United States Patent Application Publication US 2014/0057251 A1 - sequence listing, part 112

SEQ ID NO: 205428 - DNA, 1043 bp, Cannabis indica
  modified_base (110)..(110): a, c, t, g, unknown or other
cacctgcttagtgatctttctccgattggtgggctttcaatttttttatcaaaatgaatatggagttcagaagtgaataccgatttctccgccttgaaatctgattctcnctgctccaaaagctcgagctctgactccaccattgaaattgtgactagtctagaatagaaaacttaaaacagagacaccattagctacttgttattgtggtatccaccaggaaattttcaagtcatccatgttagtgatgtgcttttatcactgaatcagtaagaaaaaaattaaatgagaaaaaagctacaaagttaatactaagtgagaaaaaaaagtacaaaatttattcgctacttctcttcaggttattagtataacaaactcaaacaaaattccttaactacaatggaaaaataagaatggatactaagcaaaaaaaactcaaagaatatgtaatctattcatccttcatcaagatcaaaggggacataacttattttgtatcaatcacgacagaaatgtctaaaaacataacaatatcatggagaaatattttgcataattagcaagcccaaaccagagactggaataatattaaaatcacacaaaactttattcctgaagcctacttcaatagtttggcaaactgataaataattatgatggcctccagtcaaatcaaaaaccaacctgaaaagtcgtggaatagtccaatctaatgacaacacaacatgaattcaacacttaacaggccagtgttctaattaggaagctagccagcaatggttttcttcatatgagcattgaaataccacttcaattcagtactcttctaccataaaatgaaattttgaaactgaccataagttcaaaccaaaagtccaaaataaaacaacaaacatacaattagatttaaccaaattgcaattgaacactccaaacagcaggacccaaattcagaacaaaaaaacacaaccatctactgtcacacgagcacattaccgaaacaaatgataacataggtcgcacgaagcataacattcgtaaaa

SEQ ID NO: 205429 - DNA, 865 bp, Cannabis indica
  modified_base (198)..(198): a, c, t, g, unknown or other
aaattatacacatggtgctgatgtgataattgactatatggtcatgtcataatttaatttatcacgtgtgacaaaacttgaacaaaataaccaatttacaacatggacttattttaaagactaaaagttcaagagatataagaatgacaaatgtcatagttcaaggacaaaattactaaataagttaaaaaaaaaaanaaaaaaaaaaaaaaagaacaaaaaaagacaaaaatcctaaataacattttctttttaatatattatcatactatttacttaggataatgaattttgtttagccaaagaaaagatcccgttcactttataataattgaatcattagttaaacttattgaattattgttgattattggaatgataagtatattgaattaaacctaaaatacattaagctttaaagtagtgctattaagtattaagtgtctaatattattataaagtgataccttataaatgataagtaatttttttataataattattaaactaaaatatatataacccgatattaataatatgacacgtggtagtggtgttaggtataatcagtgtcattttctaaattttaatctaaaaatacaaaaataataataacaataaataacaaaatgtatccccttataatattctctactaacttggtccccaataagcatggaaatcactctctagtgtattagcaatagtgcaccaaagttataggacctaaaaaacaagaataaattgtcatctaaagtcaatgttttgatattagttttcttcttcttattttagtaaccaaaatactaaatatttgagtattttataagtataaatatgtgtcactatcattactcaaatacta

SEQ ID NO: 205430 - DNA, 1972 bp, Cannabis indica
atccgggtgcctcttctggtcctactgtactattttacttgtagtcaatccttagtccgtcgacgtctctttccttcctgttcctccttctacttccgtcggcattccctttactcgttccctggtttttggcgttttcctcctttttgtccgtagtgcccccttacggagtgacaattggtggatttggtcatatcgggttgggcttatatttttatattcttgggcttgagtatatttattttaatgggccctttcaatgtgggccttttagcagtcctttattttgttgggccattttatttccaagtccagtttttccccccacacagtaactaactaaaatgcacatatatttttttccatttttcttagaaacgactacccccctcagttctatgtggggtccgcccctagcaaaaactataaattaataaccatcaataaactataaactaaacagaaaaataattttatgacaactataatacaattataaaaaaaattattatttttactaaatatgtatttttgtaaaataaaatttcagtctattttgtaaaattttcaaaattatacactatttttgcatactaagtatgatgtgttatttattttatttatttgtagtaggaatgtctaaattatttataaactaaaattaaaataagtattattttaaaaatacacaaaaacaacatagtaaaaattataaaaatacggttgaatggtatttttaaacatttttttttttggattttaagattttacttacataaattaggttgatgtagttttatgttatactcttgttattttattattggctttttataaatgtacatcatttttttatgttgttttgatgttgtgaatgttatttttttatttttttgttattttcatgtgatttttgtatgaacactccaaaaatataaaaataattaaaaaataataatttctgtaaatttcccaattaaaattgtccatgtattacgtaatggataaaataacgagacatacagaaatagtctgcagtttgagagtgtataaaaataatccccaaaacaaaacttaattatcttcttacacaacacaacaactgtttttatatatagatacatacagaaacaaactttctgtttttgaaaactcccattcacatacagtactacaacaaatataaaaattaaataaaatagaaagtgtgaaaaaatgaaattaaatgggtaaaaagtagaccaaagttgggaaatatatataaaaaaaaaaaaaaaaaatcttggataagcatggatgttgatttgattatagatagtaagatgagggcgtttggtcaaacacaaagtcatctatcttatcttcatcgtagctagctggtgcgtatggtttgaaaaataagttgtatcatgcaatttataatcaaaatctgttaatttttcaattaaattaatcaattaattgttttttttttttcattattatccaaacaggtcattttgtgtaaatcgtctaccaaaaaatcgttttctgtcacataaatattgcattaattcccagtttatatttttaagtctgtctactaagatttatacaaattggcatggcataggacagagatgaaagaaaataggcaatttgttgactttggtaatggtggcttaggtgttatagatataaaatgattccaagaatacagataatcaaataatattatttaattcctcaaagctttccccacaggtcattttctcaattttcttttctacttgtatatagtctagtagactggatatttaaatataaatatataaatatgtatttatgtgtaataataattgattgagtagatttcaaaggaaaagagttttgtattttagacgtctgacctcatttaagtttgactctagagcttaaagcttcaagttgtcctctcttcagtatatatatgtgtgtgctatactgttatatg

SEQ ID NO: 205431 - DNA, 2068 bp, Cannabis indica
ttttttccttaaggtactcaatagcataccgatgtggtacccaataattagttagtaattttctaaattctttattaaaataaaatatgtggaagctaatattgaaatgcacaaataacggtatggtaccttttgtggtgtttgacaccttaatgtaccatttaatattttcattattaatatgtacatatctttattaacttcgattaaaattttaaatttttttttaaggtgttcaatatcatactgatgtggtacctaataattgattagcagttttcaaatcatttattaagttaaaatttgtaggagctcatattgaaatgcaccaataacagtatgttactttttgtggtgcttggcaccttaatgtgcctcttaatattttcatttttttttgaatgaaaaatcaagcttcattaagcattaaaatctattaccaaaactgataacaacttagttgagacatcccccaaactgaaagtacgatcaaggtaggaacgagatgctctagcaaagctatgagcaactacatttgtagattgtttaaagttaatggtttagaaatttactcatttatgattttctcgataaccacttgagtacacgatttatgacctttcatgtagtcaacttctaggaatgtagtagttggtacaaatactttatcttctacatgactatagaagtatgaacctcgaatttcctctgaataacccgcaaatatacacacttctgttctgggagcaagttttctagttttgagtttaagaacatgagtaggacaacccaaaatatagaaatgtttcaaactaggttttgtcccattctataattctattaaggtcttgctaattctcttagaggatactacattcaaaatgtaagtagccgcttgaagttcataaccccagaagcttagtggcagtgttgagtaacacttcattgatttgactatgtccaacaaggtccaatttcttctctctacaacactatttctctgaggtgttctaggtgttgtaagttgggataagatcccttcttccagcaagtagtctttgaatttagaatccaaatactctccactacaatctgatcgaagtgtctttaatgatttacctaattgtttctcagccatggatttgaagtctttgagctttctaaaaatttcagatttattggccattaggtaagtatgaccgtatcttgaataatcatcaataaaagtgatgaaatatctgtaaccaccttaagtttgaatattaattagtccgcgtacatcactgtgaacaagctcaagttttttttttttttttggctctattgctataataccctagaaattatgaaatggattagcaaaaccctaaatagataattatgtattattgaagaattatattattatataatttattatatgtgaatttatataatttatgatatgttaagaccacgttggtgagccaggggcattttggtaattttgacccaagaagggtagaacagtgaaattaatttattaacgtggttatgggactatagtattatatattatgcctgttttgtcctttttcaggtgtgttttgacaagtcggggcggttatagtcacaactgggtatttcgggccgaaccgggtttggggtcgaaatacaattttgagattttattttggcattttaatgatatatgagaaacctaaaattatttatttatgtatgtaatgtgatggaaatgaattaagtgcccttgaatgcttatgtgtgtgttatatggccctaggggcaaattagttattttgaccacttgaattactttgcaacaaaatggattttgtcattattgaaattgaatttctggatttttctcagccccttggaccgaacccctactccctctctttcaatctttttttttcacttcaatattatttcaatttttggatcttgttggagcttgggggatttcgtgtctattgattgtgtgagctttaaggtagtttcttactcctttaatttattgtatgttgttgattttagtagagaagcatgttcttagattgttaag

SEQ ID NO: 205432 - DNA, 911 bp, Cannabis indica
ctctggctcctgcaattcggcgctggaagcggaaatgttggcgatcatccagggccttcgttgggccatccaaaaccggctggacgacctgactataatctctgattctaaggtggtggttgatgcagtgtgtacgagaagagccccggagtggatttcgactgcaacttttacagttattttgaacttattgccctctttttcctcttgtaagtttgttcatgttaaaagagacatagtgggttatgttgactcattggctaagtccactcgccatgttaatggtgtttggcaaattgttaaaggggagggattgccccctgtgaatcccaatctttttgggtttaatcaatgaactacggttctttcaaaaaaaaaaaatgattccttgccaaaataataaaaaaaatctaccaaaataaaaagttaaactggaaagctatctgaactaaaataacttctgaatgctaaattaatatttttgctaaaattgaaatactttcaactatatgttggtccatctatttaatctaaatgggggcatgatgatgacaaataaaacaagagagttgagacatttaaaattaacagagaaaacatatgaattactaattttgacctatgagggttgagaaaatatacaaacactaccaaattaattaagaaaaacagtcgaaagacagtcataaggttcaattatgaatatgttaaaaaaaaaggttcaattattaaacccctcgcatgacttaggaatattggacgaacatttaactattcattactgtcatctatagccttcctttatcaagaaaacatatatttatttctatttaaatggaaagattagctgttttggaccaattaggttattttcaaagacaaaaaagtatagttatatgtggtgttcataa

SEQ ID NO: 205433 - DNA, 941 bp, Cannabis indica
tttgtcatttctgaaatagtcatacagtcctcagtacccatattcggcccaacaagctgtgtttcagcaactcttttcctttttgattcaagaaccaacaagtccccatccacgtcatcagctaaatcctcacttgtagcattgattctgtctatacttcctgctggcaaatccgaatgagtagcatgggatttatttccattgatagccaatccaatatctttaattcctctatccaatcccccagattgtggaactgattgcaatctcccttgaatctcgccatcaatttctctccctgtcgtagtgcctctctcggttgagttttttccagatccttcaccggagctctcccctctaatcaataatccttgtcgaagccatttggtcccaattgtgtgctgtctccttttcggcatagctttcagttctaggctataaggttttttcaacaggtgaggtggtgtgtcaaataatcttgggcagaatttttcagaatgtcccaggatcccacatatgaaacaaaaggttgggagatcctcatatttaaagttagcatagcatatctctcctcctttcttctctagcttcattcttcgtttcagaggaagatcaattcgaacagaaacccgtacccgaaggtagtcacgccatattcccatgaaattgttcttatcggcttcaatgaacatgccaatgtagtttccaacatccttaaccactttcgctgacataaaaccggttgataatccatgtaattgaatccaaaaatctagtttatcaagaaccaatgatcgtggattctcccccgatttgagttttgaaaagattaaaggaaccctgtcaaacgtccaggggctgccttctaccactttatccacatctatttgatgataaaattgaaataaatataaattgtcttccaattctttcacaaacat

SEQ ID NO: 205434 - DNA, 496 bp, Cannabis indica
gtttttaaagctagttccttttgaacttatgaaattccaaatgcagttttactctagttgggtaaatactaaatagtaaattttcacctttttaactctaaaaaattctttttaacaaaaatcgttttagtaacttcctaataagctaaaaggagaaatccggaaagcaaggccaaagtatctaacttctgcattgtaaagaaagaaatatttataaacaaaaataaaataaattaatcaattaatgttttgctaatgttaccaacaacttaacctgtccttttataacattgtatatataatcaaaatcaaaaaaatatacacattcaattcacaaccaatgccagcaaaactataattaacatacatacacctaccatactgatgaccaagaaaagaaaaacaagcaaacaaatacatcaacccatatgggagaatatggagtaatgtacaattccatatcaaaaattacttctaactaaatgcaaatggggcc

SEQ ID NO: 205435 - DNA, 746 bp, Cannabis indica
aaattcaattaataatttttacagagtgtaaaatagtattcactcttatattaaatctatttttctctttttattacttctgtcaccaaattttcatttcatgataaaaataaaacaggggccatgcacaaatttagtcgtattatggctacacgtgggtggtatatatttcgaacctcttaatcatgacagacgaattaatttcatgtgcaacaaaatgtttataaaaagaacattgtataagacatgatatatttactagtttaattaagagtatagaatttaaatattattatattttaaattaaattttataaaattggacattggatactctttttctttctttctttctttctcttttttgcatactagttataaaaacttcatttaataattttaaataatctatatcatatttatataatgctgatatatataaaaaaaaatgagatatttacctcagctcacctcacctcacctcacacctcttccccattacaaaataatttacttttataatcattttgaaaagaagaaatagcaaatttaattttatattatttaaattataaaaacatattccaaagtctaattataatttatttcttactaaataggattttggtatttttttgttaaaataacgattactcataatcattaaagccaaaatttagtatttatttagagcattaaatacaataaaacacatacctcccataccatccatgtgagccattatc

SEQ ID NO: 205436 - DNA, 1148 bp, Cannabis indica
tcattccgtattgatttttgcatcaagctcttcgtgcctggcgcaagagggagtcagagacgtggagaaggacttgagagagggctcagtgagacgaggcgagtgaggaggagttgacagtgagagcagtgagctttcgggagaggagggagtggcgaaggttgaggatttgggaggactgagatgcttgagtgtcagtgggggtgagaggctgcgtggatagggaagagaggggtttgaagttgaaggaggtgtggtggcggaggagggagattgggctggaggggaagcaagagagagagcgaggagggtgcatagtggataacattttcaaacactgaaaaaaaaatgaaaacacagctgaaagtattaaacttttacaccatacttcttcagttcaaactcaaaaaaaaaattcaaaatggcggcaaattgtgatgcacttgctccatagataactcaagtcttaagtctcaactatacagatatgtcaatagttatctcacttcttaaaaccaacaacaatacaatgtgtatatacatgtgtgtgtataatctacacctgaaagaattgtgatttttaattgaatggtcgaattgtgtattcagttaacaactacacctaaaagtcattagttcaacttctcttatatattatgtggaccaattttcactgaaattacaacaattcttcataaaaataaataaataaatcaagagagagaagaaataacctgtagtgagttacgaatgcggtacactggcactgaagatgaagaaaagacaaaatggagttagggttttcgcgagaactgatttgtagcgggaaaaagggaagattgtgagaatgaggagaagaagaagataagagaaatagttttaatcttgtaatttaggtatttttaattaactctgaactcaacctgacctttttcttcctttgtaaaagttttaaaacgacatgttaggcagtgtcgtttgattctcgtcctctttaactcagcaaacgaaagtgtctaactgggctggttacaggtacagccccttttcttgttccttttcttcttcttcttcttcttcttcaatatagtgaagttttagattttcctttaggtcaatactaatataatagagtatttttcattttt

SEQ ID NO: 205437 - DNA, 1146 bp, Cannabis indica
agggtcaagacttcacaccaagtaccttccagggtgtaagctggtcggccaattgcctaccaggatataggctgattgacccttcctttgttggaggctggtcaacctatgttggccatagggccggccagggggtccggccaaaaccctcaacgtggccagttcattgtctctttgtcccgcttaagtatttagactatttgtcaacttatatgttgtgtacaatgacttggccttcttgttgacatgttgtactccacgtggcattgatcttgtccacgtaaacatgccatgttatgttgacaaaaattgggataacactaataataatttattaaaaagttaaatattagtaatttagatctaatatttaggttcaaaattgaaaatactaattttcaacaattttttataattttctagtatttacttttattaaaaaagatttttaaattaaaaatacaaaaacgtcgcattggtgactagctggtaactagttgactggttcaccgttcacctgggtactatagtcaccaacatgcttttgcccagaaaatacccacacatgcctgtgcgggtacagggtgacataggcaggatgcaacagatatggctgataaatctcgaccatgcatcccatgatgcgcgtgtaaggatgcacacctcgccgagaaaactcgatcgtgcccttacttcgtccacgcgcgaatctagttgattggctaagaaatctcgaccacctagagcttgtgggtgtgggtctcgaccacttagcacctttttgtgctttaggcccattttgacccgattttggttccgaaaatttttctcatgcattaatttcaagccatacagtttctaaaacaattttaaaacataaaagatgcataataaaattatttgtcatataaatacatacaagtttcacataaaatcattaaatcacaaacaattaacatgaattcatccaaaacctgataaattattttaaaaaatgttaatttatgaaagtaaatgttactaaggctttgaggctagttgttggagcttattttactaggatctaattttttgggagaactaaaaaaattgtatttcatccaatcaaacattacaattcttcaacgcctccatttgaaagagacc

SEQ ID NO: 205438 - DNA, 1319 bp, Cannabis indica
ttttaaagactcaatgtgttcaattacaaccatgatttcattagttatttgttattacacattcaataaagactataatgacataaattccgtgaaaacatatatttttacatgaagttttcatatacttatagttgtcctcttaaccactctgtttgatatttcaattgatcttcttttaatcaatataatcagttctattaattgttaaacactacacttacacatgacaatgttcgtaaactatattttaatatcaatgtcctaatataggaaattaacatagaaggtgtgtatatatatattttataatatataaaaaaaagttattctaaccgaagggaatagtcccttcggttccaattattttttccacttttattattacatcctcttaacaatatttaataacaattataacatatgagattttatttttttggttattacgattaaaattatgttttctacaattttttattaatacaaaattttcttgttttcttcttttacaggaaatttttaagttttgcaagcagaatgtatggcaattgtggtcgcagtggattggattatttctccaggattagaaattaacattgttgaatcttattgtttagcagttgtttctgctttttataatagccatgtttatctaaatgacttcggttccttattagaggatgttgcaattttgttctccagatttccaagagtgtccctaatccatgtacatcgaacggtcaatatggctgcacatggattagctatgcatgctcttcagatggatgagcaaattgtttggctagaggactatccttcctttgtaactttttttagtcttttagcctgtacaacatttttttggattttcaatgatattgatcattgtttgcaaaaaaaaaaaaagattacaagaaaactaaaatctagttgaacaatttaggtttttacaaagaaacactcttctcacaaaactaagatatgaaaatatgagactagaaaagatgagaacatttggctgctctctaggtcatatttatggcatatagaaattctagagacaaccacaacacatttttatagctatacaaaactttcctaaaataagtcctgatttatagcgacagaatcgcactctacagtgacgaatcaggaaactttccaaataagttcaagatcacgatttggactttaattcctaccatataaagattatatgatctgctatcttcatagaaaaaccaaaacgagcaactagcaaaagggaggtcaatttttccaaatttaggaaactttccataaaaagaattcattct

SEQ ID NO: 205439 - DNA, 505 bp, Cannabis indica
agatttgttgtgactttgctttttgtaagaaatagaagaaaattgtagtggttgttatggtgtgtttgcaatggttaagttttaatggctttttattatttggagtaggaagtaatgcttttgcattatataagtttggtatataactaattggaaattagaacataggaaggtaagaacatgaccatagttttgttcgttatcaatttaattaaactctatttgtgtgtgaaattcaatttgtttcagacaatacttcaaaattgacttagatacataccactaagaattcaccgtgaaaatatcaaagatcgatcggtgtgaaggccatgttttgtcaaattataggctacaatttattgtcacaagccatataagaaaattccttcaaaaaatttagacaataaaattataacaaaagtaaataatttttacgtatcatttagttactttatacaacaaataagaatttatattttaaagaacacataatttaaagttcaca

SEQ ID NO: 205440 - DNA, 974 bp, Cannabis indica
gttgaagtcgaaattcaaaataagaaaaaagtattttaaaagaattgaaagtaatttttttttattctcaaaattttaattctcaattaaaatattaaaatgtgaagatagttttataaaatattattttgaaattaatttttagttgtctaatttaaaaataaaaaaatgctactatttttttgttttattcatctatatgttttttttccataaatatttcttttctattttatttccattcttttagccattactcacaaatcacagtcacttatttaggtgaagtttggtaatactttttttttaaaaatttttaatcataaaaatataaaagttttgtttttaaaattttgattttgaaaaaaaatattatgtaactactttttttttttcaattttaagaacaaaaattaaagtatgttctctaaattttttttattagttaattttatttaagtcgagttcgggattggggtccgggtccaggcctggggtttagggtccgaggtcggggtccaagtccagagtctaggttgggtctgggtccggggttggggtcggtgctggtgctgaggttcgggtccaggaccaagtctggggttagggccatgtgcagggctggggtgcgaggccgaggtcgggtccaagtgtggggtcggggtctaagggccaggtcagagtccaaggtctaggttcgtgtccaagtccggctctgggtccgaggccagggttcaggtctaggattagggtttggatttggggccgagtctggagctggggccgaggtttgggtccgggtttggggtccggtttagggtccaaggttctgggtcctagtctaggttggggtttgaggtttacgatctgggttggggtcggggtccaaggttaggggtgcaggtcctagttcggcattcagggtcggagatggggttgggctacgcctccgggttcgagtctagggtcagggt

SEQ ID NO: 205441 - DNA, 559 bp, Cannabis indica
aaaaatatataaaaataaatataataaagtaattttattttgttttaatatatattttttttataaaattacactgtacatagcatttattcaactactaaaaccctatcataactattttattttgataattaattaataaacaaatcgctcgcgtggggttgtactttgtttaacgataactaagttataaaaatatattaaattttaaagttcttatgtattttaaattttatgtttaatatgagttattattctgcttaattttttttttacttttaataacataaaaaaatttaatattgtacctaacaaataattatttttaattaatcaacttaacaaataattattttgaacttaagaaataattatttaacttaataaataattaattaacttaacaaataattagtctttttttccttattattttgaacttaacaaataattatttttaattaattaacttattgtacctatatattattatagggtaagttttaaaatatatattttgtttgtaaaataaattgaattgtaattaaaaaaataataa

SEQ ID NO: 205442 - DNA, 568 bp, Cannabis indica
caaattattttaatattttttgccgacgcttgacaacagctgccttttcggggaacacatagccttccccactctcttcaaatggaaaagtggcttccgcgctactctggttgagtgtaggggatggtggtcccaaaaaggaacctgcttcgggttcaaatcagattgccacacaggctaagcctctatgaccactcctctgctagaaatcgcccaactttgagtagcctccccagaggccttctccgccccgactgaagtttgcttagcctgagaagtttgggtgtcggaggatgagtcagagctgggaggcctcagcttacataccatttttgccctgctcttggtcttgccttttcctttgccttcagtagcctaggatatagtctgattgatggagtctactactgacttcaacattttggactctggcattttctgcaacacaaaaaagcatggcataattatacaacaacaattaaacaacatacacaagcaagacaaacagacatcaacaaagattgagactttggcgtgggtggaaccattaagtaagctactatgcaac

SEQ ID NO: 205443 - DNA, 638 bp, Cannabis indica
aaaaaaaaaaggaaaatatttattaccttagcttaactctgtacagctatagctcaaactcaactctttcaaaacaaccttgtataatttaaggagagtatgtataattatatgtgaaacaaaaaaaatattgaaaaagaaatataaaaaaaatgaaaggaaaaaatagaaaatagaagagaaaatttttggagagttaatgtttggtgtgagacaggaaagaaaggttgtcaataagggttgctactaatttatagatgaatggagctaaagaagaggaagagagaaagagaaagagaatctcaattattattattatatattcattttctttcaacacttattttaattgttattattaaattattaataaaaataaaaagagtgagggtgacatgagatgagagagagagagaaaacaagagtgagtcaaatggagagagaaagtcttttcttttttttattatttatttggttaattagtatttttgctccctgaactttgacatgtaccaaattacgccccttgaacttttaaggtcattaaaaatgccccttgaactattgagattgttggatttaaggacttttttctaattttagtaaaaaagtctaacatggatgaaagtttaaggggc

SEQ ID NO: 205444 - DNA, 525 bp, Cannabis indica
agagagagagagtctaactcgaaaacctagcattacatctgaaactgattttcaacaacagtacctaaatcaaattatatatgccagcaacagaaaaagccttcttcttattgcttacttcaagacgtttcatgacatgcattggctatgcaaaattgccaagtttgagacatacagactactacgcacaaccatcctaattatataatatgatcaactcaagtttcacatgtatgactctctacaaccttaacaattttaactttttttaatacgttactgttgcatttatttcgcccaatacctgccaaatgctattattatttattattttttctagtgttatcttgtaaatgaccaataggacgcacaccattattataatggaatagtacatgttaatctcttacgtgagtagactaggactatttacaggatcggttctaagttatttggccttataaaaatatttttataaagaatttatattagatttgatgatttggtgtgatggtaaaattttat

SEQ ID NO: 205445 - DNA, 391 bp, Cannabis indica
acgggtgtgacatcacttccaggacaaaggactgaattgtatgctgaaggacatcctagataggaaaagagacagctggagttgactctccgggactctcttccaagaaggaaaaaactaagtcatcaagagaagactctttccaggtggacatgatagacatcgagaacgcccttccggatgataactatcatagacgagacttcttccagatggacaagttaactttccgaaaaagctcttttaggagacaactaactttctaggaagataaaaaaaaattcgaaagatactttctacatgtgaagaaactataccacactatattttacgacaatacagtgcatacgtgtaaatttgatgattgattataaaataaaaaaataacaaa

SEQ ID NO: 205446 - DNA, 602 bp, Cannabis indica
ataattttaaaaagaaagggagttgcaatcctaccaacctcgtgggactgctaatcttaattctcaatcttaaattagtgtgagacccgcatatttcattctcattctttcacaaaattagggaagtaaataaggtaatgaattctattatttattcttattctttgatgccataagtaaacacactaaaagtttttaaattttgacaagagtgatgtggtgagtatgatgacacatgttatgagattacccgagactaattaattaatgaggaatatgttttaatttttcacttccatggggtatgttcaatgtatggagatgagattgattaactacccccagagtatgtttgagcaaccaccccttagggtgggtaagtacccgcatgggtgagatatgtaactacccccaaagtggcttagatagtcacctgcccccgatggtaagtcatctacccaggggtggtaacttagtttaggggtttaacgcttacccactacactcttatggtcttggtatcacactctacttacatataatatgaataatagtagtacaaaacttgctctaagtatcaagaccacatgctactaagcacc

SEQ ID NO: 205447 - DNA, 742 bp, Cannabis indica
tatatatatatatatatatatccaacccatcaaaatctactagtaggcctcactataatttacttctatctttaaatacattggaccacgcataattatacaaatagatatccacgcggttaattaagaaggattaattaattttattgtgttttccgtaaaggtatcattcgttaattacaattaaattaggaggagtacgtacgtattttaggggtggccatggccttgttataacgtaataagacacaatttaaaaaaaatatatctgatataattgatttatgcataaatgcatgtctatagtctctgagatttttataataaacacattttttttagtaaaaagtaattacctataaagtcattattatcttttcaataacatttttaattactgaagttttctgaatttcatccctttaaatttaaacatttatttcgaaactctataatatatatttttaatgaaaaaaaaagatatatagatgaagagtttcatgaataggtgttgttggaggaaaattgagaacactaataaactgtgagtattattcgaataagaacaaaaaacacacaaaaagtagcaagtattcatttagaacgacgaatactcaaatgaaagtaatgagtatcaaacgtaaaacaatgagtatttggagaaatatatagcgagttatcatgaactcgacatgcttaattcacttttgaagaaagtttgtgattaattttattttgtttt

SEQ ID NO: 205448 - DNA, 2618 bp, Cannabis indica
cgcgggtcgtgtcgagatccatgtataataggtacatgctcgatccgtaacacgacccatttaataatcgtagtacaaaaaaatgaaaccccgaacacgacccgtttataaacgagttgccacgacacgacccgtgtaactcgtttataaacatattttgtttaaacatgtcaatcaataatacgtttataaagtattcaacacgtttataacccattcatgaacacgttaaagtactaaaataactttaaataggtcattaactggtcaatttcgtgttaaccgtgtcaacccgaacactactcgtttattaaacgggttagacgagtcaacccaaacacgacccaaacccatttaaggcaaaacccaaacccattctgacccgttttgccggccctagtttcgagtgggtttcgagttttgagttttcaaaaatattaaactcgaacccacccggtacataaccgagttacaacggaacccagtgtactaaaattgaaactcaatttttttgggtttcgggctagatgagttttgagtgggtttcaaatttcaggtataaatgtgcacccctaattgaaagtgacaaaactatggcattttacacaagtgaaattgagactaaagtacccttctcccatacataaagagccaagaaattcaaaacacatgcttacaaactcaaccattcagaaaatcatgagcacaattttgagggacagtcattaaaaaatgtgagtgagtcaagtccctacctaaataataccaaagaattgtgctcttgtcgttggagcatccaaagaattagatagacctgtccaaaaaagcattagcaaccaacaaagtgtcatctatactacactacttacagcttcattccagaatttgtaggctgcatcataaatttggttttggtaaaatctcaagcgcacttagtgaacactgctgtctttacattttggaaaaatctcacctcttgtatagttgaaaatcaccttcaaaggagagaagcatgatacataagaacaattatcaccctttttatcttgaaaaatactctcaacatatgtagtcaagtctgaggcaccaagccttggacacatattttcatgccccttactcttaagtatcatatcaataccagcttcaatgcaggaaattacaagaatgccattgctgaaaaaacttacccaaaaggaactagaatatggacaaaccaaatttggtaaaatatcaattaaactaacagacaagtatttgaaccaagatttcgggtcaccatatttcttcatcacccaaacctcaactattttaaattcatccatagtgaaaaagaaagacacccagaaaagttagctagcttcctaacatgagatccttttacaatttgagctggtgacttatatagcttaaatttctctatacttatatcacaggaaactatccccaaagatgattcgtgataatcagttgtatttccatacaaatctttcaatgaatatcctcattaacaacaatggagcaacccagagacatataaatagttatgtaagaacagtatatgattcaaatctgaaaatatgtcaggcattgccattgttttccaagaattgcttctcaaactataaatcccaacttggttaccctctttaaacaaattaagattgccaacaacaccattcctgtctcgacatgaaacctttaccactttgaaatcagtggtgaaagggtcatacccaagcccaagtacagaatgaggagaagagggcagtgttttagcaccttatggtggagttccataaataaaccattctattcctcaaatcgaacagacctaatataccataatcactgcccataaacaattataaaggtggacaatgcatcatgcatcttaaatatgggaaatttttgggaagaaatctcaacaaaatgatttgtgcttcctgtcaagccaatataattggtccatttttaaatcctttcctaaatggggattgagaaattctgatgaagagtccaccaaatatggtgattatatattcatgacccgctttgactgatatgaaaattacgtgcagaaattccaataccattgcttttcctttcatccattctaaccaaacaggggcatgacttaccaatcaatcctgtgaggagtacacccttgtagttatgctgaagaaactagaaatcaaattgtgctcagattagttgaaggtcttcaaatgtgtttcacaccagcatagaactgcatgtcatggtaggataggaagctccactttgtcaaaggaaatgaaactcactcgtccttgctccacatgacaaaacttcaaaggaattcctccacattttctctccatgtgttgaagatcgggtttggatggtggatagccgctaaagaaggaacaaaaaaaaacacttagcaattaatccacaaatggatatgtgagtctagcagtgaaatccaatacatcaacattaatacagtggtcaagtgcttgttaagttaaagtattagcaaaaagatgatgcaaaaagtgttccagtgacttgttctaaagaaaatggagaggaaaaacaaaagataagataatacttgttctaggaataggggt

SEQ ID NO: 205449 - DNA, 671 bp, Cannabis indica
tttggcttattgtcctcctctttttatcccttgtcaagtgtcaatatctcaagtcactgaaaaccatgtttttgtggttaatttttttatgctactagattttatgttcaaaataaaaaaaaaaaaaacaattttataagatttaatatttcaatttgatttgcagattcctcttggtgtggtattagctattccaccatttaactaccctgtcaaccttgctgtctcaaaaattgctcctgctcttatagctggaaactcccttgtgctcaagcccccaactcaggtaataacaacataccatgttaatggattttgtgattactttgaccaacttcccaactcacttgtgacagatatatattaactcattttttctttttgaagggtgctgtgtcatgtctccacatggtgcactgttttcacttagctggttttcccaaaggccttattagctgtgtcactgggaaaggatctgagattggtgacttccttaccatgcaccctggagtaaactgtataaggtactaattttattaagagttagtctcacattgctgatgtgtggaaataaatgtgatatataagaagaatgagctactcttcctatgccaaatagttttgaaatagaaccccattcaccttatcatcaaattctaacatggtatcag

SEQ ID NO: 205450 - DNA, 1065 bp, Cannabis indica
attaagggaagttgacctaatgactgacaaattgtcattgcagaaaaattaaaataaaaatacaataaaagccaaccaagataacaagaatatccgagttatacatttgaaatttgttgttgggtatcattagtgctcaacacctttttatatcttttataagtagtactctatgattggttagcgatattctctacaaattattttcttaatttatataagatctgatacttgattacactaataacagtatgacaccgaagaaagtactaaacaccgataatactttagggtctattgagaaatacctcttttatttatcaattaaccaaaactatctctaattttatatttaattgaaacatatctttttaagtcacatggacagtatattaatgtgacagggataaaatcagtaaagtgttaaaaaaaaagtaaaatgataagttttaaaaaagagtaaaaataaaagagaacaatctaaaaaggtatagaatctaatttcctcaaatactttttagcaagacttacgcgtgccgacttgtaattaagtcatatcacatgccttctacgcgtcacgattgtggccaaggttatcaattcacaataaccaatcataaacttgatgggcttttcagctatattattatcgttgaaagcgaaacaatgtcatggcatccatgtccttttcttcaacaaagactacaattaatattactaatattattactaaaagacaagttactcactaattgtgaatctaatttatagccgagcggaagagggtcttttacttgtcaaataattgacattatatctaccaaattaccaattattataaaacaaaaagatactgtaggaaatttgctgcagttcccaacagcccctacacccaaacacctaacgttcaaaacagaggggcaattccgtccttttgcttggtgcggatcacaaagggaatatccctttaccaatcagaatatgcccctttttcaaaatctgatgcccttttgaaaaccagatttgcttttatttacacctctgccattaatgaccatataaaag

SEQ ID NO: 205451 - DNA, 1612 bp, Cannabis indica
caatggtcaacagtttgatagccaaatgttcgtagacttttgtacgacacatgaaatcatcaagagtttctctgcagtagcacaccctcaaaaaaatggacaagtcaaagtagtcattaagacactcaaatacaccgtaaaaaatggctccaaagggaactggccagaggaactaccagaagtattgtggtcatacataacaactaaaaggacggcaacagggcacacaccatttggcatggcttatggttatgaggaaatgttgcccatgaaaatagaactgccatcccatagaggactaacttatgatcaagaaactaatcatgccctcctggtagaatcactggatgaaattgaagaaaaataagcttcatcaaacctaaagctactggctcatcatcaaaaggtagcacgttactttaataagcaagtgatggcgggaaagttctttgtgggagatatggtccttagaagagtgtcttaaaaacaaaagacagtgcaactagcgtgcttggacctaactgggatgggccatgtcaagtaacagaagtcacagattcaggagcatgcaaacttggtcagtatgatgaaaacatggtattggatctagtaccaaggtattggaacaaggaacatctaagaaaatattaccaatgggtgtacaaggactaaagaccctcataaagtgcccaatgcttgaacacctactcttaaataagtggccttctgagcggacctcactcaaaggtttggaaaaataattggtactcaggtcggatgaccactcctaaagtacaatatgtttagaaattgttgttcttgaccaatgtctcttggacaaattataccattcaattgttttatgttttaattagctaaagatcagttatatcgtgtaatagcttttataattcaataaatgtaagttattacagtaacaacacatccagatcaataaatgaaaaaaagatattaatcatcattctaatcgtgtctatattacctctttttttatagcaagttatttaattaaaaatgcatacaaagggtttgcctgaacctagtagctggactaaaaaaattaaacttgtgcaactatacccgtacaaagcataggtaagtaacaagctcaaaaaataaaatatatttacatgtgcaatcatttagacttaagaggaaatattccttcaaaaagataacaaagcacgataactttggaattaaaagctactcggccagccagttatcttaaaacaaaatgaaagatttcccaagtttaaaagccgcttagttgtctttactatacttaaaaaaggcccataggctgaattgatataaaaaaaggaaaaataaaattcatagggcgggagttcttggctctttgtacgggtcaaatgtgtcatcaggggctggggcgtcactttcttggttgatcggaggattggtgttggctgcctcagcctctttggctttttgggcttcacagaaactaatatattcctctttattttcattgaggtaatcaaagtttacctctgggttagccttccaaaattcatagaagatttccaaggaagttgtctccacgttttccacctccttttgaagcacc

SEQ ID NO: 205452 - DNA, 860 bp, Cannabis indica
cacttcatgagatgctctaaaaattgcttttttttttcaatactatatattgacataaaaaattgtttataaaagtatttttctaatgatttacttttctggttgagttaattagagtagaaatttatttggtttagtcatccattggagtgagtattggattccacccaaaggttaatagtatcaaggttaatgtgaacgttgctctatttgatggaggacgaagccatggtcttggtttagtggctcaagattcaaacagcttgctaattgagggtcagacaaggctagttcatggtgtggtcaaactgattcttacacagactttaagaatcaaagaagttctcaactggataaaagaaatgaagtgacaacagattaatgtggaatactgtctatgtgtggggaagtgtaggatgaatttactttaaaatgcaacaccaaacaaagaaaaattatttcatttttattacattctatttcattaccttcaatcaaactacatctttagttctctaatataaatactaagtaatattgattcattaaaaaaaaaaaaaagtaatattgatttgtaacaactcattcttcaacttaaaagaaaagataaataataaaaaaaaaatcccacatgggaaaatagaatgaatatataggtgtttataatagattgaggtgaaggaattattaccgggcctagtaacgtgggcttgtgaccaagtggggtattaaaatggtgaggatgcacatgggcgtggtggaaatgggggagagggatgggaaggggtgacataagatggtgaggttgcagccattgttgtgagtattgtgagaggatggtctttcactttataccattg

SEQ ID NO: 205453 - DNA, 708 bp, Cannabis indica
atatgtgttatttgagattatatttggtattttgataataaaagaagatttttatcaattaaaattattttagagtttaattaatgtataataataataaaaaaagatagttttcaacttgcctaataaataacattttcattatttatttgctactaattaatggtttttatattaacatttttcaaaacattttatttatttaatgatttttatatatataatgtcgaatttctaagttgatgcattaaagtataatataataactagattaaatatagtgtttgtttattattaaatatagatgatcttatctctccattttggtagacaatttttttttgttgtgagttgtgacccaacttaaattcttctctccaattttcctttctctatttcatcatatagttacttatttttattaactttgagaaattaatgaacctttttaagcatagtgtgtactaatatggtctcaactgtgtaaattttagaaaagtgctataattttcattaatttacagtggtttggtggttaggtacggactatggagttcttccacttcaagggttcgattcccactggaatttagctgtgaggattatttatttattgtcatctgaaattcaggatgaaaatatttatctgagctattattaatttttttctaatgataaattaaatggtttggttaatatatatatata

SEQ ID NO: 205454 - DNA, 1147 bp, Cannabis indica
agttattagttttagattttaggggaaaatagaaattaaaaaggctgtgattaaatttggggcgtcaacgtgtcacgttacttacactaacggaatgggtatgaacggattacaactttgtcgataccttaagtattttcaccgctaattttttaaattggggactaatattctgtatcaacctcaaaattttagagatttgtaccgcaattattcctattaaatattgaacctagaactttaatgtggagatcatgactatcatggctattagagatggtgttgggactgctatgcattcaaacacaattttcctttccttattctctcttagcaagtgaatcttatacgtgtatattttatcaaggatgcactagtaatattttaccgagaatcaaaatgttttggtactttatattatttgatctcacttttcttcaaataaataaatatttggtgtcgctttaatgttctataagctaaaacttttatttactttttaagtttgtggaagaggcatatattacaatttcatgaaggaatttactaagagagacgagaaaaagactttataaaaatagatttttttttgtaaatttatacagaattaaaaagaacacttttttttttataacaattaaaagagaacacttaacttgtaattgagatgattttagtattgccctttatttaaatttgatcaattttttcatttagtgtaaaagcaatttgtatttaaagataaattattttatatttgtttaaatgtgtaaattattttgtattggttcctaatataattaaattaaacaaaaatatttttaattaaaagaaacagtaggcacaataaagtagagcctatagagtttttttttagtgcctaatgtattacgaattgaacatggactcgatacttggattataggcatgcacgtcgtcagttgtcatgccaaagtacacctttttggcaccaacttttgagcacgacagaataggcacgacatgtcgtgtcaataggatgttgggcacgagaaaaggacttctaagcactccttttgttgtcatgcccgtaaaatgttttcttcttgtagtgttgagtctgggttggagttcgcaaccactacctctaattttatagttacaaatt

SEQ ID NO: 205455 - DNA, 1192 bp, Cannabis indica
gttatactacaagagatatcaaattgttattggtctaattctatattaggtctctcaaattttataatataaaaaattaataactactcacaatgcgctacatgttgttgttgagtaccttttaagatgtctagtaataatagaatcgcaaaacggattttgacacggcatacgaacacgaacatgacacaaattttatgagttacgatagggtagggaaaattagacgcggatcaaaaataaatcgacatgatttgacacgaaataaaaacaggtcaaacacgatacaatccgtttaacacgaatttaacacgtttgacacagtttctttaaataaaataaataaaaattattaataataatataattatataaaaatatatatttaatgattcaatgtaaaaaatttaaatttaatgttctaacatgaatttgaaaatattttaaaatttttaattttttattatataaataacaaattatatatacataaataagtgtatataaattttcttatggaacctaaatttatcatttttctctacaattctaactctaataatagcaaaacgaatcattgtgagtcaagacgaacactatacgattttttacgagtaggattagggttgaaaaaattagacatgagccaaaaaaggtataagcatgtttgatacgaaatatagaagcaattcacatatttacacgaatacgacacgatgacacgttttaccaaccctaaactatatattgggatgggatcatgattatcagaattaccatgcagtgactatgatatgagatcatcctagcggttaaaaaatgataggagaatggcgtacgtgggtagtagctaggctagtaaaataatggtctggtcccagtttatataaaagaaaacaactaaaaaaagatattcgaaaggcaaagaggtgtggacaaattgtccaaacaaaagaggaggagatagcgtttgtttggagatactgtgccctgtctagaacaaaatccagtattgggtaaacttaattttgggaaattttgccttatttccctttctatcaattcatggtccagtttttgcattttagtgttacttttgtggtacacctcttcacatcaactttttccaacttctgtataagttgttcagctcacccattttcaatattttcacctcattaacccaattcat

SEQ ID NO: 205456 - DNA, 682 bp, Cannabis indica
tcaaaaattaaaaaacaataatggaaataaagccaagagacatgcaaaaatattatatattaccataaaaatttcatagtttccatgtgctttatttgcaccaatataatttgatctttttaaaagcacacaattaataaagctaaaatatataaattcaatgaaatatttcgaatagcataatgaaatattgtctttgacatcaattatcattaattttaatgcataatattatatatttatacatgtgtacgtgtatgtgttacattcaagatcgtaaataaatataatatattttatatattttttcaaacagacaaaacacaatgatatgggtttattcgggctttagggcatcgttaatatcttgataagatgtggatcaatcccccttttgggcaaataactttctaaagatgttgccttttttatttttatcgtggctaatggttattaatccatacatatatatatatactaattattttgaaggtcaactaatttttataaagacacaattaatggaaagaaaatagactgttgtaactttgtgtagtgtgtatattggtatctattgaaaatgaccttggtcaatttgaagctatcttagatcgacacgttcttgttcttcttttttccattttgacttgaattttaataaagttaatggatgctatttttg

SEQ ID NO: 205457 - DNA, 1632 bp, Cannabis indica
aaaaaataactatttaggaacgtgtccttactgaaaacagacgtagatgcaaagtgtttaagtagatattcttctgggacgtatctacgttatcaggaaataattataaagaaagaaagaaagaaatcttttttatagctactttttatttgtttcactcccccacttgtattttttagcctaaatatttgttttcttttcttataagaaagtgggatatattgcctgaatatggttatgggaatcaacacccatcaagtaccaaagcaatagaattatttacttttactttgtttactcattatgaggtgtttgaaacaaaatctaagctaaggaaaaaatattattaatataccaagtgataacatgcgcaaaactttagtgggttgttcaattgattacataaacagaatcgatttttgtggttagaataatttgagactgaccacaaaaatttacctcactttacagaaaaagaaaactcacttttttgatttttgtccactaccatcacgtcacaataataaatatgttcatcttggattatttcctaaagacaaaataaaaccctttttactgttacgccatttcccattgatatttagatgagatgaaatttctatgtctatacagtggtttttttgttctggttatatagatatgtacaaagttaatagtaataacaaaatttaaattataacaagaacatatacgtccacaagagtacttcttcactagtcttgattgtttaacattttctgtggtttttctttatcttcttatttttcgtttcacgggtgagttggtctgattttcatgtggtccaataattctttcgttacattccattcaatgcagtgtacctctttatctgtctcatttctttttgtcccatttatgattcaatcaacaaccacttggttttactaataacatttttttaaccattaattttcaaggttttggcaccactaccaattgggtttgctgtgttcatggttcacttggccaccattccggtcacgggtacgggcatcaacccggctagaagtcttggagccgccgttatctacaacaatgaaaaggcttgggatgaccattggatgttctgggttggaccctttattggtgcagccattgcagctttctaccatcagtttatcttgagagcaggagctgctaaggctcttgggtcattcaggagtggctctcatcatgtttaattcttaaggctacttaattatattacttccttctatattggggtaatatgatcaatcataatattatcaaaagaaaattaaattattattattgttagtgttcttttttcctgcttattaatgtatttgtgcttttattattatgaattatggaaatgtagatacattctattattgaaggggggttgagcttgtagtttgtactttttactgatttattattctctctaagcaaactctctcccccctttgaactgtactttttaattctattcttgtctatcgatttcctgagttgtttgtcatgttctctttatttgtaccactcattattatcgttcttctaaggaaagttatttggtgggtgtaattggattttagttggtaaaatagaaaacttagtgggagt

SEQ ID NO: 205458 - DNA, 1021 bp, Cannabis indica
ttaagctatatacatataaatatatctgtgtactagtacttatatatatcatcatgacattattttcgtagctagctttctttcccttttgactcgacattattagacgtaattatattcaattgcttaacgtggaacaaaagtattctccacttgagaaaaattcaatgatcatatgtatatgtatcaaaaaatcgatattccacatgatttaataaaccaagtaatatataatacggatcaaaaagaaaaaatatcatactatatgttaaataaattaatatatatattaattaacacacaatattaagaaagaagaagagaagaaaaaatataaaaaagatgaggtaatagcaacgcacaaccttgaagctagattgcaataatcttgtattgtacggattagagaagttgatccaaagtaaacaaaatctctgtcgcagacaactaggtttcctcagatctggtagaatcgaagctctgatacatgtatatggatatgtctgtgtgtgtggataatatgtatgtatatatatatttttattgtatataaaaatattcaacttatagagacaagcttggtaataaggcaccttttgattaagctcttgtgttgggatttcgtcactatctttagttcttgtaagtacttttttctaccaaaagtccactaataaaggagacaaaaagaaaagtagagagaaaaaagaaacaaacaagagaaagagaaagaaacccaattaaaagtgatggagcagatcacctcgggaattgaagtgtatgatgatcaaaaaccttaactatataaatgttttgtgctatagatcagattatcagatcccgaggactaagtagtagtagtagtagtagtggttcatgtatatagaaagagaaaagaacaaagagaagaacaaaggaaggtttttcaagaatgggaaaatggagaacacaaacacttaaatataggaaggcaaacacacacacatacaagtaccaaattaattaaaaatgaaaatataaa

SEQ ID NO: 205459 - DNA, 1397 bp, Cannabis indica
gtggaactctaccaaatatcaatagtagccaattgaaagtccaaggactgccattaataacacgcttaatatcgatctcatggtaaaactgaaatagaaaaagattcgaccccagttccttaacaaacaatcctttacccggtttccacaacccagccaacgtatgtttcatggcttcgaaatccaacaatcgcgcattcaaaaacctccccaccaaacaccaacgatcgtccaccagaattgcctcctcaacgtcatcctcaatctcgaacccacactcttcctcgtcgtccaactcgatatgaccatactagtcatccatatcctccatggccgtgctagtcgaagccattaaaaccagaaaaaacaaccccagaaaactgagagagatcaagaccgatacaaacctctgaagcctctgtaatctaataagaaacgacgagaataaactacaccctctacaccgtgatccaccaatgaaatcgcagaacaacccagtcgcatgaacctgtaacaaaacgcagagaaaaacgcaaaaagacgaacgataaacccaatcgctgaagtctgtagcaatcgcagaaagaaaccttcgaaacctagagagaacctatcacacatgccagctggcaagacttctcgtttggttaattaattagtatacataaattaagaatagtcctagcacttaatcgctactctaaaaaaagtcgtcgaatcgttattagcatcgactagatctttaaacttgaattaattactagtaattactttatttagttttttttctcaaaataagagaaatgctaaaagatatgagttatgcctagtactttcttatgtattattatcgctattgattcaaataaatgtaataaacttttagggagtattgctaggcaatcataaggggatatgtctaaaggtgctaagtactactggtgtccaataacaatattctcaaaataaatataatcaattttccgtattatatacctacacttattattgctaaaaggcaccacttgagtaataatttaacataaagaattgttaaaaagtattattagtactctttttgatgtcatactactattggtataattaagtatcgaatattatataacttaatgaaataactgttagattatatcactaacttaattgtaagacgctatttttataaaaagtactaaataccactattatccaataataatacattttaacataactatttttataaaatattgttaattatttacaaaacttcacaatgataatgctagataatacaagcaaaactcatttaatatttaattgacaaactaaccataaataaaaatatataacagcaggttcacgatcattctataagaagtattattattgggtac

SEQ ID NO: 205460 - DNA, 458 bp, Cannabis indica
gattacaaccggctaaaggtgtttggttgtatatgtttcctaacctaagaccttacaacagaaataaacttcaatatcggtcaacaccttgtgtatttcttggttatagtttgtctcataagggttacaagtgcttatctaaagaaaagagactttacatttcaagagatgtagtatttgatgagttcaagtttccctatgccaacactgctactctcctcaaaacaaaaatatcacattccaaaccttgagtcctggtattcctcctatattatctactggccatccttccatcctaacaccaaaccttactcctgtcccatcttcatccccacaaaccagcattaccaatcctgaacatgctcctgatctgattactaatatcattcatgaaccaccaactactttacctgccaccatcactacagaccatgctcttactcttaataatgacacca

SEQ ID NO: 205461 - DNA, 839 bp, Cannabis indica
taagtctaaataattgcaacaagttaacattgtgacaagaaaacatttcatcaacttcctaactactatgccctacctccgatcttcatcgagatgcctaaagaggaaggacgtgtggccactacaaacacttgtttctctaaattattcattccacaatgtaatgaatgaatcatacttgaagttttagttttttacgaggggctaaaacattggagttgaatgaagccaaatccacaaaaaaaccagggcaaaggacagattgaaatcaaaggataacactggactcaaataagtcatcaagaactccaatgcacacaaacacaaagatgataaaacaagggtaatgaaaatattatgaagccgaaacaattcggcccaagttaaaatggcatccaaaggggcccacattttcaaaagtgggcctctccatcaccaactaccatctttgcaaattggatccaagcacatgcttagggggaagagagagagagagagaggaggcatcaaatatgagccgctaaaaatgaaaacttcaaagggagtcattagtggcataacccactaataaaatccatagtcaaacaaaaaatcactcccaaaacccagtcacttccattccattatgtctcgtaaaagcattcaaaaagacaaccagaaacttatgcagtacaagaagttttttttattttattttattttatttttaacatcattcaggcctactttactcgtaagcaaaggaccccaccaccttcaaaactaatcactcagataaaagcttcttctaaagctatagatcacacatttaacctcaagtttaactctttttccttttt

SEQ ID NO: 205462 - DNA, 935 bp, Cannabis indica
attattaggcaccagtagtgtgtatcatcacttagagatgtcatcctacgattattggttagcgatattctctaaaagttattaccttaaaatatatgggaaccgatacttaattgtatcaatagcaatataatactgaaaaagaggctaaacactactgggacccttttaacatttctctaataaaaattgtagaaaaatttctaaacaattatagaacaccacctcataattgtgctacacactttagtgtcaacaatgctagtgacctaactatatatatgtataataaaaagacattaattaatagagcctattgttttacacattgctaaacaccctaaaattagttttgctttatatcaacaaaagaaaaaaattatgactacaatagtaaaaaaattgtgtgactaaaaaaaaattattatactaatatcgtcacaaatatatttatgactaaaagtatttcctataagagttaaaatttattataattaaatatatttttagttacaacatattatttttatgaataatgtatcacttgttttcataagctatttttcaataattttttgttgtgattagtaacaaaactaaagtgttatcactaaattatttttgtagtaaatgaataattaggataaaaaaaggaaatgtattaaattgaattttaaaaaaaaatattcaaaaaatagaataaataacacatatatgatgcttagacatattgattaccatcgagtgactcttttgtggttttgtgttcaatacaattctcctaacaaaatactaatgatacatgagtgcaaagtataaattgaaatatttttgttttttaatgtataatatatttgtatttaggattattcatataattattaattcatagttttaaatctcaattaatttaaatcaaattatttaagatcaaa

SEQ ID NO: 205463 - DNA, 920 bp, Cannabis indica
acactcatatcacaaccaatcaccacaattatcactacattttttagaaaacaaattctcagatctgaaataacagtaagataaatatgtacaaacaccaaatagcataccaaatttaacaaagaaaatctagcaaaatcacaacaaaaaataaaccccaagttcatctattcaaacagcacaaccctaattttttgtaattatttttctcctaatcaatagtcaatatttacaaaattaaaatttccaaactaagccaaaacaaatctaaggctacttggcaagaaggaatgagtgtaggagggatggactagagtaagaaggatggtaaatctacaaaggatagagaggatagtgactctttcttattatttggtattaggagtaaaggtgggaggattaagaagaagttatttattaaaattactatagtatccttatagtataaatatttgtaatttttaaaggatagttttagtatttggtgtgtatattttatttttttctccaatccttcctaaaatgaggggatagaatttttaaaatttggagggaaaaaatctccctccaccactcctctcttgtcctttctcacacttaccaaacaaggaattcttcctctcgttttaactctctcccttctcctctctccacccacccatccctctttcctatcaaacatagtgtaaaagaaaactgaaatgaagaagatcgcctcttgatctgggcagaggagactgggagaaacaccatggaagtctcgttgttggtgtgagcacaacgagttgctcgagttcttctcctgattagaggtctacgtagaagaagtctcagggttgaggggtctgggaagaagaagtctcggtgcccttttccatcagagagagagagagagagagagagagagagagagagagatg

SEQ ID NO: 205464 - DNA, 2018 bp, Cannabis indica
aaggagattcgaaaaacatttttctaatgttgcaaggtcttaagttgttctcaagcacttcaagaatacaaccaagtagcagtaaatctgttatatattgctctggtatggatgaacaagaagttaaaaggtgattgacatctctaatttttgtaaaagtaacattccctttaaatacattggcattcctatatgctccaagagaattttaaaggctgaatgtagaattcttgttgaaaaaatgacagctcacatcaagagttggagctctagaaatatatcttttgctggtagatctgttctaatcaattcagctcttttaacaatacatacttattggagctaaattataattctgcctaagaatatagtgactgaaattgaaggtatatgtaaaagttttttgtggaaagggcaaagtaacatgacatgatcaggaagtatggcatgggataaggtatgctagcccaagtttcctggtaggattagattcttgagtataaccactcagaacaaagttggtttgattaaaaatgtatggtccattgcaactaaagatagacaatatatgagtgaagtgggtccataatgtatatttaaagaataaagattggtagagttacaaggcttcagttcatagcagttgatattggaggaagttagtggacatcaaagaggaggtgagtcatctaatggacttaatcaatttacattgggactatatcaaatagttgctggatataaaatgctcaattgaattcaagatagtgtccaatggagcaaacaagtatggtcaagacttaacagccctaatcataattttatgctttggattgcagtgcagaatagactggaaacaagagaaagattatacaattttcatattgtaaatgatgcagcatatactctctacaataatattgttgaaatagtcactcatctcttttttggttatcaatttttttgttttgcctcgcctaatatttatggctgactctgccattggcatactttcgattgaataaataaaaaagtatgagtttttattataacaatctgagcagatgtgtaatatccctatattatagtctttataatttatattgaaagtataacactcaagttaatttttttcttagaaaagactctagttagtttatactacaatctgagcaacatattaaattttatgggtaattatatattaggttatggaaattttacatttcacaccttattttttatttaattatcaaaaattacttgttcaagtattaataatatatttttatttgtttgagtatgtttcaatactcttatttatatattttttccccttctcttacactacttcttttctctctttcgtatttgtctctctttttttaaactttaaaaataatttatggtcacatcattacttggatgagcctaaaaaaatataaatctattttttaatgtgaacatttcaaaatgtaggaagcatatatttttcgttattttcagaaaagaaactatttgattactaatatataattagttacagttttatataatttttttataacttgttttataatttttttaaaatcttagttaacatttattttagaattttgttacttgaattgtactacattataggataactaattagcttttaaaataataattaaatatataaataatcgacatataaaaatagtagtttgttatattacatgacaattcattagtttcgaaaatagtttttagggttatctaaatgtatttaaaattataatctaccataatataacttaaaataactaattaattactaagatgtatacaaataaattttagaggtaaccaaaatgtatctcaaattatatgatataaatatgaagttttttatgtaaaagtaattaattggtttcttctacttcaaaaaaaaaactaattgatttcttatcaacactattagtaactaaaaaactacttttaaaaatgcagtaaaataaaataaaatcaaaaat

SEQ ID NO: 205465 - DNA, 696 bp, Cannabis indica
aaaaggtgaggtctcttaatggaagcaatacatccaatcataccagacatggagtgacccacaaacacaactgatttcaagttcagctcctccaccaacccgatcaagtcgttagcaaaaccctcgtacgacgagtgtttcaccggatcaaagaggctactgccgtcatctttaacggcggtgccggcgaaagaccagtcgaacaccacaaccttgaagtgattggctaactccggtacgatcttctcccacaaagattgatcgccgccgaaaccgtgagctagaaccacagtttcgtcgcctgaaccagttgttttggcgttcatcgccgatgaataataagcttcgactcgtgactcggtttcttttccaactatcattttgttaattatataattatattataatggaagaacacagaaaaataaaatagagaggaagtggttttttttttctcttttccttttaagtgtttgtgtaaagtgttttcttcaatgttcggccttggcatcctttttatagtgaatataattatttctttttgtatttttgggattttcagaattttattattataaaaaaaatgagcaatttgctatttagtatttaagatgctaacactatactatctatatctacgtgactttcaataattgattagtatttaaggtgtgcatttctcaaaaaaaaaaaaaa

SEQ ID NO: 205466 - DNA, 418 bp, Cannabis indica
aagttctagaattttagcttaggtattgttactgtcaaaaaataaacaaatatgtatctacaattcaaagttaaaattgtatatttataccacaaattactcatttactttaatatgagttatttgattatatgcttaattaaatatacgttatgtatacatattaatttatatatttttttaattgaattatggtacttattaaaactttttatgaacgagaaagttgtattgcttaaaaaataataaatattttttgaaagcaacataataaaaaaaaatatctttagaagaatatgaagaaataaaaaattactaattaagtgtactaaaaaagtaaataaaataaccattaaatttagtttttcaaaaaaaaaaaaaaaaaaaaagataaagaagaagacaatagtgtaaagac

SEQ ID NO: 205467 - DNA, 1091 bp, Cannabis indica
tactttgtgaaacccaatattgtgacagttttaatctcaatgctttcagcaactatattttagaaagaagtaggacagaggtaggcactactctgccaattagaaattgtcttctcaataaatccattttgattaagtagctttaaaatatgatggtcattgcttctcagcctgtcattgtaggagattagtttcaccctaagtttaagcggtatgcctaaatttattgttgctgcttattactgtgtttatttgtcatgcttcatgctgttcaattttgatgattgctcacccattgttttttcctattttcttgcaggcgcatcaatttgtcatccgaagattagagcaatttttggtgtgtaaaaacttactttttaaccactgctgtgttttccattttagagccccatcattaatatctgaacataatgcatatttttttttaaattacatattaattacttaagatttgtttcttaaaacaaaaaaatcttatcatagtctactggtgtggctgatctaaagtctggtttttggagctcagatttttttttttttgttgctttcgataggctacctcatttcaaaccaaaaccaaataagttatatcccccaattgtttaatgatttgtctcaaagctgaaaaacttatgagtgaacatgaaatgatttttttttaagctattgtgtacataataaaggaagcataaagatatatctataataccaatcttctgttacctctgtctgattttcccccagcctacctcccctcaatctaaaatggatataaaccatgaagtatttttcaaattgtgatttataattggaaagctgcctctattcactctctaatttagtgtatagatgcattctggatggggagacgtatatttggaccatgaaatgatttacatgtacatcggttaccttttggatacaggttgataagggtataagttctgaagtggttcgttccattctcgcagagcgagccaacattccttctctggcagcgaagtctgcaattaaagtaaagtgactatgtttgctttcctcttttttttcgtaattagttgcttgatgca

SEQ ID NO: 205468 - DNA, 1086 bp, Cannabis indica
atatactattttttttaacttttttcaaatttacggtttgggtttctgaagtggttacaacactagttgcaataggggtttctatacgatttttttgttgcaatttaggttgcagcgctagttacaataggaggtttctatgtagaattctgtaaaaatgcaacaaaaaattattttgaaatgtaaaaatgaaaaaacccccaaaatatatataatcaaaataaaaattaaaattaatgcacgtaatactattgtatttatacaatcttttgttgcttggtccttgtattgttatattataattgaatagtaagttcttggttgtatttgattgttgtaaaatctctaacaattatttttatttgtaaacatacatcctttgctaagaatagctagatattccaaagtggacgccataaagatcagagggtagacaaaattttatatttccaaagtggagaatagaatgtgtacatatattattagtaaaacacataatatttctaaccaataaatttgcagccggctaggccggcatggtagactagttgatgatgatataaacataaattgccaacgtattttgtcaaatagacaactcaaaataaataataaaatcttatgttttgtttattttactaagtaatctgcagtccctcaattattagggtgtcgttttcttgttcttgtataaaatactatgaattactttcttatgtgaacgttgagttgagaccttgagaagtgttttgttcatacaaatatatatgaataattagtaattttgtttcttaaatttttgatactaataatattatcttctaaaatatataacttgttaaatattatttttgaactttttacatttactcaaatttagttgttctgttaggttttatcttattattcgtttaaatgctgacatgtctttataattagtaactttttcacttaaattttgacaactatcaaattatacacatctctaaataaaaatgagaaagattcaacatttttttggtatatcttaaaatattaatttagatcttacaaaaaaattaaacattttgaatgattaaaaaaatt

SEQ ID NO: 205469 - DNA, 1432 bp, Cannabis indica
aattattttcgttgtttagaagaaaaaaagaattgtaccaactagcaatcccaatctatagatttcgactcatgtacctaaataaagcaactagaatgtgagaataaaatagaatatttggatcttgaataatagaggtgaccgataagaggttaaattaaaaatcaggtacaaaaagcacattagttaaacaaaaattagcatcaatgtgaacaatatcaaatttagtaatgggaatttttataccagtacgtaaagtaatatgcgaagaactagggatagtatcaaaagaagtaaaacatgttttatcaatgaaaacatggtgggtagccccactatcgactatccagagattatttgggaaatatacagatttaccaatggggttagctagatgccaatggagtgttgacatcaactgttgattgagactgttgagcatggtgaatctgctgggtgagttgtgtaatcatttcttgcagcggagcaagtttgtccgaaacagagtgagaagcgaaagcttgattagcagccgaccctttgacttgggaaccccgatccaaagaggagtgctgtgaagattcaaatttgcgcttgtcaaaataaccgggaggaaagccatggagaacatagcatttctccttttagtgtcctgatttctggcagtcagtacaaaaaggtcgcattttcttattgcgaggaggatttgagggctgagacgaagtggcagcaatgcaatttgggagaatgcggagtttcctttgttgctcatgctgaatgatagtggaaaacaccttcaatagagggtttggtgattaacacttgatttgaaccgcctggtacgattcgttaaggccagtaagaaattgaaggagcttttcttagttttaaaattttgcatgttcgacagaagcttgacaagtgcaagggagatgaagccagagttcattgatctcatcacatatagcttagagcttggtgaaatacgcagtgacagattcatctccttaccgtaaatctgtgagagattcttgaagttcaaaaagacgaggtccattcccttgactaaatctgtcagtaagcttagtccacatctcatgagcagtatcaagaaacattatactgctcttaatatccaaagaaacacaatgaataatctaagatattaccatttggttgtagagagtccaagaatggaagagatgactagtaggatcgggttgaggaagggttccatcaatgaaactgattttgttcttggctccgagagctatgtgaaaatcctggtgccattgctaaaaattgtggtcggagagtggtggtgtcacaagaatcaacccgggatggtcaccgaagccaacgaagtaggggttgtcttggttggctgggcaatcatgagaagatggctgcaaagaaatggggttagcacttt

SEQ ID NO: 205470 - DNA, 1026 bp, Cannabis indica
gggtactatgcctagttgtgtatgtcccaaaaatgtatagtgtgcctaatttgtatattttatttatctatgttaaatttttttagtttaatttgcattcaaccttgaaatgggatacatttttagctaaatttctcaaagggaaagactcgtctgagttccttctcaagattgaaaaactactggaaaccctgaaatgagatgcattttcagccaaatttcccaaaagaaaaaactcacctgaactccttctcaaaatttcaacgtgtttcctaagtttaatctattggattttttgaagggccaaacatggacgcctcgcctgaactcctatgcatttttagccctaccttgatgaaagggtactgcctaaaatccatagtgtgtgcagcctgctccctagtttatatatggtcctagtggtaagagactttatttgatgaagtgtgggcaaggaaagttgcttgaatgttaccacggttttagcctagttcttgaacaagagataacgcctggaatctataatatcctcagcctcctttctcgaagcccaactttgtaaaagagtagtgatcaaggaatgcttggaacgcagaacccaacccttcgcgagaaaactatgcatacctatcaagcatccttcgtgcaacactccatttatgtagttaaatactcaaggcacctaaaggatactaaaggataaagagtaattataaggctacaatagtattttgacaaactaattacgaactaacacaaggagagctaataagtggaattgattatatcaatggatattgcagtaaatctcagtaaatataattctataattactaagagttcaatttcatatctatagttgagtaatcatggaattaataaataagattatttaactgatgagattaaataaataaatatagcttattggtgcttagaattatagatccatggtcccgaaatttcaaccataaaatattgttaaagggtgggataaaagttatatatagaagtttagaaaaatct

SEQ ID NO: 205471 - DNA, 993 bp, Cannabis indica
tgttggtgtatgttagttttcgatgtgattgtggtgtgagctctacgggtatcatggcttcgtacccgtaggttagagtgaaagaagtatgagtacctgttgctattttttctgtaatgcgataagaccacaacacttcaggtagttcttcaggttagttccttttggcttgttccaggcatttctttaacgtatccttaagagtttggttgacctcttctacttgtctatttgcttgtggataagcgaccgctaagaaactcttaatgattccatatatgttgctgatatggatggcaattatacccgcaggtacccgtccctaatggggtgggggcgagggtctaattttagagatgagagcgggtatgggtctaaatgttcatacccatgggtttaagcttttattaatcacattaatgagacatttcatttttcataagaatacccgcggtgatgcatattaataattgcacataactgcttaaaaaaatgaaacttcaacacttatttttgattaccaattttatattttgctaatccattaactacacacactattttatttatgtttgttgttttaagaaaaatttacagcataagtacctatattttatgttttgttgctaataaatacataaattctaaaattttcggcattaatactcaaaatctcattttaacaaattgttgttggtacccactaactttcgttaatgtactataatgattatttcattttttttttaatttttacctaaattaaaataaatattatttgataaaataaaataaaacaaactaaaattcttttaaaacgtatacaaaaatcaaatactattttttatattttctttttttttaaaaaaaaaaaaaagaaactaaaagtcacttatgataccatcacactcttcgaacccagaaactcaaattcggaacacctcttcgtaaacttagatttcgaccgaacacaattcccattagaaaaccttg

SEQ ID NO: 205472 - DNA, 808 bp, Cannabis indica
tccttttttctctcatgtcgactagtactattcttctttctttgttaatttcatggcaaactagatcggttagatgttggagacttttcattggtataaaaaacccgaaatggtattattgtatgagaacttgaaaagttttacatacagctttttgtgtcttttgattggagcttaatatttttttatcataatttgtataattaacaagttgaataagaaaaacacaagcaagccattttctttattctaccattgtaatggtgtgttactttgcaaaggtataattaggtttgaactcgaagaggttggcttagtaacgagggcaaatgtcgggggccactagggcagactcctcgtcgagtcattagggctcccgcttgacttgtttggttcgaactctagttatcgattcggataatgaaaattaagatggtaaatacaaagtgtttataaaaggtttggtcaaaatttagaacttccttgatacacaaaattgttcattttcaattacttatatcattaagaattaagaatgatgtcaattagccttgactttctaagaaaactacatgcacaagcacaaaaagttttctttaagaaacttgagagctcaaacactctaaggttgataataattaattacatagagttgagttgacttaaaatgtgggaccaactactattttaaaaacaattgtatattattgggatgtgactaaataaatttttacctctatcacataagagtagctcaaaatataaaacaatcttagatttagtgtattcagtctaatttatcgtttgt

SEQ ID NO: 205473 - DNA, 868 bp, Cannabis indica
agagatcaagcaaacctaaagctacaagccaacattagtgatttgtacttaaaaattagacataatattattacattattatatctatgccattacaataaaaatatcctaaatatttacttttttttaataaaagcgtacttttgataaataaaatagttagacctcgcgatcgttacataatatgtttataggaatggtagatagcggaataacattaaacctctggtgggaaaatgcccactcagccacattatgggcaacaaagttacaagttctactaatattagagaaaatacaactaataaacaagggagaatattacaaaaagagacatattcaattgcccagtgggactccttcccattaagagcattgataaccaccctcgaatcgctccccacaataacaaaatcagaaccaatgtccctaacaacagataaagccagacaacaagccaccgcttctccgcataacgcatcagtaaactccaactgagatgtttgaacccaaatcaccgtaccaagatggttcctggtcactactacaatacacatactttctaactccacttttaacatcgtaattcagcttaatccaatcctgatggggaggatgccagtcctccttcaggcacgaagtaggggaagggaaaatagaagcatgtaaatctacaaaagaagtacaaatagagtcaatacacttctttacatcaacagaagaatgattgtgtaccttatcgttgcaaattcgccaaatggtgtcaacaataatcaaagcataaaagaaaacctcatcagcaggaattcctctatgtttaagatcccaaataaatttgatccagtcccacatgcgactaccggtatct

SEQ ID NO: 205474 - DNA, 975 bp, Cannabis indica
atactcccatgaggattaggtctattggtcaggactatcaatgggagaggtctagtctaccatgagatatgtggtttgattttgtgagcgttttgattgtgaattagatcctattttcccttctcataaaaataaaaaatgaattcgattaatgtatttgaggagagaaaaggtgattgtcccttgctgccaagcattcttgagtgaacgtgctcttaagacagattctaatgtttgctattaggcacagtggtaatatagaagttctatgggggttttctttgccaatacaataattggatcatgtcaaatctcttttatttgtttgctcattctgtaacctattaactgtattgatctgtgctcatcttatgatttcaggttgcacgctcaggctctcaccttagctgcgttagctggtgcagcagtggtggaatactatgaccacagaacaggcaaaaaggctgatcagtatgctaagttcctcccaaactcctaccctcacaaggattgactgtgatattccatgaacaattgccatatgggagtatagaaaaagaggaaagaagttataataataatattaaataaataaatgaaaaaaaaaagcaatttttttctggaagtaccttcacattttccccagacctagttttgggttacttagttgggcagttactataaggatgtcccagtaatgagacctgaggcaaagacgtcctcctcatcaattttcactaaccaagattttggtcagaagtagtgggatttcttctttggccatgaatatttggatgacattgttgatgattgaatgtcgggattagcatttatggtcactgtattgtttcattttacaacaacttagtgtattcttcattcatttatgagttcttgcttaatgataattattatatgcatttgaagaaatttaagaatcctcggcaactagaggactctttgagttttcattag

SEQ ID NO: 205475 - DNA, 544 bp, Cannabis indica
ctctatcggacctatatgcatattctaccaaaatgtaaaaaattaaaaatgcatcgacccataatcgtcctatattaggcctactatcggaccaaatatttggaggcatatcggggcaacatcaagcctatattgggccaaaatcggccatttctcttcaacctccagacttttatttgacacagaccatcgggcctccatcatgcctggatcgggcccgacctgaaacccaaatttcacctgataaatcctaaaattcttaaatataatcctaactaacagatttcacagaacatcgcaacaaatcaatcgatttctactataaatcaataaatccataaatctaaacactaaaaattgtatgaaaatattgaaaagaaaaactcaccttagacattgctgccggtgatggattgttcatcggtcctcaattgttcgtggtatatggaagagcaaccgagaagtcggtgatgatggttttgagggttggggcggcttgtgtgggcgatttcgtgtgtggtgaatatgagagagagagagagag

SEQ ID NO: 205476 - DNA, 1274 bp, Cannabis indica
ccgcaacataaaatctgtataatatggaagtgcctttaaatgcctttttctcatccctgtcacaatcaaagcttcttgtatctatcatttgtctttgttatgttttcaagattttgaagatattttgctcctttaaagttgttaatatatttgtttcctctattgtctgttgttttttattatgtttcgtctttccactttatctattctcttgcctcctctcctttttcttccccctgctctaacataaatttcttaatccaggaatggattttacattgtccacatatgtactgaaatggcaccattgatctcagttggatctatggcgtcttacataacaggcttatctcgtgcattgcagagaaagggttcatttggtggaggtcatattaccaaagtaatctctggaccatttcattgttcattctttaataacgactacattaatgccgcttcattgtgatgagatactcttcatttgaaagtactctgcaaaacataaattctagtacctaaatagattgtggtaaaatgatgcgtaaaatgttatatatgaggttgctttctgcctgcctttgaatacttccttttagggaagtaatgagtataaaaagtctggtctattgtagtgcagtgcatgttgtctttcctacattgattatatggcatctttaaggttcaggcaggcagaggaattcaagtgtaactataataggcaagagagcattaaattgattccatacacttgaatttgcaatggtacacttttatttttgtgagaagacaatctgaaattttaggcccatgttattttggattaatagtttgcaaggaagaattttttttaaattataattttgctagaagttgtatacttactctttggtttccttctggaattcaccatgtaaataggtatgagagcctcaatctaaatgaagttcaagggctgcataaaattgaggtggaatcttattcatattttaatggtcaattgcatggaaatagaatatggactgggtaagttcagctccttgtttggagattgccatttgtttggttagttcaaactacatttcaaacacaatataaggactctttatctatcttttacagtgttgtctgtggcattggagttactttaattgaaccacagtactactcatcctttttcagtcgtgagagggtttatgggtatccagatgactttgaacggttagtagttaaaagttactctcttaacacagtctgctagttcactacaccatcat

SEQ ID NO: 205477 - DNA, 642 bp, Cannabis indica
aagactaattagaatttttatcttgaatttttgacatgcagtaaggtcgttaaaaatgtttctgaactattgagattgttagatttaataatttttgtttaattttaatagtacctgaattttgtttattaaagtctggtttagtatataaacaatcactgaaatagtaaaattgaatgaaattaaacaaaagtcttaaatctaacaatctcaatagttcagaaaatttttaacatgttatagtttaggagtaaaaattctaattagttttttgaaaataaagaaatgttgagagagagtgaaattcttgaggtaaataaccattctagaacatattattgatgataaatttatgttaccaaattatattaagataaatcattcactgacatggaaactacttgaatcgcaataacaaaacacaagtttaaccaaactacacttatttgcaggaaaagccgcatgtatagctgaagaaaaaaaataactttgagtataaatttaacaatgagaaatcctaaaagaaagaatcaattataaaaaaaaaataggtataatttgtaattacataccaaatataataatgagtatataaggaaagataataaagttgtattgcacataattaatttaaatttcctt

SEQ ID NO: 205478 - DNA, 851 bp, Cannabis indica
tttctggaagaacttgtaaattaaaattagtaaattgactattttatatctgctcaatcttactaatcaatatataatgctaattagatttgtgattataattaaagacgatattatatgaagtttgaatatacacacgtacgtacgtacatatatctattaaattttgaatgatcgatagatagatatgaaaataaaagtagtggagtcggaaattaataataaacatttgttggtattgaatgagaaggtggaccacccatgtgatgatcaggtacctggtatacggccatccgcatgaaaataaatataagatacggtaaaaagtgttttccaccagtacttgacagagaccatcacttcgatcgttcgtttctcgcgattctcaaaactcaaaactcaaaactgtcaccgcccttccaataaaagctccaaacacatccttatttactactgtttggcagtacccccatgcatggctgatggcctgtaaaacctactcatctatatatgtgcttttttagtgagccttttatatacataggtttgctgtttttgatcagaatctagtaaatatcgattgccaaggcataatatttactaagtgcttaaagtaaagttgatgatgatgtaattgactcgtgaggtttgacataattgagcaaaaaataaaaaataaatgataattatttgataaatttcaaaaccaaaaatctttattatttgatatatttcaaaacgatgtcatgtgtatactttttttgttcaataaaattgtgtggtttcatatgtggagagagagagagagagagagagagagagagagagagagagagagagagagagagaga

SEQ ID NO: 205479 - DNA, 1256 bp, Cannabis indica
cactctctattgtaacatctttccgattgtcctctttgatccaacttagtgcttcttgatgcccattgcttcgataattttagctggaaagtgaccaccatgatacacggcatgaatgtggatgggagaagcatgatggtcacgagtaaccattccgaactcgtaagagttttcttgttcaaatgtggcggcgtcaacattaatcttgatggtttccaaatcaggttttgtccaaaggtcatcctgattacctatattatcaagaattatagatgatagggaagaaatatcctgagcttttctccaatgatcaagacaagtagttgccaataccataacatcattcaccaatggggtttgtttttccctagactttcttattccgggctttccatagggaccaagatctgaaaataaacaaaaaattaaaacttaacaaatgattagagagatgtttacattgatacatatagttgccaataccccaattaaaacaagttcccttcaacgtcttgataaccgtctcagagtcactctcaataggtatctccatagctatcagacaggctgcaacttctccaatgagagggttagagaagttgagcatgtttgtcgccacccacaaaaccaaccttgtgtgattcctagccaaagttaccacacacattgaaccgccaccaattttaatattggaataattacataaggtactatgttttgttaaatatttacatttttacgttcaaagaatggttttttttttactatttttacggttttcctaaaaaataataaagcttacataaattaattagtaattataacactaaaaattaaactaaaactatattttttattattatattattttattaaaattataaataaacacaaataatatatatacaaaaagtttacttataaatatattatttaaatattaaaattaatacaaaaaagatttagtggagtacatagtgtcacactaatattattgggacactatatacaatgttatatataagataacattgatcccactttaggctgctttgctttgcaacttcagagagttcatcctttcaacaaacactccattaaagggttattatttccttaaaagagagaatcttgaagacttgtcattttctcttccaaaggcttttttgagatattccctgtaaaacatccacattgactttccaagctttcttaattctacacaaacataccttagaacattactcaaaacatta

SEQ ID NO: 205480 - DNA, 1152 bp, Cannabis indica
aataaaaaatatttttagtataaattttagtattgtaattagaatataaaaaaatttaatgctaaaattatattcttttaatattaatttaacactacatttaacttttagcattaaaattgtccaaaatacccgtactacctcttaacaaatggactaatattttggctgcactccaaaatctattattatatctcattcctaagccgtgtcaaactaactttttcaatatataacgataaaaatttaaaatataattggatattttttttaataaattattaaatatattatttttaataaataatagtagaaatacaaaaataatatttttaaaaataaatttaagactttttagctaaagtgttttttttttcattatttgggtaaggattttgggtgtggactcttgcttccctacttttaagccacccctatttttaagttcattccatttaatatttaaaatttttactttttacaaaaacaacccaattttattataaaattaaatcatttaaataaaaaactatatcccaccatttttttagaaagagacacactacttattaatttctctttttttttttttttgtacaataaacaattttttattgaaaaaatcaacattaagtacattaaaaagaaaaaataaaaaatacctccgtccaattaaacccacaattaaccttgagtaaacaatctctctcttaataacaatcttccactacaaaatttgaaaatctttcaaactccctcctaaccttcttttgttatcacttacactacaaataaaatgtataaatatatatttacaaaaattaaaagggattccatgcaacaaaagaaaccaaaatgtatatttaattttaaagactagcaacaatacaaaaaaaaaaaaaaaataaacaaatagattaatagtatataaatcaattgcatgattcccgtacggccctcgttatattattgagaataatgttggaccttgtctgtctctaaatcaaaagtaaacaaaatacacctatatattatgactattaaaattataaatatattgtatgttatgttcaaatcaaacatatactaaatatatattatatattatctccatttgtttccaatttccacacaacttaattctttttttct

SEQ ID NO: 205481 - DNA, 1094 bp, Cannabis indica
atgtgtctaaaaggtaaaacccataacctttgtttgccttttttgttgatgagaaagagagacgaaaaaagaaatgggggatcgtcggggagagagataggacgataggacacgagagggagtcatattgggggtttaggtttctcggggtcgggaataataatggcgtggcctgtttgggttgaggattgccggcggtagtaggggaaggttgtcgcacaaaaaggagggctagggttttggtgggtatgatctatggaagattaaagggttgacgggagttgaagagaaaaagaaagataagaaaagaataaaataaaatatatatattttttttataatttatttaaatttataatttttaaattatttttataatattttaataattaatattatgtggactactaaaaatttactacgtgtacatttgtgtacatgtggtagtccactgtggcacttaattaaagtttaatttaaatagcaaaacggaatggagattcagtatgtttagtttctaaaaaatcgatttatgtgattaagtgttaaaaaatataaaattcaagtggttttactgtcattatctcttatatatattgcgtttcattatatttgtttgattctctactagtagtcctaatctttcagtccagagagagaaatgccaagtaattttcgagggtatattaaaaaatacctcttttatttatcaattaaccaaatctacctctaatttatatttaattgaaacatatctctttttatatgtattgtacccaaaatactctaacataaaggagtcacatagagagtatattgaagtcacaggggcaagattaaataagtattttttttaaaaaagaggtaaaaatgataaagactttaaaaaataaggtaaaaataaaagatgataatataaaaagggtatagagtcttagagcatgtttggtattgttttctattttttgttttcaaaaaattatttttagaaatgagaacaaaaaatagtttttgaagtttttaaaacacaagtcacgtttagttagtgttttttaaaaacaatattgaccaaaagtgaattggtttttaaaaca

SEQ ID NO: 205482 - DNA, 915 bp, Cannabis indica
ttttatatacaatgtatagtaggttagggtgaggagatctagtggtgatagtaattcacatgatgagattgtatcagtagcagagtcagatgtgagttttgtgagctcatcacaaatgagtactacaagtagtagtacactagtaaccatgttcaactcattctcatcagactttaatattaaaattaactcgtactcgactaagtcaactcgttcactaccgccactcgatgatagttttctcgataaattctcttccgtccctgaatgtaaggctcgtcgacgtcgttgcacaccacttctcttaacacacagactagtaagaatttattaatttattatttttcattacaaataatatatataataaggtgtttcggtgtccctaaaaattgatacactgatgtattttgtttgtgtttttgatatctgaataatttacaatatagttctaacaaattgtttgaacattattttcagtatatttaattattataatttttctaaaaaaaattataaaatattttaaataactacagtatataccactatataaaacattaagattaaaacgttctaaatatcaaaaacatgaaatacttatataataattactatatagtgttgtggatcctaaattaattgtaaggttaaaggaggatcataatttcaaaaaattaaattaataatatgtgttataatgttttaattatgtgttgcagaaatctatggaagatgagatgaggagacttaaattagagcaaaataataatatatcataaaaagtatggttgtggtcgcaaattaattaggtatattaattaataatattattcttatgtattcatttttttttaatattagggtatagacatttactttaatttttactaaattaaattttttttgtttgtt

SEQ ID NO: 205483 - DNA, 894 bp, Cannabis indica
tctaggaccagggccaccatatatcataacaagtcacgatgaaatccctaatatttaactaaataaaagtcaatatgcatcataacgagtatcttgttttagaagtaaaccagatcctattggaagaccaatttgaccaagtggactgtaaatttttcctccccaatcaatatatgtagccaagtctttcaatccaccactaaatatgcttgatggccaatatccaatttgatcacgatcttttccaagttgaagcaaccatgtttaaataaaatatacttataaacaagttccatgagtcgtgtcgtgtcaactcgtttataagcgagttgtgttcaaatttcattttgacacgattattaaaagggttgtgttgggttgagaatatacctatgggtctcggaacgacacaaatacgactcgcgaacacgaattgccacccctacctcagaccttgacccagacctcgatccccaacccggactgcagacccgcaccttgatccaaacaagacccagacctagacctagaccccggcctagactcagacctaacacccggacccgtaccccgaaccctgaaccccgacccaggactcgggaccggacccgaactcgtactccaacttaaaaacggactccaacccaaacccgacccggacccaaatcccgaccctgactcggtccgagacccagacttggatcccgatcccgatcccaacctggacccggtcccgaacccaaacctcgactccgacctgaactctgaccccagaacccatattgtctaggaccccgatctcgaccccgaaccccaatcccgactcaaactccgacctcgggtcctagaccccaacccgaacggaaatcgaagttggggtcgagtttatggtaa

SEQ ID NO: 205484 - DNA, 913 bp, Cannabis indica
atatagtggtataaggtttttgtaagatgagttatttattgcaggtattatatttttcttattgcaggtttgttttctagttttttaggttggaaacagcagctttattggtaggtttgtgttggactcaagatgtggggttactagttaagagggtcttctcataatgttatttttggtctcaactttggaaggtaatataaagtatttgaacaaattggaaattatttttactaatattaaagttttattgttcaaatttggttgggcatctctttttcatatgagtcacaacttcaatgttgagctacacggattggctagaaacctccgcatcttatgtaatgtttgttacctttattatgttaaatttctatcagttttcttaaaatataaatatataatcatgttattattctaaatatttaagtcaaacttttcaatatttaattacctatattaaattagaatttaatataaaataatgttcccataaattttcaaattcataataatggagtaaaagtttcaaatttaacgttttgtgataattgagctaaatatatataatattagcagacagaagactagaaaatataaaggtcactgttcttttgacaaaacaaatggtaaaaattagaatttagagccaaattatatcctcaaacgacaataggaatagcccaatgcaatacttggttgatgaggaatggaataccttctttttatgccgaaaactgcagaatctgattctcttccttgtaattaactagccatctggaatttgtttcttcttttttattgtagcccttatcactctcctctacatcccaattatatctcattttgaacagtacttaccaaacatgaccaacctaatatcttaggaaatgtcatctttttgcacgaacta

SEQ ID NO: 205485 - DNA, 490 bp, Cannabis indica
tttttaaaattattttaaatttttttactaaaaaaatacttcaatattctacaccataccatgacatgaactcatttaccctcgactcagacccggactcaaacccaaatttggatttcgaatcgaaccccaaacccagacccggaccccagcctaaacccaaacctaaacctggaccccgactccaaacctggactcggacttaaactcagaccctgaccctgaccttggatccagacctcgaccctagactgcgaacctcagacctgcaagttcgagtccaggtccggggttggggttcgagtctgggtttggggtcttactgcaggttcgggtccggatgcaggtcagagttagggttggggtttgaataaggttaaggtccagggtttgagctcgggtcttggttcaggttcgggtcctggtctagggttaggatttgggtcggggtccagttctagagtctaggttcgagtgtaggtctaggtcc

SEQ ID NO: 205486 - DNA, 1018 bp, Cannabis indica
taaatttgaaatataaaatagtatttcaatcaaaattaaataatgaatttagttctactttagtcaagaacattcctgacctagctatagttatatgtttagtcaacaacataatatagttataggatcgtgattaggtgtatgggtacctggttacgatctgggttatatgtttatgctttttttttactgagtttgctgactcacagttattatttgcatgtgcaggtaagaatcagaactgaaccgaaaagagtctagagctggataaagattgtaagacggttaaacctggagtggtcgtgtgatagtcagtagtcttgtgatccgtaaggagaaatattgaataagttgtgaaatcccacatcgcctgtggaaggttaattgggatgattctaagactgtgtaggtatgggactacacagttgaagagaacttaaatggattgattggtactacctatatcaagaaggtgcatcttgttttttggtagcccatcacgaaaaaactaaatggttaagcgtgcttgacctagggtaatttcaggatgggtgactccttaggaagttttcccaagaagcatgcgagtaaggacaaagcacgctaaaaacactcgtgttggtctgtagggtcagttgtcaatccattaagcagccagaagtacatatttgtgcataaaagccatcattccgtgggtgtaagggcccaatagaggcttaaaacggggacgttacattaggtacatgaagaacttctttaagaattataggttgagctgaagtgtgaatgataccagatccaacataagagatggtcagcttatcaccattgccaaccgtgagtgttttcttaccagcatacttggttttctgaatcatagtgccatcatttgaggtaatatggctatttgcaccactttctgcataccatgcatcatcatccatcgttttaggaattgcaataaagaccgctgtgttttgagatgccttatttgtgtcactgtttggtgcataaccca

SEQ ID NO: 205487 - DNA, 1286 bp, Cannabis indica
aaagcaaatttaatagattttcactgatagaaaatcattttaacaattatgtccatcgtctgaaggaagcagttaaccaaaccgcgcatgctcggtcgctgagaaagatgcatgaccagctatgattttttctctgaattctgatctggataaacattaaagtaccatatttgttagtacctgtttgcacagaaattatagtaccagttaagtgaacagagagcctgtgattctttaaatgttgtaggttgcaataaaatcagaaacaataaataaccatatatcaattgctccaaaactatagttgatcattattgcaactagatgcacttgatttcaacacaattgatcatgagatcatgacatatttaataaattagaattgataggttggggttcaattttgaatcccacatgggctaatttaacaaatgagtaactactgaatgctataaaagaaagtgttagctttttgacttattaagttaaattcaagaaaaagatagaatacaaaacaagatgtttatttaatagagttgtaagtaaaatagaccaacatgtgttcgaaagacttggcacccacatagcgccattgctcacaacaatggaatatacatgatattccattgatacacaactacctgtcaaaatggatagagggcttatggaattttgatttaaatttagttaaatatttccaactatctctatagtgaatgaaactcaaagtttataaagattaagcaggcttaactttcccaaattgatacactaactactgcatagagggcttatcgaattttgatttaaattagttaaatatttccaactatccctatagtgaatgaaactcaaaagtttataaagattaaacatgcttaactttcccaaagcggtgtgagattgcacaaattatctggaattggaatttcccttacgaatcacagcaaataaccaaacaaaatcaacctcttatacactcgttaagcttgaaaattgcataatagaaactttcatcaagatcctagatcaccaagaagtaaactgtttgaataagtagtattgaaacattaaacttgaaaacaaaaatttacatttgcaaacaactaaccggtagaaaatccccaaacacaatcaaattagaaaaagagttctacatagaaaactcacaagaaaaaataaatgaatattttcccaacccttttaacaaattctaaaacaatactcatccttcaattcttaacttagtttacatgtctacactgaataatgtatcaacatcacca

SEQ ID NO: 205488 - DNA, 668 bp, Cannabis indica
atagtttattagaatcatagctacgatgtattagttatattattaccttttttttttaaaatatatatatatatatatataaatatatatattcttttagtaatttttttttgtcaaaacatatgtttagatttgatatgtttaaattgtatcatttttatttttccattatcattattgttgtgtttgtttatattattatatttagatagaaagtgatgaaaattagttttaaaaaaatataatcaaaatatattattctttttgaaatctaaaaacaataatcaatctctctctcttttttttatatttttttcaattataaaacatactcttatatatgccaaaaaaaaaaaatcatatatccctttaacattattgtaaacaaactatttttcaacaaaaaaaaaataactactaaaaacaaactaattgagtgtactaaaaattagaaaacgtataaaaataaaacctaaattctaaaaaaaaaatatccttaatactttttttaaaaaaatccctaatattgttaaaccacactataatttaaactattaattatctctttaactctctcagaaaaaaattaaaccattcctattaaattaagtcctaaatatctatactatttaataatttgttttttaaaaaattttgaaaaagaagtt

SEQ ID NO: 205489 - DNA, 975 bp, Cannabis indica
tataatttaaaattttttaaacacccagagtgcgaagtgcgaattgttccttagtttgcaccataattaagatgtaaatattaaattatatacatttataatgcaattatttatgtaatgaaaaacaaacgcacaaaaaaaaaaaatgaaatgaaataaagagaggtaagcacatcctagcaaatttttctacactgaagattttgaccataaaaaaattcagaattacgaaacacatatcaagagtgtacttggaaaaatgatagatgactatgcaataaagtaagaatgtatacatatgtacaattatgtatttaaaagaaagagaaggtaatataatcttttcagttgatatatatggtacgttgcttaatttatatgaaatcccacttcacaccaaatgcaacatatatataattatgggaatagtatatcttaactattaatcacctcacatcagtctttacacacctaatatatatatagacggttgttgacatgaatggacaaggttgagtttggacaaccaataaagagatatttgattttaatcatccaaccatgcaaccaaacaactctaagaaaatggcgggaggccttagatccaaacaaataacaatctttaaaaaaaaaaaaaaaaaaaaaaaatacctaattactcttctctctttccctctccccttacaatgctcttttgtttaattctctagaacaactaacgttaattatttcaccaatgggatcttcatcataaccttaattgtcatttttcttccccatgggaggttgcgtgtccgtgtccgcaagaacaggtctctacaagaggcggagggacatcaagacagtgacgacgacgacagagatcaaccccggcacaccccacaagctaaccctccgcctctcagccactctcaggccgactgcggtccttgatgaccccgtcggccatgacatcttctcaaactacaggtttgg

SEQ ID NO: 205490 - DNA, 1925 bp, Cannabis indica
cttttttttttttgttttttttttttttataaccaacttaaagataatttttaatacgaacatatacaaaaaatataaacagtacttttgtcatagcatttttagatcgaattataattaaattttagtttttttttaaagaattaatttagagtcctatttataccattttagaaaatacggagtctattttgttatttaacaatattgaggtcaaattagtaacttttacaaaatatagagttcaatatattcatatttgagaatgtatatcagcacatcatttttaaaaagtacattgtaaaaatacctaaaaatttatatgtaaaaatatatataatttataaaaaattgaagagaagaaatgagaacaaataaataaaaataaagaaacacaaagaaaactacacatgggaattgttatctctatctctggcacattaaataaattgttgagcaattcctagcattatattgaaacctgtgatgacttgccagtaatcatatgcattgaaaatgaagatagagagcatgggcattattcaagggcagaagatcaggcataaataatgtatcatgaatgtgtttacaatgaatatacatacaaatactaaaaaatacttgtagtgccttatatttttatgagatgtaattttattattggtaatttaatattgcatctcatttatgttaatttaaaaaagattataatttttttttaaatttctttttttcttttttttttccttcttttcttgtctcttctctctcgtttatgtcttcactaaaaaactagcaaaccctaatgccgacaaccacccccgacccccttgtgctgcgtcggagccaccaacagaccaggagacccaaaatcccgaaaacccaaaaacctccccaaagcccccgaaacccaaaaccctaacctcctcctctccccaatctctgtcgaccaaccccggtgaccaccatgaagagagagacctccgacgacagtgagattcgatcgctcggtcgatgcaggaggtgaggtggttgtgtttaacagtgacggtggtggcatccacagtgcacgatgcagtggtgcctttttaaaacaaaaaaaaagaaaagaaaaaagaaagaaagaaaaagaaaaagaaaagaaagaaaaaaaaaataaaaaaaaaaaataattttatataattaattattttcataatttttaaattattaatttaaaaaaaaagaaaaaaaaagaaaaaaaagtaaaaagaaaatattttaaaatattttttctgatttttttaaatttttttaaaaatatttataattcttcttattttttttttttgaaaaaatcagctcctttgtatttcaatttcaaactgttttacaacctatcatcatttgtacgacaatctatatatatacatctttgtggagttacaataatacaacccaatctctatcttttttccccactaaaaatttagaccactaaaaacttgccacgtgtacaaatgtgtacacatggactgtcaactgtggcagttaactgtgatttttgaacagaggggtatagagcaaaacaggatgagagttcagtaggttttgccaccaaaattttggtttttgtggttaagtgttacaaaacgtaaagttcaggtgatttagccgccaatatcccttatattgattatatagtataagggcaaattagtaattgattacattttcttttacaagatcaataaaagaagcttaatagagtaagtgctaaatttcacttgtttttttctgcaaaaccacccccacggatctctccttctctttttttttttttttttttttttttttttttttttttttcattttgagttcttaaatttgagtggattgaagcaagattttgttggtttttagtgtacaattgttagattgaactt

SEQ ID NO: 205491 - DNA, 707 bp, Cannabis indica
tttaattttcttaatcatttaaatgatttttcataatatctaaattgatttttaagatttaataaaaaaaaattgaatctttatcattgttaatgagagagtacaatttgatagttatcaaagtttagggagcaaagttgataatttacaaagacatctcagcatttaaacaaaataatggaacggaacctaacagaaagattaaatttctgtaaatgtaaaagttgagtaaattgttgtatattgtaaagaacataattactgttggcagaacaaaattactaattttttttgaaggaacaaaattactattttttctatatatttgtgtcaaatttaatactatatctacatctttcattagagtacaaactgtgtagttaaataatcaattaaaagaaaacccgttgatttggccggtgaaccattcaatttattaatctaatctttttttaattagtgattagagtcatgtcttacgcatgtaaccacaaactcacacaccacaacctttgtactctgtttttcttttttattgttttcttcttctaaattgcataattatacacatattatacacagttaacgtctcttctctctctagctcacacacaattttcattattagaattttaatttagggtacgtgtatagtacaccctttcaataggtgttttggtagacttattattttttttttgtatcta

SEQ ID NO: 205492 - DNA, 1524 bp, Cannabis indica
atactacttttgaccctgtattttgcaaaagttatcaattggatcttctgttttgttaaataacaaaatagaccttatattttccaaaatagtaaaaataagaccatgaactcaattttttaaaattttattttttaatataaccaactttaagataatttctaacatgaacagatacagaaaatgtaaccagttttatcataacatctcttgatcagattattataagttttattttgacaaaaaatcagttcaggatcctatttgtacaattttaaaaaatacaagatctattttgtcatttaacaaaacagaaagtctaactgataacttttacaaaacacggaatccaaaatagtatttactctatcttaaataactataacgtacacgactatgaaaaaaattaaattaaaaaattcttgtaaatgccaaaacaattaaaaattacaccaatacatttattttaattggggtggattataaaaacatccattacatataaccccttttctttctaacatctttccaaaaccaactgtggaatgtggaagccacctgaccataggaaccaccaatttcaccttttctcttcggtacctttcatcgatttgattggagagaaaaaaaatttcatctaaaatgaaattggttttatttcaattcttggtaatttgtttatttctcgcttcctttgtatttggactgacttgaattaattaaataaaagattttagagtttaaattcgtccatcataatttactatgctggacaatcaatcaattttcaacaagcttttcttttatatattgtaacaaaaaaggctttggtttgatttgggataagattggtttaatttaaaattgtgttgagttatccattgtgctagttcagttgtcaactcttggaatgtcaagtaacaaaactactagtcaatgcacctaataataccatcacccaactaatattaaacttgtgaatattcctatgtattatataaacatatatttgaaggttagctaggttgaagaatcagtcacctttgtttgctacttgtaacttagaaattcagaactctaatatttatttctatattcaattttttttttcgataaaaacaatagcttagagtgagaaactttacaagtgacttagaattgtgaataacataataataatatggagaaaacaaagggcaatggaattggctgtgcaaaagcagaacaaatggttcggtttcatctcggcggaggccgccacctccgccgccccttccgatgttcttgtgggctaagaagactaatccagagagtgtgacaaagcaagaaattgctatgttctggaggcagaaacgcatagaggaagaagatcatcttcttgctgctattaagactgctgctcatattagagcccgtaatctctctgtaagatttttctaacatatttatttattttgaaacttttcaaaacaattaagttgagaatttactattcaatggtgtgtaggaagaagattacaaatg

SEQ ID NO: 205493 - DNA, 1338 bp, Cannabis indica
taacataggaccgtcctaatgagtgataggacaagggtagagtgtaattttatatacctaaagcgagttcaggacggggtcggtgtgatactacctaccccatactcgacccagatatatagtttttaaactttttatatagttttctaattattacgtattactgtgcagtaaaaactttttaatagatagaatatatgtttattttaaagtcaatatcttattttttttatttttattttaaattacattaaattatttttttattattgttattttaattttaatagatacctaatggatcaccaattctaaaattccttactctaaacctgtcgagaattaaacgggacaagaacataaatgagagcataaattagaaatggagacgaaattaggatgtacattacccgcttattaccaatctaatttccattcttattcttaatataattgtgacatttttttgtaaattactttagacgtacaggataaattatcaaagagttcacataattggtagaatgaattaatttcaagactatacttatttgtataaaagaaatgcactattataaagcgttggtgtaaccaaatattgaatttacatatttaaatattttattttaattcattagtagtgtcacccaataatccaatattattggtgatagtgttagggtattactagtacctatatttatactagtaatcatattaacacacataatttacacacaaatttgacttacgctgacaagtaatttcaactaataaattttatttaaaataaatttcgcttatcaaaagtaacttgccacataattgtattatatttgtgcctgatttatgtctgcacatatcagaataactccaatgctcaaaattaaatttaatattaaattaacaccaaaagaatataattttagcactgatttttttctatttcaccaaaacactaaaaaacattctttattaaaatataaatataaaattttaatcataagtaccttattttaatattaaaaactgaatataagataatatttagaattttattagagcaattttatatctaaactctactatttttaaaattttagtctcattagaaaaagccttattactttgtttatatagagaattcagggtttgattttaagaaatgctaaaatatattagtactagcagtgtctaatatactttttaagatgtcaaattataattaataaaattaaatattgaatctcatataattaaatttaagaatattacctataaacactacttatatccaataacggtgccctctttatttttcatagggtaaataccatt

SEQ ID NO: 205494 - DNA, 619 bp, Cannabis indica
tatatatatatatttttgtgtgacactttaaataaatataagagaagcttaacaccacacgatgcaaccccatatgccattattaattaattatatctttccctatatataaaagtcatgaatattgtttctaaattattataggagaagatatatatatagcttacgtacatacagtaaattactattatttttcaaggcattcaattcaattggcttgggcctaccctaaagataagatgattaacatgcatgatccagaatatcatgagcaactcaagatttttattttcttaaagttaatttatggtaataaaaaaaattgaccaacattgatcaactacttaaaataatatcattgtacgtacgtgtttcattttgcaaacacatactataattatatatatatatatatattgtgttttatttttcaaacacagtattatgacatcaaggaaagtattatgtgccatccatattacaaattattattatttttttttgaataaaaattttgatttttaaggaactgcgcagtattatgacctcggccgctattagttccgccgctattaacagtattagcggcagaaccaatttttggccgctaatactatta

SEQ ID NO: 205495 - DNA, 602 bp, Cannabis indica
ttgataaattgtaagacgtgtcgtcattatgatttgacacgtgtaactagaagaataatattaatttagatgcttaacactatgtcacaccacactagtattttttttagttattaaattaaaatttatataatatttacattttatcatatctaaaatctaaattaaaaaaagcatgtattgattaattaattaaaaaaagcattttaacttaataactattaagcagcattttcaaaattaagccacaagattaattaaacagacattaatttgtacatgcatgttgaaattaatgagagattattctttttgtattaccaaaatatgcattaattaataaactccccaatatttaatcattaatgtaaaaaaaaaacagtaaaaaagaatctctaaaacattacagtatgactagagctgtaaaaaaaatatggtgtaattatttctttttcaatccaatattgatacagtttttgcatgcatgcaaagctgcaaacccatatatatgtatgtatatgtatatatatgcttttaaattttgcagaattaattgaactttcgatcatggaaataataattatattatatattaacctttg

SEQ ID NO: 205496 - DNA, 1098 bp, Cannabis indica
atcaaacttaaaataaatcaacaaacaattagtaataacagcatcaacaaaaatcataacgaaaattggagataaaacaaggtagaatagaataattaaaagcaagaaaaagtagaaacaacactaagatatatactggttcaagggtgcattacagttgagatcgatttgttagaattctctcaaagtgattatctttcacacccttacccaaaaagcttctatatctacataagcttcttcatacaaatcccaaaatttaatctctatcttttctctgttctctctctacgtctcaatctcactctcgacctctgctctcaaaatcttcttctgtggtattcttctaatgatgagaatggtgtagtatttatagatttaggaaatgaatcccaaagtccgtggttgcaatacaactcagttacgtgcgacttaacaaacttaacaaactccttgtaacaagatctctatgttagttctagcaagagctttccggatgtcccaggcggatcaagaaacgtgttcctaaaaggatgttccggatagataaaaagccaattagagcagacttattcggaaccccagacttgagggaatagctagccttctggaactccaatctggaggacgactagcttccctaaagactacttagagtggacaagctggacttctgaaactccttttcagatgacttttagctttctacgagacttctttcggagatcttttcatttagaaaaattataccacaattttacggattaaagtctttatatgcttgtatagttttaaatgtacaaatatatattttgctcagcaaaaagtaagaaaataactaaaaaataatgtgatttcaaccttacattatacaaaaatcttatttttagtcataacaaatttgtgactaaaagtaaaaaaaattgtgattaattataaatcataattcttatgttgtgactaaaaggtctgtggctaaagatattagtcataaaatcataatttgttgtgactaaatgtatttttagtcacaatacttgttgtgactaaaactaaattagtgactacttgtatctaaatactatgttttagtcacat

SEQ ID NO: 205497 - DNA, 1970 bp, Cannabis indica
ccatccttgtcttaattcagacacggtaggtgcctatctttctatgggttttgactttttgggttaattatctaattaattaattaaatcagataaatatttgaatttaaaaagtggttaaagatatttcaaagtagttgaaatattctcttaagtacttgagagattccatcataaatatcactaaccgaattcggttacacatatttatttatttaaataattaaatatgatttaattaatagagatttaactactataaatagaagcctgatttggaaatcagaagatgctttttcaacatgtaatttttgaaattatcagagaaaagaaattattttctctctcaaatagttcctgctcatgtgttgagaattaaataagaacaaattatacacattatcctaatagcccacactattccttgtgtttggtgggtcgatttggaagacactggtatgagttaaatttgcatcatcctcatcatctggattaaaggatacaacatacgagaagttttgacgataccctgatagtcattaaggggtgtatattcttatcttatattttattgtttagatttaatgtatacagatatggagattcattagactatggtaaaatgataatcagataatacgaattcttccgttgcatacttgatttagtacaataaaaaccaacaccatggtccccgaatttccaccttgaaacactgtcaaggggtagagtaaatattgtatatggaagttcagaaaaatttattttgaatcagtaaaatagtagtcatttatttttgtaataaattatttattttttaaattaattaaatagggaaaaagacaaaaattgtcgagacaaaaattgttaggacaaaaggcacattccttgtcttaaatgagacaaaggaggtgccacatgcactgtgtccaaacatagtgcatgcgccccacatggtcaggaatccctattggttttgtctttttggttaactaattaattaattaattcaatagataaatatttaaatttaaaaaatagttaagttattctctcaagtggttgagagatttcctcaatcgattattagatgtaaatatctataacaaaattcggttatgttatttattcaaataattaaatatgatttaataaatatatttgaatttaaataattaattaaataaaacatttattgggtttatttgaatatatcgcataacaaagtttttgatgagattttgtatgtaatttttctaaaagcctaaatgaggtttaccaaaaatcctttactgtgtatcacataagaaatttctcttgctcatgtgttgaagtttatacaagaactacatatacacgttatcctagtagcacacactatttcttgtgtgtggtggatcgatctggaagactacggtgtgagtttctaatcaacctgaaagaatacaaattacgaaaagaattaaggataccctgatagtcatcaagaggtatttatttttttcatgcaaattatattttagatttaatatatatacatctggagatccttggggctatggtacacttataatcatatatacaattcttccactgaatacctaattagttccataaaactatcaattgccatgctattaattgataggaaaacttcaagttttgagtttaatatagaacggattaaaatgagttttttacctataaccgtcattgtgacataggactgagatcatcgagcatttttcactcaagttgactagcatggcaatatatgattctataattaccatctataagaaggagttgttactctattttggttgtctcattaggaaacaaagtaagagagagtcaatactcaaatctaaaactaagtttcttacttatcaatcgtctcattacacaacgatagtgacattggattttctcattagggaacggtgtcttggttgcctcattaggcaata

SEQ ID NO: 205498 - DNA, 899 bp, Cannabis indica
aaaagcatatgattacatttgactaatcaaatttaaaaacgaaaatacataaattttatagaattgaataaaacattgatttcattaaaaaaaaaacattaattacctattatatcacattgttccgtttatattttttttttcagattttttaaatataaatgctctttacaattaaaaataataatgacaaaaatatttcaattaaaatcttataacttctatattcagttacaaccctctaacttttttctcttaagtaattaataaatataaataaattattcagtaaaaatatatcattcttttctaatccatatgctcttaatttttcagagttacctaagttttctaccttgataaaatttagtattaaaaatcaatacaaaatcaatagaactctaacattgattttttttttgttactatctaacacttaaaattatatttctttattatattatttattaattatcaatgtatttttatcagttttttcctctaaagaagaattttaatagtcattcaatttcattttagaattagcaatttaataccactagatgagtttgtatatttaaagaatgttttgttccattattttcactcaaaatttctttcttctattgtgttatttcttaagcattctttacagtttataaaatgaagtattcttttcttgaagacttgaagaatgataatgaaagttggatcataaggattagactttgtaggatgtgggagtctactaacagtaagaaggatgatgaattaattagtgtggacatgattttcattgatgagaaggtatgataaaataaggttatttgttagagaaaatgttatgcatgcaacaattcgaatgttgtttgtttctaagtttaagcatcttttgagtg

SEQ ID NO: 205499 - DNA, 889 bp, Cannabis indica
acaaaaaagatatcatgatgtttttgtttaactcgatctgacactaaatagtttaaaatttgtttgtacagctgagactttaggcttcaagacttacccagcggcatatcttagcccagaagcatcagggaaaaaccttctcattggagccaactttgcttcagctgcatctggttatgatgagaatgctgcaaatctaaatgtaagtaataagatctatatttttatactaatacaagccttaaaagtgtctacctttatatttaatgtggctaaacttctaattaattagacttaaatcattaattatttgttaagcattaattaactctcttcaactaacttgattgattaatacctaaactttttttacagcacgcaatcccattgtcccagcaattgaagtattttcaggaataccaaacaaagctggctaaagtagctgggcagagtaaagctaaatctattattaaggacgctctttatgtagtgagcgctggcagtggcgactttgtccaaaactactacatcaatcctttagtcaacagagcctacactgttgagcaatacagttccatgctcctaagttcattcaacaccttcactaaggtaatatataagtacttttaagtaatacttaaaactgaacctgtttatgctatatagtttaaaataacacttattgtaaaaacagggcttgtatggtttgggggcaaggaaaattggagtgacttcactccctccattgggttgtcttccattagcaagaaccttatttggatatcatgaaaatgggtgtgtctctaagttcaacacagatgctcaagcatttaataagaagttgaatgctgctgctaccagtctccaaaagcaataccctgatcttaga

SEQ ID NO: 205500 - DNA, 566 bp, Cannabis indica
aaatagcaccccaaagggcctaaaaatgcttaaagctatacatttaaatcttgtgtaatctatattaaactatacagactatgcttcattacagactatactccattacacccaattacaagctttgaagccagttagtatcctcaattgatacattttttggccatactgcagtagctctgttgagaacctctttttttactccttcaatcaacctctctacattcggtttagtcttttcccacaagctgatgtttcgggctttccacagattgtatatcaaacacacaagagcagcagcaaagatattcttcttgaacttgctaatatttgatctcccaatccacctggttagagtaagcatgttatcggctgcaacatgccatgacatccaattttttattccctgtaagcaagtagcagatgtactacaagcaaaaaaataaatggtctgcattctcattctgtgttgaacatagttcacaatgttcatcaatgttcattcccattctccttaatctatccttggttctaagtctcccctgtattgctaaccaagaaatgaa

SEQ ID NO: 205501 - DNA, 998 bp, Cannabis indica
cttcaatgttaagtttaactgataaaaagaaaacaatctttaaactaagaattgttgttatatagccacttttaatatataaagatatgaaaaaataaaataaaaatcatattgtaataggaacatttcatttaatatacttaaaaaaatctcaatttcaaaaaaatacccctttaattaatttatataatacaatcctctcactttatttaaagaaacccttaccatttatttttttcaaaaacttaaaaaaacctaaaaaaaaaaattaaatctctctcgacagccccatcagccacccgcgtaccttctagccccaatctgtgtaactcggccacaatctgatcccactctgcccactcgcgcgaagaataaaggacccatcggcgcgaaggtcccatccgtcgaagaccccttacccaactgtccgtccatccttctccttgtacgaaagactcgtccgcccgtgcgaaggacctgtctgagcctgttgttggtcgttcctccgccgtcagagcccgtcctgtcccatccgattcgcctcccatcccattggatctgcctcattctttaagaagaaaggtattgttcataaaaagaaagtttgttgttagttttttttttgtggttgaaatacacttagttttgatgaatttttcttaattttcggtcagttttgaatggtggttatggtgtttttcgatccagtgtggtggtcgttgaggaaaataaaaaacgatgtatgttctcgattatttattaaaggattctcgacgggttattgataagatttagcttttggtgatggtcattaagtttagctattgtcaacatgttatcgatatgttgtctataggttcttgatcgataaagcattgaaaaaaaatttgtaatttcgttttttaattgattcttgcttgatgggttttcgataagggtgatagtcattaaaatttagctactatcgaaatgttcccgacagttgaatcttacaaaag

SEQ ID NO: 205502 - DNA, 783 bp, Cannabis indica
acgatttgggtttgtgaagtagttacagtgctagttgcaataggagtttttctaccattttttgttgcaatttaagttgtagcgctagttgcaatagaagtttttatgtagaattccgtaaaaaaaaaaactattttgaagtgtaaaaatataaaaacctcaatattaaattgataatatatatatatatatatatatgcatattatattagtgagctgattttgtattccatgatgactagctaaaagtattgtgttattcaaaccgagtagacataacacttatttatttatttttttattttttttaaataaccgagtacacaacagtatttgtttgtacaaataaagtgttttttttctttggaaattaaagtacgtacgtatggactttctctagaagtaactaataataataataatatagtaaaggaagatactaataataataataataataataataataataataataatatagtaaaggaagatactaataaggtcttcgtagaatgtatatataatatattataataaaattttagaaaatcgcagaatctgtggcactaatggtggaaaaatatgtcatgcaccaacaaatattgtgactatatttatctatttatttatttatttattatgatttagttcaattaaggacttatttaatcttgtcaattactccaaaaatactcgtatgtctgtaggtcatgattttatattatccctccactaaatatattctttatatatcttccagagaaaaagaaaagtaaatat

SEQ ID NO: 205503 - DNA, 931 bp, Cannabis indica
aaccggcagatacggaagtcctcaattcatgtcaatctgataagatgaatgaaaactgccccgtgagtactttctttgttctctctctctccctttcttttttttcccttctatttttcttgaatgagatgagaaggatgaaattgaatttcattcataactttaaaggtaattgtcagcatttaaatgaatttgttctgcatcccgggtattgacaagcgaggctgtaaaagttctggtttgaaattatattgcaaatataagatgcatttatttagttataagtgcattcaattcttgttttaccattcatcgcttcgtttcctcccattgcaggagccagagaagagaaaagtaccatttcagggcgtgggaagaactctaggcagtacctctgcttcagctgagccaactattgcttctccagctgcaccaaccactccagcggcagtcattgtggatgaaacacttccctcaacttcagttcagcttaggttggctgatggaacccgcacgattggacgttttaactaccaccataccgttaatgatattcgttccttcatcgatggatctaggcccggggaatccagaaattatcagttgcaggtgatggggtttcctcccaagcttctgaacgacccacagcaaactatagagcaggcgggtcttgccaattcggttgttatccagaaattctagccagcttcttgttgctctggcttggcttatgtgaattgagaattatatagaaagaatgtgaagctgttatgtcaactgaagacactggatgtgtttttaaaggcagttgatttatgaaaatgagatacatttaacaaaaaaatgtatttcttacatattgaaagactgaagctttttttttccctaaaaaagattattgtaaagtggtggtaggaggatttttgtttgt

SEQ ID NO: 205504 - DNA, 894 bp, Cannabis indica
tttttttttttttacgaatttcgagtggtccaaacttatcgtatggcatcatgcagattgtttgtttaccgagaaaattgagtcgaacaaaaaaggaagtggaagtagtttaattaacgagagagtaactgagtggaattgaaggataataagtttatagtcatcttccagccttggatgactaaacaacacctttggataaaatttgtttcagtaatggagttgaactgttgaaattctatacaactttatcaagcttttcatttaaatgagaagttactaaacctgagatggatattgttgcaacatttgcgtgattgatcttttctagttggggattttgtacttttatttgtttacactgtctttttattttttattcagtggatgcttaagaattgttccagttggtctctataattatcgtttcatgtttattgcatatcatatatgagaaagtagagttttcggtcactattctttttaatttgtcatccttcgctgcattctttctttcttgatgcagaaaagcctacggtggcacaattactttaccattcgattttctcgtttgctttcttgttcacttgaagtatcacaatgaatccctcttcgagtggtgaggagcttgctattctgcagttgcataaatgggactcatcttatcctaaactaaacttgtcagagtttcgtgaagcttttatttctcccacaaggcagcagttattgttgttttcaaggcagaatgaagctttgctactgcctctctttacaggttaattaggtttatttatcccctgtaacttttattgacactgccaatgttcttttataggattgtgtattaaagttttacctttttactttgctttgccggtgcctttgacctacccc

SEQ ID NO: 205505 - DNA, 1099 bp, Cannabis indica
cagcctataaatatacattgatattccttttattaatatttaaaatactattatattgaccctagctgaacctaaaatcaacaatttacatgtgagttgtctcactttgccattctaggtaagaaatttttaggaaaaaaaaacttaaaaatgtgagaacgagatctacagattgcaataaatttatttgaccaaataagtaaaaacttagaaacattaaagaaaattatttacaaggaaagatccttatggtaaaaatgtaagtataggaaagtattttttgttagagagagagtctcttatcaatatttcagtcaaacaaattaaagtaggattctctcttagaattttttttttttaaaaaaaaaacagaaaacagaaaaagaaaaaaaaaatagaagtataatttcctccaaataaatatatttttgagataaaatactattatattaatttaaaatatgataatataatatatattagaggaggtagtaattccaccaaattcacccaaaaagcatactttgcatatttgcatttgcatggttattatctttattattaacgtttttttatttacaattatctagctcgagatagatatttatttgataaaaataaaatactcatactttaaaaaaaatgagaattactttatatatatatatatatttaatttttatttttatttttacagtttgagttactttagtagttgctctgataattttaatgtgagttgttatatttatttaagttgctccaataattattacataaattattatgtaaatttttataacaatacaaaaaaattattttaaaatataaaaaataaaaaagccaacaaaacaaatattacactattttactaaacaaaatatacatggaaagtagtaattaatgtttctcttctttttcttgatcttgtaaataacaatttgttgactgattaagaaaatgacgttttttttccttcaaagaaaaaaaagacggtcttttttttcctttaaaaaactaaatagacgtttttttttactttctagtcttttttgttttggtaaaccaataggtaatttcaataaatttatagaatgac

SEQ ID NO: 205506 - DNA, 826 bp, Cannabis indica
acaagagactctagctcagcaattgagtcaccttattagtaaaaaaatttacattgtttataaaaagaattaaaagtaaaatatttagatcttttctatgtattttagtagatatcttttatacataaagtcataaagtgtgactatttaacaatttttgttagtttaacggaatattttaaaaatataaaaatattatgttaaatttaacagtactagtataattagttttataaatatataaatattaatattatttattttaaattaatttaatatataattattaatattatttgttttaggttaattatattaattttaaaataatttaattatataaaaatattaatatattatttataacattattattattttattgttattttaatattaggagtatgttaattttaatattctttaactttatatttatttttcttaaatttttaacttttaaatattttttttaaaaaaaaaatttaaaaaattaaatttagtttcctctagtttataaaattttaaaaattacataataaaataaaaactaaaaaataaaactaaactatacgaaacaaataatctagtatacataaatataaatatacatatataagagaaaatttacgtctgaaggacgttttttaaagttttaatttcccatatataccgaatattatttaattttgataaagtaagctaattttttgtaattagttttgtactacacggtaactgttttgagagtaattgtagtgttaaacacgattccatttctctgtcaagccatcagtccatcacttccattttactattttcttta

SEQ ID NO: 205507 - DNA, 806 bp, Cannabis indica
ataaaaactaaaaaataaaactaactatacgaaacaataatctagtatacataaatataaatatacatatataagagaaaatttcgctgaaggacgttttttaaattttattcccatatataccgaatattatttaatttgataaaagtagctaatttttttgaattagttttgactacacggtaactgttttgagagtaatttgagtgttaaacacgattccatttctctgtcaagccatcagtccatcacttccattttactattttctttatcttcttatctcatttttatttcctctcattttaattgttcaacaaatctttagggtttcaaatgctctattagggttttctttcagtgtgtattttagttcgtttatggtgcgtacaaggagttcgatgtctccatcaccggaggtctctagttcgaagaaaaaaatgaaaaaaaaaatagaggaagttgcttcgaaaaaaatggctgaatgtggtgtgaaggttgttgattctgttaaggagatgaaaaataagaatgtatccatttcgaagaggagtggtgtttttgaggcttcctctgacgatcggtactttaagaagttcaagagtattgttgaagatgatgatgattttgattcagaatgtgatgaagcccctattgtgtagccaaaaaaattaaaagttagtatcttatttgtttatgctgaatcgtatatatttttgtttgatttttgttaatgtggatgaacatttatatgttagttgtttttttttttacacagaattatttggtatactaagtagtttaca

SEQ ID NO: 205508 - DNA, 647 bp, Cannabis indica
tgccttaatttgcttttttttactatatacatataaaaggatatataggtgtacattttgctgatcatgaatcattcaaacatatgtatatacttaatttgaataaataaatatatgctatatatttatatatatatagttaataataacccattaatatctacaaactgaattttttgtgttggtcaacacgacataattgactggtgaagaatttttgcatcagtttataacagacgcttcactatattttagtcactttgcatcgatcggttctaaactctcattgttatcttcacaatcacgattttgaaattagagacaactctcccaaaattttcatgcaattcaccatatatagttgtaacctttaacataaatttaagtaacttctcgacactactacaatttagccttttagtgacatgatttagtgacacgcacaaaaatgtgagtcactaaagagttgagagtgatttttagtgacatgcacaattcaactctaaatgtttagtgttagtctcctataatgtgtgtcactataaatatagagtgtcactaaatattaaaactcaaaaatttttaaattttatttttttgaaaaatgttgacatatagtgacgtgccaaatgcgattggataagtat

SEQ ID NO: 205509 - DNA, 498 bp, Cannabis indica
tacatactaaaacataacattgtacgatggagatgatgaagtagaacaaatttgaattgaagcctgagtcatttcaaactcagttactcgggcatcgcacatgttgtcaatttcgttccgacgtgccgatgcataaaatgttatgcgcccacaatattctatataaatatccatctgcatatgcatagacaaatgtatataagtactagatatataaatgataaataatttagtaatatatatgaaatgaaataacttactagtgaatgatagcaattgttgaggtgagagtatttaatatttttggttttgttgaattggggtaattgggacctagtattgttgttaagcagaatattggcaatacgagcaaaattgtcattctcacgctctatttcagcaattgcatcgtctaagtcttttttagcatctatatagtttggggagcctggttcgtgaagcttaacctgtacatgtgcattgcatgtgaatattaaa

SEQ ID NO: 205510 - DNA, 560 bp, Cannabis indica
agaagagagtttgtaatgtattgagtataatataaacaatacaatttaacagataaactgactaaaaattgtttcgctttcaaaaccaaattatataaaaattattgcagccaacagaaaaacatatagtttattttgtcacaagtgcctacattatggcaatttaaaaaaatggaagcaaaaacataaaattagagaagaaatatagaaagtgaaaggagcctctatctattctgaaaatttaaaaccttaatagacaaggcaaagatgcctccaaagagcaaaccatagaagacattgaccatggcaacgactccaatgaaatcatgtttgtatccaaaatagcttttcaagtattgtttcacagtttcacctgtttcggcatccatcacatcttcaacatctccatactgtgatactaacagtccgtacaaggtccacgctgttggacaagcccagtagtaccacctccaccatatcggtatcctctgttgtgtgttcgttcatattatcaagataattgaaactcgattcataacaagaactagttattattaaaa

SEQ ID NO: 205511 - DNA, 866 bp, Cannabis indica
atttcaatctcaatagcacaaatttaataggtatcatcattacgtatactaaatttggccaaacaatccctggttgaagttgggaattagaagctaatcagactataaattgatgatttgggaaactgaatctcttctacagttccaaattttatattctctgctggccaaagtttatagcgtagcaagtatactccataattcattttcctcaagtcacctagatccattgtgcttttgatcttatctttcgccattattatttttctccaataccagctctatcctatggagccacgtagctccataatctccatttttaatatacactgaatgtgtccaacttacccaaagattatcctctttcatagtcccaaacatataccagccaatagctgctatattcaatctctcaatgtttctcaaacccaatctgttgatttttatgctccatataagagttagaaaagtgaaagcagatttgataaaaataatttttatccaatatgaaccataagccccaagatctcaacataatatacatagattaaatgtaatgaatagaatacaatacctattgtagcctatcaagggatcctcgctatcttttagtataattacgatcatccaatctaagaactatcgctaaaattcacaccgcaatctacttagaaagagagtaggctattagattttataagatggacaaatttatgaattacaatgtattctcaactcatgagacactgtaattgagatggagtagatcacaatcgcacacacaccttgaatggtgtaggcgtgtgatatatgaggagagagagagagagagagagagagagagagagagagagagagagagagag

SEQ ID NO: 205512 - DNA, 1353 bp, Cannabis indica
gtagctcctactgcctcttttatcataccatttcaaagagatgatatctctctccaaattattaacatttgtgaattttgttacctttttctttgttttctttattttgcagctcaggtgcttgagaagttaattaagttgccaactttcagagattaagacaaaacttcatggaactttgatcttatattttgctttttctaagcaggactgaagggtggaattattgctatcatagttgtggcagttgtcgctggggtgttattggttgccacaggcatatattacaaattttaccgaaagaaagtggatggaaaattaattgcttcagattttgaagatcagtcttctcatcatttgtatggtatgataaattgttttccttatacctgtttgtcttttgagatttatagaaggaaaaattccaatttagtgtggtcattttgggataaatttattaaataattatgttctccaagtataggaatattcttttgccagtgtgatattcttttttctattgataatatttttcactgaatgtttctggttgagcgaaatcttttcatgtgaagccggattattctttgatttggtacaaatacttagccaattgatcgcgaatatgttcatagaatttagttttcatctaaagcctttaatcacaaaaaaacaaataaataaaaagaccatgttaaggctagtgataacttcatctaaagacatttaaactaattcattttgttttatgagttcatgttcttatacagtttagatctacaaaatcaaatggatagagctttttccattgaaatttaaggttaaatattccgtatctcactaatctatccttccttggatcttaggccctgaaagcacagataaagctgcagttacttctcctaatgctggtggccttgctggtataactgttggtaaatcagtggagttttcatatgaagaacttgctaaggctagtgataacttcagtttggccaataagattggagaaggtggttttggggctgtttactatgctgaactgagaggcgaggttagttccataaatattttttttttcaattttttcagttgtatcgctttagcagtcctatcatgcacctctttcttccagaaagctgcgataaaaaagatggatatgcaagcatcaaaggaatttttggctgaactgaaggttttaactcgtgtccatcacttaaacttggtaagtaatggtcttatgaagttatgaggcgtattagcgtgtaccaaaactttagttgattctttttttcttgggaaaaaaaaaacctttgttgcatcgatggcctcattttctcatacttagtgagt

SEQ ID NO: 205513 - DNA, 761 bp, Cannabis indica
taacagatagatgattaaaagttacaaaaaatgaaaaagtgttaaaataaataaacaaaatatatgagaaatttcactctggcaatttaatattatttattttatgggtaaagcgcatacctctaagccatcaaacgaacccttgttagggcaattctctaatattatctgcatcaccctcaaaatctgaagaattgcatgtttaggaaaaggacactcatcttctaagattttatctgacaagagaaggtcattcctagaagccaaaaacgttttgaaatatgtatcaaaatgaagaaaaagaggcctccaatggtgaaaattcccctgaaaaccaaaagcaacaaataagtaaaattataaatcaacaaataatataaaagtcagaagcagatatacgcaccttagtgtactcccaacgaaaaccagagagtggtatttgtatatcttgtaatggacattgtataactttgtcaacaaaagctttgactttaggcggctgcaaacaaagaaaggtagttccgactattataagattattactcataaggtagaaaaatcaaattaaaacaaatgacaaaatcagtttgcacattaaaaaaaaatcagaacaaacagtccctggcagaatataaactgtcaagctatgcatcttttaagtcagaaagaaccagtggcttcatcaatattaacaaactcatacacatactccacaacagcctcaaaacacgcaaatattaccaaactggtaaagaaattca

SEQ ID NO: 205514 - DNA, 855 bp, Cannabis indica
tccctctctcaaattctaaaaactcacttaaggagtgaactcttggagaacataactctggagaactctcctcaagtattgagatcaataacactccaagtggactagcctattaccgctgaaagggggtgaaccactacaaaattctgtgtttgttttggtgaatttcctttgctaaaccggtttactttgattaactattgcttgtgttcatcttgctcgttttacaatcttcttaaatccgttgacgaaaaaccgcgtcaacggtgaggattggttccatttcagtttgtcattcatcaattgcgattggtcaaaggctcgtctacgatggggaattatcaaaggtggcagatttctattgtggtatctttttctacatttctattttttctttcgtgtataattttgatgactttttgtgctaataaatccaactatctatattagttcatctttaatttgagcatcattaagcattgttagtggtactctgtatatgtcaaattgaattagaccttctattaatattattctataaaaaaatatgtatgacagtgataatataaaggagttttgtttgttattttaaatttttatcgataagtgagcatgatcttaaagtatgaaaagatttgaaaaaaaagtatagttattgaattagtagtaatttgttttattttctttgatttggttcatattcataatgttaatcaacattgttgtttttgtgctaaaaaaaagaggagtttgagaaccctcaaggttgttgattcatgattgtgctttagtgttcattcatacatactactttcaatttctgaacttttaagcctaatagttactaatttgaga

SEQ ID NO: 205515 - DNA, 1184 bp, Cannabis indica
attgaagaatttttatcgaccttgaaaaatttagaaaacacaatttaaaacatattaaagttttaggaggacaaaaatctcaataatacttcaccgaaatataattttttctatttctttatttcatttaaatatttatgtcttttatttttttatatttatttatatttatttaaaaatgaataaatataataatgtcacacacatataataaataaaatttttaaaaaaataatatttacggatgaatagttagggcttctattgatgagtttattcaatggatagggctacatgtaaagaaattcatgaactattgttttagctgtaataatttattattattattattattattatttacttgtgtctagtaattgagacacctacatagttggacatacaccaaacctgagattgcctacgagtcagtgtcaatacacagaaacacttataagcaaagtaataatatgtgatttcgaagcacaacgaagcaactgtatacattatccacaataataaggtgtgtccaatgcattctattataaaaaatacagagaccattcaaataatataactacaggagatgcttatagtccgtcttgcctttgtagacatgatatacaaatcctcaaaatacatcagttgtaatgtacaaaaaagctttacttttattaattacaccaaaatggctattcatatttacagtttctcagatattggaggctgcttgaataatgtcatcagcagcttagacactatattatgtttttcaagatttagcaactaaattgcaccacttgtggaagcgcatatggcagatttggcagtgactatcctgcatgttgcaaactttacttgtcttcttcttcctcttctaaattaagactaagcaggctcccgaggacgagtagcccaaagcgagctcaaagcccagagacgttggaaatactcccccatggcaagcaagcctctagcagcctggcgagttgtcaagatacgtgccatctgtgtcagggtttcctgtcgaagatggtcagcctgtttagacaaaacaccattcgattaggaaagcaaaaaaattggtgacatgtttataaaattacaaaagatgagatatatagccatactacaaaataacacaactcaaatagcctaggatttgagaagaaatgatgcagcat

SEQ ID NO: 205516 - DNA, 707 bp, Cannabis indica
acattaaatgtaaatgatcaattgggtcaaaactacttaaaaaataaatagatgtaaaaaagtggattaacacacctatataataataatgttgtaaattttaaaattaaagataacacaaaattattattttaataagaaaaacttatattttaaactttttttactcaaaaaattacaattgtatcgaaactaatttattatgtctaattattaaagttaagtcttttaagacataactataatagccaatataacatgcactatatatatacgtttcttttctctcataaacttatttggtatctaactttgaataaagggtttaaggggaatttcagtagatctcttgtctattttggtatttgagaaaaaaaaatcgtccaatttttttttatacaatcatgtattttatatagctatttaagattacttataaatttttaaaaaattatataaatatttaaatattattttctacattataaactacttaaaatttttaaaaaatttacatgtaaccctaaataactataatattcacgaaattaaattaaaaaactctcataaatactgaaacaaataagaaatctactgaagcacttctgaaaaggtttactataacttaccctatacagtacaattatatatatatgtatatgtaatttttattatacatgtatgtgtatatgcagtttatatatacc

SEQ ID NO: 205517 - DNA, 859 bp, Cannabis indica
ataataatataagtcatttatttgttaactaaaattaaaaatagtataatggtaaataaaaatatagtatttattgtaatgcaaattttgtatcatgctatgttgtgatttaaatttgaaatactttttgttatgtgacattggatcacaatttagcaatcattggattaaagttttaataaagtaagttatattttacatttacatcactcatttacattttcattgaagatgctctaagtattgattaataaaatattaattaattataatttttgtcccaaattttaatatgtactaaatcatgttaaacttttgaggtagttaaaaattctccttaaattattaaagttgtcacatttaaggatttttgttcaatttcagtaagtaaagtttgagacgtgatttagtacatgttaaaatttgagagacatgatttagtagatgtcaaagtttgggagtataatttagtacatgaacaattatcgaattagtaaaaattgaataaaattaaacaaaaatctttaaattcaaatttcaataattcaaaagaaattcttaaaactaaaaagtttcaagaacataattttgtacatccaaataaaaaaaccataattaatctaaaatagtataataagagctaaataagtaccataaaataattttaattatgtatcccatatttataaacgatgaagaagaaggtcaatattggcatttaaaaggctgctctgccagtttggaggtcaatatgacttcgagaacagcagacatgtggggtttaatttttctatcttcccctttaaaatagtaagtgctgttaattaattaacctaataaaaaaaatacaaattaatta

SEQ ID NO: 205518 - DNA, 891 bp, Cannabis indica
ttttgtgtatttgtaaaataatcaccggtgaggtgacttgacccttcaattatgcggccaattattggcccaattttgcgacccttcagttttgtggcccgtatcttagtcaagttgggccttatatattatggtatgtattagtgcacattaaatacttcagatatggtactttaccaaatcttcaccttatatccagctaggatagtgttaataaaagacttattagtaactattaacatctcaaatatattttattaccattaattaaatctcttttcttcttccaaaaggaaggctaattaattttttttttttccttttagtaatctctcaatctttcgactttattaaacatgaataaataatctttataattaatccaataatggaaaactaattggtatctcaacacaatatatatattctataccgatatttattcgatgcacgataaacaataatatgcatgttgatcgttggataataaaaaagtgattaatatattttattgtaatctcagaaagataattcgttttcaaactctcaccagatcaaagcaataataaaatatactttcgtcaataaataaataaatgattaaaataaaatatacttaagagggtagagcaaagcatgactgcatctgcatttatacgcataatttttatactagtggctttttaactttacaaacaaattacttttcctactaactactatacataaaaaaaaaaaaaaaaaaaaaaaattaaacccaaataaatctttaaagtaattccttaatagttaacaagtactttttcctaacgacgtttgggtacgtgaatatatacacatttacgtatgtggtcggacataactatagatatatatatatagagatatata

SEQ ID NO: 205519 - DNA, 767 bp, Cannabis indica
cagtggagcaaacttattggaggagtgttcttcagtttctgggttctgtgtcatctctatccttttgcaaaagggttgatgggaagaagaggaaaagttccaaccattgtgtttgtgtggtctggattactctccattatcatctctttgctttgggtttacataagccctccttctggaagacaagaccacatgaggttccaattcccatgattgattaatgaccaccgcatgaggtggttccttcaatttgattgattgttgaccacgattatgttatgtattagctaatactgatcatattttgctctttccgttaagtcaaatgaagtttttctctcaacttcattgttctatgtaagcagtttagtgattagttagatggttttgtttcatgttgttattgttgtcattgtacttagcttgagatgctgttattcacctattcttttggtatataacgatatattcctattgaaagaattatctttattactctcaattcagtttcaatagaaatatgagaaagggaatatgaccataataaatcatactgcattttaaaaattgtcgatcgggtcccataaaaagaaagaaagagatactgcctaaaacacaatgacaatccagaaatcagtagaattaagtgaagggatgttatatttacaccccataaaattataattacaccccaaaaatataattacatatttaactttgtctaaaattaccaaatgatatttataataaaaattgtttttattttt

SEQ ID NO: 205520 - DNA, 1112 bp, Cannabis indica
ttttccatattattataactgaaagtcatttacaataatagagaaaataggataaggtatttactcctatccaagatacatcttcatccaactctagagcgtactttgctaagccatgggcagcctgattagcttgcctacgagcatgagtaacagtaactccagggaaaaaggataaaagacaacgaacatcatctacaagatcagtaaaacaagataaatccctatgagaagaatttaaagcagaggagactctttgggcatcagtttccacacgagcaatggacagttgatgttgtgtagcccaattaagactgtgaaaaagcgccttagcctccatttcatcactcctaaaactaccttgagcaggtttagaaaacgcagcaattacttccccccttgtagttgcgcacaactgcaccaattcccaattttttgtcttgaacatttgttgcagcgtcgatattcattttaagggaattacctgctggtggcttccaaactatctcatccaattgtcttcgattaccattagcaacagttgtcgaagaagtgctatagtggtcatgtactgatgtggagggttgcagatgctggtgtgcagcttgccacgaagagtgattattagtctggtttacatgttgcgcatcccttatgtgtgtatccagacatggtgcatattggtggccatccatctgacaggagtttggaaaattaacattgccataatgttgttgctgctgttgcaagattcctcgttgggatggtctgttattctggggcagatcaggtggtattgaactctgttgttgatgcgtgttcttattgcagctattgaccttggcagaactgtatttttccaagtagctaagagcaaatgccactagagaagaggggtcacgttgtgaaccaccatgtaggactttattcctatcactccagatgcaccataacacacatattaagagttccacttcagcctattgcaatgtttttgccaagtgaattatgtagtccccatttaacattccatgagcacgttgataatcaattgtgaaatgggtctttttccaaacagatttggcaaatttacatgagaacaatgcatgtcc

SEQ ID NO: 205521 - DNA, 723 bp, Cannabis indica
cttaaattcgaaattactttaaaaattctacaaaatccctaataaaaatcaaacttgatgagaccagatatggaaactcctccatccccaaacgacgaagtggaaatcacagcaaacaatttcccacatttttctcggcaaaatcaattaaacctaaacccagatctacatttcctaaacctagtaatttggcgaattagggcttcaaaatcccagattagatctgaagatctcaaatcccagatctgagacgaaaacaagagaaaaaagaagagaaatttataacaaggttaaactaaaatctcaaacttattatatatagaaataggaaaatgcaaatgacagttttagcagtagtacaaaggacccatatattcaaaactatatagaaagagaaagaagaagagagatagagaaagatgagatatagagagagagaaagagaaggatgagagagaaaacttacttgggtgggtgtaaacggctctttagggttttgcccttctggagagagaggagagagaaacctgagagagaaagagagaatagatagagagagagagagagagaagagagaggagagaggagagagaaaagccctacaattgtgagagagaaagaaaaagaaagagagagctacaaatgggtatctatcaaaaatgttattgtcactttaaaataagaaaataataaaaaggaaaattggggagagagaaacaaaga

SEQ ID NO: 205522 - DNA, 1023 bp, Cannabis indica
gttccaaacgagcccttagttattaattttagctactccttgtgagtgctcttataacttcatgagaagcatttttttattgagccagcaaaattaaatctggtaaaattaattttaagtgcatcgagccagaatgaatgccggcggcatgtatatacattttctcataaataataatgtaggactataattgtcgacttattaagatttgaaattttttttataaattaattgacctaacgtgtaaaaaaataaaataaagattctccgtcatatcacttaacttcaatgtcattctcattctttcaattcagccaaaacaaactgtcatttctttatctgctccaaaaaaaaaaataacaagaaaaaaaaaactgtcatttatttcctaatatagcaaacgcgagagcaaataattaaaagagagattaatgtcataaatataaagttagggcgcatccattgcaatatatattaaagtaaaattttgtgctgaagtaacaattaatatatatattaaaaataaaataaaattaatcaaggtcaaatatttaaaaataacttatatatatacgtgcaaacttaagtatatatatgttgcttcgttcattgctctagctagccagtctgagaatctttctatataacagttactgtactcgcatagtttcagcttgtctcgggtactgcaaattaataaaatattatatatggattaacaaccaaataataaaagtattatctaaacggttattaattaatctcctttctaattttggaacacgaaaagatgaatttgatatgctaggctatgttaatataccaaaagaggtattaattactttataataatgattaattagtgacaacataaacaatttatatttgaacttttccttcgatcaaaaggaagaaacatgaaaaagggtggcatattatatttagtcatgataaaaaagttataaagataattcatattattaatcattaaattttaatttgtcaaaaacacacaatatatag

SEQ ID NO: 205523 - DNA, 1397 bp, Cannabis indica
cctactactatccattgggaagcttacaagcgactcatgaggtatctcaaaggcattgttcatcacggcttacatctcacaccaacctctgctttgagcttagaaggctactcggacgctgattgggcttttggtattgatgacaaacaaagtacagggggttatgtgatgttttttggaagaaatcttgtgtcatggtctgccaagaagcagcaagttgttgcacggtccagcagtgagagtgagttcagggccttggcaaatgatgctgctgaaatgaaatggttagtatctctcctatctgagcttcacatctcttctcaccaatgtccaatattgtgggttgacaatcaaagtgtcgctgccactgctgctaacccggtgttccatgctcggtccaaatatatcgaaattgatctacattttgtatctcataatgacaaagcaattatccattcggtatgttccagttatagaccaagttttcaatgctttaacaaaacctctttcaacagatcgatatcactatcttcggtccaaactcaagatgtctgacacaacttttcgtttgataggggatgttaacaacctaattactaatgatatcacttaactgcttttgttaattagctgttagctattactattgcttaactactttctgttacattttgggttgtatttcttggtctataaataaaaggtttgctaccctttttcaggtatacttttagctctatttttgtgccctgtttttcttcatctgcttttagcttctttcttggttttaccttccacaatacatgtattaaaatttagaataaaattattaattttatacaaataaatttataaactatgttatattttattaatatataattattcccacacgataccagctggttttttacttgaagtgcaactaaaggtagaataggtcgtggtacttttatttttctcaactggactacatttggctagctagcatgaacaacaaaaaaactaaataatataggcagttatgcgcaggattacttcatttacatggacgttgatgctaatcacctatctttccaattggtcgagtcgtaccaccatcgtcccttcactttagggctgagaaaaagggcccacactattcttgggcttttataagaggctcgagatatttcaaggcttgccacaagagaaaacttcgtgcagtatggactatattcgtccagagaagcaaaacaaatatgttacagaaggtaaggaagtctcttatgagtggattatgccaaataaaagaaaagttgtctgaaataactcaggatcaactccacctgctctagctattcgaattaaagaatttgttgaggaaactacctctcatgttgtacccattgttgcaa

SEQ ID NO: 205524 - DNA, 642 bp, Cannabis indica
agagagagagagagattattaagttttcagcacaataaatttctacacaaaagatacttctccaaagtagataaagatattaatggaaaaaaccagtcaaagcatattaaaaattcaagtccacgaaacttgatttcatcaaccatacatttaattttataattcttgtccccttttaaataattcaatatatgaagatgataatatccatcagtaatggtgatatatcttgtgaagggaagcgatgacaagaatttacaaattcaatctcaaaatcaacaagctttgaaatgattaaattaatacatacccagcaaaagagtaacttgtgtctggactttcgaaaaagaaactctatcaccttgtccatattccacctgcaataagattgtaaaacacttaatttaagaaatagaattccataaaataatttgaaaaattaacagaaaaaagaagacaataatggatagtaaatggaggattacttcattcttgatgaccatacaccaacattgaacttgtcaaagcaaaactctatgaactcatcgcagtaaggccttttataaactaaacgaaaaataaaattctgttaaataattagttgaaagtttaaaaaagcaaattataacaaaagaaaaaaaa

SEQ ID NO: 205525 - DNA, 1108 bp, Cannabis indica
ctctctctctctctctctctctctctctctctctctctctctctctctctctctctctctctcttttctgtcgacaaaaaacccacctaaaaagaacactagaatttcataccaacttcatccagttttcaagatggaatccatcatagttgttgaagagaattgttagcaaggactcaaggtaagccctctctcttgttcttctttaaatttaaggtttcacttgattttaattttagtttttgggagtttggttctgtttgggtctggcatgtttgggaatcattttgagaggttattttaaggtttttgttgttgctgttgttgtttgtaaagaccgcatttataatatagattagtttagtcaattagcacgaattattaatatttttatagttattcatgaatttatttaattgtgggtcccattatcaaaagtgggcattagagttctaatttcttaattccagagattttattaaactgtaagtgtattatttgtattacatttgaattatgctatttttacaatttttgctcagcgacaacgaaaaatgcgatggatagctattttaatcacatgggtaagtctagattcttttcttagtgggatattggagaaaaatagaataccgagtttgagtggggttatggtttttgaccattttacccctaggcttgaattgggtttagtgtaagcaccaagggtattttgggaattaattttagggaattaggtggctgtccatttgatttatttcagccaaattaaggttaaatgaataatttaccattttgagaaaataagaaaaaattaagaaattagagaaactcattctcttcgagcactcccaaaccagaggaaaaccaacatcaaaccttgtatttttagaatattgagtgaggatttaagtagctttgaagtaaaggtaacccctagaacctttaattatgtttttgaaactttgagtttagtttgaatatgtgattttgttatttaagggctcttagggttaaaattgtttgtaattcagtttttgagtttaatttgagtttaaatgttaatttagttgctagttttgggttgtgggggttgtggatgaacaag

SEQ ID NO: 205526 - DNA, 1427 bp, Cannabis indica
acgtgtacacacttgtgcacgcggtaaatttttagtggtccacgtaatattagttttaaaaaataattataaatatttaaaaaaaataaaaaatcagaaaaaaaaaattaaaatattttttcttttttttttcaatttaaaaaaaataatttttttttctgttttttcttctttcttcttcttaatctacagatccctcccaggctctctttctctctctcatcttaccaccaccgaaaacaaacaagggagaacaaaaatcgccatttgttggttcttcatatccaaaagatttttgagagaatgaaatatgaatctaaggctcaccaccaccttaccacaacaacaactctgcctcattacacaaattaggctcctcaattaataactagttaggctacccactaattatgagtccaacatctcgtcttggatcgttggaggcgataaggcctggaatagaaagcattctttgccgctctctttctctttaagcggctgcctcctcgacgtaaagatctttgttgtcttgtaaagaaagttaagcacaatcaaatttacacgggatgtaacaatggcacactatagtgtactctgtaatttagtttacctggtcagaaaactctttagattgtacgagaaagtctcgaatatggtccttaaattttgagatatcatttcttgattcaaacaattcattcacaaatctaacgatcctttgataaaaccttcctaaaaccattaacaaataaataaaactgattcaacttggttattttttaattaattatataaactataatgattaatgtttacttaggctgtaatttggacactgatacagaagcatagcaatattgttcatcatcatcctccgaatctttactatatttctcatcatcactttcttcttctaaataaatttcccttgcagccccttccatcttccagtcagcactctaaatagtcctatacccaaattcccataaaccttcacagtttcctaacacaaaatttttaaattttgagatattattgtaaattacccagcaatattattacttggaacaacttcaattagagacccattaagaaaaatagagattcataccgccgagaaaatggagaggtcgaagctgggagatgccgattgccaagaaggggagagagatgagtgaaacgaagagagaagattggtggagatcgatgctggcaataggagttagagggaatcgtggagggtgagatacaaagagagggaaaattacagtaagggttagtgaagaaaagaagaaaggaaaaagaagagaaggagttgtcgagggttacagaaaaaaagaaagaaaaaagaaaaaaagaaaaagaaaaatttaattaattttctaatatttaaaataataaaattatgtggaccaaaaaaaatttgc

SEQ ID NO: 205527 - DNA, 1941 bp, Cannabis indica
caatcggcttgaactgccttaattggaagattaaattgcttctcaactagagccttccattttataaagacttcaaaagcttgtcctttgagggtaagaggaaatatccaagtgtacctgctgtaatcatccaagaaatggacataatatttatatccatctttggaaagaacatgagagggcccccatagatcagtgtgaattaaggcaaggggttgtgatgcacgggtatgggatatagggaagggaagagaatgacttttgccttgttgacaagcattacaaaaatggaggtcttttaaggtgccagtgtggggaatatggggtaatagtttgctcatgacttggtcatttgggtgaccaagtttacaatgccaagtggtaatgtgtttactaactgcagtatgaaaaagagaggaggtgctagacacataaggggaatcaatagcctttttattaatatcatctgaagtacatggattgattacatcatttttggaagaacaacagacagaaaacaattcacacagtaatgcttgtttcggttttgatgtggagtcatctcctagcatgtatagtccatctctaactttcccccgaacgtagaacctggccagtatccttgtccttaacaaaacaccaatgttgtgaattcaagaaaacaaacgtgtctgcagttagtttagaaacactcacaagatttttagtaatctttgggacttgaaaacagagtgaaaattaatggacattactagagatggtaaaaaagctgaccaatatgagaataaagagtttcttactaatctcaaatggctaaggtgtcatggccagagtaaggtatggctgaatccatgttgttgagagatgaagtaacatgatctgtagccccggtatcagcaaaccatatagaatcatctccaaaatcgggcagaaccgtggtgtggggctgctgaatttcttggtcagactcatgttcagcaagaaaagcccttggggcagaggttggattctttggggtgacccaagatttgtcaaatctgtagtgacatactgctgccgtgtgcccagatttcaaacatacttgacagatcaagcgagagggaggaaagtattttccattgccacggccttgagcacgagattgagaatcaagatgtggattacggccaggtggttgataagggcgtgaagagctataccgtgagttgttgtatgcaagattggcttgcattttaagagtgagatcagtcatggaattgtgatgttcaagtcggctctcatgagcaagaagcaaagcttgaacttcctcaagacagagttgatcacttcgagaggtgattccagatacaaccgaatcataatcaggacccaagccattaagaatttgcaagatgatgtcttgttcatcaatagatgaaccagcaactccaagggaatcggtaatagtctgcactttgtcacaatagtcagaaattgataaagaacccttccgaacattagaaaactgacctttgagttggagtaatcgggctcgtgattgactggagaatcgttgttctaatgcgcgccagacggaataggaagtagtgaactgagcgactgagccaagaactccttcagacatggaggcacgaagccaagacagaagaagttggtcacggcgtttccattgttgatatgcagggtttggtgcaccagtaacaagggtttggggaggaggaacaccagcaaaaaggatgtcatcaagctcatgaccaataacggtggggacaacctgggatttccaggctaaaaaattggtgcggtcaagttttagggttagggaagcagtgagggaatgggagaaagggttccatggtggtgggttagggttggtagttatcgtagcagaagctggtagatcggtttgaatatcagaggcagaagcgttgtccggagaag

SEQ ID NO: 205528 - DNA, 704 bp, Cannabis indica
ggggggttaaggctcccagaataatacaaacaatagcatttttccaaaacacagcctctatctccatttcttccatatctaacctagctacaatctgatccccaacttttaaaggttcaaaaaaattcagacaagtagaaggagtcataacctaattcccttttgaatttactccaaacatcctttgccgttggattgataattcgtcttctcgacctcctccgtccaactcactaacttaagagagctttgaatcacattctcgtcgtcgtgaacttcaaatcacattctcgttatcacaaacctttgtggctccttgtttgttctccaagtcttgacaaggatcatggaattcctctgttggatttagcactgaaccttcatcttggataagagggagatcctctgccaccgtaggtacgttagaaactgccaccactggctttcgaatcacccttttcttctttgccatgggataggaaaggggagaacacacatgcctctattaataaaggatattcatttttactcatctttaattaattaaagaaagagttaaacatgtctgtaaccagtattctctgggtcgagttgaacaacattccaatatatacttttttttttttttatctttacgcaagtaacaacaaaataaaataaacgattattattttatgtcatcaacaacaaattaaaacaaataa

SEQ ID NO: 205529 - DNA, 755 bp, Cannabis indica
aagacattgcagtatataaataacaatcagttgaaaataattctcaaaaaatgcagaattgacaaaagtaaaaaatgcttagtttttagataattctactctacatatttcttttattttccttgattaattagcaactgcatattttgaataaatcaaatggaagatacaatgattgcttcaagtgccagaagtataacacttgtagcctcttagaaatgtccaattgacacttgattggacccaaaatgttgtcaaaataaataacttacatattcacgagattgtcacgccaatcattgggaatacctcctgtcagactattatttccaagaaatctgaacatttaaacaatgcaccaagggaatttagggtacaatagaaatgacacactaaggttaatacttgaaagtttgaatcttctctaggaaagacataaagtaaataaaagtactaaactacttacaggtttattagattatccatgacaaacaactcaggagggatcgttccggttaagttgttgaaactcaaatccctgaaaatattcatgaacaaagttacaacagacaaaaatattagaagctattttaaaatatactttgtaatgtattctaagtttattgtacatacactgttttaagacctttcaattctccaataaaaggtggaattgaaccggaaatcaatgcatttctcagaattctgttgtaacaaaagataaaaggtaataaaatagttagtataggcgagaa

SEQ ID NO: 205530 - DNA, 1380 bp, Cannabis indica
atatatacaccttcttcctcactttgctaatcctgcttcactgaatccatttgatgagtttcccaattgtttgggttgaggtcttccaatgcagtcaacttttcacttcttctaaacaagctgaacttttagagcaccgaaaaaatagatgatcaattgatcttctaatccacattccagttagcaagagtcacttgatatgttatatttaaacagtagtttctttgtttgaagcttataacatgactaaccataagataaatctgtgcttaggaatattggttcttccccacacttctctctgccaagttactgttacagccactggtttaatcatgttgtagccaagatttatgctataatcagtagtgaggaacctttggtcctccactacccctttaaatttttccttgaccacaattatttgtttccagtaccacctgggtgaatttggagctgtatattcccaccagttctgaccttttatatatacattatgaatctatctaatccacagattgttttgctttgtggagatggcccgtatttcctaattgcagctgtgttccatgtcattatatctctaaatccaagacccccttccttttttgaagtgcaaacttggaccaagcaactttcctcggacttgtgtgttcagctgtacctttccagagaaaggcccggcaaatggaattaacttttctcagcaagcttttgggtagcagcataatctggatccaataggaatgtaaagacatgagaacaaagttaataatcgttgctctccctgcaaaagatatattccttgaattccaagttctgactctcataaccatcttttctatcaatatatcacagtctgcttttgaaattctccttgcaaaaattggaagtcacaagtatttgaaaggaaggtcacatctgttatacctcgacacatctaagactttctacatttcttgagtttccataccacagcaatagctaacgatttggtctcatttggaaaaagtatagagatttgggagaaaagctttaggacctgtagcaagtaataaaaggatctaaagtctcaatggcaaaagagtaatatatcatccgcaaaactcggatggtttagctccataatacacgtgcatctatcatgaaatctgaaatttgacttttggcccgcttttttcattattctgaatagatattctatacccagaataagaattagtggtgataggaggtccccctgtctaagacttcttcttgcttcgaaatacccatacattgaaccattcagcattaatgaggatttaggagaagtgacacataccataataagttggataattggttctggaaattgcaaccctttaagcatttcttcta

SEQ ID NO: 205531 - DNA, 740 bp, Cannabis indica
aggaatgtaaagacatgagaacagagttaataatcgttgctctcctgcgaaatatatattcctcgaactccaagttctgtctctcataaccatcttttctatcaatatatcagtctgcttttgaaattctccttgcaaaaattagaagcacaagtatttgaaaggaaggtctcatctgctataccccgacacatctgagactctctacatttcctgagtttccataccacaacaatagctcaggatttggtctcatttggaaaaagtccagagatttgggagaaaagctttaggacctgtagcaagtaataaatggatctaaagtctccatggcaaaagagtaatacatcatccgcaaaactcatatggtttagctccatactcgtgcatctatcatgaaacctgaaatatgacttttggcccgcttttttcattattttggatagatattctatacccagaataaaaattagtggtgataggaggtctccctgtctaaggcctcttcttgcttcaaaatacccatatattgaaccattcaggattgatgagaatctaggagaagtgacacataccataataagctggataattggttttggaaattacaaccctttaagcatttcttctatgaaattccactcacttgtatcatatgttttccttagatccagcttaatcatacaatttgctcgagtgttcttccttctataatgactaacttgttggattaaaatctc

SEQ ID NO: 205532 - DNA, 914 bp, Cannabis indica
atcttaattgctattctctcatgaaattgttatttggtttgttgcaatttgagaaggatacatcatcactatccattacttggtactatccataggaaaggctgagatgtctatttaaaataaaataatgcatcaccacttccctgatatatggtcctcaaatagaaaccagatatctatgttcttgtttgttgttataagaaatgaaggaataatattcacattttctatattaagaagtgatgcgcatatatacacacctataaaatcttaggaaactagaaataagctaaatgacaacttgttacctataatttatagtatacgtaagaaattagaattaagctaaattacaacttgtcacgttatctataatttatagctaacactacgtctcaagttggagcatagacattaattatgcccgacttgttatgaagataattaactccaaccccatttaaagaagtttttgtgaagatatcccctagctgttctccaatcttaacattatgaaaaccgtgccttgttgaattttttgtaaacaaaataacaatcagtttcaatatgcttaatttgaagagcagcctggctttcacaccataattttgttggtatttaaatcttgtcccactttagtcaatatatccacattacctcacacacatactgtgtctgcgctaaatcatgacaacacatatttgcttcttatttttctatgagaccaaattccctcccacaaatatataatatcctgaagtggatcttctattcattttgaaagttgctcgatctacaatggtcaagcgcacccacatgcgctaatgcatggagaagcaaccgatggtgcattaggtccactcgcaacgaatctaagctccagacgtcggggtttagttggttagtgtctggac

SEQ ID NO: 205533 - DNA, 662 bp, Cannabis indica
attattatcattgatgctcctcctgggacatacgccacctgagtgggacagaccagtctcgggagaatcggtcttattctgttggcaataatcttggagagcaccttataagccacattgcataaggagattggtctaaactgagtcactttcttcggattgggcacctttggaatgagaattaagttagtcgcattaatgcccttatgcattgcacccgtaatgaagaagtcttgaacaacttcacagaaatcctcgcctaccgaggtccaataatgcttatagaacaaggcagacataccattaggcccaggagcctttaaactccccatggagaagagtgtctggcgaatttcctcataatcggggattatcaataggtcattctgttcattagccgagaggtgatctactataagatggtctaagcgttccagcggtcccttaacagtattggtgaaaatacttcccaaaaagctggagaattccttgcctatgtctcttcggttgctaatccacaccccttccttgttcaaaatactctccactgtattacgtctatttctaatggtcgttgtagtgaagaaaaatttggagcatttgtctccctctctaatccaagatatatgggctctttgctgccagtaagtggccctctgcct

SEQ ID NO: 205534 - DNA, 608 bp, Cannabis indica
attttttaaaaaattataggaataatattgtaactataacgaataatgctataaaaaaaaatttaaaaaaaaatatttcaacatttaattttgagcgtgaaagttgactaaaaaattataattagcactcctatttaaataacaataatttaataattggttcaatactatataatccttatgtatataataatgaagaaattgatgtaataacactaataccatattaattgtttcaatttatttttactttttctaaaatctttttctaaaataataccaattattaaaatgtaaaataatcttaaatttagaaactaaataagcaaatgtcattttttatcaaaaattagcaaaataataaaatataataaattaactaataaaaattataaaaatacattaccaccattatcaccactaccaccatgccaccaccattatcatcactagatctattaaaaaaataaacaccatatacaatacaaaaacaccaaatttaattctatttgggaaggagaatttaaaaaactacatatctaactacgcagtgaggacgaaaggaatcgtataggtgatgagcatggaagaagaagaaagaaaaaaaa

SEQ ID NO: 205535 - DNA, 2237 bp, Cannabis indica
gaagcagggagttgaagcttgtacaagtcttcactgagagtaccctgcagaagaacttggttggtcctcttgtccttaaacaaaccaagaagaggaatcaaacacaagaacaacattattgtctttggtgaacttggaaatactcaaaagatttttagaaatactaggaacatgtaaaatgtctttcagaattaaagaatgattggaaagatttgtgtcaatggagttagaacctatgtgcataatagggatagaatggccattaccaactgttactttggcttttcctttgtagtcctccttgttttccaattgctgagaatttgatgtcatatggtgtgtggcaccagtgtccaaataccaagcaacaccttgatcatcattttgacttgttgtagacagatttgcctgaggattgtcactgttagatgttgaagcaccaggagattgaggaccagtaaaacttatatcaaatcgattataacatttctgagcagtgtgtccaacacgtccgcacaattgacaagttggcctgttgcctctaccacctctgttggtgaaattggatctgcctgctcctctgttggatccacgatttcctcgaccataaccttgaactccacggccatatcctccacgatttgtcataccagcaaaatttgcttgaacattctccaaggcagcactggtttgctggtttattcgaagctcctgactatgaagcatgaactgagcttcttggagagttaattgatcagttcttgaagtgagattgaccactacagactcatactcaggtccagacctccaagaatgtaaagaattaagtcttcatcagaaattggatgacctgcagcagcaagagaatcagcatactttttcatcttgagaaagtactcatcgatactcatagagcctttcttggtggactgaagaagaccacgaacttgaagaagactagctctggatcgagtggcaaatagctgattgaagacattccagatctcagccgaagattgacagttgatgacatgagccaacattggttcagatatggaattcattagccaatgcatgagaaattgatcaaatctaatccagttttgataggcgggattgggaacattacctgcaagaaatcgatcgggaatttgaattgttccaaggatgtagccatccagatcataagcacgaacagcggccaagactaaagatcgccagaatgggaagttcgttcgatccaatcgaagatttaacggcaacaaattattgttgggaagatttgtaggtgcaggatttagaacagggactcgttgttcagccattggaggaatgggacgattggttggtgctgactccatacagctctgataccatgaaaggattcaatcaacagattgaatgtaaagaactgagagatgaaagaggaagatggtgaaatggcttagctgaacttgtaagcctttgaattgtatattgagaatatataattacactacatagcagctgaaatacacaagctggcaaaacagaatacagttagatgtacgttggacaaagaaaaggttaaacagacttaaccaattaactaactgtcctaaccgttttctatattcctaacatgtagaacacctatgtgttattaatttttttttatgtgaatgtgttaagttatttttgataagtgatattctgaaataaaaatgagtaataaaattacttgtcagtgtcacataaatgtattaaatttgtaattaatttatatgtaccacgtattattacttttgggattaataacttgctattttattattattattattattattattattattattattattattattattattattattattattattttacactaaatttttgctaaattgttgaaactaaacttcatacaaaaacataagaaattgttggaattttatcaaataacaatcctacgttctttttcttatataatttcatatagatcattgtgtgtttaataaaaaaaaatgtgtaatgttttcttaaaagtattaaatgtatacaattttaaaatataaagtactaaataatttgaaaatataaaataataaaatgagtataggaaaaaaaaaatgaagggtgtataatttttagatagataatgatcaacatataggttcggtcacaagatatgtgtaatcttcttcgaatgaatgaagctcctgaaaacagtttgtctcttggccttc

SEQ ID NO: 205536 - DNA, 866 bp, Cannabis indica
ataataataataataatatttactattacaagtcctattttactgtaattcgaaataagtggtagacattaaggcatgggaagttagagtaactgctgactaaaaaaaataattaataataagagtagaagtttttatgcctggatttcaatggtttaagtctagctttgactatatgccccgtaatttggtaataattatttttttttaaaaaaaaacaaagagcattaatactaaaaacaaattaaaagtattattttgaattatatattacatgtaagagcattgttattaagtatcagtggtgtttaagcactttcttgacatgtcacgttgcgattaattagcgatactctctaaaagttattataaactatgtgagacctgatatttagttgtaccaatagcaatactgacacatagaacggtgctagacaccacttgtatcttttaacatttctctatatgtaatagagtggtcgaatagccaaaaaaatatacacatttaaagttatgctaagtacacgttaaaaaaaaagttatgctaagtaatatgtaaaattaaaatataatttgaaaaaatatatatttttttcattttaatttaaaagagaagatgaataggaaaaaaaaatgtgaagggaaatggaagtacagagaaaaaaaagaaaataaataaataaatttaatgttaataattttttattttttatttaagaatttttttttatattttttaaaaaagtatactacatgactaatgtaaatgtaaatttaatctactttgataattaataaaaaatggaatgaaaatataaatttgcaaatggaaatgtcgtttgattggtttagctataaaaaaaaaa

SEQ ID NO: 205537 - DNA, 1396 bp, Cannabis indica
ggtatttttataaataaaatcaattttaggtataatattgaaaattccccttatttttaccatatatatttatttatatatatatatattatttgtatttaattatactaatattagcaactattactatttttctaaatatttccatttctactgtcttaatagaattattagagaaagacacaaattttggatagttgtgggcgtggatacacggggagaatgcgagcgtgggcaaaggatggtaggaagggttgttgcatgcagggacaagaatggtatgggcaaatggtgaagatgggaagtgaaataataataataattaataaaatttgatgaataagataaataaaataacataaaattaagatgggatatgagaactgattgtattgtattaactgtcaagcgggtggggagaatagtgggggctttatttgggaactcattattaacctcatcaaactctcctactaaccccacaatctcaatctatatttggactatgggtcccaaattgcggtgttaatgacttatatacctatgtactacatatttatttacagagtgaatattcttttttaggctaaataggatttttatccctaaattttaatatgtactaaatcatactctctgaatttttctaagagttgaaaattccccctgaattattgaaattgttaaatttaaggattttaatttaattttattcaattttactatttcaaattttgtttatttactaaaaaccatgctccccaaattttaatatttaccgaatcacgcctcttgaactttgacatatactaaatcatgccctccatgttagattttttttactataattaaacaaaagttcttaatccaacaatctcaatagttcagggggcatttttaacgaccttaaaagttcagtaagcataatttagtacatgtcaaagttcggaggtaaaaatactaattaaccttttttagataaaaatagaaaatttcacccgttcaacatatatcttcattcttacagattaaatacttaaaactatattttcgttaattcaaatcatattcaaacagaaaaattttaccatatagattttaaatatttttaatttcttatacttatagattgattttttcctaacaaattaaatgtgtaaagttacattatattatttttatcagtcctgaaatcatattaaatcagattaagttgacacatatcaataaatttgtggcctattcatattttcaaatatattaacacatgtcaatttagtattcttattgaatatataggtggactattaatgtattgacacatgtcaacttaatcaattttaataagatttaacatattcgtggtgatgtaagtaacaaaataacaaaaatataa

SEQ ID NO: 205538 - DNA, 2802 bp, Cannabis indica
gtaaaataatttccaacaatccgggaactctcttctagacttgactatcattccacaagaaaccttccaggatggccaagttagctattcgggaacgatgtctgggatacacctaactttccaagaatgatattggagaccttttcatttgatgaaactataccataaattccacctagttacttcaaattaaaagagtgacaatgataaaaaagaatgcagccatcgttggttggtgttctaggagtcttagtatactaacttctgagattgatcaagttcaagccatgcttgaacttgtttaaggttaagaccttagttccaacatcagcaggattatcttcagttccgaccttctctaaatcaatcagtccttcttctatcttctctctaatccagtagaatcttatatctatatgtttgctcttttcatgataaactagattcttacaaagatggatggatgactgactatctgaatacacagtcactcctccattgatttgtttcaattcataaagtatttcgcgaagtcataacgcttccttaaaatcttccgtagtcgccatgaattctgcttccatggtggaaagagcaaccatagattgtaaccgagatttccaacttatacagttccagattgtcaagaaatataagaaagggttaattttctagtatctctattcaaggcatagtttgcgttcacaaacccttttaactctaattctccatttgttttctcatagattgaaccataatcccgagtgtctttcaaatatctcaataacaatttcagggctttccaatgttccatgcccgaattggacatgaattggcttaagatgcttaaagcgtgagctatatcctcgtgctcaccatcacgtacaataaacatcctagaaccacagcataggatgcatccttcatttcttctttttctttggtataagacattgatcctttgacaacacaaactgaccccctaacggaacagaggtactctttgcatcttccatgttgaacttctgagtaattttcttgatgtacccagactgctttaagctaatagtcccttccttccggttctgtgagactttaataccgagtatcttttgatctggtttaagctctttcatctcaaattctcttttgagcttggctttgatacttttgatcacgaatttatctttgctcatgatgagcatatcatccacataaagcaaaaagaacacgaatgtagattgctccagattcttgaaatataagcagtgatcgtatgcaaaaggttgaacctgatttgatgcatatacaaactggaatttcttattccattgccttggggatagtttcagaccatatagggatttgttaagcttgcacaccaattcaactcctttcccttccacctcaaacccaggtagttgcttcaaatagatctcttcatcaaagaattcattcagaaaagcagtcttaacatcaagttgttcaactttgaactccaattgagctgccaaggacaaaattaaccttattgtcttgtattttaccacaagtgagaagattttcatgtagtctataccttccacctaagtaaaacccttagccactaacttggctttgaatctcactatttcattctcattaattccctctttcactttgagaattcctttacactccataatcttcttgttctccgacttcggtacaactacccaagtcttattctttcagagtgaatctatctcctcatccatggcctgaagccatttagccttgttttcacatgaaatcacctcttcatagctttcgaactcttcaattttaatatgtcgaactaccgccagtgtaaatgctttatgtttgcttctgcgaaccttgctagaggataaatctctcttcgggttctatcacaagccaactgataaccttccaaacctgtctattcgaattcttctagcacctttgtttggtcttcattatcttgttcttctagcttcgtagtagcttccgtttgcgcattatcttctcgttccatgctaactttcgcctatgagccttcttctaggagcttcgttctgtactccatttattcctacatcacacggagacacactacctttcttgaaggttaagtgaggatattccaactcattaaaaaaaatatatttctagcaactacaacttttggtttacccttcttagaaatgtagattctatacccattggttcctaaggcataacctaagaaagctcccttcacggatctgttgggattttatgccctaaataaaatccatttcgatataatcatatttattaattaataaaagattaaaaatcattttatgctacatagttcatatgaatatatgtttaatgtataaattttattaaatccaaaatatatatttattcatgattataatgttatctacacagtgaaaaataatcatgattatatgtttaaagtttatgtccaattatttgacagtacataggatttacactgacgtgataatcaacgataaagtttacttacacttggattgtctatttcagagtattagtaaagtatactagtatcaaatgtatgcagtatacactggactggaccgatattgacattggataagatatcataaacttaacgttatatctttcgaaatcaatattggttagttggtcttaggtcaatagattttaattctgatatagttaggttcggtcttaaatgtattattcatgttctttgacttgttcgttaaagatgaccaagtagatcttttcaatacttacatc

SEQ ID NO: 205539 - DNA, 730 bp, Cannabis indica
atgtttggttgctgaatggctcgaaatcaagtaggaaaagaggctctgagttggttgaagacaacaattttcatatgtcgagctggagtttatagtttggtggttgttgaggccatccaaaattctattcttttggttttattttttaaggattgaaagactttgttgagtttaaattttgttattttgcatttttttaaacaatgaataaattaggttgcctatttttatttttattttaagaatttttttggctaattgtatattggaagagactatgaaacctaaattgttatctatttttatgtgcagttgttttatttattgaagatgattttattcaaataataataataataaataataataataaaaattatgtaattattatacgtattagatcatggagtatgagcaagtataataaatatgattcaaacattttcataattttggacacttatgtatgaagataaaattatttataacccaaaactagaaataagtaaaagattaaataagtacggccaaaaataattatgtttaaattaagagtgatcattcaagtgaagttatgatatgataatataatttaaattggatattaattattatgggttataagtcaaactaaatgatacgattattgtttaaatcagattaatgcatgtgatataaaatcgatacgaattaatttatttatattcagttatattattaaaattattaa

SEQ ID NO: 205540 - DNA, 708 bp, Cannabis indica
ttgttgtgagtttcatttacgattgggccttgagccattacccgattgctaactgatttccttccagtagagagttcccaagaggttctataaagaaaaaaaatgccttagtcactagctcgagttgatgtatcatattaccatgctaatcttgaatagaataaattccattttgggtcctccttgcatagatactagtatgaaacaaggcagaatttttatctccatctttttgttgaaggaaagagatacaattctaatgagctacctcatgttggccctgaactaacttttcatttgtgatcatctccttgttgagtggatctttccctagctcttcttggcattctaacagcaactgtctaagtcaaatctcatttgcttgcacatttccaaatttatttttattcagctctttcaacaccacctttaatgccttgagtttttgaatcaatcttaacataggagaaccaacatagttcttgttccaaacagatttagactgttgtaagaaatttggagctttttgccaaaatctaaaatacctaaaaaattttttcccttgttggacattcgggtacaccaaaagcaaagtaggtgagtgatcaaattcttcctctgacataaacagtacctcgacagtaggaaatttgattagcaaaaattggttagctaaaacccgataaattttggagtagattcaagttt

SEQ ID NO: 205541 - DNA, 545 bp, Cannabis indica
tttaatatatgtcaaagttcgatggggcatgatttgataggtatcaaagtgtggggagcatgattaagtacataaataatcactgaaatagtactaaaattgaatggaattagacaaaaatctttaaaaaattcaaggagcatgatttagtacatgttaaaatttaggagacgaaaatcctaattagccatataaaaaataaccacacgtatactcgaaatgaactacatacttttctaaatttttaagaaattatttgaaaaatacttacccattattatgggaaatgaacatgttcatgttttctatggtggacgaggagcttattggccatcgtggtaactccggagagagagagagagtttgtttctaatatttctaaaaaattaaacggagaggtaattttggtataagggaattaatattagcataaaatagtataagataacaaaggataattaatttgatatatattaggggatttttttatgcataattaatgaaatttcttaatataaatacatgtgtgtatatattatatattg

SEQ ID NO: 205542 - DNA, 1738 bp, Cannabis indica
cgtgtacaagaatgtacacgtaaaccgtctacgatgacagttaatcggatgacaccttacatttgctaacagtttagtagtttggacggtttcaaccgtttaaaatttaaacttaaaaatttaaatacaaataaaatgatatttggaagggtttaaccttgaaaaatacttattattattattttaacaattattattattattattattattaaaagttaataaaaaaaagttaaagcaaaagtatgtaccataaaccccactataaacaattgctagtcccacaaatatacatggctagcctataacatatacatatgttactttataattattttattaaaaaataattaatatcaaatggcactttctcaactcaaagcattagttgaccccagtttaagaaaagttgtggatatgctaaataagtaaatatatgaaaaataacgctcaattattattatacaaactcaattctttatttttttttctattataattattattatatgaataaataaacacattcttctaacttggtcatattttgaattttccttatccaagcttaatttaatagtatagttttcattttgaattcgttacttcatatatcatattcatagatgtattatgtcaattggagatattagacaaaaaaataatttttttttttagtaaaaaaattaattgtgtatattttttttatgtatatagtggtaaaaaaatttgaaaaaaaaataataattgagtcttcttcctgagtaaaattttggtatagtatttataaacaataaattgggtcttttttttaaaaaaaaaaatacatatatatattttttaataaaataatgacaaaacttttaaatagaatattttttaaaaataaattagttttctgaaaaaagttttgggctaggttgggtaagggcctaacttgccctacctttgggctaggctcttcattttgtaaagcgattgttttctcatttttccagcatttattttcaaccacacctaatagtaataatcataaaaacaaaagctaaaatctcacttttcaaacttcttttcaatccattcttagttctaatcaactgccaccacaagtgttttttcttatctcaattgaccatttaattacacttcattcatagaacttcttcactttttttaaaagcataaaaccctatacaaaatggcatacatgtctactactcactactcttgatagtaaaccacaaaagtttagtcctacctacaaatataaacattttttttttgtgtaatttactcattttcatattaataataattaaaagaaatatcatttcctaataatttttgccaaaattagtgaagataattcattgaagtgcttttgaagtggtaaatacactcacaagttcatgggaaaattacaatggtttatttatagagaattgatggttaagttttgttagaaaaatgtagtaaaactctggtggctcattttcaatttgtgttgggccgattagcttggagagaggtgcccgggaaaacagaaagagttacattttttgggtaagaattattttaaattgaaaataaaaaaatgagtattatatttgtatccggtattattcaaaataaaattagaaactgacaaatatgaaacccgaatcaagaataatgggcctgtggaagcccaagcgttgatctcaaatgaagtttacaaataaagaggaaattacactct

SEQ ID NO: 205543 - DNA, 663 bp, Cannabis indica
ttggtgataatgcattatttttaatttggcggctttgacacagtcagcagttgtggaggctcggctcatgcaacgattttaccagactatccttttgcctccaactcaccaaacacaaacatttgactcaaacatattcagattggtaattttccagtcaaatctaaaacaactccgtgaaacaaactcataataaattattctatgccgtttcactttcgatctttctgcggtgttctgcgtcagcccttacgcaatattcatctccggggtttcccggcatcccacatttttcggtagagattctgttcatcctccctttcattacatatttttaaaattattttgattttgacttcgcttctacttgttgttttaatttctatatggaaatcgacaagtgcaagaatttcgggaatggcacctccgattctttcattagctctcccttcggagactggtcgagttctcagtatccagtctcatacagttcaggtattcatagatacttcgtaattaatttctgtttggatgctgagagaaagcgaattaaggagataggggagtgaatttctttacaaaataggggataccaaatatagttaatacgtttatgaattgcttgagtaaactgttttaggttggagttggaatgagatcagg

SEQ ID NO: 205544 - DNA, 739 bp, Cannabis indica
ttaatattatacatattgttatacactttattaatttggtatccacttttattttactctctagctatacaaaataaaaggtcacgttgattatagtaactaaagcggacccaaccccatgaccgcccttaatgccacgatcgttgcgtcacgaggggctcacgtggcagtccacgccagccaagcaagcagctccatgctgagtcaaacaactcacgtgtgaaaattcctctatccaatgaaaatttgccacgtaagaagcaagtagatgaggatgcacctctgccacaagttagttgaaacacagtgagtcacaaaagagagccgatctgatcctctagacttggcccaggcttggctcatatataaaccaatattgggtctaactattattgacagaaaatgttactatcatttgatttgatttcatttgttttgttttgctttgttgatttgcacattttgtcagtcttcttactccctaaccactagtgttttctctttaattaattttcccatttaatttcaattgtatttggtcttctaattttataccacttttgggcaatacgtttacttttttttgagttagcaaattattctaaacaggcaagactttcactaaactataatatagctatattgggacattgttcacaaatgaagcttttgtattattccatgcaggaatgtaaaagaacaataaaatgagccctaaatttatttgttttttaaaaat

SEQ ID NO: 205545 - DNA, 854 bp, Cannabis indica
atatgttttttcttttttttaagtatttaagacagctaagcatattcaaacacttgaattatgcattttgggtgggaccatattcatctccaattttttggacaatttttattttatttgttcctatatacatatatagtaaatttataacgtacgtggcatataaaatatttaataagtggagacatgtgaaacaaacctccaagtccaacccatgctcaaataaaatgcatacaaagtacactaaccataagtcccaaccactcttaattggccacttcatttcaattccttgtaacaatcgttacattcacaactcctactcgaacgttctagaactccaaaatataaattaaaaaataaaaccaaacaaacaggttcatttttcattttaaccctcttttcagtttttctgcccattgaaatggctcaattgatgtagttctctttaattaaattgtaaaaataaaaaagatgatctagttctaaatggaattaattaattagaactgaataaataaaataaaataaaataaataccccaaatattcacattcactgattctaaattattttgatatgaaaattgaaaaagaaagatgagcatgggatgagggatgagaatgaaatttgaattaaaagaaagatgcatgatatgggtatggagatctgggagtggcttggcttggctagtagtacaagactagtcgtctggaacacacagtgcaaaaatacttcctcttgatgttgaagcacattggaagaaaacagaatctcctcttggtttcaacatcaatggcttccacctttccaccgcatttagggcacgatccaggagcctgttgtcgtcccag

SEQ ID NO: 205546 - DNA, 778 bp, Cannabis indica
ttttaaaaaataaatataaatatgtgttgattgaatttaaaccattatttttgcatgtaaatcaacatctaatttatacaagtacgaattttaaattattcaccctttgcaaatatttggttgaattagagcgtacaaattaaattaaattggatattttattttatgaaaactcataattatcctttagatgtttaaattaagaaatatttttgttgttttgaaaaagaaaaagaaaacgaaaacaataataaaaaaattatagagccagaactggagcatgtggttggtcttaccagctgctgctgcatctatgttgcttgagagtaagtacttcatgtttaggtgtcaacatttaataaaagcaaaatccattatggacagaaaatacaaaaacaaacttacgtgtcactaaaagccaatggcgcgcttattcgtttctcaaaaacgacaacgttttatttctactctcttctcttatcctttcccatcaaaacgatctagggcttctggtcgttttggttctgtgtgcactacaaacaaacagagcacagcacagccatttcttttttctttcttctgaattaactacaacaagaagaaccaacctcaaacttccttccgtacagcctcagaggaacagaagaacaggttagttacttctactcgatctctcttcattttcacttaatgtattttaaacatttaatcttgtcgtatccgaaattcaaattcatgacctgttatttaacatttaataatccaagacctgtatatg

SEQ ID NO: 205547 - DNA, 1065 bp, Cannabis indica
ttaagaacacatatatttagttttatctgctgtttagaaatcacaacagttaaaactgttacaatatgttcatttaacctcgtaacttgagcactcaactattgtgcaagaccaaaacactcaaaactatgccataaagacaagactaaaacactcaaaattatttcacagagccaagaccaatcgtagtagcaaaaattgagtcgcaatatatagcaagacacaaccccgaccaagtcacgcctatgcctagggaaagttggcgagcctagccaattatgtttattttcagatgaacttttatttcataaattttatatgcatgttttctttgtgagacagtctcgtttttatgttaattgtgagtttagtttaagaaatggccctgctaaacttgtaaatttccattaccatgagcgatttgctctgagttaataaagttggtgttttattaataaaagattaatacatttacaaaacattactttttaaaacaaaatattcattcttatagcatcacctgttgttaacaatgtcaaacatgacaatacaaatctatgacatttgaggctttggtcatgttagtgagagagaaagcctcactgaacttgacaagcagagattgtttcaaggtggattgagtggcaaattttatttttgtgaatagtgtgtttatggtaaaagttgcagggttgaactccactagacaacacactaccaatgaaaaattagcctacatatactctgatctctggggttcatccaaaatcaagactctataggaggtgcaaactattttattagcatcacagatgacttctttatgaaagtaagggtgttccttttgaaaaataaggatgaggttttcaaaacctttgttacctgaaagaagttaattgagaatcaaaccgggttcaaaattagaaagctaagaactaataatggttgagaatgttgcttaaagcaatttgatgaattctataaggaacatgggatagctagacacttaatagttagggatacacctcagcaaaatggccttgctaaaaggataaatagaactat

SEQ ID NO: 205548 - DNA, 872 bp, Cannabis indica
tattttactattttaattatatatgcatgaccacataatatggtcccagccagtattatccacccacccacctgaaatagtaattaagctctttaatattatttactattgatataataattaattaattttatatatatcttagcttattgtttttgcattgaatgacttatccatatggtttgactagatcattgtgatcaaagtttttatatatgtgggacattattaatgggcgtgcatgttatgggagactacatctacaatatatcttaccaattattttcttaataataatctttgtttctttaagcaaatctctatatataaccaacatgccattttaaaaagtactagagaaaaaccaaaaaagtacaattggttctcctaagacaaattataatgagaaagaatcacatttcacttaatcaaatttactatagtatacttcaacttttttttgttcctcctcaataaagaatgtaataattatatatatagagaggccgatttggttgaacttttttgaaatgttggagatatcatgtgcgattatataaagcccagtaacagtttagttactttcagatcttgattatagatttgatcacaattgttgaataattgtctttttctttttttttttttttcttttaccttttggctttacagtatttattagctaatgattttattacctttatgttttaagtattatataataggctacatcatgatcattagtatatgtattaaaagttgccaaaagtctttttgtttctttctcataattatttattgggcaaattaaggaaagaataaaacgagtttaataagatcttttagtaagatcaacatcaaaggaaaacgac

SEQ ID NO: 205549 - DNA, 1074 bp, Cannabis indica
aaaagggaaaaaacgaagaaaaaaagggtagtgttcgaatatgggaaacgtttataacgttacctctatggtgttcatattatgggataaagtgagggtagatatgccaacccgaagagagtaccaagcgtcaagctcagggcagacatcataactcacaagtaacctaaaaaatctcaaggttttaagcatatataagataattgatgaaagatttcagtttaactaacatgcaatatgagaatatacaaggtcaagtagcttaatgttgtacagcagcatgtggaaaaatgaaatccgaaaaagttcaaagtttaaattttatttttttttaacaaagttcaacatttaagttagtttaacaaacttcacaaaaaggtcacgtcgtatgggcttctctaaggaaaaaatggacaaaatactcaatcagccaaatgcacaaatcttgcattcaaacttagtcattgtgaatatctaaaacaacaacgataattttttacgaagccaaaggcaggaaaaaacctctttaaactctgacttacgttgtagctgaataattctcaatcttagaaaggaagaaagaaagaaaaaattattctaaaatgaatcatataggttggataaaacaattaaaaacttacataaaaaaccttgagtgggatgtgtccattgaaatcccagtccttttgaaatgtacatgtaatgactatgatctgaacattaatgaatctatttcttagcaaaagccattttatactatcattggaagaacgtgaaagtacaaaatcaaatcaaatgtaccgtagagtagatgcttcctattgttgcatagaagatgagcataaaaaaggccttatagttccaataaccaacacagttatttacccatagacaatgatgatcctgcacaaaattatgtataagagaataaaaatattaacaaaaacatcattgaagccctgacaaaagttcagactggaaaaaaaggaaaccaccttacccttaactccttaccattcttaaaacacaccttctgcagactcggcaatgatgagccctcggaggtttgtatgt

SEQ ID NO: 205550 - DNA, 511 bp, Cannabis indica
gaattagtttttaaagatggtagcttagaaaatttgttgtagtagttttgattaaaaaatatttttcaaatttttgattcaaaatatctgtcaacccatatccagctttacattatctttgatgagaagaagaggtgaattaatttaaattgataattatctatagtttctttttttaatatgtattaaattgtgatttttgttaataagaatataatttaaaaaaaaacaatatatgtacaaatataattaattataaccactaaattatcatttagattttaattaattgagatattttatttaaataaatatactaaaaaacaatatgaacataaaaaatcatatctatctttcaagaaattgaaatattttttttatgtatagtaaaacactactaatcaatattaaaattgaaatataaatctataaacaataattaatattagacttgaaataaaaaccttaaactcaaaacaatctccataaaaaaagttaccaacaaaaaaaa

SEQ ID NO: 205551 - DNA, 917 bp, Cannabis indica
tcaactatatcaaatatattaaagaaaagggtagtgttattagttattagtagtacctaatttaacattagttagtgatattttataatagtgattagattaaattatatagatctcgatatgtaattaactgtaccaatagtgatcaacatgatattttgaagggtattaagcaccattgatgcattttaaaagaatattactattagacattaatggtgtctagcatcttctagagtgacgtcacactattggttagtaatattttttaaaaattattacattaacttatatggactcaatacttagcgatatgacacttaattaagaaaggttgtaaggcaccaatagtgcattttagtatttctctttttaaaatgctaaaattttacatataagtatcgaatcctacatgatttaatataataacttttatgagatattgttaaccattcgaaaaatatctcatgttgatggcagggccagcctaagcattcaacaacttgggtcattgcacaaggtccaaattctttttattttgaaagaaaagcctatttcttttcttttttcttaaggtaaatactatttagaccctgtgttttgcaaaagtcattaattggactctatgttttgttaaatgacaaaatagaccctgtattttccaaaaatggtacaaataggaccctgaactaatgttttgtcaaaataaaatttaataataattcgatctgaaagtgttatgacaaaactgtttacattttctatatttgttcgagttaggaattgtcttcaagttggttatattaaaaaaaaaacgttgtcaaaaattaagctcagagtcctagttttaccattttggaaaatataaggtcaattttgttatttaacaaaatagagggtccatttagtaaatttgc

SEQ ID NO: 205552 - DNA, 723 bp, Cannabis indica
ataacacatagttttttttgttccttgaacgtttttacactactaagttatgacccccttatattatatgagtcgttaatacttaataacacctctgaaatttaagttttataataacttggtcgtttcataatattctatttatttttatcgtgaataagtgacgcgataaatggtagttgataaacagatgaaaactaaataccttttacatttttttactttaatgattaaaaaatattaaataattataaaaaagaaaaagtcttttattatactatttattaatgtaaaaatggtgaaggatatttagtttgtattcaattattaactatcatgatcatttcacttgttttacaataaaattgaataaaatgtgacgagagaattttattattgtaaaaattatattttgagtgatattattaacaaattgtatagcataagagacataacttagtatagtaaaatatttaaaggacaaaaaggttaattattttattaaaattggctaaaaaaaatgtatatctactacttttatagggatgctccattaattgatgttatcaaaatgaaatcacgcatacctttaaaaaaattaccttttttctaaaaataaatgtatataaaataaacttaaagaaatgtttgtagtaaactttttagtttagacctcttgtttgtttggtacatttaataattttttttttttattttgttatc

SEQ ID NO: 205553 - DNA, 702 bp, Cannabis indica
aataaaaaaaaattatatcacaacaaatgagaactacaaaataagactggtcatgatgagaactgtctgaaacaaccattgccacttaacaactttactatttaaatccccaacgccagattgttgtgccctgctgattttgggtgctggggcaacttcagcctctggtatgtcacatactccataagtcatatttggctgtaaatatatgtcacataacaatcaattttagtactaattatttagtcaatcacataattaataaacaaggacttttttgttttgttttgggttcatgtaactaaagtgaatttactcactctgcagttgagaacgttcccacatccacaaattaagtggccatttgcaacatctgttgcttctgaggccccaccaccatcactcctctgagagatttcaaaacaaaaaaaatatataagatatttaattagacctaactagctagctaagttacatcttaaaaccaattaataatgagaggagtagctcattcattttatatatgataagttatttgaaaaaatcccacaaggttaaatcggtaaatttgtaagtgtacacatggaaactgacatacattggccgaaaagtcccaaatgaaagttaaaagagagaaatggaagttcttagttttggctcgtctttctgaatcggcaacactttagactcacaatgaattac

SEQ ID NO: 205554 - DNA, 1710 bp, Cannabis indica
gaagatgtaatgagcactctcaggtcaagagatgctgaactaaactagaaaaaggctgaaaaacaagaaacaagaaatgatgaagccttgatgattcgaggaagacaaccaagaagaggaaattccaaatttagggatcaatccaagtttagaaatcactcaaggcacaagggacaagatcaaatcaagaccaaaggaaacaagaaaatgctaccactgtggcaaagttggccatttaatcagaaattgctgggaacttagggacaagaaaatgcaaaataaagatgaagaggataaaggaaatgactcaaatgttgctgttgatgatcactacagttcaaatggtgatgtttttgttattatcaaggaacaaagtaaaaacccaaaggtaggagatgcatacacaagttcagatcagagggacaatgatgaatggattcttgacagtggctgtacataccacatgagtccaaataaggaatggttcattgactactctcaaattgatggtggaaaagtcatgatggggaatgaccacaaatgtcaagttgttggtattggcacgcttctgatggcactatcaaaacactcagaaatgttaggcacattcctgatctgaagagaaatttaatttctcttgctactcttgatgatgaagggttcgagtacaagactggtaaaaggattatgacccctgcacaagctactgcagtcaccaaaggcatcaagaaactatgacccctgcacaagctactgcagttaccaaaggcaaaatcgattccaagctttagcatgccagattgggtcatatcaatgagcaaggattagtggagctatctaagcaaggtatattgtcaaattatactcataaaaacttacccttttgtgaaatttgtgtacagggcaaacaacacaaaattaaattctcaagaagcaattacagagcaaagcaagttctggagtacttgcatgttgatctctagggtgcaagtagggtgaaaacactaggaggaaatcaatacttcctctctgtcatagatgactacagccaaaaggtatgggttttcctactaaaacagaaaaatgattgtcttaacaagttcagaaattggaaaatttttgatgaaaatcaaactgataaaagggttaaatctttgagaactgataatggccttgagtttattaatgatgagtttgatgagttatgtgtagaaacaggtattaaaagacatagacatgttgttaaaaatcctcaacagaatggggttgctgaaagaatgaatatgacacttctgaacaaggtaagatgtgtcctactcgattctggtttgcctaagaagtactggggagaaactctataaacttcctattacctattaaatagaagtcccagtagagctattgatttaaaaactcctgaagagttatggaatggtaagcctccttccttaatgcatttaagatcattcggctgtgctgcatatgcacatacagtagaagacaaactaggaaagaggtctatcaaatgtgttttccttggataccaagttggtgtcaaaggctatagactgttatcaattgaaaataataaaattttgattagtagagatgtgtttcaatgaaacaatttccttttaaaagaaatgagaagggtattttgcctactatttcaggtgatgactttcaacccaagatacaaatcgaggtgga

SEQ ID NO: 205555 - DNA, 1351 bp, Cannabis indica
aagaagcagaggaaggcatgataccccaagacgagtaaaaaaactggtaaaaggggtagctttcattacaccgcattttttgtctgtttctttcgtaatgctgtaagtggaagtagggaggactgcctgttacagggtaaacattggttgtggattttgacccctacagtggtggtggaagatgaaattttttgttacttagattttgggggacactatttacttatttagcctataggttttcctagagaccaacaccacctcctcttaacttttcttccctagagaaaaggatactacggggaaggaagcaaacatagttagcctaatcacgtggatgtatttaatccctgtgtacgtacgtagtagttcctctgtgactttgcagactttggttactaaatttatatatattttttttctttcgaaaacctgttaaccataatatttgtttattatttattagatgtgcaaaaactacatggatatggaagttatctccttattttttcttccgttctttcattttcattggactagtcatcttattcttacaaattctgttattctgcttgctgttgcattcgggacatgtaataacgtttcattatcataaaaagacttgcaataacgttatctatctatttatggctttccttgtatatatgcaaaaaaatctattatagctaaagtgattaattttcaatcacgattcgaatgatgttcaagctttggtgatgaaaaattatgaagcagctcccaaattctgtagtttccttcaaccaaggcaccaaaacaagttagaaaattaatttatattttcatgaaaattctaggttgattcctcttcctttttatttaagatcgtctttattttagttttgaagagtcaacattttgtaaattacttaaaaataatattttgaaagctaccccttttaattgatataaaaagaaactacccttttaatcaatttaaattaatttttaaaattttctcttagttcttttaacaatccttaaagaaggcttggagtgaagtttcttggacaacatttaacaaaatggggcaagccttcaagagttgatttgatttctatattaaatgagtggctccttgttatttgattttctaaattaaatgagtagctccttgattgaattttttaaccaacatcaaattttttgttaattttattttgtagtatattttatttggggaatttttcataaatatgagaattttgagggttatagtttactttttttatgtcataaataaataaaactatggggttatgagtttttttttaaatttttttttaatttttttttttttttaactttttta

SEQ ID NO: 205556 - DNA, 797 bp, Cannabis indica
attttcattcaatatgtatgggtcgcggtattcttgagtccatcaattgctttgatgtatttaatatttgaaattcttaaattaaaaaaaaagttttacacctaaaatttttcattttttttatttttactttggggtcaaatttttttaaaaaatattctgcttttttttaaaatatagtatattttttacacagtgtactgtgtaatattttcagtattgttgttgttctacggttgttttttttttaaatgttgttttaattatttggtgttattgttttactgtgcttaaaagtaaaaatctaaaaaaaaaagaaaactttaagaattgatcagtatttctcattagaaactccactcgatgctaccaatataattataaacgggccaggcctacatcttgagcccaaggaaacaaattcaacacaaaatgtctggaaattttaaaaattgtcaattaattttgaataactagataagtgttgtattttttgttgcgcctctaccatctacatttcactaactcataaaaacatatgtatatagatgcaattctacatgagtgtaaaataatgatgatcattgcatatgtatatttaagagagtattaattaattaatactaacccgaactgaagcttggatgacagcaatgaaggatggaatattgtctacaacttgtgcataggttaggttattgaaagtgaaggaacttgctagatcattttggccaatgtctattatgtagagtgccttcttgaactcttcctccttaaccaaatctttgtatcctata

SEQ ID NO: 205557 - DNA, 965 bp, Cannabis indica
gagattgtcaatgaagaatggcttgttacaggatctaaagatgatattttagaagtaagacttttctagctatatgatctgggtatatatatatatatataacttgaagatagactttatttaatttaatttttcagctgatgggatcaagggaatgtgattaataaaaatgaagaatgtctgaagagaaggatggttgctgaggctcatttggattacatttacacccaacatcacaaaccttagttatataaatattattaattaggacatatcatattaattatggaccaaagttactcttaattattatatatataatagtagtacttctccagctatatatatatatatatgtgtgtcatatgtatgatgtgtacaataatatttcaagagcaaaataaggttgtattaatataggcctatagagaatcgcgtgttagtttaataccaatgccatattagtatgcttttctttcaataatggcttagctgtttctaaatgtataaactatttatatagcaattaattttagtagtatgtcttaatatgtataatgccaatagtatatagaataatcaactgaggagtgactaagcgttgaataaaaaaaaaaaaaaaaaaaaaagaaaaaaaaaagcagtggtgatttcatgtcatgcataattataaggacaatatttctcattggaggtctctggtaggtcctgttattggacccacaaggaagaaataattgaaacatatatattattaacgtttgtttataacgcatcgaatcaacatctcctattaaaatgttaaagggtactaatagtgtttagcactctcctatgtgttaatattattattggttcaactaaatatcggatcccatataatttaatataatagtttttataaagtatcgctagccaatagccaatcgcaacgcgacatatcaagaaggttgtaacaccctaac

SEQ ID NO: 205558 - DNA, 594 bp, Cannabis indica
ttaattattttttaaaaaaattagataaccttttgtaacatttttttaattaaaaccttttgtaacattttttatcatttaaaatgaaattgtgaagtttaaaatttgtcaaagggttttatctctaaaacagaagagtcaatttatgattaagattatagacattgaaaagtagctagcaccagtttgttagattgacgagaggaataatggatataagcaaaaaaaattagaaaaacacactcaatttatagtagttcattccccatgtcgtaatggtaatggagctacgtttacttcgagtttttatttctcacaagaatttacaaaaaaaatgctaggtttttaaactctagtttctagaaagaaaaattagagaaagatgcttgcaccttgtgggtagttttgacctaatgaagctctccttttataggtgaaggagactcacaaaaataagagaaaaataaaaattagatattttttgaccgtatatgatgatctaacaatgaaaattagcttctgatagtggtggccatttttcggagtctggtgggactctctacaggtaacacagtgcttattttcgtaactccc

SEQ ID NO: 205559 - DNA, 1510 bp, Cannabis indica
tcacaatatccctcaaaattacaattatttctattgcaccacaccatgtaggtgactgcagctactactgctgatttggtattagcaaccatgctatttctactcccttttagcccaatcagccagtcctcaagattaaaaggccaatcaatctgactcaaccacttggtgacctcaagaataacattcttatagtaaaagggcatgcaaagaagaggtatgatcatgagactgaagatcacttttgcaaactggacataagggagaatcaagatgaatgtacctggccaaaagatctcatgttaataggttggagtacaggatctgccacaaaataaatttatacttcgagactttgagtttgtgccaactctctttgtgaaaagaggtcttcgaatctgttaaaggagactgataaaagtgtttaactggccatagtgtacaggaagggatgtgagtaccaaattcataagcaagtcattagagagatcaagctttagtgccttaagtttggaagtgatattagacatctccataatgtactcccaaatgttttcttttcctttatacctcatctggacaagattaactaaaagcttgcttatctcagccttttcattctttgtaaaatgtttttcaatttcttcaaggaaactttttacagatacctcattagacatactgcccataaatgcttctagaacgttgcgctttagcatcattagactaagcgattagaacattctcacttctcaaagtttgctttttcttcagtggaacttttctctgtaggagaaccaagttgttctctccttaatgcatagtctaaatctatgcagccaagaactagcaaaatattctctttccaactcttaaactttgtgccattaagcagaggaattgagttcatgttgacagtaatattagcagcagaagcagtaactaacaaattaagaacaaatacacataatagaaatttatgtcataacatactaaaataatataataaaataattatgtaagacacaaattttatttaactgtagtggcagacccattgaaacaagatacctagcacaacattgatgtttagtctttggacagaaacatcaacttgtaagcggtactctcaacgcagaaatcaaatgctaataataaatcatgtcaaacaacaacttcctttggactgatatattattcacatagaaactttacaattattactcatttattcctgcatgtacatttgttgtttggccaatcaataactttcctttgggtcgattattgatcactgtataaacaagaaatatacatatcctattatctcaaaataaataaatttgggcaaaagagattactttggcaatattttgcttcaattagtttattttaaaatagaagacacaaaaattaaacaagtgcccaaatcttgatgaagacaacctagatatatttgaagcatgaacacaataaatttataaatcatataaagctcagaaaatgccca

SEQ ID NO: 205560 - DNA, 1010 bp, Cannabis indica
gggtgggaatgtatacccttcacaagctgtctttattgcccatccactggtgcttaattcaggttacggtagtttctaaaattttaatcatgataatagaatgagaaatatttgtgttagaatattttgttcacactatatataattaattaattataatggattgattttatatattaaattaatattttatttatagacaaattgatgatcattgttatgttaattatttagtttaattttttaattaattatcaaaatattctgatgattaattgtgatagagactttaatgaaacatctcacttgtataaatataaattctcggtccccgagtttattactaatgtgtgaaatacagtaaatccataaagagagtagagagagcttagaagcttgttacctacactaatcaatttctttttctatttttgttgatccaaacctcatgttgaattgaagctcaaaaaatcaataactaaaagtattacgatttcttttgttgcatattattcccaattcatatcgatgtacgtatatgctttatattttttttttatataataagtctaataattggtatagaacaatctttatctttattttgagtaatttgagtttccaatgtataaatatatatatatatatactaagaaaaaattacgtgccatatacttagtttatgttaggtatatttatttatttacaatatacaataataattagaaaaaaatattattaattattgtttagaaatttatttttaatgtatgcaataaataaataatacagtttacattaattaatgtaaataatggtgttgcaaattaaaagtatactgaatgcaatatattaattttaagaaatcttgattatctaacgccaaattgttctcaaattaatccaaaaataaactaaaattaattcgacttcaatagatccttttgtttttgttaaaatgtcaattaaactagctaaacactaatgttccatgatcatacacatgtata

SEQ ID NO: 205561 - DNA, 666 bp, Cannabis indica
caatatgttcttccaaacctctcggataaacttggcctttcgagtagcctcagtgacaacttcatcaaaagtaaacttagccaatcggtcgaacttggtggtatactcagtcaccgacatactaccttgaaccagttgtatgaactcttttgccttagcagtacggatagattcgttgtagtacttttcataaatcagggttcagaacgtatcccaggttaatgtattcagatcatgaccttgggacacgatctcccaccaaatgcaagcatcctcctgcaacatgaatattaggcgaccaacctagtcattaccctcgactcacataaagttgaagatggatgtcatcatactcatccaatgttctgccttcagtggatcggggccaccctcaaacacaggcgaattctgctttttgaatctttcgtacaaaggtttcaaccgatttcccatgtccggtggcacaatcaaaggtgtcaaaggattaggaacaagagcaggttgagcttgctgctccctcagctctctaatgtgttttccttgcaatcatatcgtctcttgcatggcagcatacatctactcccaatttggaaagggtggggaatttctcccatcgtcatcagcaccgagcccatccagctcacgctgaagtctttcggatcgcct

SEQ ID NO: 205562 - DNA, 553 bp, Cannabis indica
aatattcagtatagttacaacatcatctctgtaaatattttaaaattttttgaataatttacattgtcgaaaataagtttaaagctttttgaatttgcatggtagactggaatataaagaactctattttgtaaactatttaaaaaaatttaaaaaatttacaggaatgatattgtaattataacgaatatcgctatgaaatatttcaaaaaaaaatccgatatataattttaggcgtgaaaattgattaaaaaattataataagatattataattagcactaatcttaatactttttgattttgatcatttaaataactatagaatttaatggtattcctcctgatttttttattatacatatattggccataaaattaacgaattattttataaatattcaaaaataattaaaaatatatatttttacaaaatacaatttttttttaaaaaattaacttatttttcttacggaccgttattttaaggttgttttaaaaaagacgttgtttactacattttcatatttcacaaatatagtataatattgcag

SEQ ID NO: 205563 - DNA, 1984 bp, Cannabis indica
ctacaaatccacctgcgaatccatggaatcgaaatcgagaaacagagcatcctcgcacccccatctacttcagtcacaccctctccgtaaagctcaacgatcacaattttctcctctggaaacagcaagtccttgctgccattcgaggacatcagcttcaaagattcattcaagacactacacctccaccacaatttctttctgatgcagatcaagctgcaagaatctacaatcctgagttcttgaactgggagactcaagaccagctgttagtttcatggctgctgtcttctatgaatgagagtcttctcattcggatggtgggatgcaatatagccaatcaaatatggagatctctagagaagcattatactcttcaggtttcatcaaaggttcttgaattcaaaaccaaactccaaaacctcaagaaaggctctctgtccttagatgaatacctgttaaaagtgaagtaacatgttgatttgttggcttcagttggggaaaccttaacagctcgtgatcacattgcagcaatcttcaaaggattaccgagtgactatgatacttttatcatctcttcaaacactcgcattgaagagtaattggtaattggtaccccgactctggtgccacgaaccattgtactcccgatccacaaaatctaatgactacagtagattacaatggtgaggaccaaatctttgtcggcaatggcacaggtctgtcaattcaacactttggtcacacttgtgttgcttccaataattataataagcctttattacttaagaacttgttacatgtacctgagattactaagaatttgcttagtgtgtctaagtttgcccttgataacaatgttctatttgagtttcatgttgatgcttgttatgtgaaagaccaggttaccaaggaaatcctattgactgggactctccacaatggcctgtatacttttgatcccacacacttcaagatcttacccttctcttcaccctcctctgtcaagccagatttccactcttccaatcaatagacagcctttcttctcaccaataaaccagatgctcttgattcaagctcattttctcgtcatcaatgtaacaattcaggtgtttccttgtttgatctttggcacaacagacttggccatccttcacataaggtggtcaaatctgttatgcaatcttgtaatgttacatgtaataaaacaccttacaatgtttgtcaagcctcctgtttaggcaaaattcataaaatgccttttccaaagttttcccaaactatgtacactgagccattgcaactcattgtgtccgatttatggggcccttcacacacattatctcacaatggttacaagtattatatgagttttgtagatgcctttagtaggtttacctggatttatttgctcaaaaccaaatctgaagcacttaagacctttctcaactttaaaactgaatctgagctacaattgggtaagaaaatcaaggtttttcaattcgattggggtggggagtatagaactttttctgaacctcttaaacaggctggtattgttcataggcacccatgtccaacaactcatgaacaaaatgggttagtggagagaaagcataggcaaattgttgaacatggattaagcttacttgctccttaaattctgggatgaggcttttagatgtgttgtatatctgcataaccgattgcctaccccagtccttcaccaactttcaccaattgaactcttgttcaatactaaacctgactataccaatctgaaagtttttggttgcctttgttacctaaatatccgaccatataataaacataaattggatttcaggtctgcaccctgtacattcttgggatatagccttaatcacaaaggttataaatgtctagacacacatggtaggttgtatatttcacgggatgttgtttttgatgaatcaaaatttccctatgcatctgtttctac

SEQ ID NO: 205564 - DNA, 1347 bp, Cannabis indica
tcatactcctcgaactttgatatacaaaatcatgccttctaaactttcatttatgttagatttttttttttactaaaattagacctaagtcattgaatctaataatctcaatagtttaggaatattttaacgatcgaatatgatttgattcatagtaaaattcggggaacaaaaatcttaattagcctaataattaatctcagagacatacctcctcatttaaaatatatacattaacttaattagtgttaattaattgggaaattggaagaaatctcacatggggtgatttggtaattaagtggttgacttgtgcttaaagaagacaagtgtctttttctgttgtcgtgcccaccattgctgccgtccaccaccatcaattctctttctcttctaatttggcccctcattttctgtgaatttacagtatttgccatcactcgtaaatgtaattataataacatgcaaattatacgtacttttcctttttttaaaaaaaagaatcaaatgacttatttatatatcggattcatatgagaaattttattaggaaatttactttttaagaaattatttacaaaataacctcaaagattactatatatgaccctaaaacaaactttaggatcacttatatatacaaatttaatttaattttataccaaagccactaattaggtaaatttcacaatttttatgctgttcatttagtaaattctttattttattgcagagcaaaaaataaatattaggtatatgagaaataaaaaaaataagaaaaatgtaaatattttaaacttacattttagtattttatagaaaggaggatagttgttgggatgttattgtattagaaacttgttattatattatgttgttgttgcatgctttgaaaaataaagttagtgttatgtgaattaagattaattctctttatgcgaattttgcgatttagccagatacgcatgtaattttttatttaattgaaagactatgatttcaaatatatatatataaatatataatattattgtgaaaaaaggatttgtaaaaattattgattgatctatttattttataaaatataatataataataattttagagtttgattttagtcaatgattaattctagagttaggattattaatcatatcacaattattagggttatgaaaaatgcaattttttggttagaaagaattagagttaatttggcacaagtgctgtgggaaaatattgctgagaaaaaaccaacaaaattatggaaaaaagtaaaactgagtgtttgataaattataaatttttaaagtactataagttgttaagatctataataataataat

SEQ ID NO: 205565 - DNA, 627 bp, Cannabis indica
ttgttaatttatatgatcttatattagttagtaaggttagttgtctaactagactacaatctattaatttattcatacgtaaataggtaaatatattttttatttatgagtggcattgcattatttagtgtaacttacgtttaggttaaaaagttaaagattgattaagtgacgtcttataatttatttatctagattctttatatatggatcttattctctcctttagctgtcaccattattatatatatataggtataattgtaaattaaaactaattatatatatatatatgatatgaattatatatgagtactccaataacatatttctactattgatcattatgacctgaaaataagattaggacaaaggtccaaagctcaattattttaatgtgtaaaagccattgtgcgctttcttttttgtagatgttgatcgattgtcaactttattttattgttaattaattaattttttatacttttttcttgttaaaaagattttgagaatgtatctacatatttaattaaggcactactatatcatttaaaatattagaattagtacttgtgcttatttattagtaggtattgaaaacaacgtattcaaacatattagtttatt

SEQ ID NO: 205566 - DNA, 1049 bp, Cannabis indica
cgctagatatcgataacgacatacaactaaaaaatacgactaaaaactaaacaaaaaaaaaattaactaaaaaaatgcagaattcgaacagataaagttttaggaacaaaacaaccaaataagaagaaagatatgtgtagatttattcatatcaacttaaatacaataaaatctaataataattactaaataaattacatacttaatatttcttttaagaattatatcgataagggaatttgggttgttcctacacacttggttgtcaaactaagttgatagattccgacaaaatggtgactctagtaaaaggtgtgtgtgaccttctagagagagaggagaatgagagagggaagaaaggggaaggggtttaattttaggggaattaccccatatattgtttttttaatttttttttcaaatttacgatttgggttctaaagtggttgcagtgttagttgctataggggttttatacgattttttattgtaatttaggttgcaatgctagttgcaataaacatttttatgtaaattctgtaaaaatgtatataaaaaaaattattttgaagtgtaaaaatgaaaaaatttcttaattttattaggctaattagtaatttttctccctgaactttgacatgtaccctgaactttttttggccgttaacaattataaaattaaatgaaattagacaaaagtccttaaatctaacaatcttaatagtttatggaaatttttaacggcaaaaaaaattcaaaaaacacaatttaatacatatcaaaatttggaaaaaaaaattattaattagccattttattatctgataagtatattagatatttaataagatatattcatgtcaaaccatgtaacgcatttatattgtttttttttaatggtctcggtgttattcaccaccacgtgccatcaacgctcccatttcaatctcctacgacaaatggactttggtcagcaatttaagtcaacatcaccaccaacttctttttttagggagagagagaaagagcaaaaagaaaaaaagaaaaaa

SEQ ID NO: 205567 - DNA, 722 bp, Cannabis indica
atatgtatattcataaaaatatttagggtacgtatttgatgatgaaataaacttcgtgatagttatattaagattgcataaaattttggagtaattagagagaatgtactttgggatggtgatgtaaaaattaatttgccttaattaaataattaattttattttaatatgaaatgaactgaaaccattctcatgtagtgtttgaaaataatgtggatatatgatttttcacaaaaaaagctcaattaactttttattttgttatgcactgacatatgcaaataatttggaacgcttttcaaaatgtacatacatgagtcctagagacctacctacatatgtatgtatagctcttctacttattaattaattatataaaatataataaaaaaaatttatttcattttattttgtttcatataattatggaaaataggtatgatatcttatcttaacagttttagtagatttaaatctattaaaataagatttaaacagttattcatgtgtatgaaaaaaattaattatatatgaattttattttgtagtatggtacattattcaatttttaaaaaaaaaaattagaaataattttaaataactacaacatatatatttataaaaaaaataaactaaaaaaccctaactactagttaccgagatagaaaatgtatcaaaacatctctttagaatggtatgctataaactttcccagtaatatt

SEQ ID NO: 205568 - DNA, 1560 bp, Cannabis indica
taattatagtttatatatatatagacaattttggtatatggtcggcgaatattttgaaattctcttgtggaaaatatattatagatgctaaagccatgtgcttggaatttatttatgaaccttatatagtttgaaaaatagtatttcttctaaataatttttattttcttaaccatttttaaacctaaacttaactaatgattttaaccatatttgggaactaaagaataattaactttctttctttcatcatcaattaatataattgattgatcgtactagtatttcgaagaattttcagatatgatatcttatcattttaattaattcagattaatatttcgaaaaatcttttgacctaatttttttatgtattcatttttattgcatattatatatattatacattatctataagtatataaattgtaattagcaaaaatttattctaaaacttggttttaatttgtgtatgtaactttaaactatatttgtaataataaattaatcatattttttacttatttttctaataagtgtttagaaattttttttactaattattataccttagataattttagtaataaaataatttgagattttttagtcgtaccttccataattatctttcgaaaaagataattttagtaataaaataatttgagattatttttaaaagtaaatttattttaagatttggcatactgaatttaaatctattttacactaataacaaaatatcaaaacgtataaaatagtgacaacatggtggtgaaatttgttgagttttttttttaaaaaaaaaagtaaaaagaaaaaaatactttactaccatatttctttctataatggataattggatatattatatttatttctataattaaagttcttaagcatgtaaggaaatttttaaaattaacattttttcaacttacacaatttattacatctaaatattactcatccacaaaatcatcaataataaactataaagtcgtttataataattaagaaaaaaaaactcctaacaatatcttaaactatccttcaaaaaaaaaaaaacaatatcttaaactaaataacttaaccattgttgatctcttatattttatatttgctttctaatttattttcttacaaacttactcacttcacattcgaaataatatttatctaacgacgcaactaacttcagaaaaaataaaattcaccctcttacataaataatgaaaatttttatatagagaataaaaaaaaagtaacaatagatcatgccaattttaactatatgatttactaaagttacccgtccaatctgaatttttgaaagctaattaggatttttgcattttaaattttgacatgtactaaatcatgctttttgaatttatttggcagttaaaaatttcccttgaactattaagattattggatttaaggacttttatctaattttatttaattttactaattcagtgattgtttatgaactaaatcatgcttcctagactttgatatctaccaagtcatgttccttgaacttcaacatgtact

SEQ ID NO: 205569 - DNA, 661 bp, Cannabis indica
accttttaaagagtctttggggtgctccagttcatgaaagaacaaaactattcatttggaagactgcctcgaatattcttcctattagctagaaattccatgctatttttgattttggtatgcactgtgccttgtgtgaccataatgaagattctctttcccatgtgtttttcaaatgtattgtggctcggaagtgttatttttctactcagtggggcattagaagagaggctttagtttttaattctaccagggacatggttaggtggattttggatcctttagctggtatgatttctgatactgagtgagagaggtttacgtaggtggcttcaactctctgtttagctttgtggaaggctcataatgtggctttccatgaggattctattgaatcctcgacttccattctgtgtcagtctctggcagatgtgcaagatttgtgtagggtgtggttggctttgcagcttgctcctaagccccctctgcttgttccatagctccccctaggaatggtgtctcagtttactctgatgcggcgatgtgtggctcctttgcctttattgctatcttggcggtggaccgggagggtcgtttgttgaagctttttctataaaagtccccgcttcttattctttataagctgaagcatatgccctcc

SEQ ID NO: 205570 - DNA, 788 bp, Cannabis indica
gtccaacaaccattactctggcaaaattatatgtaaaaatggcgcacacatgccacctgttattgtcaggaggcctccacgtgtatagacgaccattgcctcatgagcagggctcaccaaatgggcccaatattaatatattacttgtatttatctcattagtgagctaggtttacatggaaactcttgtaggtcttggtatactattacccgaccctaacctataaatataatatgttacgttcatggaaagggattgatttttcttctaacaactcaaggcaaaaagttaggtttcataaacaagacaagagtacttatgtaatactcgaagtattttctagccaaatcatattgaatcatggactagggtgtgttaatacccgagccatgtaaaaacccccaactcaatttttatatttcatctatttttttagctttaattttattttagttagtattatctcgatttttgtcctcctggcgtggcagtacttacgttgatagaatcagtgccacgtggcaatacagctcaccggtaagaataccaagtcaatacctgagaaatagagacttcgacaatcaaatgcccatcaaacacaagccaacttctactagggggcgtactcccattgagtgacttctggaaagataaggatctctaccaataacatgaaggagttccttgatagatcaaacgactttatcaaagttgatgaagccatacaataggcccatgcagggcatgtcaacaacaatcagtcacgaggcatccagtagtctcatga

SEQ ID NO: 205571 - DNA, 523 bp, Cannabis indica
acttctttcaggtctcatcatcgtcaatagatgtaggaatagtccccgacggaaactccatatccgaaatgtcattctctttcggcggaagcttgaatcaaaactcatcgaccgatccactgcctagcatttcagcatcaacgaactcgtccgagccaactcagctctgcggattagatcgagaagcgagagttttgaggtacaaagagaagagaaagagcagaagattcgagaagacgattcgttacgcttcgagaaaagcttacgcagaaactcgtccgagaatcaaagggcgtttcgctaagcgaaccgaaacagagaccgatctcgatctcgaaccaatctacggctcagccgctgctgcagcagcttttatagccgagtctcaatacggcgtcgttccaacgttttgattatggaaaaacgacgactcaaacaaaattcacctctgtttggatttcttttatcaaaatcttctactatgcttatttattagttcttcaacaaaaaaattaaaaaaaaa

SEQ ID NO: 205572 - DNA, 847 bp, Cannabis indica
tttgggttttatttttggatagagagctgtacttgaaccagcaatggaagggcgtgatatgattggccgagctagaacgggaactgggaaaactcttgcttttggcatccctattatggacaagatagttcagttcaatgctaagcatgggtatgtgtcatacatttcaatttgttatccacttatatgatcgtacctaacctcattattttttttttgaagagacttcaaatttgtgctaagcagttttattccttttgttaataatttaattctacaggcgtggaaggaatcctttggctttggttttggctccaacaagagaacttgcacggcaagttgagagggagttccaagagtctgcccccagtttggatacaatttgtgtctacgggggtacacctatttcagcccaaatgaggcagcttcagtatggtgtagatatagctgtcggaacacctggtcgtgttattgatcttctcaaaaggggtgccctaaatctaactgaagttcagtttcttgttattgatgaagctgatcagatgcttcaagtgggatttcaggaggatgtagagagaatcttagagagtttgcccaagaaaagacagagcatgatgttctctgcaactatgccatcatggattagaaagcttactcaaaattatttgaaaacccctgtgaatattgatcttgtaagtgtattgcgctctcgtcaaatgtaaatcaaactaatttatagaaatatgaagatagcaaatttgtgagtgcttccgagttgtaagcttatcaagtttcttgtgctgtaggttggagactccgaccaaaaattggcagatggtatttcttt

SEQ ID NO: 205573 - DNA, 721 bp, Cannabis indica
ctcagccgcaaacaacgctccatccacattttatcttttaagaaaccagtaggagtttagcccagcgcgccccagcagccgctgaagtagacgggatccaaaggggatcgaaccgacgatcccttgcgtatttccattgttgcaacaccaacttcgccatatgaacaatagcagcagcggagtgcgatttagactgccataacagctcattccgttccttccacactgcccaagccgtagcagcagcactttccacgacaatcgcggcttgagtgtctaacaaactagcaaaccagctttcaaactcggatgtacaaagattatgagatgccaccccagtgagattccaacaagaccgagcaaatgggcagttaaccagcacatgggagatagattcctcagcactattgcaaaacacacaattaatatcgacaggcacatgtttctacttaggctgggtccgtgtcgggaggcagccaaataacgcctttcacaggaactgatggatttttggtggaagtcccaacttacacaacttgctataacccacagctaatgaggcaggggcagtagattgtttttgagcttgcaacaactgatatgcactcttcaccgagtaaaaacctgtattctctaaagaccaataccagcgatcaacaactattgaagcactcagaggaatgctaagaatcaactcttgaaaatccatttaaatataaaa

SEQ ID NO: 205574 - DNA, 1276 bp, Cannabis indica
  modified_base (1235)..(1235): a, c, t, g, unknown or other
aagaaattgcaaaaatcaagttcagtttattttgtacaattttaaaaaaatacgagtttgaattgtcattcagaaaaataaattctccaatcaataattttagaataatacaataaccaaaattatatttacctttacctttacttttttgctcttgatattgatcattactttttaagttgatttagtacaaaatattgttatcaaaaaagatttgggataaaatgtgtgtatctcaagcttcgtcacaaattataggatacatttgtatattttgttaaaaacagttaaaaatcagtatgatgtattcaattgtgttgtgtgtatatacaaaaacaggatggtgttatattttgaataatggttcattcgtcataagtttgaaaactgaactggttaagtggtgagctcagctagtttatttctttattttaagtttgaacgtcaaaaaggctgtcctatgctttaccaccaacttctaaacaaatcttcaaatgaaagtaaagctaattatttgttatgttattattgattgaccactctctatctctagctctaccaccaaacctttttccaagttccgtacttttcaactacccactaaaactaatattaaggcctaatctttattttaattcttatttaggtctgctaaacaaactggagttgttcctgcagccgggaatcttatttataatattgttaattgttttagtgtacatattgtattcttctttgagatgcaattgtcataaaaagttgagtcaaatgtaagagtatatgtatatgcttaaaatatcataataatcagtgtcgtccacaaccaatgtatgtacaaattgtattaagcttccatcaatttctaactctacctttaaaatacataattataaatatttttttttattattttacctcatacttatatattacactataaattagttttttcaaaatacatactaaaacttcaatatataactttttttaatatataaatatttcatcacataaaaaaatattaaaacaaaaataaaattttaaagtaatgaatagtattccataaatatacaaatagttaaatttaaaaggaaattttataaaaatataattttgaaattaataatttacaaaaatataagaatttaacttttctctttttctattggtttttatttgaaagataattttatggattttctttataactattctaaaaatgtcacataattatntttttttaaaaaaaaattatagaataataatccctatatca

SEQ ID NO: 205575 - DNA, 1083 bp, Cannabis indica
aatagtttaaaatgaaacctaaggaaggagttaaaaatgatatctttaagtgtgcatgaataaaaatggtaagagtgtgatttgtttcagatacttgagcatttggtagggctgaagtctccttggaattgtccacatggaaggcccacaatgcgccacttggtagatttgacaaccatatacaagagtgcagaagaatgatgctgttgctgttgttggataacttatttaggtaaaccttgtgtaaatacataatcttgtgtagatgtgtaatctcatccttggtggactgtggtagagaattataaatagttctctttagaccatagttgcattgcattgcagttagctcaagcaattttttttggtatatcctatattatatcctggctcaggaattgacctcaccaattgaggaggtccttgttacttgaagaaaagggcaaatgcacgagaaatcaatttttggtacccctttctctacgaatcatcaaatttcacatttctaggattatttacaggaatttacctcttcctatttttataacgaaaaagataatctatgatgccttctttttatgttagtatatgttagtttttttttcttagaattaaattttaattcgatgaaaataaatgttaatattgctttataccttcaacaactcttatttaaattataatcattaatatttatcgaaaaaaatatacaatgttggaaacttcttgttctttggaaagttggggagtgctttacataaatctttcagaaaagaaaggagaagtatttttctcgaggagttatataatttattttgaattgatcgaaattaaattagaataccaaaaattattaaaatcaaacttttttgttttcatcactttttagttattctttaaagaaaatgatggtttacttattcataatattttttggggatttttttttaaatatatatgattgttaaaaaccatttaattaattttagggtttctacatatgttatttacttttatataacttaaagctttttctaattaatgttaggacttacaacaaaatgagtgaatttaaagaaaaaa

SEQ ID NO: 205576 - DNA, 1045 bp, Cannabis indica
gaaaaagggttcggtgttgggttttattcaacattaatttttaccagtgcacttaggctcgtaggtaagagtcaattttgaataaaacctttgtcggtgcacttaggctcgctggtaaaagtttttccttaaattaaaaaaatgaaacacatcgttttattaattgtaaaaatttttgttagcgaacctaagtgtactggtggaacttttcacctaattttctgcgcacgtttttactgtacaggaattcaaccgccaaaaattttagtacttttgccagcatatttattttcctgcaaaagtgaaattaatatgccaaaaattaatttttgtcggcgcacttactttcggcgacaaatgtagaattgaacaaccaaaatttcccaccttttgtcggtaaaactaattcaacggcaaaagtaacttataccgcaaaataagtggtcggcatgagtgttacccaagggaataaattagctacattttttcggcgaggttcattaactacgctgacaaatgttgactttttttggtgcagttaatgaacttggccgacaaaagtcatttttcttgtagtggaaaactgtggaccatcttccctaaaatatacaaacaggctaagtgatatcaaaatatcgcttacacatcaaaaaatacatccccaacgtgttttctcactcacctagcgtccaggttgatatcacatgtcaaactggacactggatgtcaacttgggcgctgagaatgagatgtcaacctccgcgctgggtccagaatagccttcagtaaaatgaccttaactcactcaatattaatttgattgatgcgattcaacttgcatttcgaagctatttaagtgctctataaagtcctgtaccgcacctcaatcgaaattttgaatttattgactccaaattttaccccaatagagttacaaatttaagctacaacttacccggagtaggttctgttggcgggacttaaactttaaaaattgacaattaacctctgagctcaaattcaactgttagatcatcatctacgg

SEQ ID NO: 205577 - DNA, 1164 bp, Cannabis indica
tgacactctctgccaagatctcattgcggccatgaataaatctgctgtggcgagaagacttggccgggtccaccatagccctcgtcacggccactggacccacactaatttcttcaattctgccatcctaactgcgaccacgaataaattagttgtggcgaggaatgcaccgaatgttattttctcaatttaacttcactcgcctcgatctttttatcacacttttgaagctctggacttttacaactataacaagcctgaaaatacagaacacaagcgtaattctgtcctaaaaacattaaaaacgactaaaaataattctaatttatacctgaaacctaggctaaaaataccctaacaccgaacacccatatccacctacacaagactactaacaggtactaacgacggaccacacacagttggtgaggcaacaacaaccatggacgaccggcgaggcagcaacgaacactcacatcgtgagcatattgactcctcctttcttctatttttttttctctttactttccgtttctctctctatttctctttgattcgggttgggaagataatggaagcagatcaatcctccccccttccggccttgctccgacgcccatggtggtccaactctgatctccctctctctaatttctttttttcttcttctctctctttcttagcctctttgaactgtatgggttgggaatagaatgggaattagggtttttctatttttcttttatagtacactagtttggataggaggcttattttttaaaaaaatgtgttggaaggtccaaacccaattctcaccaaaaaccaccaaaattttggtctcatcaacatagacaaacatgaacccaaatctgatcaaaacttgtctacaaatgggtgagttcagtattaaatttcccacacccgaaacctagacccaaatatacctgaaaccttgaaacccgcccgaatatgcaactctaacttgacctcttacaacaaaactaaattttaactaacctccttaactaatagtcctcactaactactaactgaattatttgtcaattaattattaacaatattttatttttattactgtaaattatttataattatttttaaatttactagtggtgctaaataaatagagccataatcaaaaaa

SEQ ID NO: 205578 - DNA, 941 bp, Cannabis indica
catctagctactgccttggaggaacaaaatgactcatctacttctgatgctaatcgtggctggtggaaattcctttgggacttgaatttgcctccaaaaataaggatttttgcttggaaagttcttaacaatgtgttaccagttgcagctgccattttcaagaaaaaaattattgattctgcagcttgttcactttgcacttcaagttgggaatcaataggacatgccctctttggatgcaagcatgctagaagtatttggaaggaatcgaagttctcattggattttagtcaagctcaaaatatgaccaatggtgattacctggagtttttgtcttctgttttcaatcaaacagatttcgaattaattatatatctgatgtggggaatatggactgatagaaacaaaatttttcatggtggtaaagctagactgaactcatcaatcgtggcctatgttactggattccaccaagattttagccgtgccaaaaccagtgcaaaaaccagtgatactgttgctatttcgtctcctacaatggatagttagccaccctgccacaccagattgcagaaggaggttccatggtctccaccttgtgttaatgagtataaactaaatgtggatgctgcaacaagttctgaagataaaaaactaggagttggagctgtactgcgagatcataatggtatggtcattgctgccctttcaaaaatggcacaaggtagttttcgatcagacgaaatggaagcaaaagttcttttccatgctctcaattgggcttcgcaattacaacttccaattacgcacattgagacagatgctttgagagtatctgcagcactgaattcaaattcagttgatctatcttgtttttcggatctcattactcatgttcattgtctattataatagctttgattattctcaaaaaaaaaaaa

SEQ ID NO: 205579 - DNA, 841 bp, Cannabis indica
aacataacaacaattgatggcttccaaaattctacctcctcctgtatttttgaacactaccagatcggaaagcaataggagtagcattattaccttgcaattgaacagaggctcctcaatttgttccatgagtagtttccaacagaatgccaaaatcttttctgatttaatcattgatttcttttgttctcatattttttcaattattaatttgttccataagaaaataaactccaataattttttccgaaaattcacctagcataaactactaattttagaccttaatttggcataaatctctataccattcgatgattattgcacgtggtttgataagcagaatcaattagcagataggcatcattattaagtgtatgtggcgactagtttaaatgatttgaccgaataaatgaaagctttttccattttgataaaaatattatgatagttgttaagccatatcagtggtgccaacacttgatatgttatttatgttacaattttttttaaataaatatatgtttcaatttaatattgtaacatattttagtttaataattatagtaagatatcttttcttgttgttatcgattaagagatcactttatagttgggtggcactattatccttaatagcataatcatgtgatttttgttcataataaagaagtgctaccagggtcgttttagtcattaacttagaagacattgccctaatattccattaaccataagttagtgatcaaaacatgaaatagttttggtttaattataattgaaagggaccaatttgccatttatcacaaaaagggtaacaaagagtgtgtgcagtcctgac

SEQ ID NO: 205580 - DNA, 1756 bp, Cannabis indica
gtcaactcaattctcaattttcaatttgggagtgcaattagaatacctcaaactatatagttagtacagtgcaattaactaattaaactaacccatcaactaggctcgattctgagcataagcgggttagggctatgcttagggcccatcgagcccaaactccccaaaaatgctccttttaaaattacatatttttttagtaattttaaaaaataccacatttcactctaaataaagactcaaatttctttttttttttagagtacgccttactatcaacccaattctaattacaagataacttaattttcaaacacatccttaaacttagagcttacttttattagtttaataattaagtagacattattcccatctcatgcggtttgaacgtttaaagtgttttatacaaataataatctctttcctaacaaagggagatagaatacttgccaaaacaattttatgcacttatgttgacatgggttatgctcttcctaagaatagtttatccttccaattcaataggtgtaaatttaataatgcatgtacttgattacatatatattttagtccaaattgtcttgtataaattaattacttggatgttcaattaacattgcagaaattctattgacgtacgctacatatgttcttgtggggttggcagttagtgtatttgtggtaatggttggtgtgtatgccggtaaagctgcttacaaacgaaaaattcgccgcttgaagaaattaggtacataattaatgttcaacacttacaaaacaacaattagttttaaaatgatgatataattttattaatcaacaacagcaaaaggacgacggctggacatagtagcatcaaagaaaggttcaaagtttttggagttcaaccactcaacacttgaaaaggcaacagaaggctttaatgatgcccacaagcttggtgaaggaggttttggagaagtatttaaggtataattaaacaatgtgtcctttaaattttggttttgtattgtaataatatgtgcacctcaaaagtgaaataatagtttttttataccaaatcatatatttatagggaactcttgctgatggtagagaaattgcaataaaacgtttatttgcaactgggaaaagtcaagcagaggaaatatgcaacgaaattgatataataagtagtgctcaacacaaaaacttggttagatttcttggttgctgctttactgattcaaacagctttcttgtttatgaattccttgtcaacaagagccttgaccaattcatatttggtgagtaattaattaaattaaggccatcatcactttatatattattacactttcctctaatactggtttaattcatgtttgaaccatataataataatgtgtggaaggtagattctgagaggagcaaagaattagactggaaaaagaggcttcaaattataattggatcagcagagggtttagagtacctccacaaaggttgtcaaatgaggataatccatagagatattaaagctagcaacattttattagattcgaaatggaaaccgaaaattgcagattttggcttagcaagattttcttcatcagctaccagttatgttcctggtgttactattgctggaacattgtatgtagtttttttggattattaattcaatatgttatgttttgaatatatatatatataacacttaattatatgtgtctaattttcttaatttgtatgtatgcagtggttacttagc

SEQ ID NO: 205581 - DNA, 797 bp, Cannabis indica
atatatatatatatatactcttcataattaattagtattgtgggacaacatagattactccacatatcttgttttaagattaaacatatatcagagtcacatccttgtatatgcagataatgatctgtggttcaagattagtaagcataaaaaatagtaaccatcttaattaaagtagaatattgtgaaacatatcatcaattaattttaagtgaaaacctcataattctcatcaactaattatcacattataaggcatacaataatactttaatttctacgtcgattgataaattgttttgttacctgcatataaatgccaagatatataaactggtgtttaatatatataaataaaaattttgcatcaacaacttttcacgtttttaaaatactcactaaactattttatatctcacaattggcacaataaatgctgatgtggccgagtattatatatatatatgtaaatatatatatatgtgtgctccttaattaattaactatatatgttattgtacctgtaaatgtttaaaccctagctaggacgagaataggtgaagcactttccatatatatatttgtatatattaataacataataattgattgtaatatagatatatgtgtataatgcagaccagtatcaggtggatcaatgaatccagctcgaacagtagggccagcacttgctagtaagtactacaaaggtatttgggtgtatatggtggcaccattcatagggacacttcttggttcctttacttataaaatgattagggttagtgacaggcctg

SEQ ID NO: 205582 - DNA, 792 bp, Cannabis indica
ataagttgtaaaggggattgatgcaataaaaaaattatactaatttattaaaaagaattttctaaaaatttgcaaataattttaaataattatagcgtatataattataaaaagaatagactaaattttttgtttgatcccaaataaataaaaaatcaaccaaaataacactttacctctactgccaaaattttgaatatgatattatgaaataaagaaagtactgaaaaagggtcacatgagcttagcatgtagtccattgtttgaagaaatagcaacataataggaaggccatgttcacatgtcatggcatgcatgttaagctattggtgttggccagataaatacaattattattgatgacgtggcagatctctaagatttggttggcaggtgacggtgagtactttttccatgtaattatttaattaacattacgtgtcataaacgtacacaaatgtggagccaaattttcaatcccattaatatgttataattcatgtcacaaccatgtctatgtagataacttaattaaaatggtacatctgcatttaaatattttctactaacaccgccgttaatgcataaagaacctccttacaattaccgacgaaggaagaatttggaaaatagaggggaaaaattatagaaaaattaatttggaagattgtttatcattaactatacatatttatacatatattacatttttaatatgtataaagtgatatgtaatttttttttgagagagctacatccctcttaactccatgcagggccggccctgaaaca

SEQ ID NO: 205583 - DNA, 655 bp, Cannabis indica
tcactcaccccatattcacagatggccacagttttcaacacaacaaggtcatagttatccatgtaaggcacaataacaatatcaccaaaaaactccgcctctttctttaactcagcattcacttcctttcttccatgctgtcaatggtataatgtgatagattagacctaagtttgatacatcaaacactaacaacaaaagtgcatgtgtggagtttcttaccaaagctaacaaaaaaacgagctaccacatttgaagatttgataagcctatgctgcatccaagacttccttattgccattcgctcagcaaaatggttacccgcagaaaggatgccaatgaagagttcaacctctccctcaggaagaggtggagcacaccactttcttgccatctcaagatgctgctgtggagcaaaactaggatgtgacaagggcaaagcagcagcaaatacagaatgaatatcaatgtccccactcacggacaatccagtggcatcttcaagagtaaatccctgtaatattatcagaaccttttagacaacattcaaattcactgacagaagagatcgacaggttctataacattactcaccgggcggtaggaggaggtacatgctccatcacataatatgataacctccaaacctcgcgct

SEQ ID NO: 205584 - DNA, 1419 bp, Cannabis indica
aaaaattatggtcataggtatagtccagtaatttttacactttttctagcaaagaaaaggtcctaaattcaaatatctctcccaaaataaaaataaaaaatacatgtaaaaaattatgacaaaattaaacgtcaatcattatgtataaaaaatatatgtgatttgagttgtgtactatatcattattactcaaaaactatatagtaatatatataagaagaggtttgaaaacttttttactttttattttaaccacagatcctttaacacacacaaaaagacagttaatagttactaacttttatttaattaccaattaggtatgaatatgatagtataagatagtaagaagaggtatgaggttaccttggtgacaacagcatcagcagaaggaacctcttgaaacatgtcacccccaatatgagtgacaccaggataagctggagcagtagaaatcacatgagatctatcaaaattaatccctttaatatgaggatatgatttcactatttctgaaataaatctcccagtcccaccaccaacatcaaccacagatccaaccccattgaaaagatcatcaccacaatgactcagtaatgttcttatcgtaattcgcgccgtgcacgccatcgcgttgttaagcaatttattgtacagaggattctttgcagcgaaatcaaacatgtacccgtgttctttctcaaacggagcgagtccaccttctctgatgaactcgctcagtttgtgccacgggtccacgtgccacgggtggttctccatgattaacatgggagccagtgtcatgatcgaggcatctgagtcagatgttggagctggctcgtggaggagccagctcgacagttttgtgggcccataaagggtttcacctgacactttgtcttcttcagaagtaaaaattttgcgacgcacgaggagacgcaagactctgaagaggtgcgacgcttgtggggacggggcgttagggattgcggctgcaatttccgagagtgtcattgggccatctgcagagtggaggatgtcggggagtctgagctccacggcgcattttagcgccatgtctccgaagttgagcatgtatttccagatctctgcttgatcttggaagctcgcttcgttgtctattgctagtattgctcctttcactgcagaagccattgttttttctttcctctctctctagcaagcactctttgtttgtttctctctatataacatataaggtggagtggttgttatagtttttgtgaacaattgcatgcatgtatttatagatcaacatctcaaccgaataaactacttttttgccatggaaggaagaaaagacagttatttggcacctgtgtctaacactctatgagtattaacacacgtatcacaacaatttctctactctattct

SEQ ID NO: 205585 - DNA, 700 bp, Cannabis indica
attatagaaaaaatcccataaatgtatagatatttaaatttcccaataaatatgcattaattgattaattgtcattattcttgtgttgtctgcaattcgattcacctgcaatctaagcaatcttctgctatagaaaacaaaaaaaagcaatcttctgttctgtgctggccgagttataaatataatttctaagctgagttttaaggccccaattctggaccgttcttgtcacttccgtttagtaaacttataaaaacatagaaaaccagaaattccatacaattcattcgtttcgattcccaatttatataatatagattcattgattgcatttattactccttccatagcagatatttcaacaatttttgtcaccatcttcttcattataattcaatgtcgagctaattatatatataatattcaagaaactgactgaaattgcagattttacctttaagcttacatacttaattgaaactaaaagttacacgatacagagtcttaatcttaagctacagggaaagattaaggttcaaaccattgatgaattgagatttgcgacgaggatgagattgatcgttaggaatattactagtgttgttattgggcgttgaaaaaactgaaggaattcctcgaaattcgagtccagaaatgaaatcttctctcacaaacgaaggtatccaactggttttgccac

SEQ ID NO: 205586 - DNA, 604 bp, Cannabis indica
ttattttatttttttacttttaacttttacatcataataaaactaactttgctatttttatgtatacataatttaatttaatttagttaaacaaatatataatatttttttgctaatatagaaatgtattatttataagataagaaggaaacttagccaaatataaaatacactatttataagttaaaatattaagtattataatttatttattgaaagtgatttttctttaaaaaaaaaaaagatagttataatttaattatgtagttgttatatctaattttactacccaaaaaagatatcagtatcactttttaatgtcgatttcgatgaagattcttcgatattatttggaggtcgtaatagtgttagtaatgaactaacgctatagttttccaataacattggttgtatacctacctgacgcaaatatcacaaccactgttaaatacgtaatagagtaaattgcggcataacttccaataatgttatctcactagcaattaaccctcaaaatctacttttttgatggtaaaatcctttaaacccaaattatattaacaattagtcatttctattcatttttttgtagttaactgccaag

SEQ ID NO: 205587 - DNA, 1294 bp, Cannabis indica
ttccataacatattgctataagcttaagtccaccgacagctttgtttccttcatgtaaccgtctcagaagatcatggcaatcatgttctgagtaagagtggaatcttcgaaaattgtaagctcagttggctctaaccggtcaatttttaatactctccaatgtgttctgctcttgtctcttccaatcatataaaagttctgttgaaatatgaatgatttgttagtgctgcatcataagtttcttaataacaatcatttaagatagatgaacaagaatgaccaaaatataaaatatttgagctaaaaaaatccttaaataacacatcaaaaattggaaaaacgcattatgtctgatacccaacggaacaaaaatcaagatattgcttcaatcaaagtcaattcaaaaccattcacgctaagttaaaaaaaaaacccttctctaatcaaaggaatgccaaaaagtcactaatcaatatccaaaaaagattatgtataattcaaatacataaatgaattggaacaaaaactctaagaaaagaaaaagaagaagaagagatcagaaaatacaggaacaataacagaaccaaaaaaaaaaggagagagacaataccgagggcgtttcatagagtttgaatttcttcaaatagcaattgtcacggttaagtttctgacagaggacttctccagacgccattgaattaggatttgaatcacccccgagcctcaaagtgctcgggttttgttgatataacttagcagtaacacaattctcccccagaaaaaacaaaaacaaatttttttctttttactgtatgctgaacctatacatacatgaaacgcataaatctatctatataaacgcagatacatacaacaatgacacagactacaaaaaaggaaaaaaaaaaaacaataataaagactgacagaaaaaccagatagtgaacagttccagaaagcaaatcagaatacgtcgaaaggtggaagacgaataaggaaggagaataagaaggtcagatcgtcgtccccggaagcttagaatggcattgacagctatggcctctgtatccacacaaaaataaaaattgaacgaaaatagtttgtatttgtttttatagtcacactaatacttaaattaacattaaattaaatatcattatagatatttaccgtgcggaattttatgcaatatttatcttttttttaaattcaaaacttattcatttaattttatattgtgttgttaaaaaattaacactcctaaaaaacttaatcttttttgtaataatttaga

SEQ ID NO: 205588 - DNA, 1231 bp, Cannabis indica
gattgtgtaagcatgcgactttgactattgactgatacaaccagaagtaatggtaatggagtccattggctattagtatcagtagcagtgatagtaaaagatgtggtcgaatcaatgcccatcgcattttcttttgtgataatccatcatctatgtgattataattatgcacgagatctagaagaatgtaaggagatacattttgtattatgtttggggtgaatgagctttcttcttcatataaaagaaagtggcatttctatttttggtctaactaatcttttgattttggttaattgtcaaggaaatagttgtagcatatgtgagacaaattataggactaagtttacactatatcttgtcaaggaaggaaatggtattatgaaaagaagggaacaagtaacttcatgtaggaattacactaatcttcagatgaagcatgtttttgaaagaaaattagggtgtatgattgttagtgcagtgatgcttgtgtcaaagttcattttttaacagaacctctttttatcaagttttcttatctaaccccttaccaaatttttatttattcattgtattgatacaagcatggcttaccttacccctagtattggtgtagatttttttttctccagaagttgcagttgtcttgaattgataatctgtgattctagatatagacgatgggtgagcatatatgtatggatgatgtattttgactgaaaagaaattgaactgttgcaacatgtttggttggatacatggaggattccatttcattgtttccttttgtcagttaattaaagagaaatgataatatagaaaatggtttaagggggcaactcttgtctgtgaattcttgtggtattagtcttaggctaaggctaaggtactggataataatgttcttaattaaataataaaatcatcattattccaatgaatagcaattctatttttcaacggaggccacattccagctcatcaccattcgcaatctcttttcattatcaaattatatataaaataaataagtagtttttttttgtcaattcaatattaattggattctattcatatatcaactaaacaaaataagtttgttttcaatatatagacaagtaacacaatattcttattctaattattatactgaatagacttgggcggtaagcttatttatcttttctttgaggaattggtgtaattaggtattatattttacatattttag

SEQ ID NO: 205589 - DNA, 702 bp, Cannabis indica
aagttattcttttactctcattttctcttctttttattttttcattcctcacgctcaagcctacttatcccccgcgcactcttctctattgtattttctcttgaggcagtcagtattcatgggagctcgaaatagtgggttaatggaggaggttaattaagatagtcagccttcacgttcatgattcaatttataattattagagagtcctacattgataatatgtaaaaattaataaataacatacataagatgcatgagttaatattctcactgctcttacattgataataggtgaaaactaaatattactcgtaaaatacatgaattattcctctaagtcccacattgataatgtgaaactaaatatcatatattgatatagagattaggagtaattgctttgttttttaagactttttctttagcaattttaagttaatttgaaacatatttaagaactaatgtgttatattaaattataaaaaaatattatatattgtttattataattagtataattaattttattctttgtaatgtaattatttaatattttatgatgtttaagtctttaagagacgatctgatttcctcccaaagtattttaaaaacttgttaaaagtgtttttaaagtaagattaagtacaatgtatatctatctatcatctttaaatatgaaattataaataaaattcttta

SEQ ID NO: 205590 - DNA, 3027 bp, Cannabis indica
tttcaaagatcccccgcgcaccctctaatgagctaatatagatgcaaaatccttggccttttgccatatggggaatagacctgatcggacagttactgaaaggcaagggcagagtacaatatgcactcatcatagtggattatttcacaaagtggacagaggtcgagcccttggcaacaatcacatctaaaaaagtgatggatttaatagtaaaaaacatcatatatcggttagacttctgcacaaaattgtttcgaataatagaaaatagtttgataaccagatgttcacaaatttatgtgcgacacatggaatcataagaagtttgtccacagtggcacatcctcaaacaaatggccaggccgaagcagtaaacaaggcactcaaagacaccatgaaaaaatggcttgaacaagctaaaaggaattggttggaggaactacctgagatattatggtcgtaccgagaaacgaaaagaacagtaatcggggaaacagcattcgctatggcttatggttgtgaagcaatgctgcccgtagagttagaatcttcgtcccacaggagactggcctataatcaagaagctaatcatgccctcctggcagaatcccttgatgaaattgaagaaaaaagagcctcagtagacctaaagctagtagttcatcaacaaaaggtggctcggtacttcaacaagcaagtaaggacatgaaaattctttgtgggagatatggtccttagaagagtgttcttgaacataaagacagcgggattggcgtactcggacccaactgggaatgaccatatcaagtaattgaagtcacagattctggagcatataaactgggttggtatgatgaaaacatggagcttgttctagtaccaaagtattggaaggaacatttaataaaatactaccaataagtatacaaggtcggatgaaccccgtcatgtacaggatgcttgaacatctactcttaagtagataaccttctgagcggaccttgctcaaaggtttagacaaaatgactagcactcagatcaatcaacactcctataattaaagaattgtaagaaccaaggaagattagaggattttatatgattgactcagtcaaacattaaataatttattctataattaatgtaaatattctataccttgtttcctataaatagtggatcatagtcaccattgagggatcgaattattccttctcaatagagctattacgatgccaaaatgtttgaaaccttcagagaaagtaagaaactcacttgaccaagttcatgtgatcttattactatctatataaatacattaaaaagggagtaagtcatcactgattcaagggctgaacctctataaatcttctgtcgtttatagctcttgaattatttttattatttaatcaatcatatcatcctttaactaacttcgtgtcattgactagaaatgagatcatcaaattaatttataattatttaaatgttataagttatgtttgacatgaaataggaatttaaataaaattaattaattaactaattatgtgaaattaataaaaataatttaattaactttagtttgagataattaaattgaaaaagttatctaaataaaactaaatgagttttagtgatgacatcattttttctattaatttcaagtaataatttatttatataaatatttatttagttgtggaaaaaataaaagtattttaattataaagaaattggattatttaattaagatatttagaaaatacagttagcccaatcattatgtgatttcagcttaggcattgtattttattaagttattttttaactaatataaatatagaaaacttaagaattctttgtacacataaaataagacactatactacttacaacttttcagcaagctagtgaaaagaatgaagaaatgtatcctggtgcgagggaaggttgtcatatttttaagtttttaaactttgcatttatttctcaatagtttgaattctcttcgatcatgatgggagcttttcgcttccgtagtcccctctttcccaaaataaaatctgcaacaaataccaaaatagataagaagtgatatttttaagggcaagaaatgtcaccctttatagccttgaaaatgaagtttattaaattaaatgaattatttttttaagggcttaccttttcttttagtagaaaagtctcccattttccactcactattggtccaacaagtgattcaaataatataaattcaaagttgtagaaatcatcctcggttgttttcttatggctgcaataagaatatgtaacaacaacattagcattctatagttattattgttggattatagcacaaaattagtttgtttttattttatatatatgtatagaaaaattagtttcttaaaccaactaaagaaaatgttatcaataaatgtgaattagcttatcaaacaatataccaacacaacaataaactagcagaaaaaatatggtaacttgttgtagaggaaacacatctttttggcctaagaattcaaattgtaaaatgcttgactctaattactcaagtgatcaaaacacattcctaatccatagttctctactttgcattaccttgattttgtgcattctcccgtagactacaaatgaacataaggtgtgttaagtactagtatcaataacttcatgttgtgaagaaagaaacaaccctcaattttttcaaaaagcaacttaatgaatacctagagggttagcacatatcatgaagttcctttagtacaaattagaaaatacaaaaacttagctgaaaaataaattggtaaacaaacaaaagactaaacgactcggaaattaatataagaacctcatgcctaattaccctaaatcataggaaagtgtatctttctatgtaatttaattatgacaaatttcaatgatagtcaatgtttattttaatacaaaacatattattcctagtccaaccaaaactaataagaaaaacaagtttgagtttcaaag

SEQ ID NO: 205591 - DNA, 988 bp, Cannabis indica
tctacatgtttcttgtatcattgaaaataattttttttaccacatggatcatgaatagtttgaacaagagtagaccattttggatatataccattcactaaataataacccatgttgtactcttttcttttaataacataattagcgagtagaacaatacattgagcaagattagcaaaaagatagaatgcctcttacaaattaatgtcattattagattttggtaaactaaaatatacatgtcatatctagagatcatattcagctactgtttcaagaataatagtcgaggatccactacgaccgacatattgtcctccctaagcagttggaaattttttccatttccaatgcatacaatctaaacttttgaacatcctggaaaacctcgacgttcaccaatgtagaatagtcttgcaacatcatgagtgttgggtaatcggtgatagtgggctccaaacacctcaacaataggacaacaaaatcgctttaagctttctaaagttgtagattctcctactttgatgtattcattgggaaagagttgaatcagagcaccacaaggatggaaaatttagtaataaacatcaaccagtaagatctttacaaactcgaatgctactattaacagtccaatttcacattaaggggatgtataaaccaaattaaaaataaaaatccaagtggtacttcaccaaaagaaattgtaagtgtttgtcattatagtttatttattattactattttattttcaatttttattgatgctattacttaatttatattttaacagttaattcaagcgaagatgttattagcctaagaaaaaaatacgacaaagactttaaacttgatcatgtgtgacacatcctcaaaggtattcaaaagttttcaaatgatgacaacatcaatgcaccacgtagtttccaacacgaagatcctatttttacttcatccaaatcattgtctcacaattttgagtctccaa

SEQ ID NO: 205592 - DNA, 630 bp, Cannabis indica
ttgagtttatttattcaattacaccatgtaattaaaaataattaaagagtgtaatagttttaatttcacttttcaattctcatgtttcatgagaattagggtaatacaaaataatacaatgtaattagatgtaataactgaggaatctcaattacactctttctcatgtctttgcatgaaaaattaggtgtaattagaatgtataatcaaatattactacttagataattaatattattaaattgtgcaattatactaactcattttttaaacataaaaaaaagaattaatatgcaattactagtatttaaaaaaaagagtgaaattactctcatgcgtgttaaactatcctagtaattacacatgtcagatgcttccaaacacacagttaaactatgtagttattactcatttgctaaacatgaaaataataattcgtaattactatttggcatctaaacacacattgtattttattaagatagagtacaattactctaatgtgtaattactagtaattacaaattataacttccaactgctcccatgataacttccaaacacccgtacacgagcgcgtttggaaagttactctgtaaatgatattgagtgtaattcggaataattata

SEQ ID NO: 205593 - DNA, 930 bp, Cannabis indica
gattcaataaatataatatattcatttattttaatattaattctttaattttattttataaatataaaatattctaatatgtaacactttctgcaaaggcactttctgcacttgtccccaaccaatgatgaaatttgcatacattgatattacatacatggtctttgctcctatggtgaagaaccatatgaggatatttccttcaatattcactacaaggattagcactttcgcaggcacaatttagcgcctgcaaaagtccaatacagcacctgcaaaagtattacagacaaatttttgagcgtcctccagcgtccacaatattgttgatggaaaatctaactcttctagctcattttgggattttaggaaatggggaaatttcctaatgttgcatgaagccaacccaatgaataagtttgaagatatagataaatttttttgttatgtttgtgattacatataggctattatgataaagagaaagtctttgaagttgactcctctttgaaaacatgcccatctcagttataccactcaacttattttcactaaggttgagatcttccagttttgtcatttttgaaattgactttggaatttgttgtgttagctttgttcccatccaaatgaagatccatcaattgggatgagaatgagacctttaggatggtcaaagggtgtaaaatgattatatccaatatctagatattgtacaaagctgatggaaattgaccattaaagttgttgaatctcaggtctagagatgataccagtgacaaattcaatgactttagtttactaccagaacaaaaattaacaggaagaaaaccactgagattttcattggctgagacatcaatggcttgaatattaggtagatgaaaaatatattgtggaaattcctcatacaacctgcaaccacttaga

SEQ ID NO: 205594 - DNA, 879 bp, Cannabis indica
tttggtccccagattatacttgctagcaaaagaaagataatagtaaaactatgctcaaaaatactcaatattatagtcgaccactagtaatgtcgtcgtcctattcaaaatctgaaccaccactactaatatcttcacatctaaatgaagagctataggaaatgggtttgggagcttgcgttcttctttgcctcaaagtcatttccttcgttcctctcgaagatgccattgctgatgagatcttgaagttatggagaaatttgggatgaaatatgtttgcatttatttaaggaccacaaaataagtgatatatttatcatcagaataattactcaattaaccatgatataaaatcaattataatagaataataatctattgtatattccaacagaaattttttaaaaggatcgtagaaagaaagtgtttgtggttttcttatatttgaaaacgaagtgcatgcactcatgtcgaagatcatacatatagaatttgtcaatccaattacaagaaaagtcaaccacacctttgatggctctgtgtctcaactctcaaaaaaacataatatcttcattgaaattatttagaagccaccctcattccatatcctcaaaaccaatcttcatttctatttcattatgttctcatgctatagaagaaacaacaagaataaaaaagaaagaagatggtctgtttatgaagaatggaggtgcagttagagcaaaccattcttttgtttaatggaaaatcaaatccacttcgatcatactcttcccatgaactgaacaaggcaactcataacttccatccaacccaaatcatacactccagcttgaaccacacactctacaaaggcaaatcaataatggcatcacaaat

SEQ ID NO: 205595 - DNA, 822 bp, Cannabis indica
agagagagagagagagataatgaattgagctgaatgaattctgttattaacaaatgagcagtatatatacaagtttaaagatagttacaagctaacaaaacacaaagatagatagctaactaataactaactaaggaagtataaatgattgaaatagcagactcataatgagtctctaacaacagagctaaacccatttacatatggtacgtacctaaagttttttgttaaacaaatctaaaacagaatcatagaacaatcaccctttatgaaaagatgaaaatcacgacccaacccattttgagttaattgggtctaaaaaagatcaaaactttgatgatcaacgtccctattatgaccacatataaaaaaaccctacccaaaataaaaaacctagccctaatagaataacccaatttttcaaaatcgaaaataaattaaaaccttgcaaaataccttgaataaatcaaaattttgtctagtataatatgttagggctcctcgtcgacgatgatcactctcttcgcctttggtatagatgaagtgatgagaatctttttggtttgactcgttttgccctttcttgtaaatgaaggctctttcctgtagatgaagtagagagaaatgataaaaatggaaggagaatacatgtggaatagatgaagctcaattacttcaactgcacgaaaaataataaaagatgaacaaaaattaaattcaagtacaaattaaaatcggaaacctaatgtactctttttatccttcattttataaattaatattataaagtaatttattgagacatgcaatgagcccttaaat

SEQ ID NO: 205596 - DNA, 719 bp, Cannabis indica
cttgggatcttctttagatggggctgtagtttttgatcagaaactgatgatgatgagtttactttggaagtggttggttggagtagtttattagtagtagaagtggtggggtttttattttgtggtaagttattgaagctagctaggtcctcaaaagtgagatcaactgattcatctggtattcctgagtacaattcttcaagctccattctagcctttgttattcttgccttttcattgtcccccattcttattattttggcttcctaatactaattaataatctctaaatgttattaactttcgaaggagaggagtgtatagttgagtcaaatggatccttttataatatgtaagaaaccaaaggttgaaagggaattatatatatttaatagttaaatttctttttgaaatgaagacgaacgtaaagccaaattaattatagctggaatatgccggtcacatacaatgttgtttttcccatctagtgtatgaaagaatttacaacaaagagattaaaattatgctttgtccttgtgtacatacttgaaaaatatatttgaaaataactagagtcatttatctcatgccacgttaactttgagaagttagtatgtttagtttgatggtaatgtaataataataataaatgtaatagtaataaaataagtaataagtaaattaagtttaagatgtttggtttattattagaatgaata

SEQ ID NO: 205597 - DNA, 871 bp, Cannabis indica
tgagagggcttgaacgatggagaggattatgacgagaggacttgaacaataaggagattcagctaggagcttgaatgatgaccgtaccatttcattcttttccttaatcgattcactcaagcaagtcaatattgtcattgatgtcttgtctccttcacctattgataagttatgggtttttatacatttggtcttggatgactatttttcgttttggtctccttctctcactgatggatggtgattgttttttcttcgctaccaggtccaatgttaccataacctccatgctagggaactgtggctggtcgttcaaatttgagttttaattttacttttacagtgtttttgtctattgtgactttgtgtataatctgattaattagttgttatattttgggtagcagatctaaaaatattattaaattttagattcaatatattttgggtagtagatttgaatttctaaagatttgaaatatgagtgttagttttacaatattttttatttttttttttgtataatctaagtaagctggtatattttgattggaatttgagtgtgattacaaaaattgaagagattgaagatgtagagaagtagaagaaagaaatggaaaatgatagtgagggtgagaatgatttttaattattttttattaaaattataatttaaactagtagtacttcaacacgtgttatttttagaattgataaatggatagttatcttgggtactgacaaacttacaaaaattaattatgacctcagagattattaccgctgatttttaaagttagggacttatctacaccaaacataagttttttgggacttattcgtaaatttctcttaataaattgatgagaag

SEQ ID NO: 205598 - DNA, 1310 bp, Cannabis indica
ttattttttattttatatatatacattaatatttactaagatcatagtttttttttttttttgaagaggatatatttattaaacaaatcagaaacaattacaaaagattaagtaaatatgctagaatagcatttttttctttttgcaacaaaaggaaggaacttcctcattctaaatataaaaaaatttaaaatctaaaattaatttggctacaagatgaacaacataattattcttactaacagtataagtaacagatgaacaactcgatttataaaataatggtgaatatcattaagggtagatttatgtcaagccattatccattcttaactaacttagaaccaacaaacaattagtctccaatgagaaaatcagaaattagttagattaaaacttgttgcaaaattaaagccaatacagattggttgcaactcaacaatttttttttttaaaaacaaaaaaaatgtaataggattgtaattatcaataatatcaaataatagattttggcatatttactttgacttaattaattgtttcattttagtaaaccataaatgacttttaaattaaacttgaaatgtatttgggcaatttcatcatttatggcctattttatatagctactatttttgaatattataaggaatgataataattaaaacaaatagttatgtaagtgtataatatgaagaaattgttgactaaattttaatttgaacgactattgctattgccatattaaaaattcatttctacatcttttttctgagaaaaaaaaaagaatttattatgaacaattgtagcaaccaagttagaaatttccaatactataatggtaaaattttaacactacattaattttctatttaaacaataaacaatatgctttttttttttaataaaataaaataataagctatattattgagtcaaatttttagctgtaaatattgtgtgtcatcattgctcatctgtcctttttctaactattatgaattaattagtgtacacactcaaaataagaataataaaaaaaactaattatttttttaatcctaaactcatagatctaccttcatttactcatttggtctaaccaacctaaaatgaaaattctttgacactttgtctatttttttttctaaaaaaatacttaaatccaaataagacaaacaacactataaaaaaatattattttagtcacaataaaacttatgactaagaataaaaaaaataattaattataaattattatttttgtgttgagactaaaatatttatagttaaaaatattagttacaaaa

SEQ ID NO: 205599 - DNA, 847 bp, Cannabis indica
attctcacttttgaatatacaaccaaataacgtcttagtaattaatatataacattatggttacccttatattgtatggggtacgttttgcacactctaattaccaaataactataattacattttcatccctcctacaagtcacaaatcacaatagtaccttactttctattgttataactcacaaatcgtttacaataatagataaaataggatgagagatttcccccatccaacaaatgtcactattcaactttagagcatattttgttaatccgtgagttgattatagtgggtctccgaacatataagacaaatactctagaaaaaaaaaaagaataaaaaacaacaaacatctaaaattaaattggaaaagttaaataattctttacatgtagtagacaaaataaaggaaacttacatacatagcaaaagtctcaatgagtaattgatacttgcagttgattcacccaattgacactgtggaaaagactaaagagcctcggctttcatctcattacttctgaaattccctcgcaattggttttgaaagagtagcaacttctcttccatcatggtcagcatcaaagttcatctttaatccattcgtctcatgtggcttccaaggaattttgtcaactcgtatggaacttcgaattggaacggatgtggaggcatttaattggttctgatggttgccttcggttcttggctgaatggtaattctccaaatatttagttagcaatcgaaaacccattaggcacaataatacttacaaattttgaaagtttaaaatatcatgatctttcatatatatggtaagtttattattaaatagaagctaga

SEQ ID NO: 205600 - DNA, 537 bp, Cannabis indica
cactaaaattgtctttcgatttctctcccagcagtgcataattggagagtgtagtgagttatataatatcatattggagagtattgttatgaagacttactcaaaataattttatatgtattttttgtgcaatttataaattaactaaaattatttttatagtttaagttataatgtaagagagtagtagctcaatcgatataaagaagaatagtgactctttcgacgtgaagaagagaaaatgtcgatgtggtgatgaatgcgtagtaagaaaaaatagaaataatgtcgaattgttctatggttgtccattgtggaaggtatttcttgtcgaattttgagaattcaagaagatatattaattatatgataaattttattgattatttgttatgtgcagaataaaagtgaccaaggttgcagatttcaaggacttgtataagatgaaagattgatgactattaaattatttgatactaaagaagtagatcaattagcacgggacgaacatggaaagctcattgaaggaatttcagg

SEQ ID NO: 205601 - DNA, 1000 bp, Cannabis indica
aaaaaaaacttaaatatctaaattgaatttatttattaagtaatagtaactttaatacaatactgaacaatacctattatatatatatatattataagcagaacaacacaaaataatagaagtcaactatattatatatattaactgttttcacacattattttctgtgtaaacaaaagaaaagaattggatcggttggaaatatatatagtagcaaaaccaatagtagtgatcataaaattaggtttttgctaattaatgaaaagaaaagagaagtagaagaaagtatatagtgatagtgaaatgtatttgtattggtatagctagctatagtcttattctcaactaagtggtttgtcttaataaattaaagctagatattaatttgacatagacaagtgtgaggtggccatgcatgcaaaagaatttgtggaaaaagattatgctacgtctgcaatgacacagctactatgtatgtttctttctttgtatacatattgtcattaacacgtgatatgaaatcctcatgcaccttcaattaaaattagctacagtggagaaatcaaatcttgtcttcataaaataggttgatataacgtacgaaataattttgtagttgacaattaaaaccatatttctctagctatataagtcagtaaattttgtatttatattatagtcaattatttggaaaactcttgtgaaaaatattcaattcaaaccaatattcattatttttcaaaagaaaaacaaaacattatgagaattaactttattttgtaaactgtatggataatattaaacactttattttgtttggtaaaagtaactaataattcaatttatatctatagaaaatttttatggtaggaactcttattttgtcttcataatatgaggatattttctcaaccatagatatagtagacttttgaaattacaaatgacttattgtatacttgtacgtagacaattagaattttaattaaaaaaaattaaa

SEQ ID NO: 205602 - DNA, 1665 bp, Cannabis indica
ccggtaataatattaataccagcaaattaatagcaaaagttctgccagtattaatgtctgtctttatatacgctgacacagtaataccggtagaccaactttagcatttcgccgatattaatatttttcatataaattttttttttcaattttgaatatttatataataaaaataattataatattatgtataataattattttaaaaatgtattattaattaatatttaaatttaagaaatcaaacattaataataattatttataatattaatttatccataacaatacacaatactatggtcttaaataaaattataaaattgtcttaaaaaaactttaaaacatgaaaattttcttaatcaaaaaacataattaattatcattgttcagatcgatcagtaaggtccataaaatcatctgcattagagtcaagtcttgaactgtcacaattatcatgagattgaggacccaacgagtagggtaataaggttgtacatattattgcgtaggtaagatctccacaaattgttgagttgacggatgaaccaaagtagggtgttgttgctaactctgcggagtgaaaatttgacatacataggctattgtggagatcctcctatttgaccatacacaggttgttgctgcaacaatgacccaaattgaccgtacacagattgttgttgtgatgacccaaattgaccatacgtaaagtattgttgttgttgcgatgagcttccaaaatggccaaccataggttgttctgtctaagatcctcctgtggcatccgaaaaatatataagaggagactgtgagggatgcccaaatatgttatgtaattgagacgactatgaagagccagcagacatgttcggagaattttgttaatgttgttgaaagaattgaggcatctgaagggagttaccagacatgttatgagacatattttatacatatgttttttgcaagaactttcaaatggtaccaaatgagttctacattattagaaaactatataaaacataataaaatacaactaaggaatccattggcaatatttactataatttgagtagttttttcaaaaaagaaaaagaaaaaataattttaaagaaggaaactcaacaaagatattcataaaaagataaagaaaatgtgtatccttttttataattatattatatttttcttttactattttatattagataatgaaaatttaaataatttaatcttaagtttttattatcttagttgaaatatattacaacacatttttttttaaatatctattcagtataaaatgtagctatgtaataaaattttggtttaacggtattttttggtttccagcattaacaactttaacataatattctattactttaagagaatagtctttattttataatattattatatatatctaaaaataaaaattatgcagatattttaattatataagaaaattttaatttaaaatacttaaaatattggagatattttatagaagaaaattttaattgtaaatattttatattagtccatggtaatatttagtgtgtgttttcctttctttttcgatcaatatataagtggagtgacctaattatttttacgattttatcgatcgatgcattttacatgatttttaaaggcacatga

SEQ ID NO: 205603 - DNA, 1404 bp, Cannabis indica
attatgttgtattttctattttatttgtataacaattttattaaagtcataaatttggactattggagacaaagagagataataaatgaatatgaaatatatacttggattggatttctgtctttgtgtaaattaaaagaatggaaactagagttagcaaaagcagccagacaaaatggtattacattatgggtaattaaaccacgaatgtctgccatttcaagccactttaccaacttctttaatagtgtttttcataagacaaagaaaaatccaaaagggtgttgattaaaatgtagaaaagctttttggggtgaatactcaaatatcttaaagttatgtggtgcaaatgtgaggtgaatttattatggggaatgtttgctagctcaccttaagttgtactattacaacatgccctaatatcttgattttttaatagtgatttgtgaaatttcaaatattttatggtgctaacaaataaaattcaaacagcacattgcacgagttaagattagagcatcactattaagtactaatgtaatgtcctacactattatgagatgatacttaatgaataatgaatagttagtaatattttataatagttattaagttaaaataataagatttaatatttaattacatctatattaatatcgcaatttgtagtagtgttaaacactattgatgtcctttaacattaatcttaagtgcgtgtttgattagaaataatgaaataaaaagaaatgaaatgaataaacttttcttttatttatttgtttaattacattttaaagtatgaaaatatcattttaataaaatgacttttttattttaaaatagaagttacaatggaaaatgggaaaaatttaaatttttttaatatattttaaatttagatacttttacaatgtacctccttaaaatgattgtaccaatgcacctcctatttatttcgtcatctaggagaattttataattaaatattttatagtcatgcacgttataattatttaagacatcatgctaaattctaaaaaaattcaaaatagattacaatgtaaaaagtaacgttcaaacaatctatttcatacgcgtataaaataaaatagtaacacataaaatagaccgttaaaacaatattttcggcgtgttaaaatttttagaaatttcgtaaaataacttaaataactaaaccgatcatagaaaaaaattaaattaaaaaaattctcccaaaattaccaaaattaaaacgcttcaattatgctacgcacgcatgcggcgtaatacaccggcgcagattatattatgaaccgaaagaaagacaaatttagatactcaaatactctgcttctctttaccgttatacggtggaaaaggtaaaaaaaaaatttaaaagtgtca

SEQ ID NO: 205604 - DNA, 690 bp, Cannabis indica
ctctgttgggatcagaagttctaagatatttagggcctgttctttttgtagtattattatcttgaggaatagaatcgtcaagagtttcttcatcatgtgcagcattctctggttcaagcctagcctctagttaggtcaaggtttcttacattcgccaggagaattcttttgtgccgccaatgttagtttttttgtagggagttctttggccattttaatgactacttgatctggctcgtaataataatcatcttaatctttttcttttccatcatcttcaggatcttcgtccttgggatcttcctctcaacctttattgacgggatttcatcaacttctttcttagtacgttgagtttttttttagcagggtgactagttgcctctattagatctccatcgattgttgtcttccctcgggctacaggatctacatcgtccataaaagtctctccatcatgaccaccaatttggttttaggtgagtagttttagtatacaacctttgatggtatcaatgctttctttaactctcaatgaaagcaccaaaatatttaccgagatttttagaaactgatttattatatgtgaaagctaaagaaattgatcatagatacaaaaaataacaatgaggattttatgtggttggtgcattaacgggcctcagctcacgagtcaacattattacttga

SEQ ID NO: 205605 - DNA, 989 bp, Cannabis indica
caagcaaagatgaaaattaatcagacatgaccgcagataaaccactatcccagtccacccaattatcttgaccatccttcaatttggatatttgattatggcatttacatttactagcagataagtgaaaatacttactatttttatctccacctttaagccaaaaatgctttgctctctgcttccaaaatatttccctttgatcaagaatctcaaataattcttttttaacatcattgtagagttgtatggattcagtatcacggttacctttgagtaaacgcagctagtccttgcaatgcttaatacagcctctaaaattaccagcgatttccttcccccactgctccaaagttgaggcacacagttctaattttttagtaattcgcccaccaatacttctttcccagcaactttggatgatttggaaacacatcggttctcttaaccatgcgttttcaaagcaaaaacgatgacaagttgagaaatttgtatgacccacaagttctaacaataagggacaatggtctgatgaagacgaaccgaggttgagaagcttcgatgcaggaaaaagtgcagcccacatactgttaataagtgctctgtccagccgaattttcacccaaagatcagtaccctgattcctttcccaagtgaaaggatagccagtcaactccatatcctccaaaccacattcagcaaggcaatgattaaagccctccaatagccatcttgggtagggatggccaccccttttatcttcttgagtaagaacattattaacatcctctttgttgctgggctgtataaatgtttgtaggaccagctcaatgtatttgtgtaatatttttgtcattttagtatatactcaaaaaaaaaagcctttttttaatatccataatgattcaaaaatttaaaataatttacaatatagaaacaaggttcaaacaattcattttacatgagtataaaataaaaaaaaacaacgc

SEQ ID NO: 205606 - DNA, 737 bp, Cannabis indica
aataggagccaaataaacctactcgcacccaagaacaacaaccaggggaaacaagggaaattcatgttgatgaataaggtcgacctaatcaaggtgccactacttcaatagcacgatcaagaggttagcaatgtctcatagaactggaaaagagataaatgagcacctagctaatcgatctgctagccctctatgtccacctcgtggaccaaggagggtagaaagggacaatatgtatacttacttaaacaggggacgattcgctaatgtgtttgaaaggcgaaagccagcctgtgaagaacatcaaggatcagaatcaaacatcgcccaacgtaggtctatttaaagccatggacaaagtcaatcccctagatctcgcacaggggaaaatccaccacgaggcgagagaactccccatcgtgaatagtaaaaatgaaacaagaaaagtgtcagcaacttgcaaagttaccaatcagaacgtgtttcccctagtctcttaataagtaattacgataataggcaagattgacgacaaaatgtacacgatcatctcgatctgcgagagaagataaatcgaaggtttcctaacctacgcaagtagataaacataaatagcactagatcttagagagagattgaatagaaatagctccacctgcatgtaaacaaagtcaatcaacccgttgatgactcactcagttaagggccgatttagttggaagagaaagttcagacaa

SEQ ID NO: 205607 - DNA, 1577 bp, Cannabis indica
atcggaaaaatcactaaaaaaaattggtttcttcatcaagaaacgatgaagaaaccggtttgttcattaagaaacgagtttcttagtatttttttggtgatttttcagcgacaatgtcaattctgacgactttttcagcaccgacaacaactccagcgataataactccggcgacttttctgacaccagcaactatcccgacgacttttttgacaccaacagcaaactccgccgactttccagccccagtaacaattctggcgatcactgtagtttcatttattttatttttaaaaaaatatatgaaggaaattttaatattttatatggtaattcaaagtagcatatcccatatatgttaagtttttattttaaatgccatattttttcctattaagtttcctcaccatatttatgctttatttttctagtttttattttcagtttgttatttgttttttattttttttttttaaataatctggtgggtttttagtgtctaaatttttttattcgtttattatttcactgaaattaatggatatttttcaggtgttttggtgttgccgggcaggttctatgcgtgagggacgaagatgaagtcattggtattaattttctgtgtctacagtataaaagaaaaaaaaaattccaatccagtataaaagtaatttctgccgtgtggcagtaattttgtaaaaattaagctaaaaatcaatatttttataagtttcccttgaattttttaacaccttatccaatatgcaatttgatctaagtagatattaaaaaatacactcatatacagtcatggaatagaaattttttttcacaaatttttcaattgtaattgaattgatttatacaatcatgggatggaaacactttttatataaatgtatataagatgctactttaagggtcacctaattatggcataattcaaaatttgtccatctcaaaagagacattaactcaacaaaaaaacaggttaaatcccttcatgctccatctccaaaccattccaaggatgtgcaaaatgctgaaaatattttagatgaacttcttgctaatgaagaacaatattggcagcaacattcacgtattgattggctttaatcgggggatcgtaatacaaaattctttcatgctaaagcttcagtaagacaatctaataatagaattcgttccctttgtgacttagatggtaatgtggtaacatcaagttcaggtatctcaactattgtgtcctcttatttctaagatttattttcagcaaaggaggaagaccattggcctctacaacatgtcttgtctaccattcctaccactattacagctgcccataatagttttttgttgcaagatttcacagcatgtgatgttttagaggttattaagagcatgggaagtgatagcagtccgagtttagacggtatgtccgctatgttctaccaacaaaattgggatattttgttcttttagtaacaaaaactgtccttcatgtcctcaatgatggtggatctccaactgctttcaacaaaacactattttgttaattccaaaaaaaaaaaaaa

SEQ ID NO: 205608 - DNA, 712 bp, Cannabis indica
tatatgtatatatataattaatagaacaattttatttaatcctttaagaatttaagtattcacttcatggcttgtatgattaagaaataaaacaattaattaattgaattaataatttttttaattctttaattatttactacttggcaccttttacttagttgaaaaactaatcaattaaatacttttttttttttgaataaaatcaattagataatttagtttatttttgttagtgttattttattttattttttttgagaaaatgttagtgttggtttttgaaaattgtaaaaataattaattaatagatatatttaattatagatattataatgggtcaaagaaagttatgatttatatgatagtttttgttttaaaagaaaaaattatttatttttttaattgaacgtaattagttttttttttttttagtaaaggtaaagtactttattctaacaacaaagaaactacacaaggtcaggcttctctgcatctaaaatggcagcaacataagagggtaacgatctctgaccaaacagaattacatttgagattaaaggcccacttagctaaggagtgagcaacattattgcaatctctactaacatattgaatatccacacaaccatctagcagattagaagagaaaatagtccatcaacggcagcccccgaactctgcccgacggaggctttcctagacagcagct

SEQ ID NO: 205609 - DNA, 1472 bp, Cannabis indica
tcagttagagtgaaggaatgcgataaggtagagaaaactccaatttcaattagaagttgtttttcccttacaaaaaaaaaaattggaagttgtttgaagaaagaaggcatcagtgaacgattgaagaatgtgaagtcaagtgctcaagtgaagttcaatgagatgaattcaatgcattctcttatttgatggtttgagttgtgaatttggagaacttgagtcaaggtggagattgttggagtttaactcaaattatttatttatctatatttgtaaaattgaaatttctttttgggtaactataaattgtgtaaaaagaaaaattttggtggctaagttttgaaagtcttctagagaaagctttgaaatgtcttggtccccatgccaacttgacttggtgccgaagtttattttataaatttgtgttttgtgagtgggtgtggtgtgtggagaaaaagagtaaattgtaaaaaaagaagtgaatgtgagtttgttttgtgatgagagtgaagaagaaacaaagaatactgaaattcaagtacacagattgagataaaaagtataagtgaatatatctctttttgtgagtttagtaattcttactagttctatccaaccgagtaaattgatctcttcgtttctttattaacctgcttcgcttcaagtttattatttttccaacataaattaatagaactcagaaaggaataaaaaggcaggggcagtaaaaatttaggatccgaaggtacaaaacaattctttaatgtaaaaaagtttcagcttcaaaatatgagatcaatgtgtgtaaccaatagtaggtgtaagataaaaattaagttggccatgtatacccacaccacatgtatttgtgactatatatttgtgatcgcagcaaatcattaacccttcaaaatgagacatccagggacccatattgtaagcagatacaaatatttaatgctcaaaagacttgaggggatcattagggtcgatttcagatataagggggagatcgattcttagagtgtctaggctcaggccttcctccatcagcttcctcaccacttcatcaaacacaatccggtttccactgggagtcagatgcaaaccatctctgcaatatttgaaattaattagtaaatatatcatcattcaatttcaaaattgtaataatgtcacacatatgtatcatcacatgaaatgttaagcataagaaacacacatgtagaatgagatgatccatgctatgaaaataccaaaaacaatcaataacaaacataagaaaatagaggaagaccttagacaagattttttccaatgaggaaaatggtgaattttggtccaaagatctatcactgaaatcccacattctccagctacagaaacacatgccttggcatacgccccagcagcttcatttgtcctttcaggctcgttggtcaaattttccacataaggatgccttaaacaaa

SEQ ID NO: 205610 - DNA, 1064 bp, Cannabis indica
tttctaagactttaattgatcaagggttcaccgtgtctgagcttggcggcatggatcgggtcctaaggaagcttagggagtcagaggaccagatggaagcccttcgtaatgaagcccgagaagagaaggcccttatagaccgaaatcatcaagcggttcttaaagcgaaggacgacattatcgcctcggccaggaaagacctctaggactcaagagaggagaaccaggagatccttgtgaagcttaaatctttggaggagttgcatcagactaacttggagacaacaaccaacttgactgttgaactcaaggagcttcgtgatttctgggacaaaacccacaaggaagcttccaaggccgagagggatgctttactggctctagttacttgcaagcactgtgaaaagcgcttcaaagatggagcgtttatgtgctggaaggctaacaagctcaaacctcgccttcacttcctccccaatcctgaggctgttatagcccagtttttggagaagaataaaaatctggaagcctttctgttttctttacattatgcatacttcctccctacttaagacactttttatttcttgcctttactctttatatatgacctatttctacgcgtattttatgccttagtacccctccaaaggaaaagaaaaaaaaacttttgggtcacttagcttaaattcatatggaataacgcacatatttagtctgtcacatgttaatcttgaagaataaagaagaatgtaattactgaactcctaactattgatagtacttgcggagatggtcagcattccacgctctaggtactatggatctgtccattcttttgagttcataagtcccagagcctatttcatcgtcaatctcgtatgggccttcccaatttggcccaagtacccccactcctggcttgtgggaggccaggaagaccctccttaggactagatcaccaattaaaaatttcttgtttttgaccttagaaataaagtattttgcctctttcttttagtatggtgccatgcgtatttgagaatcttcccagagctcatcta

SEQ ID NO: 205611 - DNA, 686 bp, Cannabis indica
gattagtcattcttagatcccaacaaaggtggcccttgctagctgaggtatgcaaattgagaagaaatattttcggtgctctgagaattgtgacgaagatgtttttcatgctttatggggttgttggggtaacctggatgtttggaaaagcaacaggttatgggagcaaatgaaacagcaaaaaacatgagatgttgtaacttttctgggaggattacaaccagtgtggtttgtagatgtgttttgactattttctactggtttcttggcatttgtggtctattcggaacaccatacttcatggtgattcggctcctagagcaagtgatgtgttagaatgctgtggaaggtacatgcaggattttggtgatgctgggtcgcagaagaagctccaagagcagtgtgctacaacaagatggatacttcctagctgtggtcagtgtacaattaatgtagacgcatgtgtttggggttcgtcagtgggctcaggtgttggtattgtggtgcgtaatgaccgcggtagtgttaagttcacttccagtcggtggtgtccaacgaagagctcccctttagtggctgaattgtgcgccatcagggatggacttcaggtggggttgcagagcgtctgtcagcgtttggggtggaattgaattgtagggagctgttcagctagtgcaaaaaaatag

SEQ ID NO: 205612 - DNA, 1483 bp, Cannabis indica
gctttattgttataagaccattccattcagactaaagaataaatgagccacttaccaacgaatcgtgaatggaatatttgaacaccaaattggtcaaaatatggaagtttgtgtagataaaatgttttgaattgataaaaatccaagaccatgtagttgatcttgcaaaatgttttccagtcctaagaaaataaaaaatgaagttgaatccagaaaagtgttcatttggagtctcttttggaaaatttcttggcctcgtactaaatacgagaggaattgaagaaaattcaaaaaaagataaaacctctgcttgacatgccttcaaaatttttgctcgacatgcaagaggaattcatcaagttttttacaattgcaatgatccatgaattcagatcaatcaaatttacaactttaattttggctcatccaaaagtcggaagtttcgagtcttccatttctacaagacaacaaccatttctgacaatgtgtgaccagcttgaccaaaacatataaaaggattaagggttgtcaaacaataacttgggcatctcaaaggaatttctttagacatttatacacctttacaacgtccaagctgacgtcagacgtcaacttgggcactggaatgtcaacctgggcgttggatgtcaacatgggcactgaaatatgaattacctttagtaaaacagccacaactcgctcaattttcatctgattgatgtaattcaaattgtgttttgaagttatttaaatcctctattaagtcatgtctcacacaccagccgaaattctgaagttatcgttgtcaaaattcatgcccaagatagttataaaaataagctccgagtaacacgcaacgtgacctgctaaacataaaaaatcaaccatcactaccaaaagctaatttttaccgttagatcatcatcaacaatggaaaacactttatttgtaatttatctcctatttttgtgggcctccttcacctataaaatgagagctcccttagtttatttttacattcagaaaaatacccacaaggtcagagcttctcgctctagaatttaaaatttctaatactcaaacagttgttgtaattaccctctcgtgagaataaaaactcgaagtagacgcagtcccattacctatcgcggcataaggagtgaattacaataaattattgtgtctctcataaattactctataactttttatattctcgccaatctagcgagcgagtggtttagaagtctagtttagatttttgaatcaacaatcatgaattcattaagtattatatataatatatatgggtaaaattataaatatatatatgaacgtgcatatgcatatatacgagtgtatatgtatatatatatctgaaaattttattttaatgcatagaaactattagaattgatgaataaagacaatcctaacaataataatatgtactaaaatgattaaaacaaaaaatagttctttg

SEQ ID NO: 205613 - DNA, 808 bp, Cannabis indica
aacgaccttgtcctcaaggtcgactaaattgtacatccgtatgaaagcatcaaagtcttcccatgttgcatcttcaggcgaactgagagtccattgaacgagcacttgacgagtcataccagtagctgtgtgattaattctggtagcgagaatagccaacggcgtgaggattggtttttagccaagctgaactcaggcaacggatagcacggtaactgttgtgatccccgaaatggtttgagcagtgatacgtgaaaagtggggtggatgcggctgccttggggaagtttcagcgtatatgcaacggggccggcatgtccgataacttcaaacgggccaaaatatcgacgactaagcttgaagttgttgcggtgtgctactgtggattgccggtaaggttggagtttaaccaagaccaaatcgccaatttggaaggagatgtctttgcgcttcttgttagcctgttggcacattctgttttgagccctgagcaaattgtctttgagatgctgtaagatgtcgtcccttgtcaacaagtcttcctctaccgcttgaacagttgtggaccctcggatatacgtcggaatggatggaggtgttcggccatataccgcctgaaagggagtcattgcaatagcggaatggtggctcgtgttataatgatactctgcccaacacaaaaaacttgctccattgtttgggattctcggcaattaaagctcgaagatatgctccaaaatgcggttcgtaactccgtttgccatccgtttggggatgataagctgagctcattttcaacttgtgccca

SEQ ID NO: 205614 - DNA, 700 bp, Cannabis indica
ctacataatataatacttaatataaaacatagcatacgtgcatcgcacgtaacaatatactagtatatatatatgacatggtgattccatgtcaattaagttaaaatatgacgagaatttctggatcattttctttattaatttgtctttcttactaaatctgagttataaccaatgtcaggtcaacaatattggagagattaaaggaagaacgtgctaattttagagttaaatacttggtcgaaaatatgggagaatcaatagtaaattaacttaatttagtaatatttagttgggaatcattggtattcatatttgaatcgggcctataaaactgatggaaatctaatgtaactttcattcttcaatcaaaacaaaaagcaaaagcaaaaaaaaaaattaaaaaaaaaaaaatacaaatacaaaatgggtctcatcgaacgaaacaagaatgcaatctctttgcttgtatttttgacgatttcagtcacaattaactgtgtctcctttgatataaccaaatacggtgcaaaacacgattctgatgtgactcaggtaactccacaaatttgttaattataataaacttaatatatatatatatataattggatcgtgtgttgtttattaggctatagcaaatgcatggaagacgctgtgcggcaccaacgagatcgaaagtatatattccaaaaggaac

SEQ ID NO: 205615 - DNA, 879 bp, Cannabis indica
tgtttagaattggcaacgctacttaggtcggcatttcctctgaatgtgactgggtgttgatcttgtagatgtaaatgcaaactgtacactacggggttcatctcattaacaacaaaaccgtatatcctccacattgcttcggggacaacaatccaccagaccgtttggaattgatggatttcatctactacttcagtgttgttattagaaaccaaattaaatgcaacacgatcatggcccttatatatgtacttatagtgttatttgacagcttttacaatggaccaaatttcaacattaatgtgacagtcaaatgttgcgaggagataggggttatacgggaccacccatcgattgtctaagggtgaccccctaacattcacagtcacaccattgtttgagcgcctatatattgggaagcaatcatttccaacagaggtaaatggtgcatagctctttggataattacttttgcaacgtggtttgtcccccttcatgcaaacattgtgtgatttttagtctccgcagggtcgatgcatcatgtgctttaaaacagccttgtgcatgtggaggttggtatttttatcaggaatctctacagagacaatctcatcaaatgattcgggtgcatgtagtctccaatctctttgcaagataattaaaaagtgtgcatgcgggaggcccctcttttggggctcaataacgtatacatatactgcaactttgccaaatatttcccgtttgaataatttatgttttaattcttccaattttgcatgaaaaactcgagcggttagatcatgtctattctgcagtgcaagcaattttttattttttgatatattagagataataataatcatgtaaatatatatttac

SEQ ID NO: 205616 - DNA, 903 bp, Cannabis indica
atgtaactgaaatggagaaaggaaaacaaggaaaccacgagacagttacaaagcatgaaaggagctagattctccaaacccgatcctcatcttgttgtaaagcttctcgagcatgccgatgggcttcaccattgtgattcctcaagatatggtggagagaagcattagggaatgatgataaggattctcgaatcaaggcaataatactggacaacgctgaattgtccttccaactacttttcaccttcaagatcaactgcaaacaattggactcaatggaggctaaggggatcttgattgcagaacaccagaggaggccctctagcagagcatgggcttcttcaaaaaggggagaggaggcaccccattttaagatagagaaccctacagtatgctggttctggttgttgcgaattgtagctcccaaacctgttttaagctacttgagatcgagggcagcatcaatcgaaagagcaaagtggcattgtggaggagagtgaggaactggatcaattacattagttggttgattgtcttggatagctgggattcgatctgaaaccttggactccaaaggatcggtatggattgtgatagtgtgagcttcttgataatcctgcaataaagagtgttatacccaaaattcagttgtgtaccagaagctgacacgtgtcctataaaaggcatttaaatcaactcaataaatataataatgacattatatcattaaatgtaattcaaataactcatttgatttaaatatatatatttaatagagatgttcaaactcactaactatttagtcttatgcgacacaagaataataactattaaactaagaattgacgagacatatgttttcctcagtatagacagatggcactcaaccgcctcgcgttactc

SEQ ID NO: 205617 - DNA, 1090 bp, Cannabis indica
caatgtgggtccgcccctgctcttatctctatacataaatttttttttagaatgaattgcggtaaatttctaaaatttttacttcactagtaattaattctcaaaacttaaattttagcgccaaaatcatgttttattagtaatttaccatttttgtgcatatttgactactaattgtcatgtttgattgttcatgtatactctatgtattattaacatgaacacaataaacacatgacaaaatttaattaatccacataaataaatatttcaaataaaataaatattaaaataaaaaatgaattgtaattattttttttctttctaaagcagattagatatattttttttataaaaattaaaacaaaaaaaaaacatataattaaacaaaattaagaaaatgccaagtacctaaccctaaaacccatctttccatcctcttttccgcctctttctatatattttctgcaactcacgattgccacaccagcactattaaaaaaatgggttttcttgactgttttaaatagtcaagtaaagtattctcgtcgatctctaaggccgacacttatttgaccatcgcaaaactgggtagaatagatgtcggttaaaaaatgttcaaaaaagtctttcccgatagtgcaaaaccatcagcaatacgaagcaacactattaacgattttgtaccatcgcctatagcatcgacgacagtgaaaaatcgtcgggtttactcttaatgtatgccacaatcaccaaatttcggagcatggtgataagctcctttggctactgcattctgtactagaattcctagctaggagaaataattaaattggtttgaatgaggatgatatgaataatactaaacttaataatcttattgctttcaccatctctttctccttctcttatttattactttgtctctctctgtatatataaacaaacaaaattatagatctatatgggtttggttagattaataggagagatgcatatatgaatgtatacactttgatttaaatatatatagtataatgaaaatgtactaacattatacatgcaggggctcgtggtcgcgtgagagaga

SEQ ID NO: 205618 - DNA, 1025 bp, Cannabis indica
atatacatctcaatgggtttttcttaacctttctaattatattgtatacagaggtggcagaggatagttcactttccaaagaacctgatgcccagaccagggagttgctcctcccttttcgttgtttttgttcccgtaaagatgtaagtcacaatcaaatcaaatcaaattaattatagtatcagattattattgttttttcttatattataaatatacattacagatacaatgcaaagacatcatgttagaagatgtagatgtagctaaagcattgattgagtacgtttcccaggctgcaatcgaaaatttggttcttggggcttccgttaaaaccggcttccttaggtaaggaaagcattaattttgattgattgggttaataaattcaataataatttataagaacaaactcaatattagtgtcaattcactatgtagattcaagatgagtgatattcctggtagtgtgggaaaaggggcacctgatttttgcaatgtgtatgtgatatcaaagggaaagattcagtcaatgagatctgcacagcgcccagctccggccaactctgccttacgagctgaaataatgaaacaatctgatgatgagccacaaccacaaccagctaataataatgcaaaagtttccttatccctatccccatctcacccatcagctgcttctgcttttgaaaaaccaccaagaagatcttatgatgaacttgaatacttcaggtcaccatttactagcagaagagggccaaatggaaagtcatatggagaacttcctactatgtcagacagtggtgacatatcttttgtcagctctggaaggccaagctctggaagatcaagtcttgaccgtataatactacaacacaacaccaacaccacaccaatcacaacaacaacctctgtcctattccatgacaacatattgactcagcaaagaccctcacctcggatgtcaaatggtacagacattgctttaaaccagtacagctttgagtctttgcctaatggacgaa

SEQ ID NO: 205619 - DNA, 1845 bp, Cannabis indica
atagccatgtcatattttttttttttttagaaaacaaagttacttttactaagaaactttattaatttaatatttaaaatgtgatatgtaagatcataatggacaatttttgtcaactatttagtatttttttgtaaaaaagaaatgtgtcaaattttaattgtaaatagagagataataaaaaaataacatattttggagatgatgtattactaaggctcatagtacccaactcccattcagtttggaagctgaacttagtgccatcttcctagccctttcctttgggcagttgagttgggagtggtcagaggtgtatatcttttcggtactcgaagattgcagtccctgacaggaaagtgtctagtttatactattctacatataattaatataactaaggtgatttttggtgttaattttttctttgttaatcgtagttgtaattctgttgcggatggtatcgccaaaaacgctagagtttctagtgattcacatataatttctcccgaaaacgtgtctaacgacacgacctattgggccaacacgatacgcacgaacttacaacactaattatggcatgtctcatgctcagtaagacaatggataaagaagagaacccgcaacctgcaaaaaattaggtatatatcaaatgcaaccaaatgacatcgtgtcacatcactgttttcttattatgacacgtaatatgtcaatgaacaactctcaataaaattcagataaaaaaacaaccctaataaaattcgacaataacttataaggtgctacttctgtgcactccataatgaaaaaattgttgcactatcttggagaaattattaagatttcagcttgtgtaaataaaaatatttgtgattatattcatattttaattaataattaaattaattattttttaataaaaataattttttttgcgccttaaaattataatttttaagtattaaatatgaaataatttaatgcaaatatataactcaaaaaatattaattttaataaaatatagaaccaataattaataatttttaactataaaactaaatgatattaaagatgaaaaaaattattttaaaagcaaaaaatcataagtactgagaatcaaaataaaataaatacttaataataagaaaagttaaaaagattataaaaaatttaactagaagaaaaaggaaaattaacacttgaaaggttagagcatgaacaaattgcacaacataaaatagaatggttaaaaatcggagtgccacacggtgagctcgtattgatgttgaatgctacgcgggcacttgttgattggctgaaagatgaaacaagttggacacttggcgggctgcagaagggaggagaaatgttgctttttggtgacttggggaccacggaaagggagacgcccacttgcgcacacggagagtgagccgcaaacgcggctgagaggagaaggtgactggcacacgcgcgtgagggaagttggcggctggcaaggggaacaaggctcatggcatggggtcgcttccccatccgctaatgggagctcgacacatgtcgagcttgtctccttgatgaggcgattgggctgattgggcctatcgggcaggactaaatatgatctttaaaaataccacattttcatgtctttggccatatttttaccaattttaatttcttttcttttcatttcaccaacgttactttttaaatcaaaacaaataaaattaaatttagataaagatagaaagagagaagaaaagaggtgaaaggaagatactgaattattcattcaacggaactatttacaaatttgtataacaactgacaaatttccgatt

SEQ ID NO: 205620 - DNA, 763 bp, Cannabis indica
gagagagagagagagagagagatttgagctagatgtagagaaagaaaatatatatgttgtgaggtttgtacacatggcaagacttacaacacagacccatccccaaaatcacgctataaaaaaaaactataaaatatctgccatgtgccttcattcggaggcagagaacatcactcggaggccacccaccaacaaaagaccagaaaaatttattaaaaaaaccaaaaatcaaaaaccaactcaaacaaaaaataaagctctgtcagaaagagcagagtagtgaagctaatttatgggggaagaaaagaaaaaaaacaaaaaccagagggggaagaagctctgaaaatcaatcaatggtggccgaaactcgatgacccagatgaagatttgagaagatggtggtgtaacgagaggtgggtttgagttgaaaatgaaaaaaaaaaattgatctttttggtttatttttcacgcgttggaaggaatgaactgctctgttctcgatctgtagataaagccgcggtgagggaattgtccttgtcagaaacagtgtgctctcttacaaatttttaataattatttaattttattatttatatatataaaaaataataataaaataggtattagagcctagagagacagaatgtgagttgaagaaaatcttgtgagagagagagagagagagcttttggtgcttatcatataattggataattgagtggtttatttattttgtgtgtacttgtgttgtgattaatttaat

SEQ ID NO: 205621 - DNA, 877 bp, Cannabis indica
ttataatttgttaacaaaaaagttatcaaactataaaatcaaaacaaactttaatagagtataaagttattttttgaaatcatatacctaacagtattctaaaatgagtctattttttgataaattcctaaaaaaaaattataaaaaaaatcaaatagtatcttaaatcaatattagaattattaatattaaaaaaattgactctactaattttgatattaagtatactttatcacaattctgtaattttatcacacatgtttaaaggtaacgatagttacaaaaagaatgtaataataaaatataataatttgtgaagttagttggtataataattaaactatttttacttaaattaacagtttatttattcttcgattaacgtaatataaaaagaaatggtagtaatttttaaccactagtacgagctgaggtgtcatactattattgcaattaaaaatagggtcttaaagattttaatttaataatttttataaaatatcactaatcattaacaaaaaaaaaagtcatctcacggtacgtattggtactactagtaccagggcaagtcctgagttaataaatgatattttatcatttgacccctaatagaattgaattttagacacatgcctaacctgtcttagcttaggatcagctctgagtggtacgtaatatcaatgctcaaatatataaatatacataaaaatattatactttttattaatatatattttttttgtcataacaaatatattttttttccacatatccaaataattgtctacaaaaagtaattataatagttattttttttttttatttagtgtaattaatatgttttttttagaaaaatgaatagaaaagagaatatata

SEQ ID NO: 205622 - DNA, 2498 bp, Cannabis indica
tgggaacgagtagagtttgcgctcacggttgtagaaagccccaaacacgccgcggtgatggtaacatttttagtggtgggctatctggctgcattcaatgcagtgattggacgaccctccctcaatcgattgaaggctgtaacctcagtgtatcatctggctgtgaagtttccgacccctaggggagtcgccacacttaaaggagagcagaaggaggccagggaccgctacaacgtctccgctgtgccttgctaccaggaccacgaacccagtaataaaggtattttcggacggtttgaacggaggcggggatgcgaaggtagtgggaaagtaggagaaggcgagccatgagaagcatcacgtaaccttttttaatatgggtgacaagaatcaaggagcgagcctggggtagctccactagtataaattctttcattttctttatttctatttcacttgtatgcatgtaacaaaaaatgtttttttatgaatgaatgaatgttacatcaaattggtatttcgaaggttgttaattcctttccctaagaataagcatgtaactcaagtgtacaaccccatgaatggcgcaatacacttagggggcaaggagatgagtaaaaagtgtatatccctaaatcatcaaggactagatacccttgatcgacgacaggaaacacgctccttggcgcaaaaatataactaagccaaaagaggtcctcacggacactcatggcgtaaagccgaaacgagagggacgcctctcaagagtaagcaaacattctttaatcaagagggtagcgcgatcaagtgctataagctccctcccattcaagtaaaaggatggatttacaataagagggaggcagctcaaagagccaaaactcccccaaagtaaaatccgttaaccacagcgatgcatggccaaagagcgatcccaagagatacttggtcaataccacaaaaaagagagcacaaagcaaatgattctttcaaaaaagtaaggaaaaccactaggccaaggggtcgaaaccgcttgaccaagattgagtcttgatgtcatgcatacataaagtaaaaataggagttttacagtcatccataatcaaaaaaataataataataaagttcctcaagtctctgcggatatgatcacaagaaggaaatcctactagttgcacctcctagagggacctgcatcacgtcgacccttgccccggcacgttgcgactgcatcgccacactcgaccctgaaagactcaaccatctctattataaatgaaccaaggatactgtagtcgatgttgggattttgtatccaaactgtgtataatagacgctcaatcttgtcctccgactcttccttgttccttgccttgatagtgaagaggtgatgttgcagcttgccaattttggctctaagtctcttcgtgcaaacgtgcgaatgcgagagacacctctggtgagtggagagatactccccaagttactacatgagactggccgaggactgctcgttggtcatgaaaacttggaggcggtccacctccccttaaagagcctcgcactggcagcgagactcctctaaatcactcagagcctgttggaggcgcagcagatcctccctctccagagggttagggctgggagtgtaacgctacaagacggatgcatacaaacaaatggcatagtcaaaaaaatatatatacaaacagaagcacgtgataaaaataaagacaatgacaacatatactaacccatatgttacacttaaagagaagcctcttggcgtccctctgatgattagttgcgcaaccaagtccaatccaagggggtaaactcacccaggtgccggttatacccgctcaaacattggttcatttgggattgtgaccatgccaaagtcattggggccgtaggatggatgtgaaggaccttccaaagaactgaaggggttctcgaaaagctattgaatattgaaggcatcaaatatcacgttggaagcataaccagagcctcccaagttcgtctcctctggcacctgattattaaggccaatgtctgacgaaggaaggtccccgtcaggttctcacatttcgacatatcccagcatgtcgactgagtatggaggtactagctccgcgacacctcactccccctcaacttggctccccaaggaggcacgtcaagacatacgatgagcatgctccttagtaggaatatcaaaggagggagtgaccaactcccccaggcaagtagtaatctctttgtgacgacacatataactaccaagaatactctttatagcaagggcctttttgagcttggaaagaagggagcgactcattttgggagcgggatcattaggaaggccggaagaagatgcacctttcttcgacgcagtgggaggcttcccacgagagccgctcttggagaccattccctcacgtcggactgctgcgaccaacgaaggagccacaacatccccaacattgtcattc

SEQ ID NO: 205623 - DNA, 808 bp, Cannabis indica
gggagagaggtgcgatattgaactgagggagaaggtgggagatgcagctgaaaggaagaggatgcgataattttaagtttcaaaattagggtttttttaaaatttttaatttattatgttttatattttatttattttataatttatttattgtcctaattttaaattatttttaagtttttttttaaaataattatttatgtagaacaataaaattgtgtcacgtgtacactgtgtacacgtagacattccaacatgacagttaacaactaaaaatggatgaaaatattaaattggtaacagaacacgagcttagggaattttaccaccaaaattttagaattaaaggttattgcaataaactaaacacttatgaaagttatgccgcaaattactcttttctttattattgtaaatggtttaggtaacctattattgttgaatttgctttttaagtgatatgttcatgtaatagactttgtccaactttcctattaatagatacatccatgttcttttaaaaaaaaaaattgcccctacgaaatttttttcgatttttatattgagtaattaataaattttaccctgaacttgatttcgccccctaaaatatacgacttgttaagaattctccttgaacctttacatttatagaaatttagcctctctgttgggttctatcccattcttccgtttaaatgatgacctgtctttgtaaattactaactttagcccctaaactttgacaactatcaaatcctaccctctcaaaataaacataagaaagatttaacacttcttttagtaa

SEQ ID NO: 205624 - DNA, 960 bp, Cannabis indica
tgcaaaaacaagtgttagaaatttattagaaatcttaattagtaagccttattttatatgtgtgagtccataataaggcttacacacctatagatgcactgtatattgagtatgtaagagtctttatcttttatcataaaagggtgtttcaaaacatgaaaaaatgttcaaaagtgatcagtattgagcaaataattgcatattaaattgtaagataagaccagtatactatttagctgtaactgatcataagctcaacagtttaccccaatttagagccattgaatctcttccactatgtaagaaaaagaaaaagactacgtttgcaccataacctatattaacatacataagaaatctaactcttagaataggtataaaataatatactatacacttatatatatggactgacgctcatgacctatgcatgtcagtggtcattcaagctatatatatcactcaaataagtacaatggtttcaaattagagaaaaagatgtagctagaaactgtaaacaaatagattatatttagtagtagatcatcatggtttttgacattaatttgtttggttgctgtaccactcatgagaacaatcaaactattacactgttgctactctggacaagaatcttatcacggttcattcatgcatatgtaaataattaaagaatgttttggctattatatattaattgaagatcgacattgttaattgttccccaaacagtacccaatatatgttactgttctatttaaaaaatatatgtatagcctgaaagagtgctaacgcaactcaactgctacaactttggagaatcatcatcattagtataggggaaaagttagttggttttaattgggtttcggattttgatacaaagcatttggcttagctttttactagttttttttttttaacttttaagtattgaaaaactactttaaaagtaatttt

SEQ ID NO: 205625 - DNA, 1340 bp, Cannabis indica
tcattttcactctcgtctcttctattcttctagatgtctctcgccccttctcttcttatctctctcaatctcttcatctttgattggcaatggcacacagtgacattttccaataggagatggtggctttttcagctagtgcaagatttagatgactatctctacccatgtgagttttcgtacatatatatttatttactatatatattcatatatatatatatatatatatatattaagttttatgaattataatagtattttttttgttagctgagacacctcgttaacacctttagatttcttttgttatatatacatatagatatacatttataatttattaattattttttaatatttttaaaaattaacctataacatctcatagtattttaaagtagtatttatatatataactaaaactatttctatatatgttaattttttttaaaaaaaaaactatgtatctacatgtataaacttaaaaataattttgaactattctgtcaattttaattttttgtaatttttttcataattttttatagttaaaatattgttgttatatactattaatttttagtctaatattttttattatcaggacataatgacacaagaaatgaggagacaacaatttcaaagcatgttattatcttcgtagcaatctctactatcttgctacatttcactgtcgacaccacaatgatgaagattcaagagtattgacttcaaagttgcagattttttaaatgaatattctcatttaaacattgataatgtatatttcctttcagcaacaagacaatttcttaaggtgtattattgtattaattgatgtacaatgtgttgaataaatattaattatttttaaaaattctgttatttttcatataaaatataatattatatattattttattttcttatcaattaatattattaaatattttttttaataaaaaactaatattggaagataaatagcagcggggtccgcttgtattaatgtgtcagatagacaatctgacgagtttagtaccgagggggtccgcccctaataatccgctggtaataatatttaatagcggcgtgatgtcagtccgccactaaaaatggtaaatagtgaacctgtagtaccagcggagtattaccggcggatcccgctggtaataacttttaggggcgaaaaacacagttattctccgccggtaatgagctaatatgttgtagtgtcattaattaaataaataaatatttaaatttaaaaagtggttaaaaatatttcaagttggtcgagatattgcctcaaagttagttgagagattccctcatct

SEQ ID NO: 205626 - DNA, 1011 bp, Cannabis indica
gtattcttgttaaatcaagaacaaaattacatcaatcaacattattggcaataaagttattattagaggacattttccttttacttagaaagccaaatcgggcttttatttcacgtttaatcatatcactaaccaatgaacaataaacgatctaagatctaagattttaagaaaaaaaaaataaagatttttagtaacacaaataaaatagaccacaataacaacaattaacatatgacatcttagttgtcaaatctaaactttgcaatctaaatacacaatgagccgcattataaaactcacttatttatagatcttgcgcatcaacgaaacaaaaaaagggtaaagaaagaacaagtgatcatgaatttcaacaaaattattacaaattggacaataagaaaaagcaatagacagttgtaacctttggagtttatctctggtcaacaactgagagtttactatctatcaaagcatgaatctatgcttcaaaatcgagaacctccatactcaagagtataatatactttctcaacatcaagaatagagttacaaaaattgctaacattaaactttctatttacaacagcaacaaatatcatggaatgagagatagtctatttgagcttgaggagttttttccaataccaactcgagttcccttcagtcatgtgttgccaaaaaatcttgccctttcaagagactctttgcacttgagtttagaaaaaaatatctcaaatgtatttactgaccattgttttatttcattcagatacttgttatggaagataagactttatcctaggaagcacaatgaatcttatatttcttatctttgttacctcatattttcaattatattattgtctattatatttaacaaaaatcctcaaattatcttgaaataatatagttctctctctcttcttctttttttttttggttatatatagttaagaaacatttaagttaaagtgttcatttttgttctcttattgtatgacatttctc

SEQ ID NO: 205627 - DNA, 535 bp, Cannabis indica
aaagtataggttttcgtatctaccagtgattgtatgtttgaacaatattcatctggcacttttatattagacagacaagtgcaaagcacctatttttcagacttagtcagtgtgtaacaagctggaggcaaatatatatgacctttgcctggctttggaaccaactcttgatgcattttcattgaggccaagtcttctctagccttaattccatatttactctttccaggaatgttcagtaaacttccaatgacactgtcacaaacatttttctctacatgcataacatctaaattatgacgtacaagtaaatgttcccaatattcaagctcgaaaaatattaatttctttttgtaacagtgtttgggttcttccacaatcttagcctttccacgacccttccgcttcctagatgtgggagctttaaacttcctaaatggaaaacaattttggatgccttctcaagtattccacttccatataaaggccagggagcatccccaaactcttgttcaccgttgaatgccttcttcaa

SEQ ID NO: 205628 - DNA, 614 bp, Cannabis indica
gaagatgacattgatataagcataaccacacgttttggtatctcttgaatgatccaattgcgatacgaaatggaaagaagtgatgcatatcttctcattgcgcaaggaaacccgataccccattgccgtataactattgtttatttgtgtgatttccccttttttggccagctatttctttttctgtattttttttcctaaatattatttcaaattcaaaatagtgacttgtatattcagctagtacgtacctaactattaatataagacaaacgaatccttctcgaagatagctgagttgaactgcacaactcacagtctcagctgctgtctagaaaccaaagtaataaattaataaaacacccatcagcacatgatcaaatgaaataaatttttttggacttgtcaaattataatattagttatagccataagttaattaacatataaaatgtaatatattaatattatatgagtacagtgaggaacatgctaaattctttaattaaattttattttttattttttatctaagttacctttgtagtttatcttttatgtatgattttgcgttactactgaacattccccaagtaaaacaaaaaaaaaaaaaa

SEQ ID NO: 205629 - DNA, 835 bp, Cannabis indica
ataatagtgtaatggattagtatagtaatgtattggttgagttggattggaggactgttgttggaatttagaccactagtctttggaaatagtgacagttaattcaggtattttttgtggagggaaatcgctcaaccggattgatagtatactcatactttgctaatcaactgacacgtcacctcgatcaaagtcaaaactactgcgctctcttccttggagattcaaaactacaatttttcagataacccatttttagtctcaaattaagctatatatctactttttatttttatctttattttattagtctttaatttatacttagttttttaagtcttatcctcatcctgtattagaaactctaattttaataagttatatgaagttatatttactactttgattataataaagagtatttattaattaaaattattttaaaattatatttaattaatatgtaattaaaaagagtagtttttaacttatttgccttgcttatttaacaatatcataatttagttgctattttttcaaaatctttatttgctcttttctttatgtagaaactagaaaaacttgtttcattttgcatttattatttcaacttattgttttaagaaaaaattaatttggttaaatttgttttattgattaaacaatttaaatgtcattggtgaagttaaccaattattttcgacctagctcacatttttgcagttttataggaaaactgtaattggcttgctacatgaagatttatagtctataatgcaatatcaatattcaggactcgttgtggtattacgatagagatcacagcccattttct

SEQ ID NO: 205630 - DNA, 542 bp, Cannabis indica
attcctataaatttttaaagtacaaataaaattctgcatagttgaattgagcactattattatacaccttaaagtacctaaaaggctaaaaccatatcgatgtgaaacgttgtaagcagttagtaatttttatattatttattaaattaaaatgtataaaattttatattaaattacatcaataataatatatcatcacttataattcttaataagatatcctctaatatttatcgagttagcttagactactaaattctttttgtattgtcctcttttatttttactctatttattaaagtctatcatttttatttttatttttaaatattttataaattttatctctatcacttcaatatactctttatgtgattcttttacgtcaaagtattttgagtactagatatatttttattaaatataaataaaaaataaatttaattaattgataaataaaaaaatatttttcaatttacccgagaggacaatgaatagtacagtcccaccaactctattgaacccaccaaatatcctggatc

SEQ ID NO: 205631 - DNA, 1249 bp, Cannabis indica
tacagaaaaggaatatttgcggtaaaaatatttaagtaatcaaattattttttagcgataaaattactcaaatcgctgcaaaaaaaaaaaaagtacttttagatactgaagttctacgaacataataatttaagtacttttaccccttaataaaaatagcttggattcttaatgctacaaactatagaaaataaatgatcatcattgttgttgagcatatagacaaaacaccatgtgagtgaggtcacaatcataatactaacagtaagatcttctgtacacaatcaatcagcagaacagaaacaatgagatgatatatatatatttatatatgtgtgtatatataatataagtaactaaagaagagcctcagtactcatgaacatgacttgagtgactcaccaatcaacaacttaataaacttgtttgctttccaaatcaagaaagtgagaatttattgttgctttgtatgtgtcttactttgaacaagtgaccaagtgttgtaaatacttcctttgatgcaactcctgcaataaaagatgaacagttgtgagttgtgactaccactaaaacttgaattgaacagagaaaccaagaaaaggaaatttattagctattgggatctgactattgagtttaatttttagtcaactttctgaaattagtagacacagaaatccacatactttcattattgttattgaacttattctcttttccaatctcaaatagttttttctcttttatttttattcttttctattagtttagattctttggaatagatgtttttaatttcctattgaaaccaagaatcatagtactgaaaaaaaaaatgaaaagtatatattctaaggttgttcataattattaatcatattttgaagcacaaaaatatgaaatcaattccaaacttattttcctttccctttcccttctaaggttcaagtttcgaacatggtcgaaatgaaactagctaggacaatagttgtttttcattccttctctatcgaagttgcctgagatgtcataacaaactgctctaacagaatctagatttttcaacttagtctaagataatgtcattttggtcttgagtttctttcaaagtccatctctaacataagacagtctctttgaaaatgtttatagggacatcaatccaaggctaaagattgtgtgtgtgaaaagttcagctatgacaaataatataaatgagcaagaaatcaacattgcttctaaaggtaaa

SEQ ID NO: 205632 - DNA, 1089 bp, Cannabis indica
ttattattattattattacttacccaactaagcattgggtctttttacaagtgcaatagcctttgcctctcctgcaaccacaaaaatagtacataaatatttcgagtctagacattaaataataacaataataataataataatatgtttagttacgtgcctctttttttccgatgatttttcctcataaagattaatctctacttgatttgtttgggctggcatggtgctgttaatttataagaaaataaaaaaaatcaaacattatcaaatctaaatatattcaaagttaataaataagtagcataaatgtataataaatgctcacaattttaactaatatatattattttagatttttatatatatataggtacctcatcatcatcaaattatttgaaggctcattattaggatcttcattctgcatgaaaaatatacaatattataataatgctataaaataattaacaaaatcaaagagtctaacattggtataatttagttaattttcaagtgataatatatactgagtgggtttcaaaagtgttaaaaataattattcttaataattacttaaaaaataatagttggagagagaggaaaaaaatacaaattgaaattaggtggaattataataagaaatacctcgttgttattgatacccagtaattcgtcttcttcaaagtaaatatcattttctttctgtaaaatagagtaacatatttttagtgaataaagctattttaagcatataatcacaaatttttcataataaatctaataatattaaattataagaaaatacttattaaacatttaatttttcttacttagataatttgttattactcacttatcttttgaatttatttagtctcatcatattttagtaattcattatatatatataataaagtttaaatttccaaacgcttaatttttaagaaaatttaagaatataaaaaaacatagtttaatttaataagacgtaaaaaaaaaaaaagaaaagaaaaaacctagtaaacatagagaaaagtataaaaaaaaataaaataaaaaaaattaacaaccaagataaaaagaaat

SEQ ID NO: 205633 - DNA, 772 bp, Cannabis indica
aaataatatcaggtttggtgctatcctctttgaagccataaacaccatcattatgagccctccaaacacacgtgttagcacatcttaaggaatctctgcttgccttaaacaaatcaaaagatccagttgccccaatccatgtaagaccacagttatacaacgtagtacctgcgaaattgattctaaatttgaactcgtattctccattgttggccacaacatgagctcccaaatcatcatcagcagacttgcaatgaactgtaagttggaccccatccttcaagttattaaagatttttaccgttgttttgtatacaaatactcctccgattttctcatcataattattattattatcattattattagataatactatcgatgatgatgatgatgaaatcatattgaccatcatcatcagtagtactgagcaaatcaaagctttttccatggttaataattaatagtacgtgtttgtacaagcaatatagtagagagatagtgtttttgatcatatatcgtgtgtcttctgtacatatttatatagacaatattgtgatgaggggtggtttgtaaaagataagaagataatcatgaaatgaatgcatatctcactataatctatatatttagaatatggaattataattaatgggttagaagattttttctttctttcccgttattataacagatattagtttttatatttatagtatttttttctttgataaaggactttaatctctaagttgattcctttttattttct

SEQ ID NO: 205634 - DNA, 677 bp, Cannabis indica
ttgttattcaggtttactatataagacatgttacagtaatgtacttgtatacaaaaactatgtaggtttacgatgtaaataaaaaatattatgttgtagaattttattgtaggtttacaaaccactttttgggtaaaaatttaaaaaatcaattcaaaacttaaaaaacgtgcccacgcgcccagttggacatgacctccatctattccaactgacacttacgtcaccccatcaactcagcgtgcccaacaagtcaaaaaaaatggtttaaaatgaaaaaacggtataaataacggtatattcaaaaatttaaaaagtaacgttattattagaattaaatggaaaaaaacgtgtcaacatgtaattttccctattttttttggggttttttgaaatgagaaatttgggggtatactgaaagttagcagaacttatacatattaattttcatttagatagttaattttaatctaatagatacatatttaatcaaaattgtcaatatataatatttaaataatataaaaaattaataagacattgatgtatgttgtgatgtaaaaatttgagataaaaaaaataaaaaatttagtaatatattttaaacaataagtacgtggtatatgaagtagtactatttcactttttcttgtataacagagtatatttgatagacg

SEQ ID NO: 205635 - DNA, 739 bp, Cannabis indica
acaaattagtccctaaatatataaattttagtaaattgatccccaaacattattttctatcaaatttgtctccatcttttgacatttgaacaatattaagtacccaccctaaaaaagtaacttaatttcaaatatttttattggatatgttcaaaagctcaatttgtttgagttgttcttgagtaagttttgttcacttaacacaaagaaagaactatagtaattaattcaaagttatactataacggtatcacctctaccttgccatttcttgtatatgctaatttgacaaataaatcaacatttttcgtacaagaattcaacttcaaaagtttttgaaagcattaactaagaagtggtagtgttatccattttggcccaagtgtcaaaaacgacttcaaattgaagtaggtggatctttggacatagtaatcctcttataaagctataattaggaccaaagaaatatacaattattaatagagtattggacatagtgaactatttaattcacgaattaaaactaaagctttaagaatagcaatgctatgctatgatcataatgaataagattacctatcctaagatcctaatgatgttcaatgctataaccaatggagaagcaagattagtaaccaatctgatattgttgccccaattcagagattcaatatgagacaattacttaagaattcagagagagtgagattgagattcttaagaatgaatactagcatat

SEQ ID NO: 205636 - DNA, 1391 bp, Cannabis indica
aaaatagaaaataatttaaaaagggagaagtcataatcctaaagttctcactaataatactatgtaattaattaattttgtgtaggtgataattttagtatacttttcgaggatcactggatcaaaatctttaacttcgagaaagtttctaaatttactacttcttcttcaatatgtgcctcgtcttcttcgtgtgtacttatcagccaaagagttaggaagaactgattcactaactcgacgtgtatgggtcagatgcactttcttcttttttctctacataatttttggtcatgtaagtatcaatttttttttaatttaaatgtcttcatttagtatttttaataatataacatgttagggtataatgtgtataaacaataaaaaaacattaaatttatgtgtttttttaatcaattaatgtaaaatattctcttgatgatcaatcataggtgtttggagcgttttggtacttttattcaatttttcgtgagacggcttgctggcaccatgcttgtaaagccgttggaggaccagaatgtataactggtccttttgattgtcgtggaaatcatcccattaagaatttaacaatattaaatcaatattgccctattaatccaccaaatcgagccattttcgattttggaatattctcacaagccattgagtctcgtatagttagcaatacagattttctcaaaaaattctctcgtactttttggtggggcttgaaaaatttaaggttagtagagaaaatataaattttggatatataatgaaatataattatatatatgatcttcatatgtcatgataaatttgttcattaattaataatttgtattatttttgtagttcttttgggcaaaaccttgacacaagtagcaatgtatcagagaatctgtttgcagttcttatctctattttgggcatactaatatttttataccttattggaaatatacaggtataaataaatatatgtataaattctcaaactcaatttttgtttttttattatctgttttattaaattgtgccaacaatttgctaatatatttgagtgcaatttatagatatattagacaaaaattttgaaaaaaaaaatagtgcatggaaaaaaattaattttaacattgaagttttttatttacaaaaatatattttcagtaaaaataataaacggtttttttttttagttattttattaatttttaatacttgtataatagttgtcataagattatttttcttagttattttttatttattttattagtttatttattatatgtcttgaggttgtattattgatttttttagtttgttttttttttatttttgtagaaagtaatattttttttaatttttaaactttaactaagaat

SEQ ID NO: 205637 - DNA, 530 bp, Cannabis indica
aacccgtccaaatgagattccattcaacatggtcaacatccggaaggcatataactgtgtaactgaaagaagcgtttagcgtggtccaaaagccccaatgtagtttattattttctaccaaattgcacaaaatcatggattacattcctataacctcggatgcaagatcgtatctcacttaataagaaaacaatgtaattgacaattaattccccacgaagacaaggcaagttttgacaattagtaacgcaatgtggtctccaggtcaatactctgaaagtcagacttcaccagataagctcaaaattaatattttattttatttgctagcatttttgtcacaaaaattttgatacttaaatttgaatgtgtattttgtcatttaacaattcagtagttttgggtagaggtgttcatcaaatcgtttaaattgtataaattgttcgcaccgcaccgcaccatacgacataaaaaatgaggtttgaaatcttttgcagtacgattgcgatttgtatttttgccaaaccaca

SEQ ID NO: 205638 - DNA, 970 bp, Cannabis indica
agagagagagagtttggttcaaactctcgaaggttctttggcaattctgagctagggttaactcattttttgcctgattttgttcagggcagaacgacaaatcgttttggttaaacgatttgtcgtgtaggaggaaacaacttggtttcttggtcgtttagtttaattctgtgtttaatttttcttggacagatttgtccatgtcgttttgattgacattgagttggtgtagggagtattcttggaagacaagaaaatcctacacaatgataatataaacaaaaaaaactacacatgagatgggcttacaaagctaacacagtgtttatgtgaacactttgatagctgatattgtattgacacattattaacgtagagaaatattaaacactgtcactataataagatgtagtatcactattaatacaattaaatatcaaattctatatactttactataataaaaattataaaaaaccattaaaacatttaagcaactgtcataatagcaaaaaccataaccatttatcatcacaagagtaaagaagaacaaaaataacaacagcttctaaagaagaacaagagttaattttttatttttatttttggcaaagcgaagagcaagagtaattttaaattgaatagtgtcattcttaatggatggaaactctcctattacataccgatgacacaactaaagaaagatgaggtataaaactcttataacgaaagtcatttttaagattgtctaaattactaaaagagtggagaagaaaactacacaaggtataattttaaattgaaactcatatacatatatatatatatatatatatatatcactcctttctagtggcactggctattttccaaatcatgaaacaaagacatctaaatccaagacagatgagcctccactccaagatagcattccttgccttgtctgcaagttccttcactctgcttctct

SEQ ID NO: 205639 - DNA, 662 bp, Cannabis indica
attcaacgagtggtattagaggaagtgctctgccagtactttgacatcatgccctccagtttagaacatgtctccaagggcaaaagaaaaacaagacattgcataactaggaagagcttgagcaacagtttttaataacactttgcggcctacttaggacaagagtctccattcccagctctgaatttgtttttgcattttttacttaagaaaacacaagattgtatttttgtttcttctcatcgtgcctgggagacctaaatcagtacaattttcatctgcaatctccatatgaagcaaagcaaaaattctaggtttgactgtgtctgtggtattggtactaaagaaaatagaggacttactaaaattgaattgcttccccgaagctatctcaaacaactgtagaggtctcatcatattagatgcctctctttcattagcatgacggtagatatagcgatcatcagcaaatagcatatgtgaaataacaggagcctcattagtcattttacaaccttttagatgactgagtctctcaaattgtttcaataaagatgagaatccttttgcataaattagaaatagatacggagacaaggggtcgccttggcagatacctcgttgtggaataattggcctaagacttttaccaccatgaacca

SEQ ID NO: 205640 - DNA, 911 bp, Cannabis indica
aataggttggttgtatgcaaagtgatgcatattggtttcctctagagaggaaacattcccatctgtccctatcttcctctcctgagtaagcatggttggtgaagcctcttccccacttctgcatatcttcccgttggactgagcagctgcaaacttctcagccgcctcttgcaggtcttggatggagacaatttttggattgtttccataaagggcaatctcatcaatacctggaagataaactagaggtatctgggtaatgaccagctcagaattcggctcagtggagctctcatttttgtcggagactattcttttcttccctgagagttgacgcctacgctctctgatttcagtagcctcgccattctgaattgctttgtggattttgacttggtttctaagggtagagtcattgaacaacttcttttgtaaaacccaatcctgaatccatttcgccaagggtgataagaaagtggatttttctattgaatcactcttcaaccagatcccaaacattgggaagatacttccattaccatccttgattatagttggggatttgaagcaagtgctctgatcgtgtgagtactccacatttgaagcatagtttagggagacgttcatacttatattgtatccatagatccttgagtcgttgacgctttaagaagaaacccgagaaaatcggtttgttgatgtcgatcgttgccctgaatcgtaggttgctcataccaaccgcatcttctacacctggagggagttcgtagactggtgaggctttagaagccaactctttgagattggagaggttccaatagaaaggtggaatactttcgatgcgcacccatatcgaggttttgtcaaaccgcacttcaactggggatagccatgccggccatggcattata

SEQ ID NO: 205641 - DNA, 804 bp, Cannabis indica
ttaaaaaaattaaaagtaattgacactacattatttctaactagacccggtgatatagaatttgaatcttatatgtgttctgtttaagacaataacagcgtatatactgacaaaattagaaaaaaaaaaaacaattttaaaaacattaagtactcatgccgctaaaaaaattaacatataccacttacaaactcaaaattttgactaccaccactatttacccatacattaattagtgactaaatatcatcatatgcaaaatttacatgtcctgatgtacatgttgatcaattttgtattattattttttttaactgatgtacattatcatatttaattaataacttctaggtttgataacattgactctaataatgtgaagatattaattttttttttaataaagaacacacatgataataacatggaataattgtttttttttactttttaaaaaaatacagccttattaaaacttcaagagtaaacttattagaataaaccttaagaagaaaaatagtgttagacaataacattaatcataaaaatttgcctgcaaagcaccaaatataataatatagttaaagacagtgctagctttgataaagtgtgagctacactattagcaatactaagacagtatatttgaaaaatatcaataaaattgttgcaataaaaaaaaatatctctaacaatacaaccaaaataagactgatcaactttattatgaagaatgacattaaacatagtaagacaatcatactctaacaccacaatcatactagatacacaaagcctcgacac

SEQ ID NO: 205642 - DNA, 893 bp, Cannabis indica
ttccttggcatgatcatcatttggctccaatatgcttagatagcaactaacacaaaatttattagggtgattctccctgcaaatgacatattcctcgagctccaacttttgattctatcagtcatcttctctgccaaaagctcacactccttccctgatattttctttgaacaaattgggatcccgaaataagtaaaaggaagatcttgtcttgtaaaacctgatagatgcaaagtctagtttataacctcctggtgcatgttgctgctatatattgcagttttattagtattagggtatagaccagatgttagggaaagcactctcaaggcctgcaacatatagcttatactcctcatccccactttgcaaaaaagaagaacaccatcagcaaaagctaaatgatttagattcagatccgagcatctatcatgataatgaaaatattccttctcacctatcttcctcattaatctagaaagatattccatgcccagaacaaacagtaatggtaacatagcatccccctacctaagtcctctcttagatttaaagaaaccatgtaaggttccattgaacatgagagagaatttaggggttttaatacaattcataattagctcaataaaaggggtagggaacttcaaacttgtcacatttcatcaatgaaagcccactcaatagtgtcatatgctttttgaagatctagcttgatcatgtagcttggtttgttagatttcgagatattatttcaggtaagattgtcatgattctagagctcaaagcttagttgcaatgttatagataacattgacaacaagtaattggcctaaatccttggctggtatttgggctattaaccttgggaactaaggtaattattgttgagttga

SEQ ID NO: 205643 - DNA, 782 bp, Cannabis indica
aaatcattcatttagaatttttttaactaacaacttttttgtctgataacctttttacattgttttcaatatgtagaatgtcatcaacataaagaacaaggaatatcactacattacctttaatgtatttgtatacaaaggcttcgtcttcatgttgtttcgaagtcatactctttaatagtcttattaaaggtgatattccaagatctagaggtttgcatacctttcgatcttcccctggtagcacataccctttcggttggctgatagatgtgattcgtcagatgttcattcagatcggaggtctagcattatttgcacttgatgcatcaccgctggcggcttattgagaaatactaaaaggcactagtggtacctagcacccttctacatgtcaatatcactattggtgtaattaagtatcaggtcccatataatttatataataatttttagggagtatcgctaaacaattgtaaagtgacatgtctagaagatgctagatactactggtgcctaatatcaatactctgagatattggtgctttagttgaaggtgtcgttagaattttctccttccttcctgttattttttctttcttttattttttttttaacaatcaataatcaattttaactttcttttcttttttttcttaaggaaatttttaactttctcaagtcaattcttcctgtttattctttcttagatggaccataagtaatagtgttcttcatcaattttaatccaatacggtgattattttgacccaaaaaaaaaa

SEQ ID NO: 205644 - DNA, 1057 bp, Cannabis indica
gagagaagctctaaccttgtagaaaaaatgtaaagtgtgaataataagctaaggaaactttccttttattggaaaggaggtccaattaaaatacaataaaataatagaaaaattgcacaaaattcactatgaaatcctacactagcatgcaaggaaactttgaggaccaaaacttcagaattacagggggtaagacacacttagatgcgtattgaaaagagctttaatttgccacttgaatcgcgccatttggataatttgagagagttatggccattttactgagcggtgtgcactactgaaaagtgactacaatatctgcctaacttttgggcgcccaaaacttagtttcttagtgttatacccgattttcgaaaaataaaaaaaaacgtccaccttatgactttgaccaagacttataaaagtcaaatgaagcaagacatccttcttgagggccccatgttacttctagagggctcaaaaatatcaaacaaccatttggtgtcgggactcacacacccaagtgtgtccaaactagggttcatgggccccgcgcgagcgttttcaccctagaaaccttaattcgccaaggaaaccaacaaggacttgatttgggcataaaaggacttaggtttgtgcataaagttaatatggtatcaaaccctcaagaaaaaaaggcatatgtgcccacttccatatgggaattgcagtgctggcagtgctcttcaattttgatgggcactgccactagagaatggtagtggtcactccttacaaactatgaaggaaaaattgttcaaatgtgttccctcaactctaaggaatgaaaaacaagtgagagagatcatttcccacatatggcaaaccctagccgaccactagcatatggaaatcgcagcgctcttcaattttttgccaacaatgcattttcaccagtactatgtcaaaaccaaggtttcgtaaagccctaatccgaccactgccataaggaaatggtaatgcccatcaattttgatgggcactaccacaacggagtggcagtggtcgaccactacac

SEQ ID NO: 205645 - DNA, 854 bp, Cannabis indica
ctatgttagcaagtggtttagacttatttggtcttacgtgtaatagaagcttacaacttaatgtctacttttgaaatgacgttgtggctacccctatgtagcttaccgtgcaacgaccatcactgaagagtgatgggaggcaatgctgaaaagcaatgagtactagctcttttatacttggctacccctacagggcttactgtgcaaaggccgtcaccaaaaagtgatggaaggccattgcttaagggcgatcggtactagctcttttatgggtccatacatggtgaaacattagcagaaccatagcacaagtttgctagttagagcacttactgagaggctctctattccagtgttttagtaggagagtcaactccaagttctcattgtactcgccaggcttgtatacacctttattgttatcttgtaacattgtgcggaccattttaatttagtccaaacatgcttgctacaagatctttgttgtcatggaatattcttcaaggagtaagtctcttacgaagaacttctttcctcgatctatttcttgaaggacctggtaagtctttgtggcaagagatactgctttgagttggtttggtctccctattttcccttttgtcaagggattctactagcttgatgtggtttacttcttggtcactgtagaccagaagtatgagagtagactgttggtggatcgggcttgccaaggtcagaccaggtggctagccatgttgagggagcattgcctggccagttgaatgaagctacgaccaaccagcttgtggaggtagtggccagccaggtttttgattttatggttggttagcctactaaggccatgctcggct

SEQ ID NO: 205646 - DNA, 784 bp, Cannabis indica
gtttcaaagatttttattaaagctaattgaagtttgaatcataaggtcagtttcctaattgagtaggtagattgtttatagctatctgtgtataagacaactattgccagttatgttacttaaatatagaattatcaattatttcctctttcctcgcattttctcaacctcttcttcatcaatgtttctctatttagcacacaacacaagagatagaagagtctgcagctatgcctgaaactggaactgatgttggaagcaaggtgtcccctgatgaagtcaaagatacggtatgatccacgtaccaactctatttgattgacatgtacaatatgttctacaggattatttatttacaaaatttgaactcactaaaaagtagtacatccattatttgttttactattgttgccaattgccatctatgcagttgaagtattatttttatctctattgcatgtttgaaatatccgtactttttcctattatgcgctaaagatgggtttaaggttctacgtatcatggggttataatagaatggttgaccatggctagcttggtcctatataacttttgttttaccacaatattttttaggcatgggaaattcggaacaaagaagcattgccaggcaattgatgattttatagtaaattttgtttctatgatggttttaggatttaaattttgggagcttaggagtcacttaaattttgttatggatgacattgatatgtgaacaaattgggagacttgtattcatctgtgcattatacttatattt

SEQ ID NO: 205647 - DNA, 777 bp, Cannabis indica
attttatcttttcatcaaaaatttctaaattactatttaaacaacactattagtgcgattttagagagtttagactattcaaaatttagaaaaatactctatacaattgtagaaaaacattattggcacataaggattgacaagcttatctcagttcttcttcttttctcttcctttttctatttatgatatcattttactgttatgtcacgaatactataatgatgaactaattttacttttagaattttaataaattctctcgaacctctattatttaattaatgcaatttttatgtgttctttttatatgttgtgatatatttaatttttgcttaatgttataataatcttttgcataatttaatgggtttaatttaagatcgtaaaagtagagagttaattttgttataattagatagagataggttgcatattagataaacgtatttgtataatttatgtagcaattataatttttgattgtaaaatatgctatgtgtaagaatttatcacaaatatctaaaatattcacaggttgagatttatatgtgtataactgctattacaataagaagaatgatagtaaaaaattgtattgataacatagtaaagagatagtagttaccctattccaatccattggtatcatattttctaattttaattttactttaagtttttatttatttacttttcaaatcgagattgattaattggaattaaaaagtaattcctattggacgatatcttgtttatcacttttattacttgttt

SEQ ID NO: 205648 - DNA, 479 bp, Cannabis indica
aaatcaaaacaaacaaatcatcatattattaaagaatcaaataaaattttataaaaacacttaaaaatttaatataactatatgtccaaccacaaattctaaaaagaagtataataaactttgctaatgcatatgccacatcattggtaacacagttttataattttatgacgtactcgttattaatattacagatttagtattgacctcgctatgtctgttttgcaatgcagcttagattattttattaattaactacaaaaattataatttttatacgtacatataaatcatgtatctataataggatgcttttttggtcttcatgttaaggacactttattacacatttattaatgatctaatggtggcaagaacataaggagtataatagtgaatatggaatttattacaggattacatacctcttcaaaatttttaatgaaattttaatacttatttcttttttttttacttta

SEQ ID NO: 205649 - DNA, 1428 bp, Cannabis indica
attagtataacacatgcacatatgcacatgtttagcgtacatatttatgttatccaattagataacatatcagtaagaacaatattggtgtacatagagttgcacttggatatcgacgggatatattgacagtttaggaagtacgaactaatacaaccaatactagtacgcctagaatactgagtgcatgtggtattatagttagttgttctttcagggagaacgaactagtgctaccaacactagtacaactaaagtactgagtgcattatggctagttgtaactcatagtgtggattgatgctatcacataagtatgactaggcttgatattatggtcaatcatgttatagtcaagaacgttcgagactcaattatacgcgttgggtgcgagttagactttgtgattaggtgtatttgcacctagttacaggtcggttatatatttatgtttatgcttttcttactgagtatgtcgacttacaaatatactttcatgtgtaggtaaagaccatggttgaacaacagtgagtattggagctcagtaaaaattgtacatatctgaacgggtagatctggagtgttcagatcttcaggaaaatatggacttagttttgttagtcgctaggcgacacttttgttatattgcataatgtttatatttaaaaaatagatttcgggatctcgagttttgtaaatatctacatttacgatgtttatttatgaaaatatttatttattataaagttttaattaaatacaattttctattaaactctttgatcagcaaaagttaatatagtaattaagaaaatacagtagcgtgcctaaactaataggacgttacataaattgaggggtataaacgtaattttattatgataaaagcatcaaagctaacaaagtgacgttgcaaaaacaatataaatgcattgtttcacttaaaagaaagggaatggtagaagaaaagaactgggaaatagcttgaagaattgaacttgataagcatagccgggaaaaaagcatgttatgaagcaagaagagagaatccactgaccaatctgagtagaggaaaaggatatcgcgaccattctcacttataaataggagactccaacattcaaaaatagacagatccttgaccacactagctcggtccaaactctatcgaattgcacttccaaaacatacttgagctctaaacattgattggagagagaaaaaaaatcattgttgatcttggaagaataatgtaataaaacagagttattcatctcaatcgggataattttagtgtaaataattcgaagtggaaatacaaatttgtaaatttgttgttaagctaatttttagtattgacaatatgtaatactagtaaattcatataacaaaaatttatcattacataattcttttttttaaaaaaaa

SEQ ID NO: 205650 - DNA, 613 bp, Cannabis indica
tatgttcacattgtgaagctttgatttcatttgatatgagagtcaaaaatagggcaaaaaaataaaagatgtaataaataaatatagtccgagtagttgcaatttaatcacaataattgtactcacttaattgcattcaaccatatggacattaaatattccaaattaactttttttttaattcacttgaatcatctaagacttcatcatcatcataatcctcaccttctctctcagtctcacccaacttcattcactctttcatattatttctactcttttagtgaagctgcgactacatacccactttgaattaatcatcttcgataagaagaagaaaaaggttttcaagtacattattataattatatatatgtgctcttttcttcctttgtttgtaatctcctcttaatttgtaaagttaaatacttttaatattaattttattaattttaattgatttttaccttttgcagatcatcaaactctaaccaagtttgggcacaacttctcaacttatattttattcttaatttcacaatttaaaaaaaaaaaaaaaacaattagtccttttcttctgcctttagtttttcattagttaaaaaaaaaaaaa

SEQ ID NO: 205651 - DNA, 850 bp, Cannabis indica
atttttcaaaagttgcctactattagaataatttttattgtaaaaagtcttaaatttttttgcagatgagagaataaaaaaataatatttttaaatgatatttgtttttttaacaattataggtttagactcattaagttattttgataagtttcaaaaattaaaccatcttaaataaaattaatttgttattttgctaagtttgaaaattaaaccatcttaaatataattaatgacacaaatagtgtgtcaaatatttgtgtgcacatatattactttattctttaaaatatatatttttttattttattatctcttctttatatttttttctccatcatttaaatattatattttttattaattaaaataaaaaaaagagtaatgaaataagaaaaaaaataattaaaagaatgagagagaaagagaaaataatatatataatatttttagttcaactatattagctaaaggaataattatgaactatttagttcaccataatctcacttgttgaaagtgctaagaaattattttaggccatttattgagaatgttttgaaaagttctgccggagtaataatgtgttggttatttattaataataattaatacctccttctatatttgtcacatgttgctaattaagaagttttgccagagtataatattgttgattgttgattagttaattattaatttaatatcactgttagcttattttaaaagtacgtgcattaatatatggtgttgggattttttatctatgcattaaattttaagttctaaacaattaatttagaagttagaacctaaagatgctctctgtaattaataataataataaaaa

SEQ ID NO: 205652 - DNA, 863 bp, Cannabis indica
gagagagagagagagaactttgaatgagaaggttaaagttattcattttattgagaaagacttattttgcttatagttatcaaactttggcacattgttttaagagcattgttattggacatcagtggtgcccaacatcttccatgtgagcaccctacgattaattaacgatattctttaaaattttttttttttaaaatatgagacctgctatttaattacactaataacaatgtaacactaacaaatatattaagtattaatactactttttaaaattttattattttaattatatgttagaaagcatgaagctccctaatcatactcaatactaaaaatccctcaaaaactggaggattaatgccactcacttttatagaatagctagtgacaatagacatataaactcgagaaatgttaaagggtacgcatagtacttccaaatataatattattattatatatatttatataatatattaattaaatttcacttatttaactttattaaaaattattgaaaaactgctaattatttactaagcgtcacctctagtaataaacatctacccaacgttgataagaaaaaatgagagatgttttcaatcaaggtacattgaataaggatatcttgggggaaactaaaaatttaaatattatatatatatatttatatatgcttggagagaaaggaaagtaaaagagaatagaaggaaaaaaaaatgcaaatatgtagacaaagagtccactaacactttggtcaaaattcaaaaacatgtgtgtggaaaacagcgtcattataatccaataaaagagctgagtttaataataattaataaatgaaagaaagatgatatctt

SEQ ID NO: 205653 - DNA, 954 bp, Cannabis indica
tatttaactttactcattgacctcattgagactacttctgcttaggttattgaaatcgctagcttttagaagctgaaccaggttaattacatagaaacctaatttttttcttccacaagagaaaaaggattcaatttccttttcaactatctctgattaagaatacagtattaaaattttcacctgatttggtgaatatcatgtaaaattttaattgtggagaggagtatgatcattttcatattggcattaccaattgagatgttattttcatttgatgcttttgtaggattggaaaactgaaagatacaaggacataatcaagtctggaactgtaagtagacattttcactttgtttccccgtttcattgtttaaaattgttataaataagttgattaaatcggtacactgaaatcattattccaggtggaacctagacctggagttttgagactaatggatgaggccaaggctgctgtaagagttaaattcatttatagtgcaatttttcttgcatggcacatggattatactttttgctttccctctctgtatggatagcttgatataactttgttccaacaccatgttttgtctttcatgagttatctgatgtgagactgactctcttttcagtgtgatttttctgttccatttgttatttagtaggttcattttgcttaatggtgcttttatgcttatattgctccttctctcctactcactgttgcagggaacattgcttgcggtttgctcggcagcaaccaagagttcagtcgttctatgtcttgaaaatcttattggcttagtaagctcttcatctactgttgtttacttgatgctttatgttcatattttttttttcattttcatgaagctttttcattttactgtgttttaggagcggttccaaggtcttgattgcttccttgctggtatgatatgatgattt

SEQ ID NO: 205654 - DNA, 545 bp, Cannabis indica
aaaaaaaaaaatgaaattgaaatgctattctagtaacggacggtcaggatttgatgaaacggattagtatggcaagtcacacgtggattgtgtccactttcctaattaactttaaatttaattaatagagatagtcatgctgtagctatctcacatgacgtggaagaatcatcagcttgttctacaaaaatccaatttttttttttcaaaaacaaaaatattttgttgtttatgaaccaattttttttctggttaaattctgttaaaaaaattatttgatgaagaaattaggagataataaactctaattagttacttatcaaaatgtgaaatgtaaattaattgtttttaaaatgctagttgtttaaaaacaccatttcaaaatattagttgtttatctttaaaaaaaaatgttagttgcttatttcctaataaaatgtaatgaaatggtgatttttcaatttatttggaagaattttttcggtggttttgagattttgcacttttatgttaatgaatttgtaaatcctaactcaaaatcaaaa

SEQ ID NO: 205655 - DNA, 948 bp, Cannabis indica
atggtttagtacataaacaaatattgaaatagtaaaattgaatgaaattagacaaaaatccttaaatctaacaatctcaatagttcagggggaatttttaacgtccaaaaaaagttcaaggggaaaaatttggtacatgtcaaagttcgggaagaaattaattaattatactatataacaaatttattagttacatggtttaaaatatgtaaatatatttacttattgtttaaaaaaatgagttaaatatattttttataaataaatttaaaatagattaaattttatatatttaaaaaatatagttaaattgtatcggatttaattttttattattattattatttaaattaataattaagtgataacaactctaatacaaatctaagcaaacatactttgcatatatatatatatatacaataaaaatttagaaaacaaaacacgtgcatagatataaattagatctcgcggtcattatataaaatattgtttgggatagacgaagcactgaacttatcaaaatggttgttagtgaacgtccacttggccacattatgtgccataaaattacaacttctactaacaaattgaaaattacaagtatcgaaaatccgagagagttttaaacaaaatttagagtagttctcaatatttcagcgaaagtttcaattgttgatggagttgataaccactctcgaatcgctctcaataataataaacttctagccttcctctttggcaaattccagcgcagcacagcaagcaaccacttcaccacaaggcgcatcgagagaactccaccctagacgagtgaacccccaccacaaatcccatatggtttctcgccacaacagctaaacacatgctatacattccaactttgacatcacaatttagttttacccacccaaaaggaggagggctccaacaaacatctaaaatcgg

SEQ ID NO: 205656 - DNA, 1266 bp, Cannabis indica
taatgataataggaatagtaatataaatgggattattttttatttgatttggtataaaaataaaattattttatttattgtcaattatatttagtaaaaagataagaaagaacagtaaaaaagtcttttttttataatatattagtaattataatctttatttgctatttttttcaaaaaaaaaaaaatccttatttacgaatcatacatgaatttatacaagtgatataatgctcattataatgtaaccaaatattataattgtaatctctattctattctaattttaattacaccaccaaaaaaaatttgctctaactctattttagtattagctagcaaaagtgtaacatttatttattttttttttagttatgatatttattgttagaattgtaatgcgatgttatatgttttattactatgcaattatttaaatttaatatttggtcaatactattcgtaatagaatgctttgcttagggattgtcgttccaccctttagtttgatgttaatagatcaaaaagaaagcacgcgatttttcactgatttatttcaagcttgatgttatggtaattttaagcttgataacaataacatatatgcttagtgtatgaaagtgtattgctatttaaattagtttgtattaagtttaaattagcaatgagaagtaacaagagaaaacaattaaataatataggtttttatttttcacaaagatacatttcatatatatataaatatttttatatcttatgacctctttatttaccttatgacctctttatttatttatttatttattattgtttgggctgattaaccataccaaatatcactgaaaccattaaatgggttaaagaaaaaattcttcttatttgattatctaataagtaattttttttccgaactttgacatgtaacaaattatgctttctgaattttttttgccgttaaaaattttccttgaactatatattgaaattgttagatttaaggatttttgtgtaattttagtaaaaaatttctaacatggatgaaagttcaagggaaataatttagtacatatcaaagtttgaggggcataatttggtagatatcaaagtttgggtagcatgatttagtacataaacaattactgaaacactaaaattgaatgaaattagacaaaaatctttaaatataacaatctcaataattcgggggaaatttttaacggttaaaaaaattcagagaacacggtttggtacatgtaaaagttcatg

SEQ ID NO: 205657 - DNA, 900 bp, Cannabis indica
aaaattactaattaacattcattatatgacaattattaattagggaagccttagaaaaattaaaaggtaaactaatttaaaagaaatgaatgggagccccctatcataagggttagagtttggcttatataaatgtgaaatgttttacaaaactaacatgaaactgagattaaatacaataaaataactattgtgatttaataatagtttcattattaaaaaaattgtaaatataattagatattaatagtacttgagattaattaaattaaattatatattaaactatttaataggatgaccttaatagagcatgtatgcactcctatcttttcagcatcgaagaaagtttttttagtttaaattttttgtttgtggtggtgcatattgtagttatttaagacatgttataaaatttcaagaaattcgaaaaaaattaacattatgaaaatatgattcaaatagtatattgtacgcatgactcttttattttatttgcaattatgcatgtgaaattcacaatttgaattgaactatggttgtttatcagatttaatctgcatttttttggtcaaacaacattcaattcgcactaagtacgaatttcatattttggatccaatccaatccgcgtaacagtttaaatctaattaaatccaatctgcaatagtgcagattggatcggatcggatactttatgaatagccatagtttgaacacggctttttatattgtaaattatttcaaaaatttcaaaattttgcaagttgtcttaaataattacatatgactataaaaaaattaaactaaaatttttttttaatatcgaaatagatgcaaggggtgcactataaaatcatcttataaaatttaaatattttcttctcagccaattgaagt

SEQ ID NO: 205658 - DNA, 3021 bp, Cannabis indica
cctttcaaaattttgattctttgatgatggttcttagaaggaggtcctcatcaactgagcaacgtgatacaatggtgacagatcctaacgtccaagctcccattgacttaggagtagacaaccctaacccacgactgccaccttggggaaaccttcccactactcatgctaatgttaacttcagaactactacgattacaacctccctcactggggtgacgcgcggtgtcctagaaaatggaaataccagccatgcgtatgctggagaaactgagtcgggcaccggacatccatttgtgggagaaccccaagttgatttgggggaaaacactgatatagagattctgagggatgcattgggacaattccatgtcacaccaatgccctccaccataatcaagaagaaacacgtgctgtaatgaaccatgtgtttgaacagcagaggtgtgaattccaagagtggatggataaacaagctgaatccatgcgtgcagaacaagcggggattaaccgatgattaagagaggctactgacctgatcagaggattccatcaacagactgggggataggcattggagaacctaccgctcagaagagattctaatcaggaaaaggcaccttacatccccctggaggactggagtaaggctgggaggagcgcccaactaattatgtgcaatcatgacagaccttccgattccagtccccaaaatcaaactattggcaactcggtagatgaccaagttctaccggtcactaccttggaagagaagatcaacacaattttttaccctagcctaaagggaggaaggatgatgcacctcctcgactagctggaaggtctcgaggacatgtggcagtttacaatcaagatagacgggtccaagcctatggaaagtgtctgtatgccagccagcgaactcatcgtggtcgaacaaggtctcacagtggacagtcatacatgagcaagaatgatggtggagctcatagtggacaatgtaataactattgtcatgataatcttcgtacctaagaaaaaaattaaggaagatcctccaaaacgatgctaatcctcctagaccactcggtctacgagccaaccaaatagaagagctccatgcaacgctatcttccaaacatggggcccaagatcgatctttgagacaatttaaatcataggagaggaaaccaggaaggatactttgtgcctttgcctgacagtcaaacaattaatgtggagaactatattccacaaaacagggatgaatgtgtacattttgatgctccagagagtcaagaagtgacataagtcaatcaataagcaggtcaagttgatctaggggtgcaagcccaattggatcagcttaagagcctcattcaagtcctgattggcccaaaactcaccgatctagagcttgatcaaacaagaggttcaccattttatgaaagatcaactctcttgatcttttgaccaagttcaagatgcccacttgaaagatgtacatgagaaaagaggatccattatcttatatcaagtatatcgatataactcagatagaatcatgtaacccaatagtccaaggtaaacctactacgaagtccatggttatgtcttcccactttcattcaggtatcctcaaagactgaagtaaacctgctgacctttgatgtttagctttcacttgttgacaggttaaacactttgaaacgtattcaacaatatcactcttcattcctagccactaatatattacttttatgtcatgatacatctatcgaaacacaaattctatccttatatctcagtagtccacttggagtcacagtgaaatcctttgtagcatcaatctcaactttctttctaagttcgatcaattcgaaatcattttattagcaaatctttatcctttctagtaaatcagactgcacgtaatattttccaacttcccgactacaaactcaatctcggccttggccatatccttggccaatcttggagagatttccttcaactcgtagacttgccctggccctttccagctaagtgcatctgccaccacatttgccttgccgggatggtagaggatttcacagttgtaatccttgaataactctaaccatcattgttgcctcatgttcagatccttttgagtgaaaaattatttcaaacttttatggtcagtataaatctcacatttctcaccatataattagtgatgccaaacctttagagcaaaaaccacctctgccagttctagatcatgagtatagcgttgttcaaagtctttcaactacctagaggcataggcaatgaccttccctgattgcattaacacacacccaaaacttgtcttgaggcatcacattatatcacaaacttttcatcactgactggcaggcttagtggtgcattagtcaagccgaaggacatcactagaaactcgtagtgcccatattgagtacaaaaagcagttttgggaatatcttcttccaagatcctcaactggtgataactagatcgaaggtcaatcttagagaagatggtctttccaaataaatcatctatccttggcaaaggatatttgttctttattgtcaacttgttcaattcttggtaatctcaatgcacatacataacgactcgtccttcttcttgacaaataaaactggtgcaccctaaggagaggtactcaacctcgtgaatcgcaaataaaactggactttcaattacttaaattatgttggtgccattctatacggggccttagaaactggctcagcccctggtattaattcaatctcgaagtcaatctctctctttggtggtaaccccaataactctttcagaaacacatctagaaattcacatactactcgaaccttctccggtccatcgggtatatctttcgtggtatctaatacactagccaggtatcctatacatccttctcacaataattccctagtcctaagtgctgatatcattggaattcaagttccctgaacctttcccataaaa

SEQ ID NO: 205659 - DNA, 1122 bp, Cannabis indica
ttgactcctcaactactacaagccgcaatcatatataatattgcatatttatatttgtacgtaagtgtgtaccacaaataatacaatttaattatgatttaacatattgtttaaaaatattttttaattttttagacttcgttgcttgcttaaaaacccttatttatttatctatataattatatatatttattgtaattaaaatctcatggatatcatcatgtcccgcaatattaatatatatttatttatttattacaatatttcagttatgtatatatagcaactaataaaagttgagcatggactaagtcttaggcttcatgaacactagaatccaaaaaaaaaaaatacataatatataatatatgaagttagatctcctccctataattataatgtcatttttttttttgatgaattaattataatgtcatttgaaaatacataaaaataggaaggagggccgcaacagaccaagtcaaataatctactataaagtataaagcccccacttaataaaaaaatatataataacaatatataatattaaaggtaaatttggccatttattttggttcgttgtttctttctaaaaaattatgtccacgtcattacatgctattgctgcggatagccaagtaaagggttttcgttcacattcacgacagacagttgaccacttacaataaatgatgaaacaatatttattttatgtctctatttcttaatttaatttaaacttacatattttatattagttgtgtctatttaactgatatttaaattagtagtttaacgtttgtttttatttttttttggtttaaagaacagttaatttatataacactattacattaattaattaattaattaattatatttactttttttaaaaaaaaacttaaaatatctaaattgaatttatttattaagtaatagtaactttaatacaattctgaacaatacctattatatatatatatattataagcagaacaacacaaaataatagaagtcaactatattatatatattaactgttttcacacattattttctgtgtaaacaaaagaaaagaattggatcggttggaaatatatatagtagcaaaaccaatag

SEQ ID NO: 205660 - DNA, 1315 bp, Cannabis indica
ctgcttctccgcacaaagcattcaaaaagtccaattgagtcgtgtagattcgaatcaccttatccaggtggttcctagcaacaacagttgtgtacatgcatcccaatcccaccctaatttagccttttaggggcctttctcattggactagagagtagagactcattcattcacgtaagtactctactttcattcttgtataattaatctttggttgaaatcataataattataatttctacacaaaaaaataataatgataataaatatattaagaaaataataataataataaatataatgataaagacaaaagcagaacttgctcattagagctagctgatcttaccccttaatctggtcgtgaaaagacttatgtaattgggttgggtcccgtgtgcttatttattgtcacatccagttggtccacattttccaatcaaattgtaaagtcagaaataactttataaaagttaatcttacatgtagagaggattatttctaacaatcttctcaaatattgtccattctttgtgttcatatttctaagttttgaaaaaaattagcatcttcgactctttatttttccatctaaactttttgtggttgcaaaaaagttataccgctacatcacatgcataacatttaatattttcttgcaagtgtcacacaccatacaaaatgttgttttcatttttctaattttatatcttctattctatataaagtgtgcctatataacagaattcttggtttatgagaaatttatgggtgacttttatttatattaaaaataaaatggtttattaataaaaataaaatagtttatgagaaattcatgggtcactttttatttatatataataaaataaatctcattaaatttaaaaaaaatacaattggatgtttgctttgtacatctactattggcttttctaaatatatttagttggattttattcaaaataagaatttactactatttatatattatatatatattgctaaagaatttttctattgttttttttggctcgattaggttataattgtttgcctccacatctgaatctcaatatataaaatgtgactatataaacaaattcttagtttatgagaaattatttagtgactttttttaaaaatattttcttttttatataaaatgtggctatgtaacagaatttttagtttaatgttattatttatttttctgtcaaaatgtcaacagaatattctgattagaaagcgttaattataattgattaattttagctaaataatcctaccaaaatttaatctaacaaatttctct

SEQ ID NO: 205661 - DNA, 886 bp, Cannabis indica
gccccacatctcttgatcttctctataattcgacaccccgacatttggcttcccatgacgtcccgaacaacttgcacacacagaggctcccggagtcaggcgttctcaaatctgaactgacgaggagttgtagtaaggttctgattcaccaattgataagctgatccgaacttgttaattccacattgataagctgagctgagttaaaaagattaatccaagatggattggccatagcacgatcaagacgaacttcgacccaattttcagtcccacgaccccgctcccaagtaaagggatacccatgtagttctagatcaaccagattacaatcggagagagctttctggaatccttcaattaaactattcaggtatcggttaccccctttcttatcagaatgagagacaatgttgttcatatccccaattacacaccaaggtagtgaagattcatccacaatcgtacgaagcaaattccaagttttatatctttgagagcgattaggctcaccatacattcttgttaacctccatggccccttatttgcagtagtaatcctcacatcaatatgacataacgaataccccaacacttccaagtcattttggtttctccaaagaagactaacaccaccactatgtcccctagcatccactgtaaacacactgtcaaaaccaagcaacacacgaattctttcaagagtttcctttagacttaacgtctcacaaaggaaaataaaatcgagtctcttttgacccacaaggtcttttaggaattggacagtccacaggttcccaagcccacggtaattccaacttaatatacgcataatgaacggtgggcctggaaaccagaacccaccactgcatcgttttttggaccc

SEQ ID NO: 205662 - DNA, 1077 bp, Cannabis indica
atataacattgttactttttcagtaatcattggatgttgattatagcaatgacttcgggaagagttgtattcttaaacccgcttaaatctaaaatcctgtcagtcattgctgagatgataaagacgtaagtttagaactttcagttaatcattctaatataatcatcaattattaaattccaaatgcttaacttgtaatttttttaatgtctttaacagtgtatatgcaaatattagttcaaatactgttgtatttggcacaaagggaccgtagatatttccctttgcttgtccaaagcaaccatacaattacgaatgtggttactgtgtactaacttacattcgtgatatgctttaacattcaacttctattacagtcatgaaagaaaaagtgagtatatactcgtttttactataaatacaaacacataaaagtactattttcttaattagttttattttttttttaatttgacagtttggcggcctatcccaatattctgaggacaatcatctcttactgctttgacaacagtggttaagtcaattgcttcccatgatatataaaaattaattagtagtcttttattgtattttttttagacactgtgtagtattttagagatttatgcataatatgtaaagtgttatttagaattgaacttacaaattattattattattgttattaaaaattatattaatcattcatttttatttaagttttttatacatactctatataattataaaaataaaaattatatatattattatttgaaaaaaaaaatgaatgaaatgaaatgtaataaaattaaaagaaaaaaaaaccctatacatttgcaaaatgggatcaaaattaaggtgatttttaaaaaaagtgggataaaatatatcattttgtcctagttttttcataaaaggtgggacaaaagggtatattttatcccaattttttcatcaaaagtgggaaaaaaatttctcttttatcccacttttctctaaaactgggataaaatagatattttttatccaagttttttaaatacctttcatcccactggcatacattccggt

SEQ ID NO: 205663 - DNA, 783 bp, Cannabis indica
acagccgctgcagcaccttcacaaatagcagcaacctctccagcgagaggatcccgttgggtcgtgcggaaggtgaggatgtgccgaaacgttcccaaagcgtctctaaatactacagcccctgcagattgagaaggaccaatagcaatatcagagttgcaagttaaccagccttccggggggggttccaaacagcttgtggagagataatgccagtagggtcgagctcacgaagcctaagattgaccaggttgatggtaatggcaactggagtggaagtcccctcgtggatgattcgattccgcaccttccaaatgtgttcaaatattattgcagcgcctcccaagagttggttgaagtcgagggtggccggtctgttatttggatccttgaaccaatctagccattccacccaattgctagtcaaacgattattggtcctaacgctccaaatacacccaaaccacacagcctttgcaaaagtgcagtcccaaaaaagatgcagactgctctcaattgaggaagaacaaagagggcatagcaggtccatcaaaggaatggaacaaccaattctttctctggtagggaggcaattggagagatgtatgatatatagttaaaatattgtgtattatagtaaaacatggacactgttatttaataataataataagtgatactattaattacactaaactataatacagaatgagatgtgttaaaattttaattaattatacttatttatattaatatttacttttttttaagaaaaaaaaagca

SEQ ID NO: 205664 - DNA, 1033 bp, Cannabis indica
ggttagagtctgggtttaggtcagggtctaggtccaagtccgggtccaggcccaaggcttgggttcgagtccgatattaggtccggatttgggttaggttcgatgctaggatgtaagtttaggttcgagtctacgtccgactcttgatccaggtctaggtttgggttcgggtcggggtctgaggtctagggtctggtgtccaaggtccaggtctggggtcaagtccggtccgggactaaggccgggtctgggtctgagttgaggtctggggccgggttcggtccaggactagggctgcgtttgagtctgggtttgggtttaggtcgggatttggggtccagggaccggtgtccggagttgggtttggggatatgttgaggctgggtttgggttttgatccaggtaatgtcaagttaggttcgatgacgggtacgagtttagggtcgaggatcgaggtccatgttcgagtctaggtccgagtcctggtctgggtctgggtccgggtctgggttggggttcggggtccggggtccaaggtcttggtccgggttgagattcggggtcacgtctgggtttggggctagggcggggaccatctgggtctgggttcgggtttaggttagggtcagagcttgaggctggtttgaggtctatgtgggagtcaagggtccagggtccggggtctgatttgggtccgggttcaggttcgggtcggagtttgggtccggttcagggtctagctcgggttcaggggttaggagtccaaggtctaaggtctagggttcagtacgggttgaggcccaggatgtggggccgggtgtggggcttgggtgggagtcaagtctgggtctgggtccaaaactgggtctgagtcggggtcttgtgtataggttcgggtcttggatcggaggtgaacccaacctcggactcgttctaaatattataccaaaataataaatggggcaagtcgggcttgctccaaaacttgcccctattatatagggtaaagcttggacttgaaatcgctctattt

SEQ ID NO: 205665 - DNA, 640 bp, Cannabis indica
ttcacattgttatgttttcattcatcccaatcaaatataccatatcaccaaacggtaagtattgcaacttattgtggctctgttttgcgtgtatgctcaatggaacttagaaaagacattttagatgtttatgtattattaattttatagatatattctgtttaatcctattcatgacaatgctgcctagtggactagtatgagtccaatcaagtccacctggcttttatctatacacggtgggagctgagctgcccctctgtctatgtataacataatcttaatccatgggtgaaccaggataggatcactttaaacaaaactgcttctacctgcaaaagttttattggtttttttccaagtcaaatcaaaacattaatgattccaaaccataattctcagcacataaacagcatgttttctttcttaaaaaagaaagagtggatagatactggtagtgctgtaatgtcaagaaatattggctttggaccacacaacataagcttctgcccatactgatactgttaatgaaaatgaccatactcagtgaatacactgtgcctcacctcaaaagtactcaacaccaatttgagtgataaaatatatgcatgcaaatccaaatctcagataaatggctgaa

SEQ ID NO: 205666 - DNA, 1229 bp, Cannabis indica
  modified_base (468)..(468): a, c, t, g, unknown or other
gctaaagttctctctctcttgtgagcgttttgatgtccccctagagcttgagaactatagaattttctttggcaatagttgcaagaaaacactcttggctcatgatcatcatgatcatctacggtgatcttgatcttgatcatcactttcattgttgttgttgttgttattctcttcttcttgatcttgatcttgatgattatgatcaagatcactactagtgatgattccggatgagtaataatttgaactttcgaagccgtcgatgaaattgtgttcggacttattaagactaagatccaatacaagatcttgttcttgttcttggttttttagtactaagtgtctccattgagatttttagtgttgaagaagaaaaagaagaagaagaagaagaagatgttgttttagatgatggacatgttgatggtattggcattaatttgagatatggattttttttttttntttttaggttaaaaataatataatagaaaagggaaaataaaggaaagaaaaaaaaagaaatgatggttagtagtagtagtactataatgaatgatgatcaattgttttgttctaactatgtatagaaaagatattaatatatatattccactgtttataacagttacaaagtcttaatatataaataacaagacttagagactaagtactttttatgaataagatatgtgatgagagagaaagagcatttggattgaaagaaactcatgaggaacattatgtacgtacaatatatattatatatatgctgtaacccaataatataatattgaatatattattgtttcccatatatttgcatgtatgccatgattaattatatgttattctattttgggctattattttttgtgtttactgtataaccatatatatatatatatggggttaattaatacctaaatttctatagtttcaataagcaagtatacattttagtattaattctacatattgaattaatgtacttattatttatgtagttttatgtaatattataagattatatatattataatagtaatgatgagagaaagatatcaaatcttcctagtagaagcactttgtgtcttattcaatacaatgactaatgacctttgtctaaatattgtaagtgcaattgtgaaatttggtacacgtttgtgtaaccactttcgctttactttaaatctatatatatacttactatatatctagtctac

SEQ ID NO: 205667 - DNA, 667 bp, Cannabis indica
atgtcctcaaaagttgcatcatcatatttttccacattacaacaaccacatggtcttgcttttactcaaaacatatatgtttttctctgtattgtctcacatattttaggtaaaacccaaacaaaatcaactttgtttacatttcaaatcacattgatctagctttgctgccacgcagaaacagatgatccaatgattcagtcatttttacagaaggcacaccagaaagttgtgagtaaaaaaagcaaactagttcacaagtattagtgttaaagcacgccaaacaaaaagtttaaactctggttggaacagatgatatccaaataaaattaaaatgcttataaaaagtagggagattgccaaagaatatctgtggataaaggatgagtttcttatccatgatgatttttattaggaataaactttaaataggtattttttttttttttttttgtaaggataacctttaaataggttgagtacaaatcgtattatgtaaattacagttaattgtattagtggttaaacagccaccctaggtcaaccctaactaataaggaaacttagtaattgctcttagaaatttagtatttacaaatttaagggaaaatattcggtttgccttatgggaatgataccaaatattttcaacaccctcacttaagat

SEQ ID NO: 205668 - DNA, 622 bp, Cannabis indica
aattaaattaatttttaagaaaaaataataaattatatatttttctttttgtacaaagaaattaattaatattaattaataataattaagaaaggaaaaaaaagtaggaagggtaatttggtaaaagtaggaaacaaaaatatgttggatacgcgtctctatgaggcccatattccattgccaattaccgacctctcaactcaacctcttcaaatccccatttctctctctctctctctctcatacgcccaaaacccacgcctctctctctttcctcctttcaattccttctctctctctcttttctcttctttctttcaatctccaagtttttttcttttgatctgaggagaattttgtgagaagtttgagaaaaatcggattcagaatcaaaagatatggctcagagaacggagaaggaagagacggagttcaaggttcacgaaaccataactctctgcgtcaacaactgcggcgttacaggaaatccggctacaaacaatatgtgtcagaagtgttttaacgcgtcaacctcatcgtcttcttcttcatcggctactgtaacgacgacgtcttctgtttctgcatcgacggtgaatttgaaattttcagctgagaaaat

SEQ ID NO: 205669 - DNA, 1119 bp, Cannabis indica
agtctaacatggatgaatgttcatcagacataatttggtacatagtgacataatttggtaaatatcaaaatttgaggaatatgatttagtacataagcaatcaccgaattagtaaaattaaataaaattaaacaaaagttcttaaattcaaaaatctcaatagttcagagaaatttttaacgattagaaaagttcatgaaccataatttggtacatgtcaaaatttaggagacaaaaatcttaattagccaaataataatatataagatttttttttgtttttgtatttaataattttttttgtttttagtgcttgttatagttatttaaagtctatttaggatttttacccttctaaattatgatttatgtattattgtgctcctgaacttttaaacccattaaaaatggtctctaaactattcatagggttgtaaattagtcattctgttaagttttatcacaggtagcaaataaaatgatatcatgactgcttaatcagttgtcacgttagtgccatgttaacgatacgtgattcattaattttttttaaaaaaaattaattcagttttacgtaattttcttaattattaatttaataatttttaaaatatataattttttttttttaatgttaaattatactcgtggcgttgatgtggcaattgactaagcagttatgtcatcattttatcatcacgcgtgacaaaacttgactgaataaccaatttacaatactgtgaatagtttagggggtacaataatgcatatgtcatagttcaggggtaaaaatcgtaaataatcttatttaaaatatcttgcaaattttaaaaaattcgaaataatttacaatataggaagtaagtgttcaaataatctatttcttatgcatgctagccaacaaaatatttgaattctattttccagagtgttaaattttttcaaatttttaaaaattttataggatgtcttaaataattataataacatatacgatcatgaaaaaaaattagactgaaatttttccaaatgccgtaaaagataaggatacaagagtacaccttttttaaggaggtgcacagtaaaattttcctatttcatctaaatgcttgtattttt

SEQ ID NO: 205670 - DNA, 981 bp, Cannabis indica
aagcttacccactactagaaaccactgaaggagaatgtgggaagctcaaatcatcgaaactgcgcaaaaattgcaagaagatgatgcttggtgggttcggccctttagagagaagcatgagcttcttctaatttagtgagagaaagaaaaatgtgaaaagtaagaagtgaatcctcatggtaccttctaggtaccttctaggtaaatcctcatgtacaagcacgttctagtcaatactacccaatggtaccttctaggtaaatcctcatgtacaaggattattatcgaccaagtaccgtcttaaatacacctactaagacatacaagtgagttttaagttattctattaactacaatggactcactaccgggccttatacagagttcccaagaagaaccacgcataaggcgacacttgtatatgcctccaaggccgtcataagaccctagctgaggtcagtagagggaaacaaactagctgcccccttggagccttggccttggccgaccagggttccaggccatagtggccgggcagaccccatgacctaacctagtggccagctagggaccctagttctaggtataggtcggccagcctatagggtacacccccttggctggccagacgctctggtagcccaccttggtcggccaggtcttgcacaagacttccttggtcggccaagacctacacggattgtaacttgtgttttttcaagaactcaaacataatcttcgtgttctttgtgactcaaagagcaaagaatcacaacgaaggttagattcagatctttttcgtctagaaattacacattatgtatcctaaggctatcatgcagatcaacataccgaaaggacaacaatctaacataggaatcgaagaatgttcaaagcaagaaatagtgttcatgcatgcatggtaaaattaaccaaatcgattgaaatagcgggaatagaaagcttacccactactagaaa

SEQ ID NO: 205671 - DNA, 2046 bp, Cannabis indica
ataaaatgctattatattaattctaagaatcataatacaataggtattagaggaggaggtaattcctctaactaagtacaattagagtccaccaaaagagtatattttgttagcaaatgagcagtattatttgcaaatctataaacatgaaatatctgcactccaggaaaattagacactaaaagaaaaatattcgatgaaagtcagaaataagagcttgagaagactataatcctttaaccactaagagagaattgatctcaatatagtgaactggtaaatgaagatctttaagtcattgcagactatacattaaagctattacttccatcactttctgtaaaaagattcacaaaatttccaacccataatttttccattcagtaatattgttcctcgtttattttgctagcagtttattcaacactttcggtcaaaaacaaccttggaaaggctttgacattacagtgatgatatcacctttacaattacgtaatatcacaccaaaaccagaagtatgagtcatattgttaacggttgcatctgtattcaatttcagtctaccggaagggggttcatccaaggagcatttgtattgataaagaagaagaagtaggagaaggagaaaaaggagaaggaggagaagaaggagaaggagaagaaggagaaggagaagaagaaggagaagaaggagaagaagaagaaggagaagaagaaggagaagaagaagaagaagaagaagaagaagaagaagaaggagaagaagaagaaatagaaggagaaggagaagaaggagaagaagaagaagaagaagaagaaggagaagaagaagaaatagaaggagaagaagaagaagaattggcaattcgagcagttgtcacatcaaagtagagcagtatattataggattttggctttgttccatgcctttctttgtttctctcgctccaaatacttcaaagaattgtagcaaactgttccaatagcatattagtccatattgtagaaacatgaagcaaaaattctttaaggttcatgtggctagaaagatactcatcaagagaaaaggtggaagccctccaaacccgtttagggcatttgcaatagagcatgtttgattgtttctttatccaatgacataaggaacaattgggtgaattcgtaacatgttatatgaagaatagtaaccacaataaagcaatcatgaatggcacgccatagaaaaatatgagtttttgaaggaagagacagtgacccaaaaaaatttccaccattgaagagttagaattccatttacaatgggttgttgttcctccaactgagtggccaaagaataaccaaatttgacagtgtagataccatttgattcatgataccaaatgcaatgcaattgttgagaagacaaagtcaaaaaaatgttttgtatcttttgtacatcagaatcaagaaataacgtccttacaactaaggatttgtggcacatataatattttttccatctccaactttctaacgcaagcctttagataacaatttcttaccccaaaggatgccttgccaagttagtgacggataggaacctaggtcagcatccaagaaagacgagttcttgaagtatataggcttaagggtttgattcaggagagatgaagggttatccgccaagcctatttggctaataaagcttgattgaagtgaataaagtttttaaatcacatgcctccttaaaccttagattggcaaagggctttccaagtcttccaattaatacccaatcctaaagaatttgaacctcaccaaaatttattcatcattaccttaatttggttcataagagactttgagagacgaaaacagctcattgcataagttggaatggattgagccacgactttgaggagaatctctttgccaccaatcgaaaataattgttcttaccaagctgaaaatgtttccatagcctttctttaattccctaaataataactttgtcctctgaatagatggaagacctaggtaacgttcatagcatggttggatcagcat

SEQ ID NO: 205672 - DNA, 980 bp, Cannabis indica
atgtaaataaaatcttaaaaacggtaaaaatatttaaaattttgttcaaccatatttttttgtaattttttttgttgtttctgtatttttttttaattatccttaataattaaaaaatagaatatttatatacgtatagctaatggaaggataacaatttaacaaatatacatagacagagagagagagagagtaatgtgagaaatctaccaaaattatttcacatactttttatacatatataatcatacataatattatgtatgtaatttttattatatactcttaatgtgtggttaaaattaattatttaaatagaggaaattaaaaaattgtgggttttcattacttttttgtgcaaaaatatagttttttgtttttcaaaattttgttttattaaaaattgagaaaaatattaaaatataagggaaaaccacgtaaaggtaattaatcaccttatagtaaccagaaggccgagttagactcaggatttaaagtaagggtaacatattttattttaaggtaggggcagaaataaacaataaaaggattttttttttgacaagaaatatatttttaattaaatttgaatccttgatctctattatatatagaacttaatttaattattacaccaaagtattatatatacagatattattttttattataaataaatactgtaatttgtaactaattaaaatatatatattttttctattttttagggttactaattctcacaagtccgccccgacaaataattatacgtgaagggggcgacaaataactatacgtaaagactgaaagactaaatgatattacagtagatatatattaaaattaattacacattacagtagatatatattaaaattaattaggtgtaaagaatatgttagaatcatcattctacatgaatatcatggtatactattttgaaaacgacacaagtatataggttcaactcattttaggca

SEQ ID NO: 205673 - DNA, 801 bp, Cannabis indica
agttttgaaaatatcttaaatgaagattgattttttttcttaatcatcatacaataattaactttaagtaatcaaactatataagtacataaaccctgtaaataaatagagtgaaaatgacaatcaaaactgaaaaaagtgaaactttgaatacctctttggcaacatgagttgtattgaggaccactagagttgaagcacctgttttgatggaatatatgggaccatgaatattggcccaattagtaaatgtcagataaggcttcttctctttcaattgcagcaaattccctatcacaggtaacccaggaacccctacacaaacaacacaacaaaacatccaataaaaatccaatctttaatcacaaaacaaaaaccccattaaaacaaaacaacaaacacttactaggcacaggagggagtttggagaattcactcttcttcttagtggaaaagaagcatcttttgagggtaatcaagatcagaacaccaagaacaagagtggtgagtaaaggtagtggttcaacttcaacaccttgaagaagaagagtgatcatgttagccatggatgaagttgataaaggagcaatctttttttgatgagcaaaaaagggtagttatgtagtgaagtaagtaagaaagggttttgtgttgtctttgccgtttcaggctctctttcacataataatttataataaatgtgtcatttccattagaaattggtcattaaataacaaaagttgatgttcatgtcttataaaaataggtgtatggggccaaaaggaagaaaaacaaaagtaa

SEQ ID NO: 205674 - DNA, 562 bp, Cannabis indica
ttattttttgctgatgatagcttcttttttgttgaagttaatactggaatgtcctcccttcttatgaagaagcttcatgccagcgtgttagtttgcgtaaattggcagtatgctttggcaatagtatgcctcaacaactttgtgtttcgtcagctacaattcttgaagtttccctagttcattgtcatgataaatatctaggcatcacgtactttgctggaaagagtaaattgtctttttcaatccattaaagagaaaatttataataaactttttggtcggaagtctaagctcttctcttttgggagttgtagggttcttctaaaattcattattcaagcaattcttacgtatgctatgagtttacttcgaattcttgttggtcttattaatgaaattcatagcatgtgtgcacgattttggtggggtgatgatgataagtgaaaaactcattagtctacatgggcccgactttattgtcacaaagcgaatggtagaatgtgatttacacatatttttattcaatcaggcgctcattgctaatgtaaagaccgcatatgat

SEQ ID NO: 205675 - DNA, 528 bp, Cannabis indica
aataatatgattccttctaataataaaaatgtgaactattgtcattgtaatgttgactttcatatccataagagttagtaattatcagtagctgaatgtggatgtgttttcaatctcattgacaaaacttaaaaactcatatcttttgtgagccaagtttcaaatttggttatttgccatgaaaagggtttgcattgagaaaagactaaatttggaagtaattgtgtaattattaaaatgaaattatacatgaaattttatttttatagttggtaaatgaattagtatttacatagtttaataaaattaattatctaaaaatgataatattttataaagacaactaattcttattgatgcctgaaaattagagaatataattgagatttctcaattacctctaattacattactatgtatcaaaacttataattactccaaattacactcaaatacaattacatagttactttctaaatgccacaccaataatatttataatactttgaaacttactatttaaatgtt

SEQ ID NO: 205676 - DNA, 1256 bp, Cannabis indica
gcaaacttcattatattttatggcttcttcatcattgtctacctctcttaccatcggctcatcttgctttctgaaaaactcatcttcatcttttgcttgaccaccatctacaatcttaccatttctcaatgcaatttcctggcatgattcttttgggtttaccacagtgtcacaaggaaaactccccttttgattaatactcaatccattggctagttgtcctacttgatctcaatatttttcatggaagcatccatgttagaaatatgagtttctatgctgtccaaccttgcttcatcttattaaacctattgttggattctatcataaaagtacccaaaatatcttctaatgatttcttttcaggttgttgttgggcattaaatctaggaggtggttgcaagacatttttagtgttaccataagaaagattctcatggtttctcaaccccggatggtagtagttaggcattggatttccccagtagttgttattataaggtttgtttgtgatgtagatgcaacaacatttttaatagttgatgtgtttttttgagaaactaaggcagtcacttgattagataaagcagaaattttagctgctatatttgccataggatctacttcatgtaacccaaccacctttttgtgagtatttatttaattaggccaattatatctattagtggccatctcctccagtaaattaatggcttcagttgcaggtttagacaataacactcctcaaacagcagaatcaacaataatcctagttggctcattcacatgttgtagaaaattgaaacttgcatccagctctcatagccatgttacgggcaacagcgtaataagtctttgaatcactcccatgcttcataaagttgctctgaatcaaattgtgtgaattgcccaatctaactcctcaactgtgcaaactttgatggaggaaagaatttcaccataaactttctggccatttcatcccatgtagtaatagaacctggctttagagattgcaaccaactttttgctctatcccttaaagagaaagaaaagagtcgtagtcttatggcatcatcagtaacaccattcatcttcatagtagcatatagctccaaaaatatggctatatggatactgagatcttcagtagacaagccaccaaactaattcggttgcaccatattgattaaagcaggcttcaattcaaaattattagaagcaatgactaggttagcaataccagtcagattttc

SEQ ID NO: 205677 - DNA, 1931 bp, Cannabis indica
aggagatgttgaatggacaatcgaagtaagagtatcgatgatactctttagcttgagaagataattagggaagactgcattttggtgttttgaagaagagtcttgtactgtccaatcttggctcgattaagggaggtgtagtactcacgcagcttgatccagatctaggtagcagaattagatccaaccattatgatgagaactttcttggacatggacgaaagaagccaagatacgagtatgttgtcttgttgttcccaatcctcaaattcaggactcactctgttatgtcgacgatcatcatcagtgagatattggagcagagcaaggttcggatcaagaaatctatgtaatcgacttcctttgattgcagcaagcacttgctgctttcatggaaggtagttggattcatccaactgaattgagagagagtgagaaaacaatcctccattgttggcaacagaagaacctccattgtgctccatgacagggacgactattgatgtgataccatgttattgctcaagaacagagaaatgacaatgaagaaagagcaattgatttcattgattgaaaagagattacagaggttcaaatttatacagcagaaaaaaccaaaactaataacagaaagttagttagaagaagaagacaattggcctaactaactctaactaacctcactaagtaacaactaactaggtactcttaacactgtgtaattgtcttcgtcataagctttaaaatcctcttggtctgtatactcatgatcattggtgtcttattttccttcagcatccaccccagaagctaccttttcttcttctgaaccttttgggttattaggatgttgtggacgtgaagtgttccttattaacatcagtataccacgtgactttttataatttcctcttttggtaagcttcctacaactctcaattaaatcactaaaatattgaccgagatttttgacaacaattaattagagctgtttgtagcaattaatggaagttaaagaagacaatttttttacgtggttgaggcattaatgagtattattccacgagtcattgttattaatgagtatttcccaagagtctcctcttctatacatcattgagatatttataggctcataatagtggtaaaaggtcactattgtcgtgcttgtacaagtcatgctttgcataatttctcaaatttgatcacagggcatgatcgcctactttttatgatgtgcttaggcttgacataggtgtttagtgagactagacttgtctcttgcttatgatttcatagctcattatgtagttgtcaattgatgtatgaggcattgtgaaatgagagttatgagtttaaatccttgagcacatctgttcaaagtaatgtgtaggatattttttcccgtgctgcattaaatgagtatgcagtgacttaacctcaagtagtgcgccgtgctttgtctgtacctccatctcttcttcgggtcgagttcactcgcagagaggaagagacaaaaaccatctatcatctaggtagaccctcctggagataaccaattcttcgcaattcttgcaaaataacagactccgaaagtgatttaatatgacacatttactagtgtgggtcccattgccacttggcttgctcctgaactgccacgtattttggaaaaaattttagaccacaaaaatcaatataattgcacaagaaaaacacacattaattaaaaaaaattaattgtgacaataaaaatttcgatgactattttgataactttttcgatgacgatgacaactccagttactttctggggtcgatgacaatttcggtgactttccagtaacaactgcttcttcgacgattttttttggaatgatgtctgctccaacaaatttttggcaatatttgttcttaatatggctatataa

SEQ ID NO: 205678 - DNA, 905 bp, Cannabis indica
caaacaagaaaaaagaaaaactatagaaatgtgtcagttgttaactagagttcctcgaacacttcactgccaacttttataaaatcctacattgtaataatgttgatacataagcactgaagtggtttgggggaactctggttgccacttgactttgattaacattaacactacactactactactactactactacactacacttctttccataatcatcaaattaattattcactgcaatatttaattattgatgatgttcaacatatatagttataatataatatctctttagatatatataattcacagtgttttggtcatcttctcataatattgtatatattgtttgattaaatttagccatgctatattagttggtgttgcatgcaattaataattatctaagctacctttacaaaaaaaaaaaataaataataataattatctaagcttattattattattattattactattactcctaaaacttaactcctctctactctctagatatcttatgctcgcaagtcccatgtctagctacacatattacaatttacaacaaaaaaagtttaggggctgataacacctaaatacttttctgttttgttagttaaagttgttagttataattttggttcttttgttgtattgtaacaaactctctaatcaatattaataaaggattgttctaattgtttgattagcttttgctaagttaatctcaattagcatttttctctctcgggtttttacaggggcgataaaacgcattacagcattttcgatggtagtattttttttaaaggtgttatatatcttcgtatcatccaaagatataatataattattggcaactttacttttaaaaacgctctaatagtataatatattttaaaaa

SEQ ID NO: 205679 - DNA, 1436 bp, Cannabis indica
gttcagggggaaaaattactaatgagccaaattattatattaaactacatgggacccgatacttaattgcaccaatagcgatattgacgcgtaagaggatactaggcatcaatggtgccctttagtatttctctaaagaaaaactaagcaaaatcatgtcacgtcctatcttttctacttcgtattcttttttatagaattttgatttttttttccaatttttggtgaattatacttttaatctctatatcataattaatagataaatacttctcttaaaaattaataacttataaacatcttcatctacaattcatgatattaacactaataagaagtaaaattagtattataaataaacttataaaaaaattaatcatcaacaaattctttatgtaatatagatggattgattttttattcttcgcatattttatacttttctatatacagttgaaaatataataataaattcataatatttaaaaagttatgtataatagctttaaaaaataaaaataaaaattaatttatttattaagatataatacatataaatatttttttttgtctctaaaaatgcatgtatatatgttaaaataattgacttttcattaatctaattatttaactaatttttaaaagttaataaatttagaaagtacaattcttattttttttaaaacagttagaaggtaaaatacttatttattttatacacattgcattgatataactaaaacatgctaggatttaatgtgccaaatcagtttttatattaaccatataggacagaaagtaagagaaagatcacaacttagtatcgagaatgtttcacatcagtaaatagtttttttttaaaaaaaaaattaggagaaaaaaatacaaatcaatttatttttataataatttaaattgtacgacaactataaaattattcacacatttaaatcataaaatatataaactttactataaaatataaaattattttaatatatataattctcaattaaccattccctagttatagataatagatgtgttgttaatgttgatgtattatatataaatttttagcttaaaaaataattgaaattttttttaaaaaaaatgacaaatttaagaaaattaagaataagtgagaaaattcttatagagtaccacttgcactgttgatgttttcttttatattatatataaactagaaaacaaatcacgcttcccgtacagttatattctgtttagtgatatttttttgtaattaatatttagtgataattttaatattttctatatatatttattttaataatattaattagtatcaaattttctaaatttgtattattttattttactacaaaacatcttacttttagttgttcccgataaatttttaccttacgaaaattttaatttttatacatactata

SEQ ID NO: 205680 - DNA, 832 bp, Cannabis indica
tttttcaattaattattaaaagccaaggtaagttttagcgtagacatatatattaattgtgccttttttaacaatgcattttaaatttaatggcacatatctaaaaagatttataaaattaaaaatattacgactaaattaaaattataattaataacaaattttgaatattatcatattttttttatatataaatatcacttaaattaaacattatctaatgaacaatatgatgtttgttgaataacataaataatactatttatacaactaaacatatatataaccaaaataaaaattaagaatataactaaatatcgtgtattgtgaacgtaaattaacctaatggtaatgtttgtttactcattatttattgtattttggctctcttccataatatgagtgtttcttattgctctagaagagttaatgttgttgcctacaatcttacccaaattgtattaatctaatggctgatgtcataaatctttaatgttattcccatcttcttcatttttgagagttattgctctttagggtgagttttggcgttttctttttaaaaaaacaattttattctaaatcttaatacatatataaatcttgacatgagtaaagcttatgatcgtgttgaatggcggtttctagattctatccttcaagtaatggggttcagcgatcggtggataggcttgattctaagttgtgtgaattctgttcgctaccatgttattaatagcggtcaaaagatggggccgattgttcctactcgaggcatccgaaaaggttgtccgctatcaccatacctattcattgtttgtgcggagggatt

SEQ ID NO: 205681 - DNA, 573 bp, Cannabis indica
  modified_base (553)..(553): a, c, t, g, unknown or other
  modified_base (564)..(564): a, c, t, g, unknown or other
agtatgtattgtttgtagtttgctcaattatattggaagaaaaaaaaatgaaaatacaatataagaactgaccttctggtctaagctgcattattgtctgagtgtgattccggtggttgtgtggtggtttgccgtagtagagagagaccggggggagaggttcgagagagacgatttaggagagagttacggattattttgtaatttttttaagggtctgtttggaaacttaagagaaaattgaaatttggtttaattgaaggtaattataaaattttgtatatttatttgatctgtaattattcaaaattttccataagtacaaaaattattattttcgtgtataattactatctcattagaaattcataaataattactatttaaagtgatgtaattacagtgtttaataattataccattacttctaaatacactctaaaagtattaccaactgcctgtcaaatcggggctccgacccatccggaaaggcatcattttgccatacctaaattaaggtgataaataataatattaagattttttttttttnttttttttttnttttttttt

SEQ ID NO: 205682 - DNA, 860 bp, Cannabis indica
aacaaccatgagatgacagtctttactaacaatatacatattgaccccatcggcctgtgtgccgagttgccaggagttattttggactggctgtatgtattgtattttgaattgttattgtatatagtcttctgagtaaatcttttataacacgaatcccgaaaacacctttctactgccgttatgatgtctgttttcagtgatttatattagtcaagtttttaatattatcacttttttaataattaattaatttattagcattaaattagtttataaaatcacacaggtgacgtccctatgcgatagggcgttacacccaatttctcacagaggactttcaacagcgtcagactggagatcttttctgcaatcgtcgaaactcgctccgtcagaggttgactttgctccagcaaaacagttgtgttcaattacgtttggtgaggattgcaggtacctattgaggaagaagatcaaaagaagtgatgatgatgataatgaatcttcatacacgcatgaaaacacttttggtgttttcttttcatagtctggggcggacgattttgttggtcaggcgagttggagaggggtgcggggatggttgcaggcaagttcagattgacctaacaaacggttgacctagagaagcgaaatatggagaaactataaaatatagtaaaattagttttatttacaaaaatatgacatataaaaatcccacaaaaatgtaagcaaaacacaaaacctatacactaaatatattatttaattatgccataaaaaataaacactacaaaaaattctataatttatgtaatttctacttaagaatttatgcaaagtaataaatataaataaat

SEQ ID NO: 205683 - DNA, 1828 bp, Cannabis indica
cgttcaaacttgatcgcaataattatacactctaaaaaataatggtcacacccattatcagaggccatagattagatggctatattaatagaatgaaataagccccacaagagtatgtaccatggagtttcatctgttgatggctaccaagtctttaagttagtgtgaatccagagtatgaataatggattatttttgaccaactaattatgggttggctctatggatctaatgacaaaatcgatagcaatagaggtgatggaatgtagttcagctagatgcttatggcttgccttggagaggttgtttagagctcattcaaaagctagaatagatgaactcaaagacaaccttcaaattgtttttaaaaggagcacatcattggcagattatcgtagtaagaggactcaagtaagcattattcttcagtcgctcactcattgcttcaaagttttatcacgaactgtgtgatgaacaagctataactcaacatgactaaattattgaatgagttgaatgtgtttgagaaccttaacaaggaagtccaagaaatgtgagtcaaataatgttgaagcaaagtccaactagtttcttattaggataagaaaaggaaatgggatggtggacaacaacagtggcaagcccaagccgaaaggcaaaaagacacctaaagccaagaagaacaaggtcagccctaagtcccaaggtcaagaaggcaaaaggtaagtgtttctattatggcttaatgggacactggaagagaaactataacaagtatatctccaagcttaagaaaggtaaatacaatttatttattcttgaagttaacttagtggaagataataataataatctttgtgggttattgattctggaatcacttatcatatttattcttatatgcagatacgtgaatcgtcaagagaactcgttgatagctagagaggtgaccatgcggttcgggaatggagcacaaatatcggctaaatgtgttgaccaagtccggtgaactttaaaaaataaattttaactgttgaaaaatatttatttcatttctgattgtaccaggaacattatttctttattgcttttacatgaacaatcttttaacattgaatttttttaaaatgagattattatttttaaatttagaacaccaatttattatgtaaaataaagaaatggactttatgtgctcagaccaagtgagcaattgattttaaatattgaattgtttagagtagcattgcctcaataaaataaggggcaaaaggtttctgatgatgatgaaacgtatctgtggcatctatgtttaggccatacttgcctaaacagaattaaccggttaacaaatgatagtattttgagagaataaaagttagaactctttcggtaagcgaaccttgtctagaaggcaagatgacaaaaatacatttttctgtgaaaggcaatagatccaaagaacaacttgagctaatacactgatgtgtgtagaccaatcaatattcaagctcgaaaaggttatgaatacttgtcacttttattgagattattctagatacggtcatacgtacttacctaatggccaaggagtctaataaaactttcagaaagtttaaagacttcaaagacatggctgaaaataaattaggtaaatcattaaagacacttcgttcagatcgtggcggcaagtatttggattctgaattcaaagactacttgctggaagaaatgctacatgctaatttccttgaacgtgtcaatatgaaaggtcacaaactgcgcacagtcaaatggttattaagaaaataaaaaatgagcaaatttt

SEQ ID NO: 205684 - DNA, 752 bp, Cannabis indica
atcaagaagtatgagtccatagaaaacatggtcttttacgagttttggaaggctaatccaaatgcaaaatttacatattttcttgaggatgagatgaccaaataaatggccttctttgaagtctaagatgctctagagaaagccgacgaggaggctaagcatcttgacaatgctaccaatgaagttgtcgaccctaacttttctttccacgagcaggacaaaaacagcctagccgccaaagatttgaacctgccaatccccgtggacatataaacttttttctatctttcatttgttgtacgtatttcggcctgtggccttatcttttgataccatttagctaaccaagtggcttttaaacttgattttattttctccatgcagacatatggttgactgggaagcttttaatctttaacttaatatatatctgataaaatccttctcttgcacatgcttaattcttaaatttttgcttaattattttcatttgatattttccaatgtcgtaccaggtgtaggtgcctccaagtgaccgagaaaactttagaatcttgatcacttgcaaaattattaaccagagtataccatagtagtttgttcagcctttattcttggatggagctttttgtacgtatgttatgatattagtgattagaaaacccctaaacatttgcaagacatcatataataaagacacaatttgaatgatataaagtctttttttctcatttattggtcagactgaaaca

SEQ ID NO: 205685 - DNA, 1005 bp, Cannabis indica
atatattctcaaggtcggccttgctgctaagcaggagtttatctcaccaaattattcgagactggtaaagtttgcaattgatattaacttcaagaattttattgttgaatcagattgtaagaaggctgtgatgctagtaatggaggacagaatggctgctttgattttgattcttaatagtttggtagctaggtctgattgtaagcagttattgttttcagttagagaaactaatttagttgctcctattttagccaaatcagctttagagtctgaagcttgtgctaagtggagaggggtaattcccatggttgcaagagttgctcctagtgcagacttgccttctcctttgttggtttttaatgaagttttactctaaaaaaaaaacaacaataacattgcatactgcccagctatgatatgacaaacattaataaacagtaaagatagtagagtagcaaggttcaatttcaaatattaagaagcattgattctcacaagaattaatgactgattttagagtttcttgaataacaacataactaaaacgtgtatcatccaatataccaatgttaaaatactactcgaacaaataacagatctaggcaattgaaaagagaataaattagaataattatatgtagagagacaaataacacacaaagttctgcaatcaataatatctacttatagcatcttcaatccatacattaaatttagtgtcatattattactaaatttggcatcaaaaactccaattataacaccaaaaattacactaaaaatattttttatttttatattaattttttaaaaagtgcttctacaataaactcttttatataaaataagacacgcgtacaacaaataatttaaacttgttttcgacatgataaatattttcaaaataacactacaataaaaaaattagactaatatgtcactatcattttttattccaaccacaatactaaaattcacacaaaaaatacattttttattatt

SEQ ID NO: 205686 - DNA, 711 bp, Cannabis indica
atttatatataagcaagatattgggaaacatgcatgtaaaatcatcaacttcgatcttcataagatgacaaaacaaaaaatatagtgcttaattaattatatctcttttgaattgatttaaataaagcttaccaaaagtcatatatagatattatatatatatattcattgttgacgatctaattgttagatcgaattacatgataaacttaaattaagctatatatactatggttaatttaatttgtttagctcttgattttcttttttaattatagtatgtttttcttttatatgtatataaagtaataattaacatttctaagatgtacattcgatcatactttattacaaaaaaaaatagatactgtagctgaaaatctactttgtgatgaagaagaaaaagatatatattaaatatatatacatataaatctctactttttactaaattattcttaattcaagatcatggggattattacattgatcgatattggattttattccaatccatgtgtccatattaattattaccagctagctagtttaaaagtttttcactttcaatatattaaatttactaaaagacaaataataaaagaactttttttttaatattttatatcatatgtatccttattacttgatcaaatattactatatatagtaaaatcattaattatgatcataacattattattattatta

SEQ ID NO: 205687 - DNA, 1201 bp, Cannabis indica
  modified_base (986)..(986): a, c, t, g, unknown or other
tactatatcaacattccacaattctagtcagtattccattacttagttagttaacaagaagtagaagcggtagacagtcaggatttgactcagttttataaggtaaatctagtagaaaaaaaataacacactaattgattgtctacatggatatgttaagcaacatctatatatcatcattccatatcttcaaaattcctattagagcattctttctctgcaaattaaaaaatatatatacatatatatctatatatatatattctatcactctatctcaatatggcctatatattcatacacaacagaacttgaaaaaccataacaaattcccaagaccgtacaccttgatatagactcttacatgattacgaaattacacaatttcttctacagcactcccatttgatcataaaagtatatttttcaatcataaaatcaattagcttagtaccaatttttgcaaggatatggtacaaacaattcatttttaaggagtagtgaaatattgatgaaaactaatttatcttttgaagtaatttggcaattataggattggtgtgaattcatctaatgtattgatagtgtgcaacataagattgaaacagtgagagccaaatggaaaattgtaaaccagacctgatgaattgggggatacatcaaacttgtgcaaactgggcattcaagtaactcatgcacaccattagttgaataaactccatttttgctacccaatccagcggctgtctttgtaactgtgctggtagattctgattttactgctacatcataatctgatattgtaatgtgggactcaagaacttctttgaaagtgctgcctccgggagccattgacaattcaaatataatagtgtttctgtcagaaaattaggatctaaacatatatagtccaatcattccccttcagattctcagtatacaaaaggcctgtcaaaataaagtgatcatgaatagatgtcaaaatntacagccatacgcagtaaattcatttttcatgactatactaaatttgacttagaacaagaagagtaaattcaaaaaatgatatttgctatttgctccagacatgaagactatacgtcagcaagaactttcaagccttttttggctgctcccaaagaaaaagaaaatcctatcattgctcaagtgaacatgcgtgtatctaaactgaaaagggata

SEQ ID NO: 205688 - DNA, 545 bp, Cannabis indica
aaaagttggtttttggcattataccgaaatagtattgggacagctaggaaatgacacttggtcctttattaattgatcatttatcaactgaaggtgcttaaggtgtggtaataaatatataagttattaattattattataatttcttgtttgtaaccttggccactagttaatagcaaagttaacgaaaacataacacacttgacaaaaagaaacatatcattttttttttctttcttttatttcagttttcctgtgttttatcttaacaataagtatctcctttacagttttattttttacagcacatataacaaacataaaataacaaataaaacgaaatgcaatttgatcttcctaaacaatgtgttatgatgagtcttataattaagttttagttgcattatagactctactgtgggccatgttctcctctgttttttcattttttagaaaaccacataaaagtttatataacacttgggtattgttcaaaagaaagttaacacgtatttttaactatacaaaagagattagtaattttg

SEQ ID NO: 205689 - DNA, 1727 bp, Cannabis indica
ttattttgtggtggtctgagctacttgttgtagttgcatctagctagttagctgttacaactctgggaatctcatgttaattgtctattagctttagtttgttacattaaataacaaatgcatttctcatttcagaccaatcccttagttataatatctctatcttttctttgatgttccaagaaaccttataaatattcttgctattagtttacacagtttatacttcgttcaatcaataaaaagtgtattagttttcaatgtttctgctaaattttagtattctatataaggggttcaagaacaacaatgaagggaatcaaagatcaagatcaaaatccaaaggtgcaactggaaagaagtgttacttttgcaagaaagaagaatatttcagatataaatgtcaagcttaaaaagcctagttaaagcaagggaagaacaacgcgaaagaagaagcctaagtcgtcttagatagagatgaatatgcaaatgttctagttgcatcaagtaagtattggattttggattccgattgttcgatttagatgtgtccatataaagatttgttttgcaatcttgaaaaaaggacaggagagggttcgtgcttcttggagataacaaagcatgtgttatccaaggaattggttcagtagttttgaagctacatgatggagttgaaataattgttctaaatgtgagatttgtgtcagatctcaagagaaatctattctcaattggacaacctgcagaaaaaagatgcaccatcaacattaatgagaattcgttgaaggttgtaaaggattctttagtggtgaagagaggagaatttcgaaatggctcagtttgttggtgtagttaacattgtttcaactagtgaaacacatatgagactagactatgacatttaagacttgtcatgttagtgaaaggggacttagaaggaagaggaaaactaaatggaaagttcggattatgtgaagagtgataagagttgcaaacttaagtttagaactagagtacgcactagtgatcaaaagccacttggctatatttatttagatttacggagaccttaagatgccaacaccaagaggtggaagttactttcttagtatcattgacgattactcaagaaaggtttgaattttcttgctcaagataaaagataaatctttcaatacttttgtcaagaagaatcttgttgaaaaccgaatggggaaaatgattaagaagctaatgaaatataatggcctcaaattttgctaaaattaattgaagaaactctagaagcaaaagggcattgaaaacatctcacagtactagaagacctaacaaaatgaccaaactgagagggtgaattaaacgattctagagaggggaagatgtatgcttaatggggctatttggaaagcaagttttggggtgaagcagtcaatacaacatgctatctaatcatggtttgatgagttcatacattttttacagaaatttcaaaaatggtttgatgagtttgtacataaatccttatatgacaatgataggctcctagacaatggaacctaaatttttgacgagttcatgcaaataattggttttacgaagagagcaaatcatgatccatgtgtttactttaacaattatagaaaatggtaaatgaaatgtatattattcaatagaataataaatatttatatacaaaactagagagactaaaaaggaaaccaaag

SEQ ID NO: 205690 - DNA, 1200 bp, Cannabis indica
aaacctatgaccaaagacaattgaatattgtagaagagaattgaaaaaggaatgtcaattctgctgcaatatgcagatatttgacgatcacatatttgtttgtctgcattgtctttcgaagtgtaactaattccatctggactggtcaggatcctgtacttcgtcctttggttgagcaagattcagagacattgcagcgcatgttccctgagattccactctgggtgaaaaatccagactatgatcgagtatgctgcttctttttgctgcaacattatcttagttttgttagcattttttacattctctcatatcctttcttgttgttgctttggttttgggtgaaggttgactggctaaacaagttcattgaatatatgtggccttatcttgacaaggtatttttctatttcttgctattttgtaaaattatttctacattttatcttttcatatcatttaatgagctttgtgtcaacaatttcttctgttttcttatgcaggccatttgcaagactgcaatgactattgcaaagccaataattgctgagcaaattcctaaatacaagattgagtctgttgaatttgaaacactcactctagggtccttaccaccaacttttcaaggttagaaaatatgctgagcatctttgtaaagtttgtatactttatctgtgtatccttgatttgatttgtttatagtatatggctagaaataagagcttcataaatgtatttggattatggaaacctcttgactttttcttttgcaaaatgtacattctccaggtatgaaagtgtataccactgaggaaaaggagttgattatggaaccttcaataaaatgggctggaaaccctaatatcactcttgctgttaaggcttttgggttaaaagcaactgttcaggttattgatttatcctactattcagcaccatgcttctgctaattttactattgagtgcatgacagtggggtagagttgctgcatgttaacattttgttctttcatttcaggtggtagatttgcaagtctttgcctctccacgcataactctgaagcccttggttccaagctttccttgttttgcgaatatatacgtgtctcttatggataaggttgtattgtatgtatttaaaaagtttacctcaggtttttcttgtttagatatttttagacataaaagtgttccaaacta

SEQ ID NO: 205691 - DNA, 725 bp, Cannabis indica
cataactcattcataattgttaaacaaaaaaaaaacataactcattcataatattatagtttaaatataggtgctagaataataatatcagggtaaataaaacttttaaattaaaatatgattcgtaaaggatttaattttttttagatataaatatcattattaattgataattctttaaaaaaaaatatatttactaatatatatgaaaaaagtttcatttaaaatagggttaattgcggcaaaatcctcaaaatttttgttttccttgcatataacctccaaaatccaaattttagcggtaaaaccccccaaacctacattctgttagcatttagctatttctatctattttatgcagttaactgccatgttgggttgtccacgcgtacatagatttatccacgtggacacattaacacttgacacaatttaattggcctacataataaattattaaaaaaataatttaattaaaaataaatcacaaaaaataattaatttttttcttccaccatctttatttttctaatctcatattttttttccaatttttgttcttcctttttctttaaaaatttcaccaccatcatccaccataaccaaactgtccactaccaccaaaaccacatttgcgcaccacaatcaaaattcccaccaccaccgaaaccacatctgcgcaccacaaccgtcactgaaacctcttttttagatccaaacaaaac

SEQ ID NO: 205692 - DNA, 697 bp, Cannabis indica
caaagtcatgtagtgagataagaaaatagtaaaagaaagtcgttagctattctattagacagtaatagtactaaagatattgtaagtatacaacattaggacaaaaacaaagttaggaaaaaaaaaatgtacactcgagaaaaacagcatagaacactattatgtcctttgctgaaatatgtattttcttctttagaaacaaccaagaatttcaagacctcttgagcagagcagttgagttgttacaattaaatttattgacttttccaatcaagtttggttctgtaatcattcaaactaaagtttatattactataataatttaaactatatggaaaatcaaagaaatttaatattatttccttcatattttcaatattacttatttctttcgttaagggttaataagaaagagatcggctccacctcaggcgaactgtatcaaagcatagattttcaactagagttcatcttgcagcaaccgattcatgactcctcgtggcggatatattgaacaagtttagatctaacctctgagggtatccggatagggcgatagtttttatctaaccaaactgctgtggcctgtgcctccacaatacgctgtggataatacatgttataatcagtcatacagaatgaagaagttcctttcagtgatgtcatttcaaagaagagaaagttaaaaaaaaaaaaa

SEQ ID NO: 205693 - DNA, 949 bp, Cannabis indica
gttacctacaaattaatattttcaagtcaactaattatatggtaatttaattttttaatgatcaggggtattttgggataaaaaagaaagtttttctttcaatacaaaatacataagactcattttccaaaaggaaaaaaaagtaataataataataattattaattaaattaaaaagtgtttgtgatgatgatcatgaaaaattcaccctttaaaacttgtggttcttaatgtagatgagttacatataaatatttatatatatatatatatttatatattatagtggactttatgaacaataaatgttagtatacatgtcaacccaaaagaatctcactgcttgtaaaattggaaaattcaagagaaccatataaactagtaaatacaattaactcattaaacttttacatattgaataatgtcaccatggaattttattttattttatcattttagtgtataaatatatatgggggattatcccaagataaatttattgagaagtaagtagtatatgtacataaataaaaataaaaaataaaaataaaaatagtgagtgaatcaattattgagcccccaaaaaaaagaagtggaatggccaacacataaatatataatgcaatgtgaggtgggacctattccaatcaataagtcatttaatgcacaaatcatcagagatcaacttttgtatccaaactatacttatcatgaggcacatgtatagtacccaaaaaaaaataaaaagtgaaaaataaaataaatatgtataaatgaaaatcacggatgaagggtattttcgtcaatttaaaatgcgtaagcaattggtaaaagtataagggtaataatactttataataatgttattaataattaaaaataacacgagaaggatgggagtggaggtggagtagctaggaaggtaaagccctaaaacataaataaataa

SEQ ID NO: 205694 - DNA, 934 bp, Cannabis indica
atataatctttcttcttttcttcattttttttcaaggtcagagtatgagatgtctttccattcctttgttactcaatcttgcattattgaagagtaatatatatacataattacatataaatgcacagtaagagagttagtcattctattcttacatcctaaagacaccaaacttagtatcttcaggggtacggtttaaagaagcagagatggaaagtccaataacctttcttgtatcagctggatcaataacaccatcatcccagagccttgctgtcgagtaataaggatttccttctttatcgaatgcctccattaccttcgccttgaatgcctcatcctcgtctttctcccactaaaacaaaagcaaaaccgaaatggaagaccatcattgacaaccagtgtctacaaagtaatattcacacaatcttttttacaaaggcaatgaattgtacctttattccttgctttttcttgctgctaccttctatttgagacagcacaccagcagcctgaatgttccaataaaaaacatgttatgacttaatccacacccgagtttgaattgtgaaggtagaaactttgttttgggggagagacatcagcagacattattttggcagcataatctttttttttaaaaaaaagtctgcaattgttaaaaatcaaaatcgccagtgtctaacatgcattttgaatatagtaaaataaattttactgatctgctatgttagacaagtacatgagcagatgtcaaaggaaaccaggaataaggcaaatgcaacgaatgcatgaagcaaccagaaaatgcagaattatgactcgtaattgcttcaattctcacttcgcaggcaaggaggcaacagtatcttattgacattggtggtaagcaagcaaccaaggaaaagtaaaggttacctgagcccaccactac

SEQ ID NO: 205695 - DNA, 898 bp, Cannabis indica
gtacactaattattaattatatataatataaaagtgttccactttatatagtggtgggattcctagtcagaaataactaattaatatgatccattaatttcttgattaccactacttccatgtttataagtgttacaaataattatataaatattatatgtgatataatatatatatacatttttgatatgatatatatgatcatggccattttcaagcaccactaagaagacatatgttaagtttaaagtcacgttttgtctctataattacaaacatatatttatatataatatatatatatatattataatttgtagtaaattaattcattacacttttgtttataacacgatccatgcatcttttattattcacgtgaaaattcattaattaatatgttttttttataactaccaaactctccccacaaaaaaatggcaaactccttttaattaaaaaataaataaataataattaacaaactatatatataattataccatgactatatctctatgcacatagatatttgttatatgattgaagataataaattatttgactcatcaaaatcatatgatcattggtatttgtatgttttaaattgtctaattactatgattaattaccgagttttattactttaattcgattatcaattcatttaattaattcaagaattaattgataaactttaaacaattgttgggttagtttgctaatgtttctttattttttgttaaccggttctgtcaaatcaaaccgcacattatgttcgtagaaaattttgatggtttgctgatcgtatattttacaggtagacgttaatcccatctaatttattgtctatttttattgagtgattgccctacttaataaaaatatttgttaaaaa

SEQ ID NO: 205696 - DNA, 778 bp, Cannabis indica
ataattaataaattacttgtaataacttacttttatttgatttttttataaatgaaaaattgaaaatatttataaatattcattaaaggacttattaaatagttcaattaaaaaaattaatttattttaagtgtataattaattattattaattaatttttttgatgaataatattattaatttaaatttaaaaatagattttttacctattaataacttgatatataataacaataaatcttttaattgaggagtgttgtcgccctcactgcagtcctaggcatagacagattaagatcgtgcctatggcctacacttttcgaggggtctaaaataaaaaataaaagatctcattaggcttttatttaaagaaaattagtgtattgtaaaccctaaatattcatagctttacaaaaaaaattacttttagtcacaacaaaatttgtgactaagtaaaaaagttgtaactaattataaatcatcattcttatgttgtgactaaaagatccgtggataaaggttttagtcacaaaaattacaatttgttgtgactaaatgtatttttcgtcacaatacttattgggactaaaactaaattagtgacaacttgtatctaaactatgttttagtcacaagtaacattttgttgtgactaaaagtcatatttagtcacaaaaaaattatgttgtgactaaaaagttgtcaccaaaaatagcagttttttgtagtgtttattagttaagatgtatgacacattatacaatggtgtgggtgagt

SEQ ID NO: 205697 - DNA, 667 bp, Cannabis indica
accagcatagctcataataacatttttgggtaaaaattatttttggacgatatatttttatgaaagttataattggaccatctattttattaaatgatataatggaccatgtattttttaaaattgtacaaatatgatcttgaattgattttttatcaaaataaaacttaataataatgcaatttagagatgttatgacaaaactgattatattttctgtatctgttcgtgttagaaattgtcttaaagtcgattatattaaaaaataaaattattgaaaattaagctcaggatcatatttttactattttaaaaaatataggatttattttgtcatttaacaaaacaacgggcctaattaaaaaattttacaaaacacaagatccaaaatagtatttactagagtttataagcattgttacttaaagagtaagtgggacatgcagaattgagtttcttcttttataaatcaagttctcattcaggatatcatattgtaacaaaatctaatgacctatatatccattaaaaattgatattgagacactctcaaattatatacaatttttatgcaatcatatataattaatttcaactatataattaaagagtcaaaaaaatttgggagtgaacaattttttaattttgtataagttataattataat

SEQ ID NO: 205698 - DNA, 854 bp, Cannabis indica
acttttcccagaagaagaaaggtttgtcaggattaatccgaatacgggtaaccgaagaaaggtttggaagcctccacatttcatcttacgtggcatcctccaaacacagggtcccactatgttaggggtttgtcccctatgtgaggcacaggaactgcgcacaccaccaaaaaaggaattatctttttgtctaatgtcatattctttgacattctcggtaccaacatggctacgcacgacacctgaatggtctctgtttgtacggatgaccgttatcttgtgaattaggcctcaccaattggcccaaagttaatatatattgtatttaaccccatcagtggatccaattgacacctctaaatcctaccgcatccaagtccactcatacctgattcaaacctataaataaaacattatcctttcatgcaaaatgttagaaaatcatttatgctataaagaattaagaattaagattgttcaactaggataaaaaagcttgtgttaaagatttatggattaaagttcatattatcttgtttcttctacttataacatatttcttttttaagcttaattgttttataatgagtttcaattttttggtgggacagatcaaacaatatgagtattttggtttttattattttaggatagagttagatgaatccccttgtaatgttgagctaaccaattacaagctgtgtctctttttttttactcggagcagcactgcaggcgtggaatgaactatgaaagctgctgtttcactggcgctttccctctctcgctcatggctctacctctgcctctgcctcgcactgctgaggtaacaaagccacatttatatacataaa

SEQ ID NO: 205699 - DNA, 89 bp, Cannabis indica
aacagtactatttggagatcaagaaaaatattataaattttagttattggtatctgttttatagtaagttttgtgtcaagttcaatttc

SEQ ID NO: 205700 - DNA, 1201 bp, Cannabis indica
tatattgttgtagtgattttttagagcatgacctatgcagacaaccttagaattccatgcttagccaatcaaaataaaaaagagaaaaagaatatctaacaagtatcggtgttcctattttgtcacaaatctttttttttttggattgcaaagttagttaaggacccacacgggctcatttattatgacaagcaactcttatatttctaacatcggtcatgctttcttatagtatctctaatcatgctttctaaatatttcttaactaaaatgaggaattagacttgaaaaaggaacttcaaccatacaaaaattggctttctatagcctataatagagaatagaaataaactctctaaatgtaaggaattctctatttttttattaaacttttttaatggtattttaatcaaaagtattattacattttcaagtattattatttttttcattattttataaaattaatttatatttgacaaattcaaattataaaatattattaaaataatcaaatattaactaaagtagagagcatattagagcaacaacaataaaacgaactttattttaactttttagctattttaattaaaaaaatagagagtaccattgaagatgctcttataaatgttatagataatacttgtgtaataggaattaaaatactattttgaactccctattttgttacattttaaatgacaattcaaattctatatttttcaaaataatacaaaatagacaactagcttaattttcacctgattaaaacttaacaataacctaacttgaagatgttatgacaagattgattatattttttgtatctattcgtgctaaaaacaagcttcaagttgattatattaaaacaatgacacaaattgacatttaataaaaggtctaattattaacttttgcaaaacatagaatccaaaatagtatttataaataatcgttcactttattaagactatatgattagagttgtaacacatacttcctatactctcttaaaatcaataagagatttagtttttagtagctaaactttctcaactattatttcacttgtgatgttttaagcttaaattttgacagtaaaaccttcaaaattactgaattgttagcaaacgtaaggtgtcatacagctaattgccacaaagaactatttacggtacattcttgtacacatgacacg

SEQ ID NO: 205701 - DNA, 913 bp, Cannabis indica
gttaacatgagataaaacctaatcgttaaatttaagcgaatattcttttatttttaagtatattctgttaaactaagaaatattaaaccaagaaatgccgttaaatatgcacttttaatatataaagatatattctaagaaaaaaccttattaatatataaatatggaggattttgatgaatatataatattttatgtaccatatatatattattttttttcttaggatggatggatattgtatgaatagaaaaatagatggtgtctgatgaggtgtcctaaaaagtaactacaattttttttattattaattgttgaattgatttatattatacaatgtaaaaactcaatatatattaaacaatattttatcaaagtacatatatgtacaaattaaattcctaattaattagttattgataatattatacacaattttgcaggaaattttgtggttgagcgagaatgtgcttgacgaataatgatatgttttctaaggagaaggcactattatatttccctctctcaatgagaaatattaataataataatattgacaatcaaaatgatactgctccactagaactgggatcagtagttcactccaattttaataaagccaacaacaaaataatagtattggatgatggtgatgatgaagctctcatcttcaaagattttcgatggtacgtaatatatttatataataattaatattatgatttcttaattatatttaattaatcatagtttggattattaattaactaatattagtatatatatagtaatggagtggtagatgaaggtgatactgcttttactgcacctcgacgtagtgggcgatgtattaagggaccaagaagcacatttggtgagagaggctctatctatcgtggagttagtaggtata

SEQ ID NO: 205702 - DNA, 1367 bp, Cannabis indica
catcggttattgtataataaccactactaaaactgcacgttttggtgtcggtttaaactgacacttatacttttagcgtcaattcataaaaccgacacctattccaccgagacaaaaagtctaattttagtgaacgttctaaaccgacactactgagttttggtgtcagttctaaaccaacacctaatgcatacatatcttttcatttagcgtcggtttgaaactgagactatttcgttttggtgtcgttttataactgacattaaaactccctttagtgtcagtttaaaaccgacacttaaggaaattaaaaaataaaaaattactaaaattaacaaaactaaaaaatacataatgaaaaaattaattggtattataattaatatttaataatttatctaaaaattaaagcaaaattcatgtaattttataaatttaatttaaccaaatttagaaatattatacactacagtactcaagctacaacaacctgacacataatacaaaaacatatttgttctacttgtttatttgcattatttgatcatgttgagagaaatttctttgtaaaattgaactgatttttcatctactttgcatacaggtcttccaataaaaatttagcttatcttattgatctaacacaacccaaactaacttttaattcttagaaaaccctaaagtcagatcaaagatactctacacaataaataaaattagtgtatcgatatacgtaataaacataaacacatacaaaatggctatgaaatatatatcaatatatccatgatgaaagtaagaccaaaagcatcaaaaccttttgatatatggtggttctctgagagagaggagtgtcggggttagagttcgagaggagagacggtgaacacatgatggggtcaatttgggttccgttgggatgaaatttgtgaggaggggcggcgtgactcataggagcaaatagcgacaacgtgggcttcagggtttcagggttttaggggtaaaacagagagggggagatggagaggggaagagaacgaacgagccacctccatttgggatgagggtttggttcaggcagcttgggatgagggtttggttcacaaagaagatgagaaaatgagagggagcatgtcatatgatgtgatttttttctttttgaaaaaaaaagacaaacaatagcatcctctaaatgcttttttaaactgagcaaaatggtctttgttctttaaattttctttaatttttttccttcgattttttcttaaatgtctagactctaaattgtacactattggcctttaaactagacaacctcactattgtagggtactctttagtgtcaattttgtaaattaacgaaactc

SEQ ID NO: 205703 - DNA, 1514 bp, Cannabis indica
attagttatttatagttaatgaacatatgtgagaagtgtagttaaagtaaaagtgtgaatttttcttattaattgaagtctttgataaagaaattgagttcaactataattttgttgttgttgtttctattttagaaatttaagaaagaaaacttaacaggtcggtattaaattgttcaattaatgttatttttcaattattccggtagaacaatatcattaatttattcttagtgttctcaattttatgcaatattacatcttcgtgtttttataaatttctaacataaaaatatttatttcacatcttttggttgcatttgagcctagatggccctctctttttatagttttattctaaagtaatctaaaccaaatatactattctaatacattaattatttcccaatgatgctttttctcaacttctcaaagaaaaaaaaaagacctttttcatttcttttctttccatggatactcatattatgcaagactaatgtgattaagtcacaaaagtgactttagaaaaagagaaagtaataaggattcaaatcaagtaagtggaagagtacaaaggatgatcaactcctcccaacctaaggaagcataatcataaaggaaaaagaagattaaactcccaaaatatcattcttattgtccccctaatcattcttttatatataaatatatgtttataaattattgaaaatgaatgtagtctcctttctagattggtcctagtgcatattgtagtaatgcatgttatcatttataattttgatattgaattgtttttactatgcaactaaatcggttcaaaagtgaaacaatttacatccaaagtacataatttatgtataaatactagcagatattttggttaaggtattacttttgtttcatattataaaggtattttttgttatcggtactttgagaaattataattcaatattttatatgatgatatttattgtagttatagtagacgtttttattaaatttcagtaaattatgaatatttatggtagtgaaaatagaattgaaatagttatttgcatgcgtgagttttttttatatatgtgtaattgattatttaaaattatgttttggataccatgaattattcagaattttataaaaattaaccaaatatctactataactacaatatacattatccaataaaaacaataattcagcaaatattacggagtttcataattaaagagatattcagttcacccctattactttcatcttttacatatgttaattcaaaccatcaaattcttatcttaaactatatatttcaacatttcattattaataaatgaatacatcatcggtcaatgaaggccagtcattttcccatttaaaataatttttttattttttattttctgtcaaaaatatacttgaaattgttacggtttcctaattgcacaaaaataaattacaatatctttcccatgagattcacactcataatattatatacttgatcttaaatt

SEQ ID NO: 205704 - DNA, 751 bp, Cannabis indica
agaaagctaaaacatcttcttccacatcctccaaagcaatattaactccttgctttgatagatcaagagttcccatactactagaatccataaaagaaccaggcagaaacaaaacacggacaaaatccttaaacaatatgattaaaccaacatgtcacaaagacaagacctaattcataatttaaaaacccttaatttgttgctcattttaattttgattaatttgtatgcagcttaattaaaaataatttattttgtcaaaaacattatttcgatattgtttaattttaaaattatcagtgcatatataatgacaaaagttgtgagagattttatgtcaaaacaaactaatttgtagtaaatagagtaattcatgttcttataaatggttcaatggttttatatttgttctatttttaagagggatatagtcaaatactttgataatttaatttgaatattcgtattttatattatatatattatatgttagaaatttttttcattattacaagagaaaatagttaggatgattacaatcaaaataatcaaaagaaatagaaaaataagaagtagagagaatattaacaatactaattgaaaatcgaggttttaatattctgtattgatgttgctgatactgctcattatacattaataattaattgttacttaaactttaaacaaataaaagtaaaaatatagagaaaaaaacaaattaataggaatagagatagatggttgtggacat

SEQ ID NO: 205705 - DNA, 1450 bp, Cannabis indica
taaccatatgtagaaaaaaaaaaaaggtgtgaaaattgaggagaaatggttaatgggtttcgagggttttggttcatatatgttgaaagaagatgaaagctctgacctttgaagaagcagaggaatgtagagagagaaagaggagagagaaagtgagagagaatgatgaagagtccgttatatgagagagagagtctgaagaaaataataaaattaaatataaaattaaattaaaattaaaatcaaaattaaaattaaaaaattaaattaaattaaaaaaaaaatatgtggcctccgaatcccgcgtttagtttaaatgcctcgtgtgatttttttttttgttttttccctttgactccttgtatttttatatatttacaatatttacctacttttaattattatttttttttgattaattaggatatttggctctagattttaacatgtactaaattatatctttgaaattttatctaattttacttaattttgttaatatgatgattgtctatgtattaagttgtattctcgaattttgatatttataaaatcatattctctgaactttaatatatatcaaattatgcatcctgaattttcattcttgttagattttttttagtaaagttgaacaaaagtctttaaatttaacaatcttgatagtccgaagagaatttttaacgacttgaaaagtttaagagacataatttagtatatgtcaaagttcaggggtaaaatctaaattagtctattattttcttctttttgaataattaacttaatttttttatttgaaccgcatgaggttagctcaagtagccataggggcttgggaggatatgtgtgtggagggtgctgagatcgaatctcaagttgtgcaatgtaaggtatataattaatgcttcaataaaaaaaatattcaaaataatcaaagatgagtatgttatagtgttgtaaatatgagttgtgttttttgccatggtacgagcacgaccagacacaaaaaaatatgagtttgagcataacacgacacaatgctataaattagcacgacacaatctataaattggcatgacacaacacgaaaaatatgttcttaatcttaagtacaacacagttgaaaaacttaaaaggcatgacacgtaagtaagaatagactagcgcgaaatgccacaatataaaacattaaaaaaccttgtaatttaattattataataataatatgtatatttgttcgaatgctaaaaggtaactaaagtaagagatttataagaaaaacgtcatggtcactacaccacacactcggcgataaagttatcaatatttgaaagcttaattttggcaaaaataaattacaccaaattggtgagttttgtcattaaaaataaattaaaaagaatataagtacaacaaactaaaatattagtgcatgttttgcatcatagct

SEQ ID NO: 205706 - DNA, 1242 bp, Cannabis indica
tgtttgttcgatatgaacagttaagggtagttatttttcataggaaaaaaacttttttaatatataaaatatgtgattagaggagatgtgttttcttagagtctaattatacaaaaattgttagtgaaaatatcaaactgttaactccaaattttgttaacattaaatgaggcttagataattaatactttgaatatcaaattaatataaataatatattcaataataaacaataaattaaagatagcaaatttttaatgtaattttgtagttaattttacatacttcatgagtttattttatttatgaaaatattgaggaaattttagaattaagatacaagattggcaatgtcttttcagtaaggaattttcgtcgtccctttttacattgatttcacttatttataggttaaaagtagcagttattaaatcatatatttacgattaatgaaacttggacaatcctcacatttcatttatcctattttgcaggcaagaaatctatacatgcataactgctatgcatttgaattataagataattatgatagttatatttgatcttatctagaactcgttatgagtgaccccttattcgagcagtggcttaatagttcttgagttgtattattctatttataacttcatttgggagatgattcatctcgggaaatgaactatcattattccttacaatgagggtttggataatttttgtacaatcttactcaaattgtatctcttgttctttatggatgctgaagccattcaatctcgcatctagcgtggccttcatctccttgtcaataatatacctattcattatgcgagctggatcatattgccaaattttaaaacacatgtcgaatgttagccttccatatttactgttcgaaatatgagaataaaatattgtagttttaagtaatgtggaggtttttaacacgagtgccactattgaagatgtttttagagcacactcccaacaacttctctactccatcttttaaaatacatcacaaaaaatttactttctctataaatgtagagtatggatagtaaatttttaaaaaattaaattaaatgaaagagcattttaaagcatctgccatagcatttttactgtggttctttaattttttttaagaagtttttttcttttttatttttacactttctaaagtagttttttttttacaatttttacagtaattccactataaaaattcacatagcaact

SEQ ID NO: 205707 - DNA, 542 bp, Cannabis indica
ctttgaccgctgcttctgctgcttctccttacacaccataattcttaaaaattactattggtgtcatttcccttctatttttggtgtatctatataacttaaaaattagttttagaaaatatagctaaacaattactgagcttctacttataaaaagtgttgtacatactcttccttgatagtaatgctcgtttacacacactttattgtaaaggagaattgttaaagggtaccactctttcttaatattttctttagtatcatattattattggtgtaattaaatagtggctttcatataatttaaaaaaataaattttaaaaaatatcgctaagaaattatagggtgacatttatagaaggtgttaagtactactgctatctaatagcaatcctcattgtgaagccccatctttcctttcttgtaagaataattattgtcccctcacttttaatatagtattattttgctcttatagtaaagttagtattattttacctccatatttgatattgttaaattttcaaattatatttttttt

SEQ ID NO: 205708 - DNA, 610 bp, Cannabis indica
taataccgatgattggttctatcgtagcagtgtgattgtcaattaatgcttcaacagggaagtttaccaatagagtttgatcttttaactcgttttgttagattgaaattctaaagtgaaaagtcatggattagcatttgttgtttgttgttggttaattgatgtttgatgaatttattcatccggagtttgatgtttgataaatttgtttattcatttctaataaatttgtttaacttagctcggcatggaaagaggtgagagttccatgatttatttttttaaaatttatacaaggtttttttgtgatatttaattttgttttattttaataaaaaatactatttttatgtttataattaatttaaatattagcagtattattacaaacagttatttatattttagtttgttttaaatatttgtttaaaacattgattattttggttatattaaaggatatttgaactaaatatttttggtccaaaaggccgtcttttttcaaaatagaggatcatacattcagaaaatcaaataaaaaatcaaaatggtattaaactaaagtatttcttctctaaaatcaatacattgaactcctcatttttcactt

SEQ ID NO: 205709 - DNA, 792 bp, Cannabis indica
aaaaaaaaaaacaaacaaattttgactattttatgtctgttttaatttatatgcgtgcaaattaattaattttttattttattttaatattataaattattcaaaaattacagaatacctactataatcataacgtaaattataatataaagtagagtaaatagtgacataagtacctaaagttttgaatttttaaacgctataaatttaatattttttagcgacataagtacacaatgtttgtaaaactataattttctttcaattccgttactacaaattttgttattctcttaaacagagcccatataaagcctagattctaaattatttggtccagataaaaatatatatgtattatcagttgcttccaaatcttcttaatcggaggaaaattataattttacaaatattggatacttatgcgtgccgctaacaaaaaaatcattaaatttatgtcgcttacaaaatcaaaactttaagtacttaataaatttttttcgtcaaaatgacaaccctacctaccttaaaagttttctaaatttatttatcaaaacatcaaattagttttggtaatttttttttggctatttaggtttttttttttccttaaacaatgatctatgtattattgtacccctaaacttttcagtcctttacaaatgttccctaaactattcacaatattgtaaactaatcattctgtcaagttttatcacacgtggcaaacaaataatgacatcgtcgtttagccaattgatatatcaacaccatatgtataatttaacatta

SEQ ID NO: 205710 - DNA, 1002 bp, Cannabis indica
ctgctaaataatgttaaagaaaagaagcctaaattttgatagtgtaacttcaaatttcccccgtttaattgtgagtgaagtggagacgtagcagaaacaaattaaactaaaaaatattatcgataagttcaaatttgcaaaataaaaggccaacaacttttagaagatatataaatcaatttacatgatcatgttctccccacatccctattcctggagctaactaattggacaactggttataaaggctctagagtactaacaaatatatcatacataagtatatgtattaattatctcattgtaataaattaacaaatggggtacagctaagttttctccactaacataatatgggaaaagaatattagattgaattcgatacaggaaaactaaatattgtagtttggagtgtttgggggccccaagtctcaacgtgttatgcccattcatttcaaagaaatggctccacgtgaattagtcatggaaacatgtcaggtggcctagtgtagtggacttacacatcaacttgtttagcgaaatatataaatttacaaaatacaacgtaaccaaaatcatcacaattaataagtagtgagaacggttatcaaaaaactaaaattaataactaattatgaacgagaattgttagtcataatggagcggagaatctccgtaggagagtcctttaatttgcgctggaccttacgacgaagctagttatattatatgaggtggggaattgtctcaccgctcgtttggtaagcggtattgtaatgtattgtgttgcattgtgttgtattgtactgtattagtattatttaatacaatacaatatttggtattgacttgtattaattgattttgtaaagttatataatacactcgatcccaacaccactacgggtccgagtcccgagtaccatgtttgggtccgagtccggggtccgggtccagggttcggggtccgggtccagggttcggggtccgggctggggtcct

SEQ ID NO: 205711 - DNA, 753 bp, Cannabis indica
ttatagtgattaaaattaaattaataacaacttatattaaatattattttgtagtgataagtaatttttattttcactaaaagtaatatttaattataaaaaatttatattgtgaataaaaaattattagtaaggtataattatttgtagtgtttaattatttattgcacatatgtttgattattttttctttatattaatgtaaaatagtttgctagaattacattttgaacccaataagttatttaacatttttataaattatttaaataactaataaatcataacttattatggcagataattgaacatgcaaattccaaagaagtaaaagaagaggaagcaagtgaagctctacttcaattagccaaagaaacagaggagttggctttaaaagagagggaaggtttcagccccatactaaagagatggcactcgacggcggtgggagttgcggcggtgacccttcacagctgttatggagctgttttgaagcagtacttaagtggggtgtcaacactatcatgtgagacagttggagtgcttcaaagggctgggaaattagaaaagatgttagttcaaatggttgtcgaagactctgttgactgtgatgatggtggcaaatctattgttagggaaatggttccttatgaagttgattatgttatattgaaccttttgaagaagtggattcatgagaaattggccaaaggacatgaatgtcttactagagctaaagaaactgaagtaagt

SEQ ID NO: 205712 - DNA, 1139 bp, Cannabis indica
atttcatttgtgggcatcgtatattatggcttttgtctgcatatcatcaccccatgacccaatttagggtctgtattaaatctaatatgtaaattatttaaatacctgtattaaaatacataaatgcatggtctgcatatcatgaatgagtgcacatttaaaccattcaaatttacattgtggtttactgagtgaaagaagtgatcatatataccagcatatctgaacccgaatatatagccattgatcgaaaaaaaaaaacaaatcagatatatttgctgaaatgaggtgaggatacacgctgtcatttattttttaaggatttgttcacctcaaaggctgacagagaatttgatgtgtataatcgatcggtgtttagtagcaaaataagatctggagtttggagggggtggacacattgaaagatagagaaagagagcttttcaaaatgtttttgtgagtttgatgaaagtggtatcatttgtttctcattgtgtaatgcattataccgaagacctattcaaaagtacaattttttgtttttcttttcaaatgaatgacctgatcaaaacccaatttgattggtgattaaataaagatgagcttgctattggtcaacaacccaaagcattaaagaaatgggaaaatttaatttacaaatctgaaaaagctccaaattaattagaggatgctgcctaattatataagaatacaaaaaaataataaataaataataaataattatataaaatcttaaattcaattaaataataaataattaaatcaaaaataaatgtgttaactcttagttgtgattcaacgcgaaaaaaagactcctcaactttcataacttttttattatatgtgggtttccgatgagtctccacactccccaccgctcccatatgaaaatgttttgcgtggcattgcccgacctaatccaactcatgcaacttacaaaccagaaccttgtgaatctcgtaagcacctccacccttcgggaacaaataaaccaacaagacttctctttccaactccttgaagaagatcactctggcactcttggcttctatatttcaacccaccccacccccctcccctattgcctaattatatactactaaacttgtcactagaac

SEQ ID NO: 205713 - DNA, 1459 bp, Cannabis indica
tccttcgtgcgacgaaatcttcttctctctcaacccattttcttcaattttcaattcgaaacctagtgattcaagatttggtattaaaaacgattaaggtaatgattggtttcgttttaagttaaaaacggttggttttatacattgactttgtgatttagagtagttatagggattttgacttcatgaaattatttttgggtagctatgggactagttttcatgtttacttattaaatttgagttgatttttagttgaaaattgagtttgaacttttttaaatcttaagtctaaaatttaatggtgtttttcgtttaaggactcaattttaatttctgttacgtaaggattgttgtatttatagtatttatgtgccctgtgaagtttgaaatgatttggataggtttcggtagtatttcgaagagtacaaaactcgagattccttacatttggaaatagttgttgctgattttgcatcaaaaccattaataaggctaagcatagggacaaaaatttacccctgcagtaaatggcttgccgttttaaaaaaaaaaaagttaagttgttttcccaaaacggcagattatttctgatggtgcttttgaagctcgttttttgtatttttccagaaatggaagtagggataccctagtgacctattagggaccctttggaatgaacttttagacctagaataaggttagattgcttagttaaccattgttttattgttgtgacatagggtccaagatcatcgatcattctccaagcaagtcagccaacatacctgaactgagacttgagataagaaatctataatgtaccacatggcatgacaagtttttgattattgattgtctaattaggcaatatcactgtgaatgaaagataaccattattaataaaaaattattctcttgttcaatgaagctcttccattattctaaaaacagtggaagaacaataatacaaagactaaaacctagtagaatattctaggttttcacacaagaatttctctctcacaaagatgaaaatgtaaaacaataagactaaaagagacaaaaatatttggctgctctcttggtcctattcatagcacatagaaaccttatagacaaccacaacacgttttacaactgtaagatattttcctaaaataaatcctgatttgcagcgacagaatcgcactttacaatggcaacttagacaaaattaacaaacttttcatataaaattaagatcacaaatttgactttatttccttgcataaaaggattacaaaatttgttatactgaaagtatcaatcacaatcaattaaaatagttgtaccataaaaacactacttattcacactttccataaaataaaaagaatttaatttttaataaatattaaagagttataaccactaattgacacaataaaattaatgcattttacataaatgtatacat

SEQ ID NO: 205714 - DNA, 1172 bp, Cannabis indica
cacatggcaccatcagaaactatagaatttatatgctgatttacatgtgcagcactatgtcgaccagaacaccggaaatgtattcaggtcattaatagctgttgagagacacctagaagaagaaaaagaaaaggaatacacaatgacactcaatgcgttcaagcattcccgtaagcgtaaggtatgctttattacaagttacaactgaaagtgcttatttgattctttgatccctgaccaaatgtaggttgcttcaaaatcaggtttccaccaaatctgattcccataatgtatgtgcacctgatgagacatgttctactaaagttaatgatgacacccctacaaaatatagtgaaacaaacaattatagtcaaaaagaaatcacacatcacaatatttccggagtaagtttatgagctcatttatgtttgtagctgaagattagagcaagagttaagttgatatttgttttgactatgtacgtctgtctatactcttttctagctttcggggcattctgatttgcgcaaaaatagtaagttgggagagaaattcgaagcctcaatggatgatttttcctgcccaccatcaaagataaagtgggttcttggtggttctggtggagatatgtggaatccttttgttggtgaatttatggtcccagaatctatgaagcaaaagtggtctgaaacctttatatcatccatctgcagtgaaaaacttaaatcaggcatttaagatatgaatgatattctggcaaggtggtgttctcctgttgagtttgtgaatatgaaagaatgtaacgccacaaggttcatttacatacttggagatgagttttgtctcaagcagaagaaatatataaataaatgtacatattttctcatggactgaatgcaaagataactggttgattagtctgcatcccttttgtttgagaccagttttttattatatgaaagaactaaaattcaatgttttgagaatttcattgtattgaattatgttttggtatagaattatcataattcaatcgtgattccgtaaattgacttgataaataatatatttatatttatgattaaaaaatattgtgacaattaaattaaggatatttgtgtcataaatattttatctttttagttttaaacacttaaatatcatatattttt

SEQ ID NO: 205715 - DNA, 675 bp, Cannabis indica
aactagaaggatcgcaactcttattagtagatttgtgtccaaagcaataggtaaatgcattctatttttcaatatcttgtgcgaaatcaaaaaatttaaatggaccactgagtgtaaagaagtcttccaaaggtgaaaggaacatttggctagagctctcattttgtcaaagctgtttgagggagaaccattgtactcatatttttcattgtaagatcaagccatcagtgtcacattagtgcaagaagaaggaaatgtacaatttatagtttatcgtgtaagtaacagattgtggagcgtagagtccaagtatcccatgattaaaaatatttcctactatttacttataaccttaaggaagttaagaccgtactttcaagcacatacctttaaggtactcacggagcaccctccccaccaagtagaagctagaatcctcagggagactgctcgaatgggccatggagcttagccaatttgatatttagtaccacccaagaatatctatcaagggtaaagtcctagccaatttcattttggagtgtaccaggattaatgatgatccagagaagccagttctaggactaatgatttggaaagtctatgttgatggagcattaaatggaaaaggttctagagccaaaattatttagatttctcctcaaggaaaccagc

SEQ ID NO: 205716 - DNA, 1008 bp, Cannabis indica
tatgtttatttttttttcttacaacttaattatattaaacatctttttattaaaataatattattcatttaattaaattatatatgacaaatataacttaaataaaaaactaaagcatatagggtaaatgcaattttagattctgtgttttgtaaaagttaccaattagaccttctgttttgttaaatgacaaaatggactctgtttttttccaaaatggcacaaataggaccgtgagcttaatttttgacaatttttttttaatatagccaacttgaaaatacgaacagatacagaaaatgtaaatagttttatcataacacttttagatcagattattattaaattttattttgaaaaaaatcagttcagggtcctaattttaccattttggaaaatttatggtccattttgtcatttaacaaaacaaagggttcaatcggtaacttttgcaaaatacagggtccaaaatgatatttacccaagcatataatacccaactttataaaatctgtttattcaaaaaaaactttataaaatctgttgctcttgaatttgttaacaaatatttcctgaaatatagtaaggagtgccatttttaaaaaattgaaaaggaaaaaaaaatgaataaaaagctcccactccattatggaaaataaaaaacaaaaattatctgtagtagatttaaagctttgatttttgatttaatttgagtattattctcaatttatcaaaataatttaaatttaaacaaaacatatttatgaaaacacataaatataagcccgtattttgcgctttctctcaaattatttatctccttgactcttttgtattcattgctcttctgtggaactccttccttcactcatgtatctgtcttttctcattatatatcattattaattatgaattaattaactatctaataatttggttctgtgtttcttctctcttctctttccttaattaattaaaggaataataatatgttgattcatgtaaatg

SEQ ID NO: 205717 - DNA, 1586 bp, Cannabis indica
gtctgatccccacgtataaaaataataaattataatatttagcagcagtcttgaatttcatttttcatcaaattatctcaaaacgattatctcactctcaactatcatgaatgtagattaatttaacacaaaattgtacacattacacataataaactgtattatattattaagtaaagattaattacatcacttttaataatataatatatagctaactacaaatatgtgcaaatgttgtgctagtttgactaacattttttggttttttaaaatacaagttatattgtatcgtgccataaaaaaaatatgtgtcatgtcataaaaaatataagtcgtgttgtgccatgtaataattttataaggtagacgtggtacgacccacaagcccaatacttttgtgtcgtgctcaaattttatttttcttaaatagatcgactaacctattcttcatacatggacttaaatttttgcttcatatttttgtattttcattataattgataagctaaatactataatatatatatatatattttatagttttaattacttttatattttttttaataatagttatacataatcatacaaaaataattataattattataatttgaatattactattattttaattgataaataattatttatcactattattattataaaattattgagtttttaatgtgtgtcatgtttttgagctactctattcgtgcttatgtattatgcttttggacttatcttgtcatgtcccatcgtgtcaaagcctatattcttcatgttgtatcgtgcatatgcttatgtttttttatatcgtgtcgtatcgtgcttaaatacatattttttttgtattagatcatactcatacctctcagactcatatcattttcattccaccttaaaaaaactcaacctatatttacaatactaagtataaaaagtgcattgtaatttggatgtgtgtagtgtttttttttttcaaacttcttagctataacttttatgactttataggtattaaatgtgttcaaaattttgagatgtaaataaatatattgcttctagctagctcttgatttgacctttattttaatatataggaagattgattttgatgggagtacatatactttcaccggttattttgaaaattaaattagagggcattgaaatcaaattttaatatgtagtcaattggatgaatctacctcttcacctctaaaaataatatatattaagtgtcattttctcaaacaaatttattatagtgtgacttttgactgatttttttttttaatgttgaaatagacctcaaaaatgttgaccttttggtcttgtaaacattcatagtgatgaaaataatatttaaggaaaattcaatatttcattagaaaaactttttaatttcaaaaattgttgtagtaatttaagtaatttaataagtactacaattgaatatattaagtaatttaatttatctatttttatagtaaaatgttaatggcatcaactcgtgacactaaatattatagtttaatagcaatattaattttcgtggactttaatatttaataaaa

SEQ ID NO: 205718 - DNA, 673 bp, Cannabis indica
gttcaggggaaatttttaacagtaaaaagaattcaggaggcataatttaatacatatcaaaatttatgggaaaaaaaaatcctaattagcaaaaaaaatttaaaaaagctattttagaatataatttgaagagaataaaaagtagtttaataatgtaaacataagcttagcttaataggttcacattttttctcacaaaaaggagaccctagtttgaatccttattccacaatatatatgtaatattttataatgctattagctattgatgattactaaacaaatttaattttaaaaatattaaactattagattttgacataataaataataaaagactttttttttaatttttatgcttaatttatctacttatattaaagaatattaaaacatatctttttttatatactatatcaaaaatatgtttatatacaaaatatttaaattaaattcaacttttttttatctttttttttgccgatttttttcctagccactagaaacttatttttcttaatattatctattcacaagtaatacacattcaaaatatatccatatttaaataaaaagtatttttttccttaaaaaagtagttttaatgatacaataaaattatcattaaatatatctaaaataggagtcaagtttgtatattttttctaaaaaa

SEQ ID NO: 205719 - DNA, 657 bp, Cannabis indica
ttattaagtggtcaagctgcgatgaagaacaactcttttgttaacttctgtattagtattccaccattctcttaggatgtgtaaattttaacaataaaattgcacttttatcaaatatattggtcagtatattttctttagaaatgtcctcaagaaaaacttagttttaaggcatcaaggtgtgtaattgtgaagtggtaattatatttgagttctatttgaaaatttagttagtattatacaataaattataatatacattttaaaatgcttttcaagataattatatcaattctcatacaagacttcacttatctcaaatttcatattacacagacataaattaatgtgatttggttgattaaaaaaacaaaattaatgtgattttgttagttaaacaaaacgttactaacttggtaacttccactaagtgcatcaaattctaacaataatgtatgtggtttgtaaaatgataaagagtacggttataagacatcagcagtgtctaacactacctaaaggtgatgctttgtaattaattagtaatatttcttaaaagttattatatatatcaaatacttaattgtatcatagggatatgacatattagagagtgttaggcatcaatggtgtctagcaccctctaacgtgtcatat

SEQ ID NO: 205720 - DNA, 1396 bp, Cannabis indica
taaaaaggaattttattcaaaatagaacaagatacaaacaagctgaaaacaacacagaacaacagctcaaagagccaacaagaggttactaaaaaccagcagcaaaaaatagactaccaagaccgaactacattaattaaatactactcatttttcctcagggtactacaagtcatgctcaagattctagcttgagcaaccttcttaacttccatgctcaatttacaaggagagacacaagcctaatcaaatatacaaccatttctgttcttccaaatcatataaatggcagcaacaaaaactgtatttattatacgattttggatgccaagagaaccccgtaagcaccattgctggacgttaatgatatctattagccacatcacatgtcccagccatctaccaatttcagcaaaggctttcttggagtaaacatagtcaatgaagaggctattatgcatttctgtaacacattcgcacaccaggcaaagatccgaggggatgctcatgaatttgcataaaagatctcgagtaaggagctgagaattgcaaacctgccaaaagatgaatctatgttttggaataataagtttatgccaaataactccactatacttcacatcttgagcttcaaaaagcgagttatagaaatgtttagcatgaaatttactcccttttcagcttgaaacaaggttgtctcattagtacttgatcgaagtttcaaaagttttttgaagtaccagctcatgtcttgtttgataggaaggctccacaaacgatgctcctttagataaattgaatttatccacttcacccaaagactatcttgcttgctagcaatggcccaaaggaacttggtcatcaatgctttattccactatttaccctctcggaaaccaactcccctaaactttttgggaagacaaaccttttcctaggatgcaagatggagcttggtccggttccctgtagtctaccataaaaactctctatatctcttatcaatggctactgttattttatttgaaagcgtaaagatactcagccaaaagcttctaactctgaggagaagcgagagagtcaattgggcatgaccatcaaacaagaggttcctactagcccaacaatttagattcttgtttatcttgtccgagatcactccacaatcttcagtcttccattttgttggtcggagcttaacccctaagtatttcagagggaatgagccatcctccattttgactaagtccaggatctgagctttacctccttctttaaccccaccaaagtaaatatgggactttaacttattcgtaaagctcaaaaaggcatcatttaggtggctaactgatttggggttcctcttccaaaaaatgataagatcatctgcaaaaca

SEQ ID NO: 205721 - DNA, 1032 bp, Cannabis indica
atatatatttatttatatatattgctaaaaaccgcgttgactttagtataaagcttagggagcaattcatacattaaacatatctttttcttcctcacttttttaaaattatccaaagcttaagttccatatatatttttttttgaaagaaaagtgcttatcatttggaacaataaaattgtaactggaaaacatttcgtaacttttttttaaaaaaatcttatttgtcaatttaaggctctaactttgaagattgataaaggtagggacggcaggcccaaatgacagtcattattttattttatttttcttttaaatgtacgtagggtcttcttatatatagaatatgattgattttttgtatactttgtaattaaataaactttattacatggtagagcctttgatcaaaagagataatttcattctttaaagaaaactattattatatttaacgttacttgtaaatgagcgagagaattcataaagaagctttgaataaaaagattataaatgtttgtggtacaaaattataaactttaattagctctttatttatattttcgaagaaggtgaatatggctttatggttggtgtttgaaacatatatctttgataaaatacattgataagcttgttcacccgttgtgtttcaaactcctgcaatactatcagagcccactaatcacttacctacatagttcaaaaataatttattttaggcaaagtgtaaaactaaaattaaaaagaaagaagaatataatctgggtgaaatttgaacttttgacttcaattatatatataatttaatttaattattacattaaaattaatattatatatataaatattatattttattatatttaagggcacatgttcctttacttctatgtgaattcaccccgatatatttatgtataatattaaatacacacagatacaatatatattctaaaagagaattgctaaaaagcacaactgttgtctaatactttcggtgtcatactgttagtagtgtaagtattaggt

SEQ ID NO: 205722 - DNA, 695 bp, Cannabis indica
tgaaattgagtttggacataagacaaaaattaagatatgatgagagtagcatcatattttttattcaagaaagtatatctaagtgaaccatgagtgatcatcaacaagtgtgagaaaatatctataattagaatgagaagtaatgtgatatatagaccccatatgtcacagtgaataagatcaaaaacattttcagcagaagtttgatgagtaaaaaaaagtaacttttttagtttgccatgggacaaacatagcaaggttcttttttattgatggcttagtgttttgacattgcaatgaatcactaagtaaatctaagtatttatgagacaaatgactaagtcttgaatgccaaatttagctaagacagtaaaagcgtaagaagatgttggtgtgggatccaaaaatgtaaaggctatttgtagattcgcctctgccaatcatccttttgctagttgtttcctaaatagaaaaaatattgttatgaaaaagaacagaaagatccttatatttagttaaacagctcactgagattacgttatatttgaatgagggcacataaagtacatctgtgagaatgagctgatcagagataaacattatatcactatgtttgaccattaaattatcattgtttagaaaaaaaaatttagtaggaataataggaacaatagactgaaacatatttatgttag

SEQ ID NO: 205723 - DNA, 819 bp, Cannabis indica
acgaatgctaacagtcttttgatcaatccccagttcccttgttatcccttttagtcataaggcttctttgacaacgtttgtgtaggctatgtattctgcttctgtagtagaaagacccacaacaacttggaggtttgatttccaacgtattgtgcactggtttagcagaaatacgtagccagattgggatcttcttgtgttaaggtcaccaggaaaatctgttattcgtgtttctacagagtatgacatgtgtcacttaatgaggaggattagtctaatacttccctaattaaagccctttaatgccaccctgacacagggaagcctcctagaatcgggaacgactcgggatggaagaacacatggaagcctacttaagcttgccttagcttcccggacgcggatgaagaatttcttctcctggacttagaggagtctaagaagggaagcttgcccaggcgatacctggacgggtattcgaatggcctaatgcgaatatcaaccattctggagtgtcgcagatgtcaaccttttatgcacgccagataaccaagtgatggttatgctttttctgacgaagatcaaattcggtctcatacatccaagcatggtagtgcacatacccctctctctgtgtgaaacctcttgctactaatctagctttgaatcgtgcttcctcaattccaggaatgccatttttgtgtttgcacacccatttgcaactggtcactttgcatcttactggtttcttcactgtgatccatgtgccattcttccttagagacactgtttcttcctgcatagctgaatcccattcca

SEQ ID NO: 205724 - DNA, 517 bp, Cannabis indica
ctgcaaatgatttatgagtatttccatgataagatgtgatacattgttgcctatttggtttgaatatcgttaggataggcagtgacatgaggctcaagttcaaaatcttttgtaaacattgaatattttcctgatgatgatttaacctcattgtcagggtaaactgaggcatgaggctcaggttcaaaatctttagtaaacattgaatattctcctgatgatgatttaacttcattgtcaggataagtagtaacatgaggttcaggttcaaaatctttggtaaaaaaaggttttactgatgatttaacatcattgtcaggataagcagtaacatgaggctcaggttcaaaaatctttggtaaaacgtacgtttttactaatgatttaacatcattgtcgtcgggataggaggtagcatggggttctggttcaaagtcttgagtgaaagtgtttaatattgtagtacttttatcatggttagaacacttggtttttggtggttgggaattttggtgtg

SEQ ID NO: 205725 - DNA, 968 bp, Cannabis indica
aattattttttaaacgaacatttataaaatctcaaacatgtagtaagttataattatagtgacacagtcatagtggattataattgtaattacatgttcaaaatacttttgtcttaagattaaatcaatacacttcggcaatctatgagatgatctgcttacacatctggtgtgatgtcttatttaggacattgaccaagaaatcattaaatgtattttgttatattggactggaccgatattgattatttataagataattaagtatcattaccctactaaaaaatccagaattctcgaaggctttacaccgttgggtaaagaattctcaatggtctatacaattgttgcctatacgagcgtcacgaattctggatagaataggccatggtaaaaaaatgtcgggaaaaagaatttttgatggttgaaaattgtgagttatagtcgatacaataggccacggtttaaaattgtcggtatagtggattctccccaaaaaaaatatcattgtcttcatcctcctcaaaaccaagatgggagttttgtttgggcttaagagccccaaagagtcgagatttaagccacggttctgtcgaaaccacaaccctaaggtctttgacgatttgcgaaatacaaaaattttaaaactacataaatcttaaattaaaaatagtaataaagaagttacgagaaatattggacaagagagagagactagcgacagcggtgctcgtggctgtgtcgtggctgactctggtagagcttgaatgggctttcatctatggtagagatcgtgaaagagagagcgagagacgagagacaagtggtggagcttgtggacctccgtctatgagaaagagagaggacagcggggagtggaggtcagagagagagagagagagagagagagagagagagagagagagagagagagagagagagagagagagagagagagagagagagag

SEQ ID NO: 205726 - DNA, 1024 bp, Cannabis indica
tatttacatcacatggaataatagtaaataactgctataactattctttatatttatctgtaaggagttatgctaacaacactttattaatcttgtaatacaagtaatcttcttaagaggttttattttgatatcagtgcctaagtatactctggataatacctctcgtgtccttctgtaaatgttgagagaagcaaacacgagatattatcgtagtgttaatcatactttctgttgagtattctgtgtatcccgagatagaccttcttcgttggttattcatctcgctggtcccataaaccagtagttagtattaacgactcatccttatctttaaaagggtgagtttgaatatttgtactaattatactatttaagacaagtttattgaatggattagttgctttataacaagaggtggtttatattctaggtttttaacacgtgtcatcaccatattaattgctcaaaatatgggcataacaatttctccctataaaattctttttagaataaaaatgactttctaattactagagggtacaatcgtatttttctcattttaaaggagaatgcatattttattttggcggttcaatacttcaaggtaaacatcattttagcatttattattctgactcttcctttctcaatagttcccatttgtttgatcagtcatcattacgatcgaacggtttctattgtttaggtataaagtctgaacctttcccttatttttccattaccgtttatagagcctcaattttaaactttctaaccattttttctctctaaaaacttggatgccctcactatccctcacatacttcctttgagtttctgtcgatctttttcctcaatcccaaaacttgccacggttcaaaccttcatcttcaggagtgttcaacaaggaattctcaaaaccatatttctttcaacgaaccagtaagtgaattttcactatatctctttttaattgctttttcatatattttttggcatcatttatcactctcatgtggga

SEQ ID NO: 205727 - DNA, 868 bp, Cannabis indica
taataaattaataataattgaagtttgagttaatgatattagccattaattgtgtggaccaaagtagagtttgactaatggattgaatttgatttgagtaggcattaagtttggttgaaattaaaaggttttagacaataacttaaaagagaattataagtagtggattattgcaaaccaatgtgtttttggtggggagaccacagcttttatttttttgatttggacaacatgagttcttccaattttgtgggtcattggatttacaataataataacaaacaagaccttgtacggatgttccaaatcaaagcataaatatttatattactagttaatataatcttagatttaactaattatggccccaaacaaaggatggtctcctcaagaaaccaagtaactaactatacaaactaacttgttggattttggtttctttaggaaaaaataattggcattaagaaaaattgaacaagaaattgaaatatttggattaaattattattggtaattagtaaaattagaaaattatgtttgaattaaattaaatctaggttcttatttttaaccaaattgatttggattctatatattattatcacatcttttataattttttcggaagtaccatcaaccaactcacaataaattccataataaatccctcaaatatgtagtttacaaaatcaccttaatttttttgtgtttaaacttaactatttttatatagttgtgcttatctagtggtttagctcctactaagataagtatcaaacttttggtggaaggtcaacaattgatttgagaggggtagactacaaactatggctgctccattcattcattgtttatttatttttatttt

SEQ ID NO: 205728 - DNA, 1597 bp, Cannabis indica
gaactcggtcacgatcttgagaaggaaaaggaaatcgggaataagcaatatgaccaggctgtttgtgattatatctatactaccctgaccaagctaccttattttgacttcgcaattctcaaagcagaggggttgaaatggctgatgcattccgcgatatgtcgcctactgagacccagggacttaggggaaatattttctctgaggatgccgaaaatgcgaatacagatgaagtcgcagatgttgttgttagcaatgtcgtggatgatcccaacactctagttgcttatttttttaatttcttttgtattgccgaacttacttttcaagcggtacatgggcactcgaatcttgtattttgaatgtcttgtttagttatgttattcgattaacgtatcctttcgaggatactttttttgttataattttttccctttattgcttcattaacatgtgatttcaattaaaactaattttatcttcgcaaaagttcttcttgatctaatcacaacttggtgtgatgattttccctaagtataaaattttaaataatgcagataattcaaaatttaaaaaattcgaaaaatttcattaattagtcaatagtacagtattgatggttacacctgctatacttattacattttacaaaataaattgactaagtataaatgcatgcaagtaccattggtagtaatacattaaaatttctccattccaagctattttaaggactgtgctgtcgagatcggacaatcgataagtcgcgctgccaattttttcagcgattagatatggcctttcccacttattgccgaatactccttgtgctgaattatgcgtattaggcataactttgcgtagcactaaatctcgtactcgcaggttcctttccttaacatttgagttaaaatagcgagctattcattgttgataggctacacttttcaaatgagtctgatctcgcttttcttctaggaaatcgagttgtatcaactgattttctgtattgctgtcaatattaaagatgtctattctcaatgatccagctgtaatctcgactggtaccatggcttcgcatccatacgaaagtgagaatggggtttcaccagtcgttgagcgaggagttgtattatatgaccatacaacttgtggaagttgtttttgccatgtacctttattttcttcgagcataccatttataatatgtttgataattttgttgactccttcagtttgccaattactttgaggatatgcgactgttgagaaagctttttgaatccctaggtcatcacatagttggcgcatctccttgcaatcaaattgcttatcattgtcagaaattagttttgtaagggacgcgaaacctgcaaatgataacactatagacaaactcgtgtaattttgaagtcgttatggttacaagagccttagactcgacccatttcgtgaagtagtccacaatgactacgtcatactttactcctccttttccttttgacaattcaccaattgaatctatgccccataccgaaaatggcccagggctagtggtaaagtttaattgacttggtggcctatttactgttatacc

SEQ ID NO: 205729 - DNA, 1395 bp, Cannabis indica
ttcttcttgaactatttagattgttagatttaaggagttttgtctaattttagaaaagaaagaaaaaatctaacatgaatgaaagttcaaaggtcatgatttaatacatatcaaagcttgaggggcatgatttggtagatatcaaagtctgggaggatggtttaatacataaacaatcactgaaaaaataaaattaaatgaaattagacaaaaatctttaaatttaacaaatccaatatgaataatagttatgatttaaattattattagtactagtctttttttaaaaatacatatataattttttaaaaaaaataagtaagtaataaattggatatgtgaaatgggaaggtattgtcaaatcaaaagcatggtatatattattggagaatttgataaacaaattaaagatccttatgataaggtattataatatatattatataactagctagagagggatcatgcatgacttgcaattgtcttatgtatttgacatgtcgggaataaatgatgggaaattgaccctacaaaaatcattcaatatcttttccaaaaataactaataataataattaaatttattaaataattttatataattaagcatatatatatatataagttgaatcacttcatgagtttgtgtggtgtgggaacattttgcagagaaatgtttttttaatttaatgttcatctcagtcttcagtgggtttggtggaatctcctttttctttctcatttgtatatattacaagacaaatattatctgtctatatctttaatttattcataatttgtctatttattcataattataaatagcattaattagaattatatatattatcttattttgaaacatatccatcacactaattaatttttaatgttaagttattagtgtttttttccatatcatttctcacaattttattttatttattcaaacggttaaatttttttttcatataacggctattaaaagtacatccatcccattattgattttcttcctaattattaatacattcataactttttgtttttattaaatagacaaatcatcttaaataactgtttgaaaagtaatagggacaaattccatactatagctacgaccagcatattaaaagacaattagtatttgccaaacaatcaacgaacttgattttgttcgcaaatcgtttaacaaaaacatataaaatattattgatcacaaaaactaaaaaacgacaataaataattaaacccaaaagagatcgtatgacctgaactatgaagaacatcaataacactcttgcagtctgactcaaccactgtgcgtgagaatccctgttgcttgattcaacttagcgcttcctttaaagcaattgcctcaaccacaactggttg

SEQ ID NO: 205730 - DNA, 734 bp, Cannabis indica
tgtaaactgaaaactgctcctttgatttcagcatccgaaggaatagcagcaaagctctcattagcagtagtatcaacctttttatccagcaagcctattagatcatcttcaaggttcgggttagaggatgtgaaaagatctaaaaaataggcattaatgacctccgcaatgtgtttcttgtctttccacactcttccatccttgtccttgatagcccaaatactattccttcgtttcctaatgacagtagccgcatgaaaaaagctcgtgtttctatctcccaaagagagccaagtctctctagatttttgcctccacatactctccaatttagcccaagaagccgaaagttgagtgtgaattctagcttcttcaacactgagtgcatccgagaggggttgcccttgaatccactctaactttttctccaaatcttttatatacctttcatcagtacctatcaagtttttcttccagctttggagggctgtcttcgagtgatgcatatttcggataaaggaggcagtagcattggccccagaggacacccagaccgtttcaatttccttcttgcaagaggcttcccaagaccaagcttcaaagaaacggaagggaataaagcctttaacagcaaacaagtgtgagtcaagaattatgggcgcatgatccgagactgtaataggcaagttcctaactcctgcggaagcgaaattcatcaaccactcaggagagca

SEQ ID NO: 205731 - DNA, 786 bp, Cannabis indica
tttttttttctctttttttttatggaagtgtattatatatatttgaattatacatggtaagatttgattacaagactgcctagtttattctagtattatttttgatgaaagtctattatatatatatattttgagttaagttaagatttgattccaagatcttatgcactacttccataacttaccgtgttttttttagagaagttcgtgaataattatttttctaaaaattaggaaactctcttaaataaataataataaaaaaaaaatcttttcatgtttgatccaacaagttgttaatgtgatgcaataatataaatataaaaaagagttatttaataaatattaattggagtggttcagagcaagttaagaattatcaaatgttctactattaaggtatgttcattaattatatattttcttataaccatttttataatttcatgaataaataataatttttatttgataaatataaatatatctcttagaattcaaaatagctcataaactatgtgggatttttttttcacactataaatttgaaaaaatttcacaaataggtaaaaataaaaataaaaaaaatatataaaatgccactggattttttttttggctttattttatatagatatatagatactgattgtgatttgtgaattaggtaaatagtcatgctaactatttttttttctttgtatggtgataaactttgtatttttatacacatgaataacttataagttctaataagatataactaatttttacaaaaaaaaaaaa

SEQ ID NO: 205732 - DNA, 1021 bp, Cannabis indica
gaacattacatactattattaatataaataccaaatcccgcataatttaatttaataaaaattaaatacaaaataaaacgtagtcctaatatcctaatatgtaaaaagaaaaatactaacaacatcctagaacattacatactattattagtgtaaataccaaatctcgtatactttaatttaactaaaattaaatacaaaatagaacataatcgtagtatcctaatatgtaaaaggaaaaacactaacaacgtcctaaaatattatatactattattagtgtaaattccaaatcccccatagtttaatttaaataaaattaaacataaaatatattatgaattatatacattacataaaaatgctaacatggtcttagtgcattatatactattattggctagcacacttaaattttaataaaattaaaaataaaatatatttaatccgatattatattgcactaaacccgtatccataacataaactaaacataacataaactttcacaaaatagttacttctaccatcaaccaaatgaaaatgaaagaaattgttaaacttgctatattgagaaattgttaaagtaaaaaagagggtgggtcaaatttcaatgtgcaataatatggcaacgtgttgaaaattttgatgagggttaaaaaagagcgcagtactatttcgttagaagacatgagagaatcccaagaccatcaccataaagtcctccatatccgaaaaggtaacaaacactctagttaaccacggttagaatctaacctcaccatggttcttcccaagaacacaaatataagagaataaaataaaaactgtacaacacacaaaaaaatatataattgtaaaaaacaaaggagagagaggaaaagttgctgggactgcctcccccttcttcttctcttcttcttcttcttcttcttcacctcttcttttctttttcttctttttctctatctaaaagttttgattctcttctctctctctctctgtgccctattttttcctt

SEQ ID NO: 205733 - DNA, 741 bp, Cannabis indica
aaaaaaaaatagggataatttcattgataaacgccatataattatgtctgtaaattatgtgtgtacacatgtaattaatttttctatatatgtaaataagtttattttaaatatggattctaagcacaaatctaactcgcctgtatcgaaagccagccttaaccctcgtagagtggcaattctataaaaaatttgagaaatataccattattttttgtgttaggttaggtgtatataaatattatgtaagttgatacctctataaatacaatgagagctttaaagtgaggggcattctcattgatgaagccaatatcattgatatcatagtcaatagatgcttcagctccaaggtaagcaaatattggagcattagggccaccccaatactttgagttcaccaaatatctttgttgaaatattgtgtaactctcttccctatagttgaaatgatccaatgtttggttgtagaaaaacgtttctaaatcctccgaaatcgaaacttccggaaggtcggggttgtggaggaacaacctgtctctagtgagacctagtcttggaattttgttgaacaacttattagattttaatgaagaagaagaagaagtattagtaagtattatgatgattagtatataagagactagtattagtagtttagacattttattttctgataattataagtaagtaattatttctgtttatgtagtgcatgttggtagtgcatatatatatata

SEQ ID NO: 205734 - DNA, 758 bp, Cannabis indica
aaaaaaaaaaaaaaagttagaaatgtgtggagtattataagcaagttacaaaagaagaaacagaatgaaataatatatataattacggtaattatgttaatttggttgttaaggtattgtttagagggttgtataaatatatacatatatataggaaaaaaaaagtggtagagaaggaggctttcagtttgtttcttgtctcttttttctcttaaaaaatggacacaaacatacaacaggttcataaactccaggcgctcttttcttcgtacctttgtaagtatgattattttattgtaatataatatgaatgtatgtgtatgtttatataatccttactaataatatacacataaatgtgcaagtatacataaaaagtatataaaacataatcttgatttgcattttgttcatttgatacatatcagtatgttacatgattatgttttattgttttgacacatattatggataaatattattttatgtaatgttattaactgagtacttgtttgtttgactaatacgtatatttaaaaataaaaaatatatccggtgaaattcaaaataaataatgacaaagaatgaagaaaagatgaagaaaaaaaaaggaaagaaaaagaagggcgaaattcgtatttttcttttatttagccttatttatctttaattactactttattaatttataaccaatatctaactgctaaaatcaaccggactcttcaatcaactagatcaaacaatacaaaaatgaa

SEQ ID NO: 205735 - DNA, 930 bp, Cannabis indica
aatttaaaataattgatccaattcacaattttgtaaattagattagactgaatttaaattattatagaaattaaattagattaaatccaaaatataaaatcctcacttaatttaaatcaattaaactataagtaaaatagtactaatttaatttgataaacccctacatcttaatccctcaaatcttaacatcacatgggcttcctcccatattcattgatatatagatatatattttcggtttcaaaagttttttcacattttcaccaaaaattttgggtaactaagtaaataggctatacttggtgtacgattatttgtagaaattttaaattatatatatatttattaaatgaataataaaatcgtatcaaataatttcaaacttatttttatgtataattttaaaaaattatgtatttattaataaattatatatcgatacatagaattttaaagaattctaaaaaaaaaaattaaaacatcatacaatttcttatatataaaaaaaaagcacgcaaataaatatttttaaatatatattatagcgaagaaaaattaaaattttaataatactctcacaaaataaaaatttaaaaaaaagaagacaataaatttataaaaaataattcatcatttaaattcaaaatagtataaaaaataatcaaaatagagtttagcattttaattaatataattataaataggggatttattaatgaatattgatcaactgttaaacatatttttagtatattagttaatgttgatcgagattttcgacaaccaattaaatgaaataatgatgagagatttggaataattaatgcatgtaatttttacgtggtttgggcattaataagccgtagtccacgagtctttggtattaatgagaggtcttatatagaaaatgttcttggtgagttctct

SEQ ID NO: 205736 - DNA, 867 bp, Cannabis indica
tcgtgaaaacgacatttattaaaaaagcttagattagactttcataaggtgtaataattttgaaatatatttttaagtacactttatcatttacaatactaaaaaaaacaaaatttaaaaaattattttttactatatatttatcactcattatatattacaccaacaaatagtgcatgacaatttgatgtatacataataccatgtagtattttgatttcatggttatgtttgttgggtcaatagaagaggccaaatcacatgtaaaagttagataattaagtcaatagagaattagaaaaatgtcacaatacagtataggatgaccatgtttttgtagcctttattttcaagattgattaacaaacagcccatatcaagcctaaatgtacgcaaacttaattgtcttctcaactatttcaaccaagtaaaaaaaaaaccatagtaaaagtggatgctttccatcttttttcagttgaaattttggaggaagaaaaaacataatgtaaaatatacattggactttggatgtagtagtcactttgaagaatcagtatcattcacattatactctcctatttacaatagtgggttagtttgggatattattttcaaatcttgttttatggttcatcaatatttaatattggaaatattaaatatagtttgtcatgttatactctagtttaaataattgaagtatttttaactcaattttaattgacaaatctttcactaattgttagtaataggtgcaatcaatcacattttcattcgaaataaaaatcaaatataaattttttagttaaagatgttgttagaatttttgtcctattttgttgattctatctacatgtaataaactat

SEQ ID NO: 205737 - DNA, 1621 bp, Cannabis indica
attttttttcttttcttttttggctagaaaatttgagtaaaaattgaatcataatatatatttgatatgacctttgctaatggttgctttcaaattaattcattcaacaaatatataaaaaaatataattatttgtataaattatttataattggcagatatttagattttatatatattatatataaaatcaaatatgtttgctagattgaacttaattcaatcccaaacctaaaataaacctaaaatgtatagatatatatagttaagcaaagaaactatatatttatcaatataaacctaattggaatgggatattatattgaaggtttgagaagaaaatagcaaaggcgactctctctgaaggcgattcttccttgcgactggaaaccccatgctctcttcggaagagcctaatcaaaggatgtgctcgacaagcatggaccaaatggaggagtcgctctcgcgcaccagcaaactgacggtaaccgacgaagacggatgggaaattaatgaagaaggagttgcagatatcgggaaatcctgcctcattggcagactctgtacaatgaagccttttagccgttctttactcaagaacattctatgccgcctctggaatttgggggacaccgactgggatttaaaaatcaagaaaaccacggccacagcagtgttcttggttctttcgttcaaaacgaacatccacttggaaaggattctgggaaaaaccccttgggttcttaatgctggttttctcatattggaaaggatgcagggcatactgacggactgggaaacgcctttatgttccttcacaatctcaggtcgtgttctaaaccttccaatcaaagccataactaaagcaaacatgttacgactggcaggtatggcaggggacatcatcgacattcaagaagcggatgttaattgaattgttgtcaatggtttcttcaaattcaaagctcggaactccattcattccaaactcttcccaggctacctattcccccacgaaggacggcgaatttggctccaatttcagtatgatagactgccatatatgtgctttaactgtggcagaataggccatgaaatgcgtcaatgccaggaacctagagctacgggaattcatgaagatggagaggcgagaccaatctttggttcttggcttaaagtggattcgggtgtaagggtagaactgaatcactacaatgaaccaaacacaaacaaccttcgagaactccctggcaatcaaaggattcactccatgaaagacacagatcagaaagcacaagagaaaggggtaacacaaaccagtactaaaccagtacaaggtaatcttgagacagtccctttatttaataattatgaacaagaaagtatatatgctaataatatcaatctaactgattcttttaatcaatctgatgcaatactggatgcaatgaatgaggccacaagatcccataatcagatggaacactcgggcagtggaattcgaaaaagaatgggggatgaactcaacaatggggcaaatactaagcagttggggaaaggatatgcaaagcaagaactatggcctctgaattcttgagcaaggaaatggaatccaatcttg

SEQ ID NO: 205738 - DNA, 949 bp, Cannabis indica
ccccctcatgcacatatgatctaattattttgttataatatacctctataagattattttggtgatactataactcatccagagtatgtgtgaacttctaaattatggatgaggggttctaataacttcaataattatctgtttacctaagatttttctagaaaatgaattatttaatattagagctaaaaaaatataattaggaaaataaaatatgaagaaggcactcaaagtttttacatggttggggcgttaaatttcctgtcataatttaaaactattttaaatggggtaggttagtttaaaattatcaagttaattctaaattaaatcttagataatttacatgcttttagtttcaataacggtaaatatataaacatataagataatcttaatatatcatgtttctactacgtatgtaatataattgtgtaggatttctatgtatgtcatgttattcactaatgcatgaacatattattaatcaactattaatgaacatttatttaaaaatagtaaataaataatgatgatgaactggataataattggatatttctaatcttacaacccttgaaaagattaaaaataaattacaaaatcttatgtttatcgctgcaaggatgcttttgtaattttgttggaccgtttaagccttcaattaattaaaatatttttaattgattattcttaaataaactttttacttaagaaatattttaacccttttgaattaattaaaatattttgtttaatttattcttaaatagactatctatttaagacaaattaaaacacgtaaattaattaaaatatttttaattaatttattcttaaatcaaccttttatttaagataattttattatcatatttgatttgtctattaatttaaatttttaattttggataaagataacttttgtcttactatggttatagatttt

SEQ ID NO: 205739 - DNA, 977 bp, Cannabis indica
caatataataagattacattttgtgagtagtaaatagaagaaaacaaatcaaacatttataagattattaaggtattgctgttttgactttaattaaatggattttaggatggaaatcaaataaataaattaatttctagttattctattttctaatattttgattgaatcaatattctatatatataatatatttaaatcataccaaatatagcattataccaaaacatattatagggttaacttatggcttggaacgtagttaagtgtaatataaattaagaattaaagtttatgaaaatttaaacattcaggcaaatatatatacacattaaaaattgaaatattttctattatttttattcttatcataaaaaatttccttactaaaatttaagcttttgatcaatgacgcatcattggtggaatctgccaaaaaattatattaggagccaaattaatacatattagaaaaaattaatgaaaatttatttaatttttttacttgtagcttaaaaaatatcaaaggcgacactctcctgcaccccaagtttaattattgggtaattaaataccaatttgaatcctgtattttgtaaaagttatcaattagactctttgttttgttaaatgacaaaacaaaccctctattttctaaaatagtacaaatatcactctgaactgattttttgtcagaataaaatttgataattatcctatttaaagatgttatgaaaaaattatttatattttctgtatctgttcgtgttaggaattgttttcaaactggttatattaaaaaaaaaagttgtcaaaatttatataagtttagggttttaattttactattttaaaaaataaaaagtacattttgtcatttaacaaaacagatggtccaattagtaacttttgtaaaacacatagttcaaaatagtatttactcttaattttttaatattcacatttattattttttt

SEQ ID NO: 205740 - DNA, 502 bp, Cannabis indica
atttatccaatccaaaaaaaaaataaacattttattaaaatatttaaattccaaaaataaaatccaaaatccattatatgtattttttttaatatttaataactaaagatttttgcttgaattttgacttatattaaaacatattttaaatattttaaaatattaagttgtttaatttttaagactcttttgtattttaaaacctttgtagtttgtcgtttgtgcctattaatgcaattatttttttgttttcaaaaaaaaaaatatattgattttttaagataaaatgctattatattaaatgaattataatacaatagtcattaaaggagatgaaaattcctccattcataaatattccgtgtccaccgaaagagtatactttgctaaagtatgaacaacattattagcaaatctataaatatgagagattttaactccaaaaaattattacaattttaaaaatatacaatttaattacctaaaataaattaaaattata

SEQ ID NO: 205741 - DNA, 1811 bp, Cannabis indica
atagaagttggaatgacaccttcgaaaagattatcttccatggctaagccaattaagttgaccaggttttttattgttggaggaatacttccagatatttgattcccaccaaggtaaagataagttatttcagttgacaaattagctaaagattttggtaaagggccgccaaagttgtttcctgctaaagacaatatattcattttactacaattttgtaaagatcccataaaatccaagctgttgggtaagttctttcctaggtgatttagctctaaatttagtatcctaagatgcggaagattgatccccaaactagctggaactttccccacaaaataatttttcgaaacatcaagtttctcaagcttagaagcatttgaaaattctgggattgtcccagaaaacttattaccaccaatatgaaattctatgagattgggaagttgaaggcctatgtaggggggcaaagtgccttcaaattggcaatctgaaattgataaacttatcaaagatgatatgttgtaaagtgagggaggaatgataccagacaggttactaggccctactgaaaagagtttcaacttttttaacttgccaaactcttctggaacagtacctatcagagtattgtctcctacagaaaacagttcaagtgatgaaatatttgccatggatggtggaatttgtcctacgaatttgttagcgtagagactaagaaaagaaagctttgtaagagagccaagttctgagggaatgagccctgtaaatcgatttcgactgagagataacactcttagtttcgagcaataactaagattcaatgcagacaactcaccttctaacatgtttctagcgagactcaaattttgcattctagataaatggcaaacttggtgtgggatttcaccggagaagctattgtttataaggtcaatggtcctcaaaaatgtgaggtttttaatgtaaggtgatatagtacctctcaagttgtggtctcgtaacgccaggcttattattctttgatgcctgtgactgcatatgactccattccaattgcagaagtgagcggaatcattccaagatctcaacactccaaaagggtcattagagactgattctctgaacttgagcagagcaaatctatcagtttcgtttccgaatgcattgctcatcacgacatcaaatgacaccatcaaatacaagaacgaaaaagcaagccaaaaagcacaagtgatggggctcttaagtttcatggctaatgaatggtagcagtaggatatacctatggtgttaagtaccttaatggttttaatatatagcaatgcttgaaaatggagattggttattacaccttaatatgtctatctgatgtacagttgtgttttcaataagtcttcgcaccaattgatacgttgatgcacattcaatttgattgaagtaatacgtttagtgggcgtaaaattctttgataatatatacacctaaccaataagggcctaccaggcaaatgaagtttcaaattgattagaaaaattatagttgacaaaagagaaatggtaaaagggactcggtccatatagtttaatgtaataagttttagtaagtattgctagtcaatcgtaacaggatatatttagaaggtgttaggctccactaatatttaatagcaatgctcctgacaaaaatatgcagtacccgtctaagcattttgggggccttctgcaaaatttgaaaattgtgtcttttttttaaaaaaaaaaaaaaaaaatataaaaaaataaaaaaaaactaaaatagtatattaaaac

SEQ ID NO: 205742 - DNA, 645 bp, Cannabis indica
atacttttaatatctttttctctcaaaactactcttacatttgaaaaaaacctctctctctaactctcttactctaaataagtctcctcgtctccaccccgaagccccaaaattcacaagctcaaccactccaaaacccttgaaatctacaccaatcgccagagttttcaacccatctcttattttctgcattttttttcttctgattttcacgatgtcgcttaacatcctaaatgtcactaaatcgctaaacatcgttaaatgttgttaaaccacactcaagtttttaccatgattagcaatgtttagtgatgtgctatgtattttgtagtttgatatcgcaaatacatcgctaaatacacaaaagatcactaaacatcgctaatcatcgctaaacttcacccataacctcaaatttgatcaattgatctatcattgcaaatatatcactaaatattgcaaaatatcgcaaaaaactagaaaatgagaaaaaacaggcgcagaaaatgagtgatgggttaagaaatccggcgatgggtggggatttcagggtagttgagctcatggatttcaggacttcgaggtggagacggtgtgacttagagagagagagagagagagagagagagagagagagagagagag

SEQ ID NO: 205743 - DNA, 717 bp, Cannabis indica
ccaactgagctagacgggcttttgattttaatgcaatgtaaatattatgaatctcaataaatttcagctaataggtctctcttcacaactacacaaagagcagcgaaacgtaagaactatacctgagcaaaatcccgaagcagacgatttgtgaaagtaaacaatggaggttgaaatcgtacagaccacggtggagatcttggtagccctcgtcgtaatactaaccctgggtttactctctgttatattttttgaagcttatcgaagaaggcacaaccacacgtacgttcacttcccatcgtttcccattctcaattctgctattttcgtttctgttctttgattaaatactgtgatcgtgttttccttttttttgggcagtcacgtcgaagccccggcgatcttcgaggatccccattcgttgaaacaggttcattatcttatgtaaagttgctttgcaacgtttttgtttcagattcaatttgaagtttgtatttaataattgaaaaaaattaagcttaatttgaatctcccatgtttttttagaagttttgtttgttggattttctattgcattagtcaacgtcttacggttgtagatttgttggtgcttttggagaacattcagtgtgtttatcttgtaattctttctgttgagatttataatgcggaggaaaaataagcttttacttactgtgttaaattacgggttgtgat

SEQ ID NO: 205744 - DNA, 760 bp, Cannabis indica
aatactaattagatatacaatttaattggacatcaacaaaatagtagcagataactcgaaagacacaatcaaacaatctcaaaaaaaaataaaaaaaaaaaaaactaacaaattacctaatgaaaaaacttaaagatatactcatttgtaagatttgatacttcatcttggaaataaatttatttctcttgagttgttagctaggggactagaaataaactatttgctggttgtgttatgtatttaaaaaatattttaataaattgtataatgatttaagtaaaataaaatacttttaaatagtatactttcatttattattattattattattattattattttgatcaaagttattaccatatatataaaaaaaattagaaaaattgactttaaattttttttaaccagctaagaaataaaaaacatacatctacacaacaacactattttaatatgtaaatcaatttaacatcaataaatattttcgacaactttaaagaaatgtaaacacagtacataaacaattataatacatgtatcgataaaaaaactcaatatatttttagttttctactgttcaaacaactaataaataagaacaaactaataattgtataacaactcttctttaatatgtaaattaaattggcttgagacatctaaaaaaatacaaaccaataacctgaaaaaattaaaaaaaaaacaaaaaaaactacaaatccaataatttcacccaaaaaaaaaacttaaaaacaat

SEQ ID NO: 205745 - DNA, 888 bp, Cannabis indica
atttaaattgcataaaaaaactcactaatccggtgttgtctgtaataggaatttttttgttatatcttttcttacttaggtcaagagtttaaatttctctagagtttttcatggaagagagactaaataaataaacaaatttaaggaccaaatagtattttaatatattttaatgcagtgtcaaataaatggtaaaatactatagtttgatatttttgtagaaattcctaatccaactgtatattaaaatatgtgttaaatttgggttatgttaaaagttagaccaaatttgacatatgatataatattgggacaaatttagcatacatgtatatttttcatttacattattatttagcattaaccagttactttaattcacttttctaattacaatattgcaaccattttaaaaatatatatatatatatttaatttattgattataattaatgataattactttttatactaatttacaatttgttattatgtattggaacataattgtaaaaataatatgctaaataaaaagtaattggctaataaataaggctactcaggtcaagatttgagatttctaccaatttaggaaagcttacatatctttatattccgtctcaattcttagagcatttctaatgcaatggtataataaaactttttcatcaccatttttttttagcatattgtgataaaataaaatgaaaaatgtatattaaatttgacatatattaaaattatactaaatttagaatgatgtggaactgttgtggagaaagtagaatatagtgaggcttataataacatacctgatatcaattttaaaattgatttgacaataaaaaatacgtaaccatactattttatatattgattacactttat

SEQ ID NO: 205746 - DNA, 670 bp, Cannabis indica
tatagagtataatttcctcttatgaattcatataaatttaggtgtttgggctgttcaatcagatatatttttgtattactttttttgttggaagttttataaaaatattggattttgagtaaaagtttacaattttactatcacaaataattttttacaaaattactgtctttttataaaacaactgtaaaacaataattaaaaataatagtagaacaactaaaaaataaccaacatttataccatcacttataggctagccttactctcaacaagaacaacaatgggactcaggacctagccccaacctgtccattcttttctcctacaaaagtcactggagaaatccatagccaaatcaacatttaattggattattctattatcattatgggctgccaccgttcaagatcttttctcccatgagttccattttcttttacaccatcaaaattttgggcctttatttcaaaataattatgatgttattcaatataattatataaaagtggtatttttgtaattaatttataaatagggctttatacgaaaaaaatatgggaaaaagaattatagtttacaaatatatggctgaagaaaatagaagacaccacatcactgaaattgtttaattttttttttctttttttactgtgagatggattttttt

SEQ ID NO: 205747 - DNA, 997 bp, Cannabis indica
catttgagctaaaataaattacgtgtataattttaataaagtattttaaaaagtaaaatagaatacctattaaaaaaagctatatcaattttagataaaataaaatatatctaatacatattttgacgataaaaaataaaaagttaacaaattaacagaattgatatatgataatagtataaatttcatttatcttaaatatctcactatgaaagaaggttatatgtgcatatgtatttaaatttttatttgatttctaatatttttttattattttttctaaaacgagtttgtataaacataaataaacttaaatctttttttaagcgagaaaatcgtacttgtttcagtaaacttaattttcttgatttaattttacgaaatttattggagttttttcataatttttctttggttttttaaggtatatgaatttatgaatataataaattttgaatcttttttcttgttattattatttttttcttttttaggaaatctaggggggaaatttggtgataatcgatgtttggggaacaaaaagactaattatttattattttaacatttgaatgaaacagatgctaaccgaaaagggtgtgattatgtatgcatataattgttatatttaaaaagaataacaaacaatatattttaataaatcttaaggaaagaaactcattgttaaggaaagaaaaagaatagaattaaatttaataaatctatttacatatttattatttgttgtgagaaataagaaaaaatcaatgacttacgatttagtatagctagctgatcagtgttggcaggtggttctacctagttattttgtggaaaatatcaatgattttacaagctgatttgatcgggtttgttcaacttacaacagtgaaaaatgtggtgaaatagctatggtttgctggtcttggtggggggcgagaaatgatctgggtttggcaggaaaaatgacatactctagctagtgttgtgtctgcag

SEQ ID NO: 205748 - DNA, 934 bp, Cannabis indica
tttttttttttattttggctttttcatcccccttagtctaagacctaatctaactttttttgttgttgttttttccgaataacgacaaaattccacaaccataaaaggagttcccaacttcctcttctaaaatttcaatcctcttttctttcattaaattctatctttgtgagagaaaatatttttttatctttccttcttcattttcatttttttttcaattaaaaattttccaaaaaaaatgaagaacccacaatcaaatcttccaccagggtttagattccacccaacagatgaagaactcattcttcattacctaagaaaaagaataaattcaacacctttaccagtttccataattgctgaggttgatatttacaagtttgatccatggcaattaccaggttagttggtcaaaaaaaaaatcaaaactttattataacatagtatattataactaaattaactaactttttccttttgttattgttattgttattcagataaggctttgtttggagagaaagaatggtacttttttagtccaagagatagaaaatacccaaatggagcaaggccaaatagggcagctgcatctgggtattggaaagccacagggactgataaaactataatctcttcttctttatgttcttcttcttcttcttcttcttcatatcatcaaaatattggtgttaaaaaagctcttgtgttctataaaggaaggcctccaaagggtgttaagaccaattggattatgcatgaatatcgtctagctgaatctccaacctatgcttataattccaaactcaacaacataaacaaggttaaagattcttctatgagggtgagtgacacgtgtcaattaaagatggttttttattagtttatgtcatggtcaattatttttatcaaagattgagactttttattc

SEQ ID NO: 205749 - DNA, 736 bp, Cannabis indica
cacgaaccaaaactcttaccaactgaagcttcaatcgatcaacccaaaaatacaatcaaaataaaactcaagcaggcataaaactaccattatttatgacgactttacctgagaagaagaaaggaatcaatccaaacaaattttgtttcgtattgatgaaagaaagagcagaaaaaatggttcgaaactaaaattcaaccctgaattccggtttaattcgcagaaaactaatcctcctaatatcaatttttagattcataaaatgtagatctctaacaaatagatctggagctcccgatcaatctaaatcaagtatatttcaaaaaaaggaaaaaaaaagtattaatactacaagtaatgtttatattgttgcattgacgttgttttacaaatttctaatagtgaatttgttaatatcaaataacaaaaagtataaactcgcatgcatctacaactacatacatctacatatggttctggttttttatgttgcattatgatttcattatgatttcattaatgttttgttgacgatcagaatttgaaacatgaatgactacaaactgaaaacgtaataatggtgtttattaaatttacaggtgtttcatttgtcaatataagagaaatatctttaaagaaacttcaataacatggttagttatatgtatatattcaattggttgaaatttaagttagtttacagatgtctaagcgttgtttatccatatattactaa

SEQ ID NO: 205750 - DNA, 1202 bp, Cannabis indica
ctttctctctttccaaaatttagtaaacaattgtatgagaattaatatcataccattgattcccatccctttaagtaaacatgccttttcttatcaaagctctagctttaacatctctctgaatcttcttatttacaaattaaactgaattacgtctgatatccgaatttttatccgcttgacgtgggatgtccacataagcaaaatagaggtcgtgtgaaatacaacatgtcaatagatgatcaaagtcaccatgcacaatatgtcaattaacaagacttccaaataatcagacaaggccaaattgaagtctatgtgccaacgaggccttagtaaaagggtaggccgactagcacaagtagagagcattaagggggagtctaattgaatggtggggtctacaaatatctttctagacagttcacaacttggtttcagttagtagacaactccaacaacccacaaagttaagaattcaacctcaaattatctacctatctttcatggatattattgagttatttttgtaagttaaatatataataaaagagttgttttccttattttgaagggatatttacttatttgaatattaatcttttgtaagccctaaaattatacaaagggtcttaagcatttagaaaagggggacttgaattatgatctcttaagctctatagctctcactccctctctctcatgtcactttctcttcattagacactcagtctattttctcatctcatttatttagaatttgtaatacatcggttctcacaagtataacattcaaagagagccataactataaattacaaggtttaagcctgtaatctacatggtattatctctaaaactaatacaactaaaaggagagtaggtcattactcgctaaacaagggggtcaaacctctataaatcgccgtgtcaattttattattttcttttacactttacacgtggtgattattagtaataaataaggctctgttgtgaattgaccaaatctaaggtcaacttagtggttcagtcagatcacagtctgcttagtccactaatgtaagggttttctgtcttatttatttcatgttggatcactcatttatatacaaagaaagtgttctttgattacacagagattgacttaattatcaatccgtttttacattgaacttcaattaaatgaagaacaatttcgaccc

SEQ ID NO: 205751 - DNA, 548 bp, Cannabis indica
agtacaggcttgtactcgacagttaactacataaacatacatctttctgggaatgtaatgaatagacaaaggttacaattgcttggtatggcttgtatgacaatttcctcctaagaaatattaatggtaacgtggaggattcagaattgaaaactctttttgaggtattctgcatttttcttactgaaataatcatagttcttttgtaatcatattcattacatttaatttattgcttaatgattatgaaattcatgccattcttatagcaatatggagatatcggcgtccaagcatagagtttttgtgatgatatcctactatgttatcccagctgctcgtacaaccatgcgtacgttgcagaacaaacccttgaggaatagaaaacttgacattcatttttcaattcccaaggtttgtttttaacccatcccatatgatttgtttatgagcaatattagcaatcatataatacttttttctcctaacattccaggacaacccatctgaaaagaatattaaccgaggaactcttgtagtatttaatt

SEQ ID NO: 205752 - DNA, 627 bp, Cannabis indica
taaaatataatatttaagtataagtttttattaattaattttagtcagaataaatattttgactaaaatcacatttagtcacaataaattgtgatttttataattaatacatttagttataaatcttttagtgataacgtataaaaagtgatttataatttaaaagacaataatgctaaatagagtaactaaaaaaaaattgttgatgaccacattgctaattaaaatattattagggcataatggatacaagtataataagtaagtaattatattattaatttcattgtgaagtttcattgaacattattcaagttttttagtgcaattataatatcaagaacatatgataatataaccagtaagattatttgagctgtttgatagtgtgtataactttttaatttttagcttggcaactgcttattttttatttatcttagtatttaataattataaaaaggaaatatatatatatatatatatatattcatatagtattttgataccatgtatttttaataatacttaatattggtaactcatatttttaaatttgacatatttaatttaatcaatacaattgaattcagaatatcaattcaaccaaataattctcagttatat

SEQ ID NO: 205753 - DNA, 1010 bp, Cannabis indica
gtttctaaatttagtgctattttatattttaaccctttaaatattgttgtggtttaaagtgcaattacaatattaattgagtcaaatgtaatattaaatttactgtttttttttattttgctaaattgagtttttttaaaaaaaaaaaaatgggagatggtcttaatataatagtataatatattgtatctttttttttttgctgaaaatatattgtatggtatatggaaaaatcttggccggtggctaaaagaataaaagaataaagtcttaacaatttatgcaggggataaaaaaaaaagaaagaaatgaaaagtctataactctaattctacttcattttttcacatatgtcttactcttagcgggtggataaaaattatgaaagacacgacaaatttatatttgttgaaggaatagaatgggacagacaatttggctaattgccatacattttctcagcaaccatcttattgtcgcctttcatgtcatatgtcttataaataaaaatacaagccagtagtaataattaaacagaaagtctctctctcaccacacttcacctaaaatatttctaattaaaaattgtaggtttattttcagattaagaatacgttaatggaatcagcacggttgtttcaagtgaatcggtttgagccagagttggtcaaaccagcagaagcaacacctcgtgaggtaaaagaattatcagatattgatgaccaagaaagcttaaggttcattgttcctctaatattcttttacaagaacaagaataagccttcttcatcaaattcaaatatcatggaagaacatgatcatgatgatcctgtgaagcttatcaaagaagctgttggtagaacattggtgtattactatcccttagctggtaggcttaaggaaggtctcaacaggaagcttatggtagactgcaatggccaaggggtgtcctttgtggaagctactgcagatgttgactttgaccagcttgccaatgtgattcaaccctc

SEQ ID NO: 205754 - DNA, 532 bp, Cannabis indica
tcactgtgtttatgcgttaactgctattgttgatctgatattttctgttgttttcgtgatggatccttttctgcactttgattcaacattagctcttactgaagaagaaagttctgttgctattttgcctgctgaagtcgcccctgcttcaactgccacctcgagccacatccttatagcacgagttctcactgataactatgttcatatacctaccttctatgataaaatgtttggccattggaatggtagatttcctgctacaatctctgactatggagatggtatgttcaaaatttctttcagttgtgtaagggataagtttcgagttttgaacaaggaaccttggcactttcaaaaccatcttgtaatctcttgatcccctgatactctgcaaaatgtcacagcgaacaacttattgactactcctttttgggttcaaatctactgtttgcgcttcctttgcaagtcaaaaaatgcttgctatttccttggggaacatcaatggggagtttattgatgtccatgaaga

SEQ ID NO: 205755 - DNA, 567 bp, Cannabis indica
ttagtgttggtaaataatagtcagttattttcatcatcatccactcactccgaatttaactgctgttttaaagacaccacaattgcccactttagtggccaagactcatagagccaagtctcacagtcagtcaccaactatgctacaaaatctctctctctggtaaaaagaaaagaaaaaaaagtctcattccaaatattattctactcttttatatacttttgttctaaatttgagtacccttttcaatttttctgtggcttttcgtgtttggtaatcttattgttgttgtttacattaatggttgttcaactaaagagttttttttctaaaaaaaagaaatggaatttttatatatatttttctcctgagaatttaatctcgtgtcaaacgttctttgtagtttttcaagagcagggtgatgagattttattgtttttttccttttataaaagaagggtctttgtgttgagtctatctaatcttttcttttctttttttctatatttgcaaggcaaaggcaacccatcatagagttggaaagttaagtctataaataaaaaatta

SEQ ID NO: 205756 - DNA, 605 bp, Cannabis indica
agtttatttggttaagttgtttgggattaatagaagaaacaagagagctctaattgggaaatgataattaatttcacatgatttttcattgtttatattttttgatgttaaaatgtgatcaataactaaagttagggtgggctaaaatatattaaaatttagaggtatatgctccataaataactaaaattataagtttgtaattagtataaatttaatgattttcttaacaacataagtacatgatgttaataaaattttaattttcgttcaattttcaattttttttattattgattttattagtgttttaaattgatacatgtaaggttcaaattctaaatcattgtgtttggacaaaaacatatagtgtaagttacttccaaatactttttgtaacaaattgaaaaactaaagtctgtctgattacgaatttaagacactaattaatagagtttgtaatgatggaattggacgaaaattataattttactatttattatttatgccaacaaaagaaaatttttgagtttataccgcttacaaactaaaaaattgaagtaattatggcacaaatatttctaaaactcaaataacaaatattt

SEQ ID NO: 205757 - DNA, 1118 bp, Cannabis indica
tcaaacaaggaaacacctgaattattacagtgatgacaagaagatgaccttgaatcaagaacatctggttcattggtgagaagaaagactgtctgttgattggaagagttgaaatctggcttgacagaggagggtgaagaggagggtaagatcttgaagtgtgtgggatcaaaagtatacaggccattgtggagagtcccagtcaataggatttccttggtaacctggtctttcacatagcaagcatcagcatgaaactcaaatagaacattgttatcaagggcaaacttagacacactaagaaaattcttagtaatctcaggtacatgtaacaaattcttaagtaataaaggcttattataattattggaagcaacacaagtgtgaccaaaatgttgaattgacagacctgtgccattgccgacaaaaatttggtcctgaccattgtagtctgctgtagtcattagattttgcagatcgagagtacaatggttcgtggctccagagtcggggtaccaattactatcctcagtagtggtattttgagccaaattagcctgcattggtgaagtttcagcaggtgcagcagctcctgtaaagctcttatcaaaacgataaaagcattcgagtgttgtatggccaagcttatgacaaagctggcactgaggccggttgtgattttgtgctggttttcccccccttatgccaaaattaaagcctcttccaggattataggaggatgaagaacctcgaaagaaatgaccagggtaaggtgcacgattagaaggcatgttaaaatagtttggaggaggaaaatttgagtaagagggataaaactgacctctttgagatacaggaggcctgaaattcctgttatattgtgcaatattagcttcatgttgcagaaaaacttcagaggattttggtgttgagtcgacagtggcaagattaacagaatgctcaaattctttgtctgatttttctattctcgactctgaagctagaagcaaagcttcaatttcaccaaccgaatactcttcaattcgagtgtttgaagagatgataaaagtatcatagtcactcagtaatccttttaagattgctgcaatgtgatcacg

SEQ ID NO: 205758 - DNA, 553 bp, Cannabis indica
gagagagagagagagagagatcagtatttgatgtacatgcaagctggattgatttgttttcttctacctgtttcgtagcatttatatatatctaccgtatcatctctaatgtagacaagttttgttgaactgctaatataatacgagattcggtcaattaatttttccctttttattatatgtgacatgcatgcattctttagcaacagatattatatatatttaatgtgtttcctgaagagattatttcattattaattgaaatactaaatatatatataactagctaggaactaagtaattaggccccctttcatgattttcttgaactgggtcttttttatatatatatatatatattttggtgatgtaatattcacctaatcttgtaagtattcaaaagggtagaattatataagtagaaaaatgtcaacgcgtaataaaaaacagcttctgtatttaaatagtaatatagtagtagtagtagtagtattgacttttatgattcaacaagaatcataccatacaaatcaatagagagacggcaatattt

SEQ ID NO: 205759 - DNA, 511 bp, Cannabis indica
aatgtatgtttggagttcgatcgaaagagtatataaattaatgaatggatcggtgcacaaaaattatttgtgttttaaatttaattagcgttggcagatatgaaggtatgcgaatactacgaatcaactttttcttttttgaatgacgaatcaactttttgaaatgttattaaaaactactcaaattgttgacattttatttcttcaaatttataactctaaaatttgtttcattgcgacaaataaagaaaaaataagtagcacaacaaaatgttgaattgtctgtcccaaatgcgagtcctattacctgtcccaacaataaaaaattgacactttttttagttaattttcaactaagacttgtttggtataatcaaagagcaaaacatattaaatcatttattgctttgtttaaaatatttatacatataaaaaacaatattgccatcaataatgacctaattttccaagagacaaaacatggaaggtaaaagtcttgtcgtatgacatg

SEQ ID NO: 205760 - DNA, 1117 bp, Cannabis indica
cttaatcgttttcaattctaaaaataatgttaaaatattctgttaaaaaaaactagactaaaaagattttctaaatgtaccataacaatacttttaagaagtataatgtagacttgcccaacacgcaagtatacgtatcgttttaacaagtaatactcaagtaagtgagatcgttgccacgaggactgtagttaagtaccaatcaattaaaatcttgtttttatttggcaattgaataaataaatttcgaactaaataaactaagcaaaattaaataaaataaataaataaaagatttaacaatggatgtgaaaattaaggatatgattttaattgcttcgattacccaattgctaacactaattaaccattcttcttcctcctatttgatgacaaattttaaattaacaactcttttcaaatcataaaggtcctagattgcatggcacctactgcatctttgagatagaacaacatacaattcgcattaagcaattatctaaaagtcacataagctatgtgaatactctcgtttcacatcaaaacctatgtactcaatactcacttttcagattttgtattgagatcatagatcataaataaggtggtcaatcaaatccataattaaactaaacacaaatgaaaatataagaaatcaagagaagagaaggaaactagatggaggattgtcacggatcgctccaagaaccttcttcctgtgtttttagggttccaattctgtctatcctttttaaattcgcgacctctttcattaaaatagagttttttagcccaaaattaagaaaatacgaagttctccttgacctgtatggagtcggcgccacgaccaccaatagtctcactgcagcggctgtagaaaagtgaaaaaacggtgtttctgtagtccctcgccacgaccactggacccattttttctacttcaacctctctcagtaaaatgtgcataaattttacatataaactccaaatgagctgattcaagatgcgttggaaagctgagaaagggatctaaaacttttatgttttgactttttctaaattttgactagaacatagtcgaatttaggcttgaagtttcagctttattttcttgcta

SEQ ID NO: 205761 - DNA, 1470 bp, Cannabis indica
gtacctgagaagctggagctcagcaaactggaagcggccaactttgcaggcgatccaccaaataattgggaacattctgttgatgcagatcctatgccaatcccagcaccaaaagctacagatgcccaacgagatacaggactccctataggacaacacaagacagattaattttaagaatactaatatgaaattttaacagcataaactagcttgcatgcagattccaggtctgcattatactccggacacaaaaatactaatatatctcatgatactcccgatacaagattccaggtctcacagatgaacattgaaaacagctagatctacatcagtttactaatgattacaggccttccaacttcaatcattgagaagccaagtatgggataaaacaaaatcctgatctcagcaagaatcaagtacctaagtgaccaatgcaaacctaaccatttaagtctatactgaaataagagcttactttcagatttaggacagagagaatgaaaagtaagaaattctcattaacttgtgaaagagtttacagaggtgtttatatagagcttagaatacaaggcaacagtgttaccggtcataacaacctcaactaactcctaacaaacactacaccttacgactaattaatcttaatactcccccttaaacggtggagtgtaaatgttacacaatcccatttttcctttgtagaatctgaaactgtgtaggtagtaaggctttagtgcatatgtctacaatctgctctttgctagaagtgtgagctgttttgtataaccccttccttgaactttcttgccttaccaacgtgacaatcaatttctatattttttttgtaaaaacgagacaaaggccacttgtcttagactggtccctacctgaaatatattgaaaagcctcactatgaaacactggatttgcagcaatttgttgagttgctttgttgtcatagtgcaacacagtagcccctttgtgctcaatgtttaactcttgcagcaaggataacaggcataccaactcacaagtggtgtttgacatagctttgtattcagcctcaactgaagacctagatactgtattttgtttcttactcttccaagacacttaagtagcgtttggttggaggtaatgaaatagaatagaatagaaaggatatttgtttggttgcatattaaagtattggaatgtcattctaatgtaatggtctttccactattttggtggaatgactattctatttcgaaatagaaggaaagactattccaatgcatgataaatcaccaattttttttatgcattttaaattttattccattgctattcctattcctattctcattcccatttctattttcatattttcattcctcctaaccaaacgccacctaaaagcctgccaaggaagacacagaaacctgtagtagacctcctagtgtcaacacaagctgccca

SEQ ID NO: 205762 - DNA, 1086 bp, Cannabis indica
atattgatcttactggtgcaattcacctttcattttgaagctatttgagtgatctatcaagtcatgtctcacacccacattgcaattccaaatattttgggatcaaaattcatcctcaacaaagtattgatttttccaacacataacccgaaaaaatcccggtggatgagattcaatgtcctaaaattgaaaattttcaccaatagttaatattgatcatcaagaatcatcatcaatggcaatgatcagcgcaacatattttattttcatattttgtatttttgtatttattattttagtaggatctcattccctataaaattagagctcttctagctcattttccacattcttctgagtccatataaggtcaaagcatctctctcgattttctctctctagaattttgagccccacacttatccaatccttcgtaattatcatgagcaatataaactcgaaacagacgcaactctattaccgtcgtgtcatagtgagtgaattactataaattcattgtgtctctcttacttcttaactctcattacattctcgtcaatctagcgatcgagtgtgactagatatctgtatctaaatttttgcttcaacatttttattataaaattataatatcattattttatttaagtttcatattattttatattaacttatttataattgacaaataattatctatttatttttattattaattttatatggtttataatgttttgtgctgtgctttttaggcttctttcgtgtcgtgttttttggattagtctattaatgtttacgtgtcgcctcattcgtgcatgtcatatcatgcttaagcacatattttttataacgtgtggtgctaatgtgtagcatcatattgtattgtatcaaaactcataatttttttacgtctaatcgtgctcgtaccaattttgtattgtgtaaaaaaatttaactggtatttacaccacttgatggatagggtagaagtacaaacttttcttgtaagaattgatcgagtgtaaatgtaattgaattttgttatatattattattcttgttaattattaaaaaaagtgaaaa

SEQ ID NO: 205763 - DNA, 1193 bp, Cannabis indica
ttactttcacaataattaaacttagcgtattattttatatcattttaaaaagtacaaaatccgatttatcatttaataaaacaaaaaaatatctttaattaattagataactaagacacaactttactataattagaatttggtattttattaataagtacactttagagaacactcatttcaaatgctctaaagttgggattctaaagtatttgaagtaacaaataaaataaacatcacatgctttaaactcattcttcatttttatgtttctttaatatttattattcatgctctatatttataaatactattcatttttctagacatattttattaataccattctttttatatgtggatatatacattaatattatatatttttaatggataaattaaatatattatttttttttttagaaaaaaaagtaaaattttggtgatatatttaaaagaaactaatgtacaagcttcaaataaaatagaaaagtgagatttttgaaatatattttaaagaataaagtagggaagactctgccccaaaagtggatgcattactgaaatatgccaacactgccctcatcccagaagggaggaaaagagggccaggcacttagctcctcagggatctagatctgccaaagcgggacgccttcctgcccaaatccaacaaccaccttcatcaactctatcaccaatcgacatagcaaatgaaaggcaactggtcctcatgaccaataatactttaacccaaattcagttgaaacaacaatacaaccaatctaaaccacccaaccaaatctcaagaaaccaagtaatctctgcctcaacctccttagctaacccaactaagctagctttccaaacatcttgcccttaccatttaagtttcttataaagcccactcatctttgggctgaggtcttggagtaggtacgaaaggcagatgcatacatcaagcgtacgcttgcagagggtcaagatcacagagggcatttttaatttggggtacttcgacacctataacagacctccctgctatgggaaaatagttagttccttgcttttgtatggagttagtatccttcatttctgatgcaatcaaggacattaaggtcaacctgaccgattcaacaattgagaagtgggctattggcagtagcttgacctcgtgctcctggccaacactt

SEQ ID NO: 205764 - DNA, 536 bp, Cannabis indica
aattacattataccaagctatgggaagataatccaagacaaagtttaggcatttacctttttagattagagtccgggtagttctgtttatttctttaagtagttttacattatacaacagtgatagaattacttcacttacatctttcttaatcaccttccaattatcgtggtagaagaaacttccaaacccatctggtccaggcaatttatttctcaaaatatcaaaggccaccttctttacatcttcacatgagaattcagccaacaaaagtctagtatgttcaacattgataattggcccaagagccattattttctcgctgaccgatttccttccttcaagagagctcctcaacaaattcttataatagtttacaaatgctttggtcacttgcctaggttgatagattctattgccatgttgatcaagaatagaaaattttgttcaagatcctcctggagcgaatactagcatgaaacaatgaagagttctcatctccatccttaagccaaaagagtttgcattatgttgac

SEQ ID NO: 205765 - DNA, 514 bp, Cannabis indica
aatccaaattggagattgtggtaatagatttctgagatgttatatatattatctcatcatttttttttttgggttgttaaatattacttcttcaaatttgtttgtgtttcttctcctaagaccatcccatcagctcttttagcagtgattagtgaaaatctgttggggatttagttggacaaaaatttctataattttgtttggtacataaattcaaaattgacctcatacctacgggtgctgaacgagggaagagtatagtaattgatttatggtaaattgaaatattgttgtcttaaaaagtttttaaaaatttacataaacgatgtggaaatagtaaatagttaaaataagaaattcacagtaacaatttttattattttattaattattagaacccagattcgatggaaagaagaaaatagcttccaatttactaagttttgcatgtattttaattggaaaattaggcgaggaaaaaatatataatactctactgtaaccatctgttact

SEQ ID NO: 205766 - DNA, 1071 bp, Cannabis indica
gagcacctacgtacacaaacatacatataaaaattataaaatatgtaccaaaatattatgtatatagctctttttgtttatcaaaaaggagatgatatactagttataaataatgtaaaccaaaataatggtaagtaatagcgagcatcgcaagagttgcattaaaaaaattgttcattttagtaacaacataaatttttaatttttttttgtgattaaaagtgacttttagttacaataaaaaattacttgtgactaaaacatagtatttagatataaatttatttttagtcacagcaaatactactattgtgattaaaaacacatttaatcacaataaattatgatttttgtaacttatacgtattaattaatgccggcggtctcctctattattaccggcgggtggctccgccggtaataacaaaatttgttgtagtgtacatttagtacagacttcttaatcatactatataaattattgtttataattaatcacaaattttgttataattaaaagtaaatttttttatataatattagtatacttgatcccatttaattagtaaaactgaaattattaattaataataaaatgtcaacgatatggtgtacaccaaaaaattgaataagtggccttttaaaaaatgttcttatgtgtcactacaccaaaatatcatctacagacacatgtgttgaacacaccttaaaacctacaaataaaaaatagtttttttttgtaaggatatttattaatattaaaagtgcatattgtgtctgtataatgatctaaaaattgcccgaaatattttagtgcatatatatatatatatcattactctaaattatatataatatttaccagataaagcaacaagatcagttcgatcaagaccaaatctgtcaaagagattaagaagagtagtgatgtttgatcctccggaaggcaagtcccttgaagcctctgaggccacgctcactcttccatctctccttcctgtgaacaccttccatagcgacttttcgttctgcaattaattacaacgttaaaaatatggcttaatatatatg

SEQ ID NO: 205767 - DNA, 1850 bp, Cannabis indica
  modified_base (38)..(38): a, c, t, g, unknown or other
atgcctatggcttcgtgcttgccactggcattaagaanctgagatggagaccacatcaccatcttcctcactcacctattattgttattatttcttctctcctgcttacctggaataatctcaatctggtggttcacattccacccccgtgtgtcatgaggatgattttttttagacactacatatttggggttgggttgggtatatttatatcattatgggactaatgggattatctgaaaatcttctcttaacaagtggtccattctataaaaggatagtgataaaactcttctttcttttgggcttcttgccatgtaatgattctatcgtttcaaataaattagtttataatcaatcttcaatgctaatgatattaaagatcattactccttttctacaataatttatatttgaagaagactaattagaaaactagtttgtgttttttatgaactagtaatttaatttaagaattagattcaatatgaacttaacatttcacacaattcttcagcaaaagaaacaaaaaaaaaaaaatagttcacgaagaagtcaatcctgtagcaagaagatattcgatcggacttcgcgtttttttttttttttttttttatttttatgaaagctaataacaaatgctcgagttcattatctaaaggaatgtcagttactcctccagtcctcagtcttcaatcctcagatctagaaacgtggttaagaacttagcatctacatttaagaacctagcatctacatttggcaattctaagaaggacaataatgtcaatataactatgaaagatattgaagaaaaggtgtcctattggaattcttctattgtgtgttacgtacttggagctaattcacccttagctgtgcttgaaggctttgttaggcgactatggaaagaaaaggtagataaagtaggcatgctttcttatagaatttttctgattcgttttgataccattaagtatcaagatgaaatactcaatggaaggtacactttctttaacaaaaggcctgtcatcatgaaagcttataatccaaacactaattttaaaaaagaggatatcagaacagtctcaatttgagttcaattgaatgatttggaactgaaatactagggtcaaaagtctttattcaagatcattggccaagtaggagagcctctaatggttgatgatgtaaccaaagagagagacaaactcaatttctcgaggattcttattcaagttttcattcattaagaattttcaggtaccatttactttgaggatgaatttggttgcaatatacctgtggaagttcattatgagtggaaaccaacaacctgtagaaattgcaaaggaattggggatgatactaatgactgtcgtaggaaagaaggaaaaatacaagaatgggtggtgaaaatgataaaaaaaaaaacaaaggagaaaccagagcctgctcctggagaattccaacctgttaccaaagggtggagggtcaaagctaaagattcattgacttgtcctaccaccactaacttctttcaagctttagctactattcgaacaggagagaatcaaattgaagtagtaatttaagaggatcttatacaggacaaggaattggagaatataagagggggagaacctcctatctccaatagataagctcaaaagttggaatgtccgagggatcgatagccagcaaaaacaaaacacgatcaagtaatttattgttagttagaaatttgatcttgttggtctcgttaagacgagggttaaggctccaaaacttggagttttatatatagaacatgttctcggggtggtgttttaccttaaatttggcatggc

SEQ ID NO: 205768 - DNA, 1223 bp, Cannabis indica
aacttaataaataattaattaacttaacaaataattagtctttttttccttattattttgaactttaacaaataattatttttaattaattaacttattgtacctatatattattatagggtaagttttaaaatatatattttgtttgtaaaataaattgaattgtaattaaaaaaataataatataacaattgatgtatttaataaaaaaaaaaaaaaaaaaaataaacaactatatgatttggttttctatcaccttatttcacttatagtgatcactatattaataaaagtcaatgttatcacggtatctaatttgtgattatcactatcattcaccacaattgatttgctccataaatcaaagaaccttttttttaataaaggaaatataccaaacaaaatctattcactaagaatacgaaaatagatagaattgaatttaataaaatttaaatcaaaatggttttaaatatttacaattaaattattaaatggttaaattttttttataattgagatattttcaaatgttatatatagtgaataaaatattataaattaaagaatgctcatacaaaattagaaatttattaataaaaaataattgataaatctatagaaaactcattatatgattttaaaattatacttcatcaacgtatctcacttgtagttactactacatttaaaagtgttatttgatataaaaataaataaaaattaataaatttaagctacgaatgacgaaaaaatagtatcggtggaagattataaatgtataagataatttttataatttgctttaataaattgcttgataaatccttacagcaaaaatttgacaattaaaaaaaataatactattttttaaagttactaattatataacaacaaatttaaaaaaaaaaaaatactaaaagacagctatattgaaaataagaaaaaaaaaaataaaataatatatatatatatatattgaaagtcacattagcaatgattttgtaaccatcgcctattctgcctattttacgacggtcgtataggcaaacagttatagaaaccgacggaaatactttaaaacgactgtttaaaaacatcgggaaaaactcatttttgtaatagttgaaataaatacttgaattctcttttcttctcaattgtgcccttccttggtaaaattcacaaataagacataatctttatttagtaatcctaattga

SEQ ID NO: 205769 - DNA, 1162 bp, Cannabis indica
tgtatcttccctggattagagataaatcaactcaccatactcaatgcataagccaaatctgacctattgcagaccatgcaatacatcaagctcccaacagagaaagcataggatacataatccatgtacatcatgtctcccaatattctcttagcttcaccaaggttcttcatatcgaattctaaactcagttgatcctttagcatgtttatggcctttctatccttcccaataattaatatgtcattaacaaagagtaacaactacataggtatgtcattatggtatacacaggaatcatactcacttcttgagtaccctatttgcagaatcatgaattcatggaacctcaagttccattgtctttgtgtctgcttgaggccatacaaagatttttgaagcaaacacacctttcagcccctttggtcttgtatccatcaggttcatctatgtagatcttttcttcaagtttttcatgcaaaaatgcagtctttacatccatatgatccatttcaaggtcaaacattgctacctttgccatcatgattctaatagaagtctatttcacaataggggagaagatatcattgtaatcaataccctctctctgattgaaccccttagcaaccaaccttgtacctgacttcttcacctgatagcctttctttgtgtttgaaaatccatttacagcctatgatcctttgtcctctaggtctaggtactgtaatccaggttttatttttctcaagtgaacctatttcatcattaatggcaccaagccatttcttcatatcctttccatcaactgcttctgcataagtagttggctcaccatttacaattttttttagctgcaacaagtgcaaaagcaatgcaatcaacatatcatagtctctcagggggtctcgatatctctcctaaccctatctctagcaagttgctagtcctgtagccctgatggcatttgttcttgttcttgatctgaactgtgctcactatgtgttactggtgtatccacctgatctacaatctctactccctctttgtctgtttgaatctcaacactttgtttcccatgaccaatgttagtattggtagctttcattgtcatttcatgttctttaaacatcacatctctgttgatgatacatttcttgtatcc

SEQ ID NO: 205770 - DNA, 756 bp, Cannabis indica
aaaatattctggcatgtgattttagaaatagaaatttactaagaaattgtaataagaggttgtaattatcactactctttcaataaagtaagtttaatatataggtcaatatgaaaatgggagttttcttttcaatatgaaagtttgttaaataaataaaaaaacccttcaagaaagacactaacataatgtcttataatgtcttaatgttcatattttaattaaaaaaatatctaattctaatgttacttttcttaaaaataaaatcatatgttagaattttgagagtgtatagttaaggtgcatgtgattcaatctttaaactaattcataacgagatgagtaacatatgcatcttatatatggtgttacctgtccacatattagcaatgtgggactttaacatcctctcaagatagaggctattttttgctcacgaatcttccacggctcgatcacaagaagctctttttggctcactatccccgaatcacaaacgactcttttagttcgtctttttagatttgttttttggatttggatcggatactcgttagagtttagttcggctttgataccattttagaatttaggagtgtatggttaaggtgcatggagttccatctcaaaactaatgggcaataaaagaagtagctcatgcatcttatatatggtattatctgtccacacattaataatgtgagactttaacagcataaatcaagataaaaagaatttaggggcttttttattttt

SEQ ID NO: 205771 - DNA, 840 bp, Cannabis indica
gtataatttatgaacactaaataacaattttattgaacactaaacaaagtaatataatcccaatatatgaacactaaataacatttatatagataaatatttaaacttatatatatttccacgaaacttgttgtcttatcctaattttatttacattctccaacctcatattaccatgaaacatgttggttataaccgagttaactaacttaataatgggtagttaaaagaacttgctcacaaggattaagtgagctaaacttgacaaataatttataaatttatttacaatctttagtagaagcttagcaatagcagaaaaaaatttagaaaggaaaaaagcagagctaaaagaagaataaccagaaaaaatttaaccaaatagttagctaaatgtattaatttatactatcacaagatacaagaagttttcaaaaccaaacaaataacaaaaaactaattctttatctaactacctaattgtcgataactaactaactaaacaattgatttattagtttatatccctcctcaaacaaaatgacgagttagccatataaagtttgcctttgaggtggttgaagcaatcagtagtgagtggtttcgtgagtacattagcaacttcgtcgattgaaggtacataacgcactgaaagttatttggcaatatttgatctcagacaaaatgaaaatcaatttcaatgtgtttgcacagtatggaatacatgattagcaactaaggttgtagcactttaattgtcaaccaacaataagagagagagagagagagagagagagacatgtagttcaaacaaaagaaaatgaaattccgtattttaat

SEQ ID NO: 205772 - DNA, 570 bp, Cannabis indica
agaaaaaagaaaaaaaaaaagttgcataataagattatgtacgacttcaaaaaagaggactctaaatctgatctatcatattagatctattatctcatgctgtttaaagcttctgacagacttgaactagggaatccaagacgtgctttaaaagaaaaaaaaaaagtatatttggaagaaaaaaagagtaaacgaggaagaagtgaagtgggttctttttttccttctaacttgagtatggaaactttaaaatccacacactacaaaaccttctcattaagataatatttatttctaagtcttgaagcttaactaaaaatataagaagtgtaataaatactaataagtcttgaaaaacaaaagagaataaaaaaaagacactaaagagcactacaatttcatatagggagaaaaagcagacagaaatgggcacaccactacaggaaattatgtagtttgaccaactagagttcgctatcttttggtgatgatttccccaccacttcaacaagctcagtttcaaatataagcgttgccccacctgcagttttgacaaagctaaaaagttaa

SEQ ID NO: 205773 - DNA, 1050 bp, Cannabis indica
gatagcatttgaattttctttcaaattggttctgggtcttgagctgggtattttcacatttttaggatcattcatgtcaatttaagtcaaaattcattactctcattcattttcaattcttatagttcttgattatatgaaggttttaggagttgtttatgttttttgcgtttgtatccactcattgttttttataattactaattaattccattgtgatagttttcaccttcattcttgtggtgctaatgtttttcattaagggctgtactcctattctttcagattgttcatgttcctattctgttgagatccttaagtgaaatatagatagccaaagtgattctagctctgccacttctgatatagttagggaagcccgtcaacaggtactattcttttgtgtttcgttctcttttactttttgtgttaattccaagtccttatgatactccaagaattcagctttacaattgtagtctgtgagtgtataaaaataatgattgtgaagattctctgtgccagagtagggaaactgtgtgaatgacaatatgtattgtatgagctgtggttattgttagaccttttgtttttctctcatacaggtactggacttttgcaaagcttctcctaaagagtacagctgcatattcacatctggggcgactgcggctttgaagttggtaggagaggcttttccatggagtcatgaaagttgttatatgtacacaattgagaatcacaatagtgtccttgggattagagagtatcctatgattcctatactaacttgtttttattttaaatctcctaacaaagatagagtgtcaaactttttggtgtgcagtgtagggtatgatcttacctctattattttccccaatcatgaatcctttgatcttgttgtatcctttcccttttcatttttactatgaattttgggatttcttggtttgtgcccttaataagctttagatatgctttaaaacatggagctgcagcttttgcaaatgcaattgaagaggatgcacatgatagcacatctatgag

SEQ ID NO: 205774 - DNA, 834 bp, Cannabis indica
aatgactcttttattattgattctcaatgcttaatagtaaacatgtcattttatttttaataggatatatataagttgagttatatttgacataaaaataaattttttgatatttttacatcaatttttattgttaccttctaatgtataattataaatcttaattcaaaatttaatatgttatttaataatttattaaaaaaatataaataatcacaaagataaatataaaatttaataataaaataataataatgtaaatcatttaaattttaatgtgtgggagaatattaaaaatttaataataaaatattaaaaaattatattattaataataaaaatataatatttatcgtaataatgacatatcagacacacagtaaactatattttactttttagttgaattttcacatatttttatgaacctggtataaatacgggattgtaaatttctgattgtattcctcccaattataaaattttttaaaaaaagtttaatctgccaataattttataagttcggtgttttatagggattggattgtttgtaatctattttagcactactgtaataacagttggtagaactaaaatactaagattatacataagatagcagtactaagttaagctccgggtttatctgagtcacgtctaacacgatttcgtactggtccactactacctaaatcgctttactactaaagtaataacctctctctctctctctctgcattcaagtgcacccattttaaagctcaactcttgtggggttttcttcgatttcaccatactcacttgggtcattctgggtttttcttcaactttcaa

SEQ ID NO: 205775 - DNA, 1112 bp, Cannabis indica
ttttgctgggataatactgatgggatttgtggtcttttgctatcaacgtcgaaataaaaaaacaaaatgcaccgccatattttctgtctcgcagcatttcctctaatatctcttccgtaaaggatattgaaaaaggaagcacttactttggagtacatctcttctcctatgaagagcttgtggaagccacaaataattttgattcatccaaagaacttggagatggaggctttggcactgtatattatggtaaggacactcctttattttaaatgttgattcttcttgaaagctagttttgtaacactagaaaagaacaagcaattgacttgtttagatgaatctctacacaggaaaactacacgatggcagagaagttgcagtcaagcgtctctacgaaagcaattgcaggagagtagagcagtttatgaatgaagttactattttagctagcctacgccatccaaatcttgtttccctattcggctgcacctcccgccacagccatggactccttctagtatatgagtacattcaaaatggaactgttgctgatcatcttcacggtcaaagagctaagcctggtgcactggcatggcctatgcgactaaagatcgccatagagacggcatgtgcattggcatatctccacgcctctgatattgtacaccgtgatgtgaaaacaaccaatatactcctggacagtagtttttcagtcaaagtagcagattttggattgtctcggctctttccaacacatgtcactcatgtctcaactgctccacaagggactcccggttatgttgatccagagtatcatcaatgttaccagctgaccagtaagagtgatgtctacagctttggggtagttttaatggagcttgtatcatccatgcctgctgttgacatagcaaggcatcgacacgacattaatttgtctactatggctatcaatcggattcaaaatcacacattacatgagattgttgacccatgtctcaagtttgatacagacattagagtgaagcaaactataacaggcgtagctgattagcatttcaatgtcttcaaaatgagaaggatttgaagaccatctatggttgatgtactgg

SEQ ID NO: 205776 - DNA, 1000 bp, Cannabis indica
atatatagatttttattgttttgttgctgacaagtttgtactttagtgtaaatatgcatcatgggggttcttggtgcaataaaaatggtttgaaacactatgtgggtcgcactatgaccgagtttgacaaatgccatacagatttgttcagcataatggaacttgaaggaatgcttttgcaagttcagtggtgtcatggttctcctcttcatttctgtttaagcctaaagacaaacaactaaataatgaatttgaccttaagattgacaatgatttgttgactatgttcgaggacatgagaagaaagagatataggaaggttgatgtttatgctgatttatctggaacttttggaggaaacagtgttgaattagcagttgtttgtggtcaagttcctaagaaaacaccagacaacacaccacttggaactaagctaaaaagatgcataatagagtagctaccagatgatgcaaatgtgactgttgatgctcgggtttgaccatgttcatcaccaagtccctcagccatggccctcccacatgtcactcggccacggctctctcaaggccactcagccatggcacaaggaatgtcactcagccatggccttcctgaggtcactgaccatggcacgaggaaagccacttcgccatgaccttcccgaggttactcaaccatgacttttctgaatgtcactcggccatggccttcccgagatcactcagccatggaatgaggaaagtcactcggccatgacctccccgaggtcactcgcccatgactctcctgaatgtcactcagccagggcttgcctaaacttagtggaatctgcccaagtaaaaaagagagtgaagcgacaaaggtatggtcactaggataaggtttgcatctgagaagcgtacaaccacgccttctgcaagctctgaaagcaaggggtatgagtagtgggagcatcactcctacataccctgatgccttaacaaccaggactctacagcca

SEQ ID NO: 205777 - DNA, 670 bp, Cannabis indica
atatattttctcacctattttaaaatcaaagcaaatatttagttacttacctcaattatatactcattagttacattctaatagtatataaataatttaaaaaataaaattttataaacaagtaacctattagtgctatgttaatttagcaattatattattattggtcaccataaaaaaatttcaacattttttattgacatctcaagcagctaattttttttcttcaataaagtaggataattaataaagaaattaattattttttgtgctgtgtatgtaaaagtaacatcgtagttactttattttaagtatcataagcaattaaattgttatttttcattatggtgaccataaaaaaaatatatatattttacatgtcaacattaccacattcaagaatcattcatttttcttttagttaaccaaaaagtaactaaattttaatattaaataaaatataatacgcaataaaattccccgattactattttgttattttatttaaaagatattatatattaactaattagtttctacattaaaataatattacttcaaaaaatataacgatgccatagcataaatttaaaataactaattggttattaagtaagaagtctaaactttttgctaataaattatatgatttattttactttattgtaac

SEQ ID NO: 205778 - DNA, 578 bp, Cannabis indica
agtaacaagcgaacgattcatagctggaaggaaatgaagagattactactccatcatttttgagattctcacgaggggtcattatttgaccagttcttgaccgtttgacaagaagggacaattttagagtacaagaaataatttatcaagtaactggcaccaataagagtgtgtggatccacctgtgcaactaagttcataaatggcctacttccatcgttgaaagccgaattacgaatccattggcctcgaaatgtggatgaagccatggaaattgtccaagatattgaggataagaataggaaaacatagtagcgctaccccagctcaagccgcctgaatattcctgacactgcaacaagggctgaaagaccctcaacccaaatttcactcgccaattctccaacaaaaatttgcaaacttactgattttgagatttaattgaagcgacaaaaaggattgtgtttccactgcgatgataagtggtctctaggacattgttgtaagaagaaagaacgccacatgattatgatacccaaagacatcgaagaagatgagtcaacacaagactccgagaa

SEQ ID NO: 205779 - DNA, 608 bp, Cannabis indica
atttagaggatatgagatagtgtgagagtattgctattaagcattattagcactaccgaaaacaacgctttgtaattgattagtgatattttataaaaattattccattaaattatatgagacttgatatttaattgtaccaaatattgatatgacatattagagtatgttaaacacttaatgtcttttagcatttctttgtacagtgtgaaaatagttttttttttttttaaaaaaaaaaaataaatatgtaacttctttctttcatatagaatcatatcatctacaatttacaagatttacaagatagaatttggaacttaccaatctaaactaaaaaaggagaaaatcttcattttatcccaactgatttgccagacatttttaccatttgagcaagagaccgaatgaatcttgcacaaacatggtaatatatataaaattttttttttcccaaaatgtaaagtactcaatcaaaagtgctacaacacatttcttaaaagaaaaataaaattgtaggtaagaaatgtgtagtgatcattttatgatatatttgaatattttatttaattatgtttgggatacgttaattgatgatattagtatta

SEQ ID NO: 205780 - DNA, 764 bp, Cannabis indica
atttatgaaataatccctatatttttagcatataaatcatgattgttagtaattttgtaattatttttaataacaaccaaataatcttttaattcctataatattatatagagaaattggttacctattttataatttaagtatatttggaatatattctataatttttatttgttactgttgtccataagtatatctaacttcacttaaattatttatttattttagtttttataaataaattttgaaaaatgatgtataatttttaaaaatcaataccttttttagttttatatatttcttaaaatttctcaatactattactgtatgtatagacataaacaataaataataaatttaaatatataaataatatattagttgacctaaaaaaattaattaaaattaatattagattacatcaaagtaaaaaaaaaattatttataaactatataagtaacactatctttaaattatgtgagagttttaactaagttaataaaagatgatatgagcttttctcttaataaaaacgtgaagctcctaaaaaattgtagaaatacgttgaaaaaaaatataacatgtcacatcatcactcagtttcatttatataaatatatatatagataaatatttaactgaagtaatatattaatggagaattcgacaatgcactaaagggatgcatggatggatgcctatctatttaggtatattaaataattttttagtcaactttattctcataatcatgtacgttata

SEQ ID NO: 205781 - DNA, 871 bp, Cannabis indica
gacttgtaatattttgtaaaataatttttgggatccaaaaacatttaacttttgtttgtaaggttaaaattattacaggtttattttcattccgttttcgtttaaagtttaatttccacgcttattttattagtaatcccgtttaggggactagggtttcttaatcatattgggtagcgtgcctaaatcttagggcgttacaatatgataaatagcgcttcctttattgcttatgtgatagcaatatattctgactcagtggttgataaagcaactactggttggagttgtactttttagctaataactccctccaaatgtaaagtagtatgtagtagtagattttctattgtctctgtctcttgcaaaatctgcatcattatagccttcaattaggagctttgcatttagtcttctaaacaccagtccaacctttgttctcccaagtagatatctaaatgtccatttcattgcgtgtcaatactctttttcagggtcatgacatatgccaagtctggccttgtacaagccattaggtacattacagatcctactgcattggaatagggtacctttttcatctgatcaatcttttaagatgtagtagggaattgagcttttgatagttaatgctaacaggtgattggctgtttaatcaccatttcgtttttaattgagaaaattctcaagtagttagttgatgtagtcttcttgacttaattttagcttctctttctgtctatcgctctttatatacatcctcagtatcttggtggtctctcctttcaaattcagctttcaacaaatcatttagatttttttatcttggcattttctttgcttataatcaacatatcatccacatacaaca

SEQ ID NO: 205782 - DNA, 923 bp, Cannabis indica
ggttatagtaggaacatgaagaactgaattgagtttaagaggacatgaattaagagaaggtaatgtggctaaacaaacttttgagataacaagtttcttaccatctccaacagcaagacctttaggcctagagtatgcagtggaggagtctagattctctatgccatttgtcacatgattggtggcacctatgtccatgaaccatcctgaatcactgccaaagtttggtaggaacaatgtggaaaaggcctgtggatcataatcaaactcatgttcagtcaggtaagcacgcagggaagggttggtggaatttccagattggccattggttccaagttttgtcaaatttgtagtgacagacatgtgcagtgtctccatatcaaaggcagagttgacataaggggcgattatgatgattgggaccatgaaagcctccaccacctctattcttgaggccttgaggaggacgatagccattggttcttaatcatgtgaaggctacattggcttgaagtttcatagtgagatttgtcatggagttgtggtgttcaagacagctctcatgcaaaagaaggagagattgaacttcttcaaaggtaagacggtcactgtgcgtggtgatgctagagacaactgaatcgaattcaagtccaagaccattgagcaactgaagaatagtgtcttgatcagatattagagagcctactatagctagagagtcgataatggattgcaatttatcgacatagtcagatatagtctgtcctcctttgtgaattgtggaaaattggcttttgagttgaagcaagcgagccttcgactgagtggagaacttttgtcaagtgcaggccacacagagtgagaggaggggaaacttgccactgatgtagaactcttctgtttagcgatctcaaccagaaagt

SEQ ID NO: 205783 - DNA, 1484 bp, Cannabis indica
gcaagatatttgactattttggatttggctagggtagagttggattgtcgttactcaatttagttttccatacttgaaatcgttgaaattgactattgttcggcttgcagaaaaagatgtgttgggtaagctgttgttgggttccccttctcttgagagattgaaattaagttgtttaagtagtgatcataagctccacattcatagtgatagtttagccttgaagttcttggatgttgtagtggatgacaatatagtagtagagcaaattgaagtggtaaatcttgaaactgtgatgctatctggtgtttcctttgacagaataaatttctctgtatgcaattgcaagacaattagaaccctcaagttaacttgtgattattatatgacagagttatcatcattagaaaatagcatttcaaatcttcctctccttgaggatttgactttgagcaatgatcaatgctcgggattgaagcgtattaaaggttttcgtgtaaataacccttgtgattacgaaacgaatgttatagttaaatcagctccgaaattagcatcattttgttataaaggtagtttcaaatttagtataacaatggagtcatccaatttgttgaatgggacattcataattctttcgtggccgtggcgtgagaactttgatggagattggtttatgaatgtgttgaattttcttttgaatctcaattgttcatggaatagggtaagcctgcatgttgagtcagttaaggtatggttgtttctcattttatttgattttgtggtgttatttcaacttcatattattattctttatacctgcatttgatttttaattctataaatgaaggctctcatcttccccgaaaatttgaggagggcatgtcgttcttcattgcttaattgggaccatataagagtgtttgctcgacgtgaactactgagagaatcagaattgagagacgctctgttgtggatgtctccttctttaaaagcattatctataacaaaacggtcgtcttctacctacttttgttgatgaagattatacttttgttggatatatacaaggctggctacttaggttactgtgttgatttgtttattctcttcttggttatgcattttatcgttgttcactgcttaggttgaagcttctcaaatctcaaggttttgacaacttgacagattccttgtctcaaggattttaggtttggtagagatactttctgtgcttgtgtaatacatttcacccaaatttatcattacaattgaccattatatgttttaatattcatcgtaatcattacaatgaatcacttttattcaaaaaaaaaaaaaaaaataacacaaacgaattacaccaggtcaggcaactctgcttgaatcaaagaagcattgtttcaatgtcgaggagaataatagctcaccaatccgcatgattaacttccccacccttagaccatctcgaatgaggaaagtat

SEQ ID NO: 205784 - DNA, 674 bp, Cannabis indica
tcacctaattgaacctaattaaagaaaaaattatacgtatattgcatgtaacatcaacctagtacaatataaacgatctgaataagtgttaataaaaatatggcaaagtccatagttttaaaaagttttaaaacataaaatactataaaaagttgacgaacagaaacacattatatttttgaatattatttccaagtgtaatttttatcactcatattatagctttaatggccatcacactccattattttaataataatatataattaaacagcaaaagttgggttggaaatattaattcttacccttcacgttgtgaatatgtcatacacatccataaaaagttgaaactcaaaagccgtaacatcctccaaaagttgactaacttgaaaaaattaaagcctaaacatcctccaaaaagattcacatagtttttttaaaaaattgatttagttttagtgcatggcagcccataagcagtcattttctgctaaatttttttgtgcttcattttataaatatattatatatgaaagattgaatgaagtgttaagcagtaagtacgtgcttaagccgattttgaatttttcctgtatttacattacaccggacttttttaaaggtaactgaaaaagtagcttaagctacaataggaaagccatctatttatattt

SEQ ID NO: 205785 - DNA, 634 bp, Cannabis indica
aaatattgcaagtgttgctgtttagtttttaaagcctaaagcttcttctaagatatcttattttttttagattgtgatattgcttgggttagaatgtagatttcttatatatatcactatcttattgtttattctttcttaagcattttgattcaacataaatagctgtgtgtgtcttttgcttttactcttttcaaacaccattttctctaatttcctattagcggcacttaagaaacagtgatgacgttacctaaaagagaacgtatctcctaatgctaactcatacctgtagatcaacttcacttggataatctgcatactcattagtcattacctaccttacaaggaatcaccattaactctacctttcgattgtcaggtctcactatgtagtttagttggggatgatagaattagttttagccttttagggtatttgttatattcaactttacttgcagttccgaccctacaaacgaacttgttttttcctagttctgtttctataaatgtatactactaagctttatttgatgtttgtatagatcctcatcctgtaaaaggaaaaatttccacctatgcagcgcagctcgaggattttactggatattgcaaccataaggtatggtga

SEQ ID NO: 205786 - DNA, 1078 bp, Cannabis indica
gagaaacaccataattgggaccaaaccaacagccacgaaacggtttcgcatacctcctagaagactccagagagagagaaagctatcttcaaaatataagcagtttaagcacatctttttatctaaaattaatattacttagaccattaaaaatttactacgtgtacaatggtgtatacgtagacagtccaccgttagagtaaaacggaacccaccaaatttttgatttttatagttaactgttacaaactgtaaaattcaagtacatacagtggggcacgtaacacgtgtgaaaaccatagaaacaaagacaaagaaatacatattcactgtgttaaaattctatccgccaaatcatactaccaaaaaaaatgaaaaagaaatccgccaaatcactattcttcgctgctaaagaagtttataaataattaaataaataatgaaaatatcgaaacagtccctgcatggtgggtggccagacatggattccaaaggccaaactaattccagttaataaaaaaaaagcaataaatagtatttaatagactaggattaattaatttaatgacaaggaccacgtcagccacatgacgggtgggaatctgttggacccatggacgcgtagatcgactaattgacgaacacgtgtacggttcaaaataagcaattttaaagaggcgcgaatatcgatgggccacctcaacaacccccatgcccctcgtatatacggtaaaaccgcttacagttgacacgtgtacgatcacgtggaagttggcgtggcgctcttcttcttcttcttcacttcattccattttgtacagagagaaactgagaaatgcttgaggctatgaagctcggtgaatggtgatttcgccattgacgatagttgaagctcttaggaataatatttatcagcaaatttgattccgagatggagatctttggaatttagagtcagaggtatgaagttctccttgtagatttagtgtataatcttttgccgcgattttctgttactttatttcctttttgggagttttttttttgttttgtttttgttttttttaattttgtatgt

SEQ ID NO: 205787 - DNA, 936 bp, Cannabis indica
attaaaaccagtgtcccaaggaattggtaaacttgaagatttttcaacctgaaagatccttcatctacaataatttttgtcacttccttggcagtgtgtgacaatatacactggcatgttgaaatcatcaacacttttctctttaattatgccctaaaataataacacaatattgttatatattagttacaagttatgtaataatataaagtgaccactttgtaaaatgacattgttttgataaattttgtaataatatcgagtaattggatgaaaacaattttttaatttgtccatggtatcttgaaattgattcaagtaagctttcacaactgaattagggcttctttttgtaatgtaaatgttgcctttttttgagtgcttctcctatttccctaaccaaaccatttgaaaccttcaaaacaacatcagttaatcacataattaatgaactaaaatcttatacgacaaaagggtaaatttcaattcaattaattgcgaattttcatttttatggattttaggatatatatttgtggaaaaaaaattcaataagagttaaaaataagaaataaggggaagggtataagtaactgattacccctaagaaggtagttgattatcttaaggggtaattagtaaattagtaatttaagttatacgtactgatcaattttcaatttctttttcattgtatgccatttttcatgtcctttttttttttcttctttctaaattggattaggtaacctgttaccaatattaggataaagtaacatcattggggtaaggccgagggcccactccactcattttaagagccaaaaaaaaatatatattttttaataaatatatatacatatttttttaaaaaaatttaacaattatcatttattcttataataaggtctaaaagattaatttattttaaaaccc

SEQ ID NO: 205788 - DNA, 1174 bp, Cannabis indica
tgctgcctctactcgaggcttggcctaaactcagagtctgagtgtggggctgtagggctaacgatggggtccggggttcagggttcatgttagggtttataccctaaaaaatatgtaaaaatcattttgatcattaaataaaaggaacaatattatatttgtaccagaaaattttacattcatttatgagagtatgttcatgtatgagtagaagagaattaagaccatatataatgaataaaattgtatattaaagtttgagatctttaattaaatttgagggaaactattacttttgtggtagacataactgaccacttccgagtttgttgaatgaatgacgagagtaggtctcgaatgcaggttggagagtctttcagggccacaaaagacattgagtagcatcaatggtcaagcgttgttcgaaaaattcactcttggatctatcttctttgcatatagagctctaagttgattgttgtcatcttttacaaccactctcacagacatcagagattctttaagagccacatcatcaaatattttatatctcattgtcaaatgaaagtgagcaacatcaatgggcaagcattgtttagaaagttcacatcattgttgaaaattttgtcagttaccatgaaaatcattgacaatgatattgaacatagaattcacaaacaacagcctatgcctattctgatgaaaaaccacattcttgaaatgccatattatgaagacaagacgcgtcaaaaatcacaaaattcttacctcactacttcgatatctgtattatctcctaaagaaagaggttggagaatccacaccagaatatacattcagagctcaaattgaaggttcaataatttggacataaaccactacctcttagaagatgacttgtagaattcccaattcaaatttttttgagctaatcatggtatagcattttatatgctatgatattggaccggccgaagctcaatttgacctctacattgtaatttatggaaaattcaagtcaataaattatattcatatacaattaagtatctatattaatctggttgttactcattgcgtacttatgagatgaactaatctttacagataaaaaaatcttttaatttttttattttttttataaaaaaaaatttataactctaaaagtgtaaaa

SEQ ID NO: 205789 - DNA, 2770 bp, Cannabis indica
cctcaccgataccctgatatgtttttctaatggaaactgaaatgcacgttaaacatgtattcatatatgcaattattatactaatcataccttgattctaaatttaagtgtgtcggtcaacttgagtagaaactgctgctcgacaatttacagacccttaagtcacaacatacgtaaaactggtaagcgatacacttaatcactttttagggacttaaacttaaaactaaaagtttttctatcaataaatagcatgtcaatactctaaatatcgagaaaagactaaaaaatgagatttcgagaaaaacaccccagaaaatggcaggccatttttcctagtcctaactgctaaaaatagtagaccgtttctggaaaaacaacctaccgttttcaactgcaagattttaaaaaatctgatttctcactcaaatctacccaaaatcttctataacctccaaaatacctatacaagtcatatacaacataattcaacaggaaaaagcctcttgatgtttttcaacaactcacctttaggctcgatacctccaagcattgccactaatattcttccctcttcagtaagtcctttcacctttgttgcttcagttatgaatcgactgatgtaatcttttagaggctcttttagtatttgcttcacttctaccatgtcttcaactgtgtgtaaaattttgaagcgaaggtgtttcatgaatcgaacttcccaggtatcaacttaaaatatcattgttgggtggcttctactaatgttgctaggaagattcaacaccttacgtcgccctttactccttgcaagtctgtttgtatcttgaagcacttattgtgagataatggatcatctttccgggtatacatcttccaagttggcattttaaactaggtcaaaaaatctaagaaattgatccatgatgtaaatggcaaacccctcatttgatcgagttataagtcagtgagttttgggtcagttaggatttatattaggctcttaagttgttccaattgagcttgtacccttaaatcaacttggcatgcctattgaccgacctgtgtcacatgttggcccatttgaaccttgaagggtataaagctgtctctattatgtgggacatagttgtccacattgataggatgattattatgcgggggacaaaatgtctgtcttgattacctctccttcagtttaagtcatcccaaaggtcatttccaggcctgagtcccaccctttgaaagattgagtcagccttgggccttctatttgaattttgattggtggaccttgccggtctgggaggatctttgtcattttgggtgttaccttgattgccattattgggcgggtttccctagcagtaatcatgccttcattgacgattgtcaatattgagcccacttttggctttgttgtcattcttgttagagtatgattgtccattttgggaccttttttggccttttcgaggttgttggtcggcatactagttatgaccatgaacctagacccttccatcttgattgtaaatgcccatctatccccgagatcctccaactggccgaggaggtacatcttctctcctttctttaggtctgggttagaagttggtctggttgttcttttcgaggtagtgaccattaaaaggatttttataatcccttatgtgtttaatttattatttttaagaactttcatattaggatgtaagattagtcataatccaacatatacgagtagtaaattaaaatcaaggtaaaagttttttcaacaattttatctcttgaaagtgcgtaaaaaaagaaaacgcccctaaatagtgaatttgcctcattatttataagtgagaatgaataaatttattcttaaaataatatgagaaagatgagtgtggatttgaatatgaattccactaaacggttaaggaaagtatcctaaaatatcttcagcgaattcttcaggtcggctattcacgttatgcgacttgctcacatcgctcggtgtgaggtgaaatcttgagcccgttcatgtgataattattttgagcatttatacttcaatttaattcgtcattgtcctccttggttggtgcattctggtgtaacattccgtccatggttaaattttcctgttacatgtcagcttgttaggtaccacaccacccatgtgaattttggaataacaaacttgaaaagtataacatttaaggtacctaacactatattgatgtgagattttataattagttagtaaatttttatattaattattaaattaaaatataagagatagacatcatcttggtgtttagctaatagaaactattattttattattgttctaataagtcattgataactttataaaaatatatctttatggtcttaacttttgatccctttacaaaaaaaaaaaaaaaaaagaaagctttggatagaattataattacacaatatatatatatatatatatatatatttctattctatacagcatcaaatagagtgtttctgcaaaaaaattcagtataggtacttttaaattcataaataaccttaaatcatttttaaaatttagaacaaaatctaaaatagaagtgaagttgtaggaattatcctgaaatgaaaaaaagaaaaagaaagaaaaacacaagagtgaggtgagtggataggagtagtacaaatgtcgtcacttttactcttcttataaatatgtaaataaccgactaaaactctgtctattctcaacactgtaaaaaagccg

SEQ ID NO: 205790 - DNA, 1239 bp, Cannabis indica
aatgcaatcttcattatatagcttcttaaatgtaatgaagattctccaaatccaatgagaaaaggtactaacatgtttcactatactaaggtttattgtaaagtaataacatgtttcactctattactgtactaaggtttttttacattgagacacgtcatgatttttctttagaatgaagccaaagtgatatataatagttcacgagagggaaaaaccaactgaaaaatacctaacacaaatggcttatatgaaaatgtttctctcttacatttccaaggctatataaataatatatatatatatatgtgcataattctgaattatttaaaagaaatatactgatgtatttttatttgttttagtatttgagataattttttagtttaattttctcttagtcatttacgttgtagttatattaaagacatcttgtataatttcgagagatttgaaaaaaattaacacactgaaaataaggtttaaatagtctgttacacgggagatttttttattttatacacgtgttaaataggttgtttgaactttatttttaacatgttaaattttttcgaatttctcaaaattcgcaagatattctaaataactataacgtaaacggctataaaaataaactaaattaaaaaattctgtcagatgtcgaaacagataagagatgtttatgtaaattttttctatatttatttattgatcacggggagggaataagcttagctatacatactaaagagattgggctttgaaactgtatgtagtagtggtactgatacaattgtctttttatgaataagaataagaaaaagacaattatagataaaaattgagatgtgaagtgtatggttgataaattctatgaattagtttctttgtgtttgttgggttatatatatttacaaagggaacatgaaaattggtaatttgcatgtgaatgcacatgtgagatggtttcttagctcttctatcactttcagtgctaccttttcttcacatgtgttctcagaaacttaacagaaaaacagtttaataataagttatgttttcagttcatgacaagattcttgcttttacggtttcggggttaaactacccttttcgattggcaggacgtacctactcttgttttgaataaaaatcttctgtttctaaattatacgtctcctctcagtctcgtcacttaaaatataattggtgagacgagaagagacatgtaatttgaag

SEQ ID NO: 205791 - DNA, 575 bp, Cannabis indica
gattcgaatagtgggagcagaaggagtagtactgatcgccaatgggtgagtcagggagagagaagccatatcgtttagtgctgtgctttggtgcaagatactcaccatgcatgaggatattaatatatatgctttttacaaagtaggtagacaataaacaacatgggtattttataattacttggaatttggaaaagcatagcgatagaaactcacctcttttaggtatattttgaggtataatattattattagtatagttctcacatattttaagtggtaattcgtagtgatgctaaatcacttggtacccccacgctacaaaaaactgttgctaaaacaattttttattacaacataaattttttctgattaaaatatagtatttagttataaattgtcactaatttagttttatagtcacaacaaatattgtgactaaaaatacatttagtcacaaacaattgtaatttttgtgactaatacttttagtcacggaccttttagtcacaacacaataatgataatttataataagctacaatatttttaactttaatcacaaattttgttgt

SEQ ID NO: 205792 - DNA, 1254 bp, Cannabis indica
aagctttacagttcttttcttattattatgtatgctaaagttgataattaaaaaataatttggtatagattatttatattaagatataaatttatcttttgacaaatttctcataataatttattatcaggagatcacttattgctaagaggtattactattaatttttctgattgcctaatttgtgatgttggtgacgagtgttgcactttttcttttagcgtttttttcttccaaccagctcatatacattattcaattttaacttagtaatgccatttgatcgacatcgtatctagattggcaggttgaatgctaaccgagctcaccgtgaactttatagggttattacgattgtttgacattcaaaacaaattacaatatagaaaattgtgttcaaacaatttatttcatacacgtataaattaaagagtcacgcatccaaccaaacacattgtttgacccctattttcatagtattaaattttttaaattttttaaattgaagaatatctttatcttaaataactaaaaattatagactatagaatttttccaaaatgatttaaataataataattaaaacaaaaactttaataattttaatttcctttattttctttagtttttcttcactgtccctcttatcatctctctccgacgacggctccgatctccgccgataccgccacctgcctccttcttcaagagtaagtatacctttcctctcccacactttttttggaaaattagttttcagatcaaattagggccacggaatccctagaatgaaactgtttgtttgtgcttttgatctgtttttttattattattattattattgaattgatgaataattgttatgggtttaattttatgcgaataatgtatggattattatatgttttctgggaaattctaatgggtattaaatcacacatttcatataggaattcaagagcttcaatgtccatttggtaatcattattcttcttcttagttttggttttgataatattattatatactttcgttatatatgaaaatcagtagttatatatctcaataaattttgtttaatttctttcagttttgatcagtgtaatggtggggtttcaatttcaatttcaatttcaatttcagtttcagtagttattatcagtaacagtttgttgattgtaatgaagtaaatttatttttagagcttctaaacatagccattaatgggaaacggccaccacaaacaccataaca

SEQ ID NO: 205793 - DNA, 755 bp, Cannabis indica
ataagtgttaattacaacttttttagtcaatttttacacccgaaattgtatctcaaaatttttttatagtaatatttgttatagttacattattcttgtaaacttttaaaaaatttataatactatatttaaaaaatttcaaacttatttttcggtgctgtaactatttaaattttttaaaaattttgcatgaatggtattgtgagtataacgaataccgccgtaaaaaaaaatattctaacatatattttcgaatataaaaattaactaaaaaattgcaacaaaaaactcctcataccagcattgtctattgttgtctattgtttatacaacaaactattaactatacatatatataattatgatatcatgagttttaatttattaggagcaacttagcgaaccttcttcaacaacaatgatcagaacaactaatttcacgttttttttttaaaaaattattattttgtgtgatcaggctcgcatatatttatattaatatatttggtgcgggcaccaaattattatatgaaggagctgaaaaagatatatggaagcaatgccggttagtaacgaaagtataaagtgggtgcaccatcagtatcggttaaacaataataatatttaatacaatcaactatagtaggatttttttaggggaaatctatccaaattcagacagcataaaataaaacacactatatctatggagtactattttaactcccgagctgacttagagcatgtttggtatt

SEQ ID NO: 205794 - DNA, 2420 bp, Cannabis indica
ttttctttttttttaaaaaaatgaatagtgtatgatgagaagaaccaccttaatataaaatttattttttcagagttattatttataagtcgtatattataagagacatacaatttaataatatagaaatttatgagaaaaataccaattactcttttaatagcgattataaaaattaataactatttatagaacgttatctgtaagagtgtgcctcatatctgtactcatatttttgttatattattttagtactatttcttttctacaacatcaatgaataatgaaattaatgatgtagatccaattaacaataatactatatagcttttgtaatttatcaaatatattactaatttattattattattttctttttaattaggaggcctatttgatgttggtgattagtattaatgttttttttttaataaatgtactttgttattagtaacatttagataaaactataacaatagttaagtttaattaataatttaatcaccatgcaacgattttcctagtaaaaaggaaaaagataaaactataaactagagcatcgagagacccaaatagatgcaaatacgatcccaaaaatttgattagattccaaatttttttttttttttaaaggaaatagggatattccattaatacgcacaaagcctagaaagtctcaaaatacaaaataagcagaaaaaattaaataataaaatccataagaagccccgaccaccaaatacgagacttatctaaacgccttccttacaagagattgggcaacgatattcttagatctttacaatgagacaaagataaactttgaaaagaattccatgcattagaaatatcattaagtataataccaaacttattataacaaatataattatcattgacaacgagaaccatacgtagataatcaaagaatgctataaaattgttaaaccccaatcgaaggtaaaaggaaaggtcgtgaaacaggaccattgcctctgctatgtgaggctcgaggttaccaaacagtggaaaggcaccatagaacaagacatctccatttggagcggaaggtacaactcctaaacccatctttgaatcctcgttgcagagattggcatcaacaaataggttcacatcacctaaaacaatatccaaactaggggccgagatactcctcgagcccaaattagtggagatcaggccattagacacacccatacccatttgagggtcttgataacccccaaagatagttaagtgcccaaggactaaccatattatttatgttacgtttatgccatatatgctaattaagaacaacaaactcttccaactcttgtttgctcaaaatgtgcatgcaacccaaaagaagctcatagaaactataggcatcctctaaagtatcaagacctttaagatgtcattccgaatgaattgtgttaagggaggtgcaaagccatagcgcatgcatgaatagtggtctcattattctgaaagtaaatggagtagaccttagacacatgaaggccatggcgagtgaggttggcataagatggcaaaaaattcaagcttgccttccaaacgaagattttaatatttggttagagattaaggccctaaataaatttccaccaatgagacgtccctaaagaggtcgactcttggccccaacccaagcttgaaagtattccaataaccactctcaactagaaaacacaccattgttagaaaagtgccatataagtctatcttgtctatcaaacaaagagcaagaaatagaaatgatagctttaacttctaccttatcaaacacttcctgaataagagttgaattccaaatgccacaatcaagtttgagatcactaaccaaccaaagatgaggaccaccattgaaagagtaggtatgaccatggtctttggtatccaaacatcctcatgagtttttatagtgttgccttgtccaataagccacaacaaccttgcctccaaagatcacgacccaaaagaatactcttccaaagaaaagagaaacgctttgcctcttcaacatcaagcaaggaactattggcatagtagaaacccttcataactttagcagtcagggaccctgagtggttaaatagataagcaacctgcttagcaagtaaagattggttaaaacaagaacatatcacgaaatctagcccatacatccatcatttttgtgccaacaaagacgagaccaagtacaccaatgcatcttcatagtatcatcatctccaccccaccagaatctagcacacatttgatgtatttcattcgcaatgcccactggcaagcaaaataaactcatagcttaagcaacgatggctgtgattattgattttaaaagaacttccttgccccaacagagaagagcttagacttccaccaaagagttt

SEQ ID NO: 205795 - DNA, 661 bp, Cannabis indica
aattcattaaatgtaaaaatgtaaatgcattgtgtaattatcccaaaaacaaatttgtacacccagcgaaacattcgatgtctttgggtcatccatcctagccacccactcccggcatgtgtcatgtgtgcaaaaaaataaaaatttatagcctatcttttaaattgtaataaggtttttcttttatgagaattaacgcttgatactaagtagagtaatatgttgtaacatttacccgtaaacaaagtatattatagtagtaggagcaatttgcagtgaaatttttaatttttatacattaactctctttttttttttggtaaaacttttttatattttaatttttatacgagtaatttgcggcaaaaatacataagttttctcccgagtagcagataaatacctaagtcgtatttttggcggtaaaaataccttccgtcacacttctggaatttccgtaggtacctctctgttatgtgccaagttagtatccatgtgtcactcattcattggtccatgtcattaactttttattttttatttaaaaaatctaaaaattcatttaaaatctaataaaataaaaaaagatatctagaaattcatattttaactaattaaaattaaaaatcattaattatatttttaaatttctaattaaccc

SEQ ID NO: 205796 - DNA, 770 bp, Cannabis indica
cgaatatacaaagaaatctcatagaaataacgacaattacttacaacgtcagctaattaaaacgtttactttttttttttaatttttttgatgaactagtaaagggaaagtgttagtaaattttatttttggaaatacaaaccttgaaggactaccctttaaaatgtatatatgttttctttttttatatataatcaatatatcatttaaataatcacacatgtatccgaaaaaaaattatcctatcaagtgttttatggataggtatgagaggccacggggtagaaattaaagaaaaatttctcccaaattttaatttaataataattataagaacttattaattactcacaaaattctatccaaggctaagagtaattagatcttaaaaaaaattattaagcacttgttctaaggatatggtatttttactaaaagaaaaaaaaaaggtgtattttgaagaaaaaagattgggccctggtggacttatacccaggcggcaatatgctcaggataagttaagaaatatattttttttatttattaatcaaaatattttcatattatatttcattaaaatttatttatttttgtgagtggattgcttaatataatcttaccttccacttaagtctagtagataatttacattaacttaactctagtacataacctaaccatttataaaagtgagtatatatcaaagaatttgaaaataaaagtaaaaagtaaaaaaaataaagggcttgttcggtaactattttaaaaat

SEQ ID NO: 205797 - DNA, 1057 bp, Cannabis indica
ggtatctgttgtaacaagggaacggtttttgttcccacttgattatgtctaattttggttattctttgtcacatctaattttgattatgtctttggcacaatttagcttcgaagaataggaacatttaattttttagacagctaaatgaggggcttatattgttggttccacattggttatgagatatcttatactttataaatgtctcctgttggttccacattgtgttccattatttctacgttggaccagagtagtgggatgtattaagatctccttgatttttgttgggcttaccgatacattgcaggtatggattcattggctgtagctcatcaattccaactcagattgttttgctctatccatgtttgcactctatttgaagactacaagtcagaacctactgtctaaattacattgctcaatgagacaattgacctctattctggttggttagctgaagccaaacctgttgtctagtataacaagcttgtctgctatgttgatgtgttccaataaatttgtttaaaccatgttatgtccattggttcgacaactcatgattaattacagatttgttaaagggatttagttgtgtggcctctcctcgtgggtagttgcctttgagtgtgtgtgtatgcttcatattaagacttgtttctttcttctaaaaaaaagacaaccctattaaatatacagagaaaaaaatgatatataaagctcctttggcaaaaagtgtatattgtttaacaaaactaatggcatcttttaggtgggctttattagatactacgggctcatatgcctgatgggccgacccattgtgtcaggcccatagtaactatccgtatagaaaaataccactggtttgatcaaccaatatatgtctgaattttgtgcaactcttctataaatataaataagaataatttgtggtataaatatctaagtttaattctcggttgtaaataaatacttataagtttaatttttgacaataataatagctaaattataattttggaacttgtgtaggtacctgattgttaagtg

SEQ ID NO: 205798 - DNA, 1287 bp, Cannabis indica
aaagtttactgaatccttgtagttgcaaatatcaaaatgaatgtgatcttgctaaatctacagatatccaggacataaacaaggtattataatgtactgaaaaagcatgaacagaacatagaatttattttttaaaataacaaaatagatgttagtttatggtctagtcactaagtcttggacacatggcactacttcatttgttccaacaattagttacttaaggtggttagttctatataaggctaaccgaaaccaactgtaataactaacccattatatctttcagattcacattcttttagcttagagtttttggtagcttagtaaaacaagtttagtcttcttggagggtcgtaattagaaggattgtttattttgatcaatctcttctcagtgtgaggaaccattttaaggagctgtgctctattgatgtgtgttgctatcattgtcatgtaacctaattctcaagctaattgaatcaagaagtgccaggctgagctatttgtctgcaactcgatctcttctctttcttttctttgctgaatttttgggtttatgctattgaattcggtttttgatcctccattatgtaattgaatgatcacaacaatagaagacaaggaatgctacagatttccaatattaaatgtttgtatatatgtgtgtgattagcattgattataagaacattatacacagtcctacaggaacttcagtcacataatgtgaagttaaaagtgaagtaacatgaatggacttacgtattccattatctcgaactgataaacaacattgctctcaaaagccgaacgaggtcccgagcgagtacagtcaaagtattttagcagtgttggatcatggtcaccaacaatagtaacagtttcacctaagacatgaatgaccagccataagagaggagaataacaaagggaatcactgcatatcaaatagcatagcaattgtcttctttatcttttgatcagataaaaaatcttttatgaaattcatcaatagcaaagatacttgaactggaaaatgataaaaactttgtaacaaaactaaggcataacaagataacagagaagaaaagcacacacacacacacaactttgaagttactttgtggatttcacccaagaattgatttgttttacttgattttattaaagacgtgaatttttgttaaagaaaaaaacttctttcgatttcatgtgaccaacaaaacaagagataaggttcttaagcgtaccatacatggaaaaagggcataccagtggttttgtg

SEQ ID NO: 205799 - DNA, 844 bp, Cannabis indica
caatttcactctttctatttctcctagtctgatgcatattaggttactaattaataaatataaagccgagtatatactactacgtacatatatacggcgatatattgtatatgtatatagtcaatatattatgaaaacattaagtacttctccttatgtacatatacaagtttatacagtatcttataattaataaataaatttatacatataaaagacaaaggtatgcagttgatatcacatagatgacgcgagtacgaagatgacaatatatggtgtggggtacttattctatataatatgacaattgcaattcccaagatcgcaagagctagctgctacctctttgtgtcttttgataaattgcatgtggataatggaagaataaataagtttaacattattattaactagatttatcaaatcttatgacaaagtataatatataacctttttttatattctttttatggttttgtatttctagtgtaataattgtatatatatactattaatttcgttgtgtgtatataccactctctagataaccacattattaattaggtgtgtagatatgcatcattaattaatttatgagggacctattaattgtagagtattatatacttacatggatgtacactaaatatataatcagagtactaaattttcacaaggaccacaattaagctaacttttaatatatatatatatatatataaatagactaactaatcattatcctttttattataaccaaattaagtgtatatggaatggttatgtatagatcatcttatacaagagatatttctgtatacataattaatagatattttttttt

SEQ ID NO: 205800 - DNA, 906 bp, Cannabis indica
gaaattatgtaatatgttattcatcatattaaataatgtgcatcaatgtaaatacactcactacaacaaatcttatttttagctacaacaaaacaaaatcttattaagattagttctagggctcaccttagcttccctcttccaaagcttcctcctaaccttgaattcctactagaatcagcaaggtaaagaagaaagaacccttggttcttggctactacaacaagagagagagagcaaagaaaattggatttcttcctttttcttttaatttctatttttcttttaattttcctcaaataaaatactatacttagctgaaacaatataaatggccagttgccaaacaaagaggaggccacctaatcccttaacaaaattataatgcccttataacttataacttaaggaatacaaatcctaggagtaaaatggtcaaaagccatacttcgtccaaacttagtattctatttatctcaaatatttatactactaagaaaaaagttctagacttatccatgtgactcaaacgaccactcatcgcatttttcgttgtcgttgatcaaaaatcataaatattacataatgcatatataacttaaataatacttctagaatttaataaaatctccataattaaaaatttataactgtaatgccttttttgataatagaacccaaaacatagtaaactcatacataattataaaacacatgaccaataattaatgttaattatctttactaattgcatactctaaaatacggttattacaaatacagtatagagatagtaaattcttattttagaaatttatatttttataataataaagtataaaagtataatttttatgtaatttccaaatatgtacagtaaatgcataatatttaaatatatatata

SEQ ID NO: 205801 - DNA, 679 bp, Cannabis indica
atttattatatatatacatgcaagttgaacgcacgcaggtcattaataatgtatatataatagtgtaataattctgttattttttttatttttgacaaataataatctgaattactcatagttttaatatggaatttcaaactataatgatgaagtatattcatcgaatattccattaacgtgcatccatattcataaacttgtacaaatttatatatattcacattagtcattaattagttggttaatcgttaattaagtattaatcgttagttgtatattataatgattacttatatcataaaaaacgattatatatacataactaattaattactagctaacaacttcttttgacaggagtctaattttgaaggctgcctccaaatcaaatctaatgatatatatatcatgatcagcctatgctttcatacagatcatatatatatataatacatatacataaacacatagtgcatggtcactctcaactatatgtaaaataatattagtgtatttgccaaagtaggaagatcgactatatcatggctgtgtgatgatgttttttttttttaattattattattaaataattgagaattaggagtgaacaaaatgtagggtgactcattcaaattgaatttaactctgttgaattactatgtgaataggccattat

SEQ ID NO: 205802 - DNA, 3391 bp, Cannabis indica
agagagagagagacttgatttctaacttttcttcttaatttaactaactaatgaatataacctaggttaattttacaataaacaatttgaattagaattctaattaaatccactaaaagacaaatccttcctatatggaaaaattataattttgccattgcctcacactaaagtaacctatacgtctaggggtaaaatggtccaaaaccataacctcgcctaacctcaatatttcaaatatcacttatatttatcccactaagaaataggttctcaactcacccatatgactctaatggccatccatcacattttcgattgttaccaagtaaaaatcataaaaattataaatttcatgtgtagtaataattacacttagagtttaataaaattcttgaattgaaaaattataactctaatgcctatttttgaaaaatgggacccacaacataaatattcatatataattataaaataaagataattaatcttaattaccctactaatccatattttaattatgcggtcattacaattattctcccgttaaaaggatttcgcccacaaaatctaacctgaacaactctggatattgagctctcatgcaagactctagctcctaggtggcttcctccaccttactattcttccaaagtactttgaccaatcctatggtcttgtttcgaagaacattttctttcctatcaaagattcgaactggctattcctcatatgacaaatctagctatagttctaggactttgtaactcaagacatcaaattgaaataaatacattatgcacagctgagaatgctggtggtatggctagccgatacgctacctgcctgaccttctcgagtatcttgaatggcactataaacctagggcttaacttgccctttttcccaaaggagcatatacctttcatccatgaaacttgctaaaaaaacatattcttctgcctgaaatgcaatgtctgtgcacttaggatcagaataacttttctgcttgctttgcaaagcaagcatctaagccattttctattgcctcattggtcctttgaaccaattttggacctaaatacttcctttccccagtttcatcccaatgaattggggaacgacacttcctactgtacaacatttcatagggagccacccctgttgtaccttggtagctactattgttggagaattctattataggcaagtatttactccatgaaccttcaaagtccataacacatgcttgcaataagtcttctattatctatattgtcctttttgactgcccatcagtctaagggtgaaaagttgtactaaactttagctttgtacccatagccctatagaattatctagaattttgatgtaaacttcgaatccctatctaaaacaatggattttggagatccatataaacgaactatttctttaacatacaatggtgcatactgatccactgtataagttatttttactagcagaaaatgtgctgacttcatgaaacagtccactatggcccatactgaataatacattccgttttagttcttggcaacccaaccacgaaatctattataatattatcccacttccatttaagaagttctaaaggttgcagtaaccctgcaggtttctgatgttctgtcttaattttctttcatggtaagcatttagacacatattccactacatctctcttcattccacaccaccaataatagggtttcaggtcgtggtacattttggtggtactcgggtgcaatgaataaggtgtagtatgagcctcatcaaatatttctttcctaagctcaacattactcagaacacacacccgagccttataaagtaacattctactgctcaagactgagaaatccttaccccaaccaactaatatttcctctcaagatcttactaactcaacgtcttctaattgtgcctctctaattctttgtaacaagtctgactagagttttatattattcagttttccaaccatgaactcaatacaaatcctaaccatatctattgccaactgaagtgagatcttgatggtattgaaaacctgccgagggccattttttcttaaagaatccactactacattaactttctagggacgatataaaatctcacagtcatagtctttaacttgttccaaccaccacctctgcctcatatttaaatcgttttgagtgaagaaatacttgaagctcttatggtctgtgtagatctcacacttttctccatacatataatgtcgccatatttttaaagcaaacacaacaacagcaagttctaaatcatgtgtcagataattctgttaatattcctttaattgatgggaagcataagctatgacccagtcagcttgcatcagaacacaccccaaaccttgtctggatgaatcacagtatataacaaacttttcttggtctgatggcaaagctaacactggtgctgtgatcaaccactactttaactcctaaaaactcgtttcacatttatcagatcaaacaaattgttggttcttgttcgtcaactccgtcagaggcattaaaattttagaaaagccttctacaaaattttgataatacctttccaatccgagaaaactttgaacctccataactattctctacctcagccaattcttaaccgactcaatcttccctagatcaaccataattctgtcttttctgagaatatgctttagaaaggacacttttgataaccagaattcccactttttcaactttgcatacagcttatgatccctaagtcgttgcagaaccattccaatgtgttgatcatgttctgcttttgtctgagagtatacaaggatgtcatcaataaatactctaacacagatatcaaggaaatccttgagcgctctgttcatgagatccataaaagccactagagaatttgtcaacccgaacgacatcaccaagaactcgtaatggctaaacctggtctgaaatgtcatctttagaatgtcttcctcctgtattcttaactgatgatatcctgaacgcaagtcaatcttggagaacacagttttaccctgaagttaatcgaacaagtcattaatccatcctcaataatcaatacacattcaaagggatccatccttatttttcacaaacaaaactagaggtccccagggcgatacactggttcaggtaaaccttaaatccagcatcccctaaagttgcattttcagctccttaagttctgtaggagccacttaataaggtgcctttgaaataggctctaccctaggtgccaagtcaattgtgaaatctatttctcactatggcgaaaatcctggtaactcttcataaattacattaagaaactcttttacaactctgacatcctc

SEQ ID NO: 205803 - DNA, 884 bp, Cannabis indica
catattcttctcccgactgtcgatcgacatgcttaatccatctccgacgatctcccatcaccggactcgaactccctccggcaccggcgccgacgtgggcaatatcaagtccatccccgaccggcaaaaacacagaacgaaccagccgccgcgacccacaaccaccttcttccaccgcgctccgccacctgaacccggcggcgtttttcgccgacgcgttcttacaaaccagaacggcccctctctggctaatcttcgccactctcagaactctagcgaagtcctttctcagaccatcgaccaccagaaaatcgaccccgaccaaatcctccataacctcctccgccgcatcgccggccacgattacctcatcggccgaaaccccagcttcgcttagggcttcaacgtactcggtactcgacctctcgtccgggactatgcacacgtgtcttccacacgtgtggcggttagccacggcgaggccgatgctggtggtgatgggtcccccgtgcgaccatgtctccacaatgaatttcgcgttccagccggccgccatggccgaaatcagctccgccacacccgaatctcgaaaaatctcgcactgaagataaaacccagatcagaaatttgttgaaatttaacaattatacaatacccaactctttaaaaattaagaataatccgataacgtttatttatttttattatataaacctttggagaaaattgcttactgatttgacagtatcgatgtaagctttcgatgctgtttcaggagaccaaactagcttcatttcttcttcttaattaattggtaaatttgtatatatatatatatatatatatatataaagtagttattgtatatatatgtaataaggtag

SEQ ID NO: 205804 - DNA, 956 bp, Cannabis indica
ctccgccataaccaggcccgaaatcttatcgagctgaaagccttatataaggtgagtggtggtttggactttaagaacactaaacccataatgaggagaagaaagaaagggcgtcgagattttatgtgatatcgatgatgatgatgatgatgatgatggtgttgggggtaaggaccgagttgtgactcggtcggttaagagagaatggtcgagtggggacaacgagtcgactcagctagtgaaaaaagttttgctttggtatttgatagagtgggggcgattccacgtgtcaaaattatattggtttaaagagcgggagaaaaaagcttattgaatttcgagccagtgaggggttcacacgtatggtgcgaatgtggggatgagaatagggaatcgatgtcgttgactgttttatatttatttttagttttttttggagtgatttttttgagcgtgaattgcgggttcagatgaaaaagcgcttttgcccctggttgttgctataattgacttttaaaagacgaggcaaagttttggttaggttgttagctttatgtttttttttctttttctcttgattttgagaaagtaatttgtttagttttattttggaaagtaaaagtgaaataattgcaactaaagcgaaaacgaaaaaaacaaaagtgattaaaagtaaaaataaatacaataacacttgctttatgtggtggaaaatcccaagaaatttcctattatttttgcttatgtgaatttttttatatataaatatagcaatttttgcatatgtacttacttgcataaatgttttcaaaatatatgtattttgttttatttttgcttataaggaataatattgtttaaatttggaaggaattttgtgtttttcctttccaagaaaaagggagtcttatattcagacaccttaattttattaaaaataaatatataatatatat

SEQ ID NO: 205805 - DNA, 626 bp, Cannabis indica
ttttgaaaactaaaaactaaaaatacagccaaagtgcctctaaactattaagattttttcgtagtcgtaattaactacacgaacacgatcaataaaaaatgaactaaaaaattattggagtatcaattcaagacccacattgtagaataggcaagagttgtcttggatataagtgttcaacttactttattagtatgagaccttatagaaatatgtctaaaaacaaaatcgtgaggaatcggcctaaagcgaacaatatcatactaatgtaagagtcaaggtgaggtagcggctcgacaaggtggaagaacgggactcaatcaaaatttccttgaatgcgaaaataaataagagtcaaccaacactcttttagggggtgtactgtaaattttttcttcgttatttaatcacacaaatatcaatagaattttttgcgattaaaccctcttaattataattctacttgcacttaatcctttaagttcaaattttgactaaaaatcctcaaaactactgaactgttagcaaatctaaggtatcattaatttttcacatttaactgtcaatatagattctttatgtgtatatttttgtagatgtgttacatttatattagtacacttaat

SEQ ID NO: 205806 - DNA, 599 bp, Cannabis indica
aaaaaattaatttaaatataacattcagaaaataatacgtgtataataacttcatatttaatacatagttttaaaaatataatttagctattattacagctaaatattaattttatgtatttatttataacttgaagttaaagttaaaatttaaaacttttgttttgaatagtaataataataataataataataataatatacagtgatatgtggcattaatcgatcagatttcagacccatatctcaaaaaacgagcagctcaatgacaatctatttgacataaagtagtgcaaattatcagtcactgctagtagtgcattagcacaaatccaattaaaagtaaatatatatttcataaaagatgcacattttgtttgtatggcatggattaaccactaataatcaatcatcatgtatatttctttttgtaacaataatacatattagcttgacttttcattagaaagattaaattaagaaatatttacataataactaaaaaaatttaaaaaaaaaaattagcgaaaatacatcagtatagaaaaaaatatatatttttctttaaatttttttatttacaaaaatatcttttcagt

SEQ ID NO: 205807 - DNA, 995 bp, Cannabis indica
cagctgcacagtacgttaaaaatcacgtaatacgcctaagatagttaggtgttacagcagtctctttagtgatatcgtaaaatattactataaacatgaagttagttagtatttatagaattttatataaattttaaattttggtaattatttgtgaagaaaattataaaataaattgaaatgttagtttttgatttttttttttttttgtattgatgaaaaaaaatataattttcatatattaaaataataattttaaataataggtcagagtaatattttttttttcagtccaacatatttatattaatgtcaataaataattttaaaattaaaaattaaatgaaagttttcttatataaaatatctatataatttttatataatttgtactttaaaatatatgtaataatattataattaagtaataggatattctgttaaagttaacgtaggaaatcaaaatatacagttaaactaaaatttctgttacatagtcacattttatatagaataaaatatatatatcttacaaaaaaaaaatgccatgatttttttttttccaaaagaatttttgcatgattatggccgttcagattgtaaaaaaacaattataatgagtaggtaagaaatataatccacaaagtcagtgtaatagcaaatattaaataataaatattcatatatataaaacgttagttaatatttattgaattttaaattttagtaattatttgtaaaaaaattataaaataaattgaaatgttggttttgatattttttaattgatgaaaaaatatataattttcatattttaaaataataatcttaaataataggtcaaagtgatattttttttgagtccaacatattagtattgagattaaaaaataatttcgaaattaaaaattaaatgaaaacacagaaaataaaaaataaagagagctaaagatagatctctttgaagaaaacttgaaaagtaaaaaaaaaaaaaa

SEQ ID NO: 205808 - DNA, 620 bp, Cannabis indica
tggtgaatcaatggcactaggccaaacattccaagaatccttctagaaagcagtgaggtctttggaatgtggtcactctggtgaagtatagcttacatgttcctaacccagatcgaattcatgatgtatgttctaagggaatgaagatagatggcattcatgaactaagttacattgacatatggttcctcacccaacttaaggagttggtagatgtagagcagttccttttggctcgaattaagcttgtcagatgatttttatgaagtgaaaacaagaggttttagtgataaatagattgcttttaccaccaagtcgactgagatagaagtacgataaactaggctatctttgggtgttgctccagcatataagtgtgtggatacttgtgctgttgaatttgaggttgatactccttacatgtattcttcatatgcttttgagtgtgaatcatctcccacccaaagcaagaaggttttgattcttggtggcggaccgaatcgaatggtcaggggattgaagttgatgactagctactactgttttcacatatagaaagagtatgattaatcctatatgttattagtaaaataacgacaaagaaatagagatggttttca

SEQ ID NO: 205809 - DNA, 672 bp, Cannabis indica
aattaattaagtcagtcaattttatgtttttgtttttgtttttctttttaaacaaattatttttggcaatacatgtccaatattgtttttcttgaatttcatcccaatattgttatatctcttccaacaaatccaaatcatatataccatactacatatatgttgtatttttactttaaattatttttaaaagaagagtactgttctttaatttacatctcttataagttagctagggaggcttctggccgatttagcttgatagttgatagtacgtactctatttacctaactagaacttattaattaccaaaaaaaaaaaaattattcatatcccttaagaattaggatagcagaatatatatatccatttaaataaaactgaaaatatatatatttatatatatatatataatataaaatatatatttttttcttttcaatcaagtaagagtgttgtggcagtagtactactaattgtcgaaccaattaaaaaaaattaatttggatttttaccctatgaacttttgacatgtactaaattatactctctgaacttttaaggtcgttaaaaatactccatgaactatttattattattttttgggtcttttttcattaaatgtacaacaaaaaccaaaataattacaaaaaatgtgcaaaaaaaaatta

SEQ ID NO: 205810 - DNA, 630 bp, Cannabis indica
actaataaacaatcacttaaaaattgcatctaaagtgtaatttttattatattcatagttgaatagataaacatattttaattagctttcaactaagctgctatggtgactagattaggaaaacagactacttaatattattaggtaagaaaaaataaatattgtaaaaaggaaacatataattttttttataaaaaatagaaagaaattgtatttaatttagcatttaactttctgatgataaaaacaaaattaaaaatttgaaattttagtttgacttttttgtgaatgggggccaccatataataaataccaaaaaaaaaaagttcgcactatagccttaagtgtgcatccgcccctgggcaccgagtaattagggttttcatttacgacaactctaaaaagtataagtatatggttgtaatgttttaacagagtatttgtaaacctttttaaatttaggcgattgtgaaacatcgtcaataattcttcttactaatgacgacaggtttcaagtgctagtaaaaaatttgccgacttttttttaccgacacctattctacctagttttgtgatgatcgaataggcccgctttggtcttaaagaccgacgaaaatactatacctagtc

SEQ ID NO: 205811 - DNA, 2172 bp, Cannabis indica
aaaaaaaaaaaaacaagcattgtcaatgttatgtacgtacatattggctggactagagagcttataaattagaatattctttttttttgagagagtataaattagaatatcgttttttttttgagagagtataaacgataaaaaaatcatttacagtttatatttacgaatatattatgtaagtattctgagtagtagtatcatgtgtacgatttttttgatagttttatatcatgcaatagaatttcgatacagtggtatttcgagtggactgttttatcttggggacaaccgataatttctgaatgcttgcacattcctgggcagtactgcaaatgtcttaaagagatcgagtgacctagtccgcaactcaacccaaaaatttcatttggtaatatcgtccctcttttatttttcagtggcagtctattcaacaatttttagacgtactacgaatgatttttttggtggcattagaaaaccttctcgttttgagagtttgcattttaaactttggagatagaagatgttgttttttctgactattaaaaaggttacgtttgtgctgactttttgaaaccagttatgtctgagactctacctcctgtcgagaagaaagatgaaatcgagaagtacgaattgtgggttaaaaaaaagggagtagagaatgattttctgtgtaagaattttattttgaatgacttgtttaatgatttatatgattactataattctgataaatctaccaacaaaatatgggaatagcattacagaaaaaatatgatattgtggaggttggaacaaagatatatgtcgtgagccactacatgaagttttaaatgatcgatgataaatcaattaaagtccagtctcatgagcttcagaaaatagctcatgaaattctatctgaaggtatgactattgattaacaatttcaagttgctgttatgattgatagattaccccttttgtggaaagattttaaaaaactcagttaaaattctgatcactcgccttcgaattgaggaggaagctcaaaaacaagaccaaaagaaagaggtgcttattgttggaaacaacaacaacactattaaaagatccactgcttttctgaaacccaatgaagcgaatacaaaccgcaacagtcaatctcagactaataataacaatcagaattggaaccatcaaaggagacaaaataatatgcagcaagtgtcccctaatagtaataattttggtttgttcgtgtggtacaagtgtaacaagccatgtcatatggcacgaaagtgtaagaacaggcctaaatctgcttcgcaggctaacttgacagaagagctgtcgtttacagctacgatttgagagcacaacctcattggtggatttgaaggggggtgggtagatattggcgcttaacaccatgtctgctatgatagaactatgtttaaaacatatgttgctgctattgaggatcagtaaatattgttaggtgactccaataccactatagttgctgcaactagaaatgtagaattaaacttcacctctaaaagaagtgtgattctaaaatatatgatgcacactccagagatgacaaagaatctggtcttgggctaccttctcaacaaggcagggtttacacagactatagggactgatttatttactttagccaaaaataatatatttataggagaggggtatgcaactgagggaatgattaaattgaatgttcaagttaataatgttaattttctgcttaaatgttgtgttcttataatacttaacatgctagactttttcacataaataaacgcataatcaagaatatgagtagtttaggcctaatttatctttaaatgacattgaaaaatgtgaattttgtagccaagccaagattattaaacaccacataaacctctgataggaaaagaaacctagcctctagatttaatccattctgataattgtgaacttgatggaactttgactaggaatggtaaatgctactttatcacttttattgatgattgtccttatttcatctttgtgtatttaatgaataataatagtgaagctcttaatatgtttaagttatttgtggctgaaattaaaaattaacttagtagaaattacgtagtgatagagtcattgaatatgattctattacttttg

SEQ ID NO: 205812 - DNA, 762 bp, Cannabis indica
aaaaaaattacaaaagttgggatatacgtatttgttagagagatatgtaggtaagatgttatttttttttaaatttaaaaaagattgttttaagttttttggtttaattagttgggtttatttatttgttaacgttataacagtctgttaagttaataagttaaaataaataataaaaaaaaagaatcgtttaaaaaaatcgttaaaccaacaattaccgttagatagacactttttatatataaagatattgacattaaaattataattaaataataaaccacatagtttataatataatagtgtaaatttatggttaaaattaatagttgatgatactatgattttgatgtattttttttggtagttctttaaactatttataagcaacaagcgtacaacttacactataaaacaattttgatatttaaaatcttcaaatcaatttactctggtaatttgttcgtgagatgtaatgattagtatgcaaaattgtatattttagatatttttattaagtgaataattaaaattaaatatttgttttagtagcttttagtgccaaaattatttcattggaaaatatttaattggtgtgaattttaagacttggaacaatatggcaaaattaaaagtagaaaagaaatggtacaagcccatcaccgaatgggcaaagccacattgaagtttagaaagcacattattttgtggggctttttaaagtaaacctcaaaagcccaattgaatcgtaccagtctctac

SEQ ID NO: 205813 - DNA, 518 bp, Cannabis indica
aatattaaaacattattacatatgtttgttattagttttccaaagtgtgtttggaactttggattgtaattatacataaattcttatttcatgttgactaatgtgttcgttaattgcatacaaaaataatataaaaactcttaaaaatattaatattttgtgattagatagtataattataccaaattcgtcagagattaaaataaaaaaaaaaacaccaacatgtaatatgataaaaaaaaaattacaaactcggtatcattattaaatatgttcccaatcgaaacccatttttcatttaagttttgttattatatcagtgtcaaaaatgatcagcatttccccaaaagaaaaaaaatgatcagtcttaatgtgtaacttttattgtttcaataagaattttagttaatttttttttaacatgtatattataattatttaatatatcttataaaatttaaaaatttaaaacaattttcaatctatctataataaaatatttaaacctatatttttac

SEQ ID NO: 205814 - DNA, 1986 bp, Cannabis indica
tgattgtctttcatctatatccattactggtgtaaacatctgataatattatgtaaaaaaaattaaaacttatacatagtaaataatttggttgatccatccatttttttttctgtgtggtaagtttatttgaatgtttcaatctctccaactttaatagactttgattgtctttcatctatatccactaccggtgtagaattctgaaataattaagtaaaaaaattaaaacttatacattgttaattaaaattaatgagcaacaataaattatttttaccgcctcatgtaagtgttgagtaaatgatttacgtccacccctatgcataaattttatttttgatttattttttgagccagccacatactttttctgcaataaaagttattgacgttaataatttttttagataaattaaaaatagatatgataaaatagacattatgatatcttctactctttattggagaaacatgcagtgcacatccatttccagtcagcatctcttatcaccaaactcgtaggtcgatgctctaacggattttttttcttcttgaatcattttttgataatgccagtgacaaatatcacgatgattactgtatgcatttttgcaatattcatcacaaatcacctcaagatatgaatcttttgcgaagtctaatttgaatacatcctgcattaattttgaatgaataaatataaaattacctaattaaaagaaatattaaaaaagtgactatataaatataatgtacctgtatacaagcatatacaacttttttttttttctgaaagtggaactttgctccaagcactgtattacaatggagcatgatggcgtatatttacaccaccaaaattagaagcataattgccataaactttaagctcgccttattataagtaacagttaagttagttatttggtcattctccagttcacagattaagcgatctccatgagtaggaccacgtactttcttttgtatttctattttttgtaagaaaaatatataattaataagtatttataaatgtatattttttaaaataagagtgatgataaaattttggaccttttgaagattgacgttgttcatcatgtaatggaactgttgaagggtcatcagtagaaggtgtcaaggattgcggtgaatctgatggtgattgagtatcattgtgtgcccgtttagagctaaatcttctcgtactactcaagggttgatctgaagtatcagtgcgtccctgttttgagctaccttttctcgtactacttgacataataaaatctgaaatgataaattattagtagctaatattaaattatcccattaacaaaataaagttatttacacaccctttatattaatcactttcatcacagtcagtttcagaatctgaaccactaagtagtgcttcttcatcaatatcatcaatgtttaattcgtgttgaacttgattattttgatcttttggggagtcaatcaataactcatcagtttcaacttcatcaatatcttttcgaataagaacgtcgtccatgttgtttgaagaatccaatgtgagattaatgttgtttgaggaatcttcttgatatgcttcacgattctggacaactcgttctccatcatcaacttcaggctctgatggtatttcccaaatatgacgatggtttaccttttgcaccactttccaattttctccttttttttaatgtcatctaaatagaatactggattaacttgatttgcaagaaaaaacgggtcgtcatcaaaccaatatgagttaatatttatactagtaatatgatattttgtataaattctacgtgggctctcactagagttataccaagaatatttgaacaatatcaccttattgaaaaagatgtaatgtacatcccacatttcattgatgacaccataaaaatcacaaaggtttccattatattctacctccactcgaattccataattttgagt

SEQ ID NO: 205815 - DNA, 505 bp, Cannabis indica
aaaattctcaaactccctcatctctctcactctcggaccacctccaaccaccaccaaaaccgccaacgagacccaacagagccacccacctccgtcttcctccctcctcagttgtcaacaaacctcgaccgagaaacggtagccgagccaccaccaccaacaacaacccttcgtcctcctccgtccaccactagcgacccaccaccaatccaccactgcctccgtcaaccactgccaccctcttcgtctctattttaggtgaaagatatatgaatgttatatttttttattatttattttaatttttggatctttatttagattattgagattattatttttttagttgagattactgagattattgttgttgttattgttgtagatatgagattatctcaaatttggatattgctaatacaaatttttgttaactactaaataagtattttgtaattaatatactcaggaactaaatagacagtaattaataataataataata

SEQ ID NO: 205816 - DNA, 769 bp, Cannabis indica
ctcgacgaaaaatgacaaaactaaaaaacccgacgaaaatataatttactctaatctttatatcgggcaggttagaaaataactaccaacccgcccaattaacccaaactaactacgaccaatccgataaaaatgtaattttttttatatatatttatatctttttatatatatatttatataaaattatatgaatctttaaaaaaaatataaagttcaaaattaatatatcatttttatagtagttgattcaaagtttgaattcaatttatatatttgtctcattattacaattaaccaaaatataatcattgaatgtaaaaataaataaataaaaaataaaaaatattagtggtaaatttagacgggttaactcgatcaaacccactaatttcattaagtgggttactaatttttttttgcgaattgcaattaaaattttataactcaatttttacattagactgaataaaatgtaacataaattaaccaaaccgactcatacgtatgacgtacggcccctaacaaataataacttttaacaattcacgtaacataattactaggttgaacacttttcatttttaactgaaaaacatccaaaaacaaaataattacattaataatttcgtttttaaataattaagataaaaagtcctgacaggtaaacaggtgaaagcaccgttaggttttgacattaggaaacatgtaatgttgtcctccacatgcccatttttttttctttatatatatatatatatataaaaac

SEQ ID NO: 205817 - DNA, 850 bp, Cannabis indica
aaaagaaaaggaaaaaagagaggtaagaaagtggaagttgattgatgtatgatagggatggcacaggtgtctgtgcatggaaatgatgtgtaagtggtataattgtaataaaaaaaagaggattagtaaaaatgttgatgtaggcgtgtaggggtaaacctgtaataaattgtgcaaatcagatttttggtgtaaaaattttaatgttaaataaattattatttgtttcttagtgtaattaaggggatgtttagtttataggaatgaaaattaattatatgtctattactttgttttccattttaaaatttagtaatttattatattgtgatagttattacataatttacattgtataaagtaaaatactcgtcattacgattatactctattacaaatgatattataataaaataaaacttaaatattttataattataaaacaaaagtaaatagatattttagtaaatatatatttttattccattacattttcacaccaaattaagcacaataattataatcataattttggttatagtactcattccaacaacaaaccaaatattatcattaattactattattgtacttattttattagtattaccattactattatttttccattacaccaaacctaatatcacctcaattaatcaaacatatctttatttcatttattttatgattcgtgactaatttaaaaataaaagaaattggaaaaggagtcttgtcatttgacatggtgtgatgagttaggtatttttgtctgtgaagattattttgcttgtttgtccttgtgttttttttactgtatcttattgttatggagaaagagtaaaatgat

SEQ ID NO: 205818 - DNA, 684 bp, Cannabis indica
aaaaaataataattatttttgttaacgcaaaatattggtgagcactcgctcgttagattaccgaaagaaaatagaaattaagtagtgtaaatgaaagacacaagaaatttatagtaattcacttttcttgtcgtgacggtaatggtgctacgtttacttcgagtttttattgcttacgagaattacaagagaattgattatggcaagagctctatatttctagagagagatgctctgacctttttggacagttttctaaatgtgaaaaatgagctagtggaactctccttttataaggaagaagatcttaataaaataataataaaatatatattacaaaaaatatctcttagccatttatgatgatctaatggtgaaattgactctggatgataatcgtcaattttcagagctcaaattttgttcgttggatcgctttcaggtaatttgtgaaaaaaagttacacttttcttgggaatgaaattcggacgtgaaatcttcagaaatacaatatgggtgtgagacattagttgaaagagctttgaaatagctttaaaatttaagttgaatcatgtcaataagatcaatattgagggagttatggccgttagactgaaggttattcagcaccaagcgcccaatttgacatactgatgtcaacctggacgttgtgtgaatgaaaaa

SEQ ID NO: 205819 - DNA, 1916 bp, Cannabis indica
ctccctgtcgaccaactggtcatgttgtaactagtgcttaagggaaaacctttaacgctcggaatgccactaccacacttggtgaatgagaaggcactaagaaagcaccaagcgtggagacctcttggagggaaagcacctttaaggaagagcccgaaaggactgaagctcttgagtgccaaccaattggccctccacttgatgttcaaagacctcgcaacaccgagagagcaattagacttcaccaagcccttcttaacgctctcatgacaccaggccctgagaccctgcagggggaaaaggggcctgctactcaaactgatggaggtagtaggagacactacttcaaaactggaggttatgagatccaacgggtaaggaccaatgaaccgcttcatacttgaaaattcttctgagatgaaagggataaattgtgatgttaattttcttgtggccccaagggccagcaatatgagtacatccctcaagcacatatagagaagttgaacttgagcgaccagttcaattctcttcacacttatgatgcagctgaagactacgttgaaagaagtagccattaaaatgctctaaatgaacactcccaaatggatcgtcccgagatgttctatagttcattctggaggcttcactagtgttgccttgatgacctcatggtcaggagacaacaataagagccaagtcagtcggagtccatgatcgacttggaagactgagagacctgtgtgacctcttgactaagaaatggtcggtagaagcgggaacttctaaaggaggccttacttaggtagtagaagatccaaatggaatgtagaccaccacctatggggtcaactgggcagaatttgacaccttggcagccttagtgaaaagaatcatgacttctaaatcgtctgagttcgaacttgatagaaagcggtgcacaccattctctgaacaaatcaaagctcttcttatcccttcgaagttcaagaacccttcctgacaccaatacggcaaaaagtaagatcaataatctcaaatccactattttaaagtaaagtgcagaccgatctacaaggtgtgagagacaatgtcaagtgttgaatcttccctgccacactaacagacttagctcagcgtggtacctttagctgtcctctagatcaatcaactcatggaaagatctagcggatgcttttggcaaccaatttgctctttcttgtcaacgccagattgaacccaatgattttatggatgtcaagcagtaggaagacaagtccctcaaggactacatccaacggttcttagaggcaactgctaagaccaaaagtattaatgaggacgcaagagtaatgtcacttatcaagttagaagaagccattacccgggacaaggaatcaaagggtggcaagaaaaagtcactagattcccaatcccttgctactgaggttcaaggctatgggaagaaaggaggatcgaacagagggaagagagccaacaacagtggtaagccaggaaactttttgggtggaaagaagcccaagactaggggaaggcccttacgagagtatgccccaagggaggagatctatatggccacacaatcaacagtgtcgtattgcaaacctcttcccttcaaagagttagggaagaaggatattaacaaattttgttgctaccacaacaattatagtcatgagactaatgagtgaaattagttgctcttcagtggtatgtatgacctgaagctctagatgggggcaatgcacctctcctgcttgcgccagttgcaggcaggatagagatcgtgattggaggctttcacctagctagaaatttaaggaatgccttagaaaggtaagtaagagccaaagtcctgaaggttattaaacatcctcccaagtctcaatgctatg

SEQ ID NO: 205820 - DNA, 774 bp, Cannabis indica
tatcatcatgattttcataatccaaattttaaatttgaccctattcggatacccagaaacatattagtttaactacactaaatatagaaagaaagaaagaaaagatgcagaaagaaaaagaagaagaagaagagagactaacctgtcatacgtgggtgtagtagattgagtttgctaaactttcaaaaccttaatttttttgggagtcctaaataaaaacacagaatcccacaaaggtgatttcatagtatccaagggtaagaatgagctctccatgatccaagggacgaggtcaatacaaggaaaggcagctggaatttagctcaccaaccaataaattcgaatacatatatgatatacagagagagatatagaatatatatattaaatagcaaaaatggaggatacgtgataatgtgaatagggtacgtgataatgtgaaaagggtttttgttaaaacaaataataatgagttaagaattaagaaagttggtagctttgtccaaaagaaaagctcatgaatgaagctttgatatcataaataaataaataccaagtcactactcatctcgccgtagagtattgtgtgcttattttattcattcattttattaaaaaaaaatattaagaatatttctttaaaatggtagttggcagttggaaaccactcgttaaattgtctcattctcgacttgtttttcctttaatgagttgcattgtgtccatggtttgtaacaaaaataaaaggttacctttttcaaaagaaaaagaaaa

SEQ ID NO: 205821 - DNA, 685 bp, Cannabis indica
gttcctagtattataggtttgagtttatctaaacctatggcttgtggtatacctggtaattacttactctaatgcaagcaacttactttagtaagatgctgaagcattttctttctaatggcaatctatagaagcttcacaacttcttagacatagattttatttatctaaggaaaagtctcaactattccagaaaagataaagccatgaaagaatttcttaaatcaacagtgagaggtctcagatatgcttttgtatgccttagaccagacacctgctgttgagtgggagtaatgagtaggtatcagattaatccaggagaagaacattggaagacaatcaagtaaatcttaagattaagaagaggaactatatgttagtcaataagggtgtgtttaaaactcttagactacaccacatcagatttcgagacttgcctttgtgctagaaagtctgctgataagatggtgattactctgggggtggagtagtgattttggagaagtgtaaaaacctatctgaagtctcttggtctaccagagagagactgaatgttaaagttgcaggaaaggtacttattcagtctaaggaaagaagttgttataactatagataatgcatggatagaagattcttcttgttatagcttttcgaatcaatctattgatcctgatgcactgcccga

SEQ ID NO: 205822 - DNA, 969 bp, Cannabis indica
agagagagagagagagagacggggggggggggaaacaaggtagaaccttctatgtatttttgtcttatcttcttcttttcttcttctaattagataaaatctaatttcacataatgtataggctgaatataatagtggacagctgtcaaagtgaaaggcaaccaccataacccctaggataaaatgtccaaaatgccattctcacctctaacttaagcaataataagcttaggggtaaaatggtccaaaactataaccccgcttaaactcagcattctaaatatctcaaacatttgtccttgctaagaataggttttaaacttacccatgtaacacaaacgaccatccaacacaatttccatcatcactgagcaaaaatcataaaaaaatgcataattcatatttaacttaaatattacccttagagtttaataaaatctctaaaattgagaaattataactttaatgcccatttccaagaatgggacccacaacataataaaatcatgcataattattattataaaaatacccataattaatgctaatttcttttactaatccatattctaacatgtggtcattacagttatcccctgttaaaaggatttcatctcgaaatctaacttggatagctctagatattgagttctcaatccagattcaaattttccaggtggcttctccaccttgctattcttccaaagcatcattactaaaattatgatcttaattcaaggaacttcttctttcttatcaggatctaaactggttgttcctcaaaagataagtttgactgcagttttaggattttgtaactcaagacatgagtcaggttcgaaacatatttcctcaatattgaaacatgtcatatattatgaacagccaataacgctggtggtaaggctagtcgataggctacctacccgtccttctcgagtatctcaaatgccccaatgaacctagggc

SEQ ID NO: 205823 - DNA, 758 bp, Cannabis indica
ctttctcactctctcactctacggtattgaacccgacctagaacccccactgtcaaacccagacgcagaaccccagtcacaagcccccattgtcgtcttctctcacgatctctctctctctaagtctcatcgtctccgtcccgaaaccccaaaattatgagctctatgataagtctaaaagttagaattattttaccacattttataagttaaagtttgtttagttattaagtttttaattatttttgtatttattagctttattttaagtttataaggttttatgttgtttttttaattattttattgtaatatgttatgtattatttatttataaatctattttagtttttaattaattttatctatttttaggtgtgtttgtggaataaatgaagaaaaacttgaggaaatgggtcaaaagcataattataaaagaaaattagattagcccttatgggagccccactctcggtcaaagtctcctttccatttgggtcttctatcatatgatcgtgcgactcccatgcgtgcgtgagccacaccccatacaaatgcaactgacgcgccagactcacttgctagccacctttcgagtgggtccttgtcttgaaacctccagctatcactcatgcacagttccccacctccgtcagctctcaccacaaagcgactcctatcatgcgagcaacccgttagccccaagcctctcctagccagccaattttgactgcaaagcaaaaaaaaaaaaaaaaaaa

SEQ ID NO: 205824 - DNA, 527 bp, Cannabis indica
tttactactcctattgttattattatataaataattctgaagatcatttattacaaaaaaaaaattacttattatttaatcattagcataaagatatatatatttatgtattaattttggaatggacacttatttaatttttgtgtcttctaatttgaaataaactaattaaagtaaagtgttgccaaagtaacctcttttgcctaaaattatttattttgagataataagatgtgtatatttcttgtttatgcagtcaataattgacctaaagaaatgttattgattgaccaaactacaaatgtacttcaagaatgagagtgtaataattgtaaagtttccatgtgaacaatatattggctcaaatgaaggttgttgtttgactgaatttattattagcatttgatttgcattgagagtaccacttgcaagttgatgtttttgtatacacaacatattccaaccaataattctcagagaagcacactgaatcacaatatgcctttaaagacctaagctttgagttt

SEQ ID NO: 205825 - DNA, 1403 bp, Cannabis indica
tgctccataagtggtaaaccacgactaccaataaaagaattctcacattatccacgatgttcggccttgtattgcccagtcaaaccgtccaactatcaaaatttcttgaccaaccatcaaaccccagccaattaaagagcacagatagcacctgttgggaaaagatgcaactgaaaaagaggtggtggtggctctcgatttcactgtcacaaaccacacactttttgtttggaataggtatgttcaaacggctcaacgattcccttgtcagaagcttggattgagcagcttgccaaagatgaaatgcatgttttggcacatttaaattgctccaaattgcactagcagccgagaaggcatcctggtgtagcatacttttgtacaacctgctcacattaaacttatctccacctgcagcaacaatttcagatttggaaaaagtagtgcgaagtctacaaagcttcctccaataccaactagtatccaagctcatcctataagaccaaatatcactccctttgagataaattgagttaatccacttaacccaaagcaaatcttttttattcatcaactcccataaaaatctagctaaggaagctttgtaccacttagaaccatccttgaacccaagccctccaagagcttttgggaggcacactctctcccaacttatcaagtgagttctaggccgattgtctttcaatccccaaagaaaacctctacacgatttctcaatctcttttatcacactttgaggaaggaggaagactctcatccaataattccttaatccaatcaatgtagattggactaattgaacacggccaacataagaaagatgcttattagcccaagaatggagtctgtgtttcatttttttcaagatcaacccataatcatcaagcctccattttgttggtcttagagggatcccaagatacttaagagggaactcaccaatagaaagatttatcttttgagcaagaggaaccggttgggaaactccaccaaagaaaacttgagatttagcaaaattgatggaaagacctgaagtcttgctaaattcatcaagcatagccttgatagcacttagagagccctcactccctttacagaagatgactaaatcatctgcgaaacaaagattagtaagtttcatttttttgcaaaagggatggtacctgaaatccttttctctggctgcttgttggatctttcgagaaagatactccatgacaagaacaaagaggaggggagagatgggatccccttgtctgagcccctgctctcccttaaaagaaccctggattctaccatttagctgtaaagaataggaagtattcctcacccaattcatgatccgagttgactaacttagcaggaaaacaataggccaccag

SEQ ID NO: 205826 - DNA, 1076 bp, Cannabis indica
aaatttcataaggcgtccgtttttgtaggtttggtgtaggagtgcgattaattaagaaaaaatccattaataggcactcagtccagtatttgataggaacacttgactggaaaaacaatgatttagcaacattaaggaggtgctaatgttttctctcagcaatagcgttttgttcgggagtttcaatgcaagtaaaatcatgcaatatcccatgtttagcgaacaagtctttgaatgtaagctcaggagcattgtcagacctgaaccgtttaaaaatgcaattgtattgagtttgcaaataagaaataaactcatgtattattgaaagtacatcagatttttggttgaggagataaacccaagtgaatctcgagtggtcatcaaataagtcaaaaatatctgtggttagagtgagaagtaacatgacaaggaccccaaatatcacaatgtataagatcaaaccaatgagaagtaaagtttgcattattaggaaaagggagccttttctgtttagctaaaggacagatgtgacaaggctcattactatgcaaattcttggtattacaatgtaaaacatcttaaagtatatctaagtgtttatttgacaaatgacccaaacgtttgtgccaaacttcagcagaggtgaaagcattgatggaaacgattttggtatccaaaacatagagaccattattcgaatcacctttgtcaatcatcttcttggtttgtgactcctgtatgtagaatttatcagcatagaacttaatagaatgattatcatctcttgttaaacaactaacagagaaatgttaaatttaaaaaaaaggaagcatacaatacatcacgaagaatcagatgtttgccaagatatacattaccacttctgttcacaatcaaatgttcattattaggtaaaaacagtttggttggttttatagggtgaacactttgaaaggattttatatcagcacatatatgtctatttgcaccagaatcgacgatctaagaattgacttcaggtaaatatgagtaattgattaatactatacctgacttacctgttgatgatcctggat

SEQ ID NO: 205827 - DNA, 904 bp, Cannabis indica
gggagaagagaaggacgggaggagcagatgatggacgagaagatagaaaaaaaaaaaaggaaaatattaaaagtaaagaaaaaggaaaagattacagaaaagaaaaggaataaagattattgaagttttaaatttttttcctcatgaacttttattcatttatacggaggttggggatggggtttctttgcttgacggtacttgggatggtcactttttacgctgatcgccaccatatcccattctgtgaactcgccgccgatgttctaggttcaggttggatgattttctttgtacttaatatttatttaacaattttgcttgcaaggcaatgcattcaggtatatcattacaatactttgattttgctttttacatgttataattgatgttgtagttatgtacattcagattttcaagtataattttgagtttggtataaatgtaggttcctgccattgccatgtgattatatatatctattttaaattagatttttgtgtcagtgaatttctgtccacttagtatgcaattaccgtgtggacctctcttcatattttgttgttgctgtaatggtgttttaattcagagagtcttttgtttttagttgttagtaatggcgtcaatggggccatttacatgaatgtctccttttttttagttttaaattttgtggttgtgtcacttttcggtgataaatgtaagaaaatagtaaaaaaatgcttctcggtcacacaacattcaagatctatagtcactggtattgttagtttttaagttattatttttaattaaactgctatcggttcttttgtgcagttttttactttcttcatttttgttaatttgagttatgttgtttttttatgacttattttttaaaaactaattattattattatta

SEQ ID NO: 205828 - DNA, 515 bp, Cannabis indica
aatcataaaaaaaaaagcccaccgaatcgtgaaaacacaccctgtcatttttgtttcaagttttttggtctcctcttttgtttttttggtttattatatatactctatctttattcattttttctgaaaaaatatattagttacactaaataaaaatatactaattatttactttagttaaaaaaaaatgctattgtaatttacttttcgaggcaattatttggatatgtgaaacaaataaatatatttgttatcacaaaaaaaaagtaatccaaataaaaagtataatatttttatatatatctagagcattgacattaggtaccaatcagagccggttttaagttaagacgggttagtcttatgtttaaagttcacttctattaggggtcaaatgaaaaaaaaaaaactaaaatatacatattttttaataattttaaaaaatatcatttattgttctaaaaaagggccgaaaaaatattattttttcaaaaagcccaaattaactcaggata

SEQ ID NO: 205829 - DNA, 455 bp, Cannabis indica
aagtattttcaaatatgatgcttcttctttcttatcaattaccaaacatatataaatttcttaccaaacaatttgaagacatatttctcaaaatttaaagcattaattatatgaaatatatttggagttactttggtcaatatattggacgcacaaaaagaaaatccaatttagaaatttgaggaacaaatctttttttttttttttgtcatgccaaaatattagcatatattagatatttttgtataactttttaaggaataagagatgtactatatcttaaatccattggcaaagcacattcgggaagataaaattgacttaattagggatagagaccaacctaagatttcattttgccatcatatattctctatatgtttttctctcaagtgagagagttggagcctccaacttgactttatgttggggattcaaaaaacgccttcttcccc

SEQ ID NO: 205830 - DNA, 752 bp, Cannabis indica
gagatttcaatgcggtaaaagttcacacatttacttagctttattttgcttttttctcaaaaagaaaataaataagtacttttttttaggagagataaaatagcttcatttaagagccaaaaagggctacagaaagaaaaggagcaaagtccatagtacgaagataggagaaccaatcaacagaagctagaatggtgcctacactacacctgaaagcagcaatgcaatgagctgcaaacttggaagctctcaaagtcaaaggcacttttccatgcaatctaaaagcaaactaaaaaacaatgctttcaacaaaatctcaatgtccaaagccatctttagaattttaaaatacatagcaacttctagcattaatgagagaaatgcaatccccacatgaaaacataaatcgatcaactgctgtttggcacttctttcaaactggcatggttcctacaaattgtgcaagaccttgcatggtctttcgtatttctctcagcctaactagaatcatatctaagaatgtatctatcactgtctaataaaacagggtatagatttcaattttttcattttttgcaaaattctcctagtttgttcaaatttaatgtcaacaacacttcacaaaatccacaacttttgacattaaagcttccaaaaacagattccttcacatcatggtagatgaaataacccaaatagtcagaagcatcacttgtttcccgggtccccgaatatttccattttactgtaat

SEQ ID NO: 205831 - DNA, 1123 bp, Cannabis indica
ctataggcatgaatgagttaaaatgttaactaataagtaatatatatattaattacaagtggatagttccaaaagtatatccacgtttagatttttttttttaaaatataaatgttgaataagagcatggcatggcatggcatctgttataggtgtattttttctcttaaaactttctaagaagccaaaaaagagttgcctccaacgacaaaagtggccagccttaaggggccaaagagaatcctaccaattcatcattatacaaattataatcattattttcttaatttaattagtcttgccttaacattttaatgatgaccaattagaatattacagaggctgcaaaaattattttttatacataaaaaaaaacactaagtaagttttgtcaacgtatataccactcacgtagtactttggtttctatttctttctttctagtacttattattattattttttcccttcgtaaattttttaaataaatatatgactttttccattacactaattaatatattatatgggtgtggtaccaaatatttatataatgaaatcaacaaactgaaataataattaaaaattaaaaaaaaaaatggttttctcaatccaatcattaatctaccccttcaaaacaacatattgcattattttaatgtctgaaattagctgtgagaatcttttgcttggactataaggagagcttaataagcacccctttttcttttcttaacttaattttattaacaatcaaaattgatatgataaaactttcttctcatattttgggctttgtttgaaaaaagaagaaaatatgggaagacaaccttgttgtgacaaaattggcctaaaaagaggtccatggacaattgaagaagatcacaaactcatgaactttattctcaataatggtattcattgttggagaatggtacctaagccttgcaggtatatatatacatacatcttatattaaaattttctctttttataaatttatattaaaattttgtgttatatataggtttgttaagatgtgggaagagttgtagattaagatggattaattatcttagacctgatcttaagagaggaggctttacagaattggaagaaaatc

SEQ ID NO: 205832 - DNA, 1184 bp, Cannabis indica
atgaaagttcagaggtcgtaatttagtacatgtcaaaattcgaggagcatgatttggtagatatcaaagtctggggagcatagtttagtacataaacaatcacttgaaatagtaaaattgaatgaaattagacaaaagtccttaaatccaacaatctcaatagttcagagggcatttttaacgacctaaaaagttcagggggcatgatttggtatatgtcaaagtttagggagcaaaaatcctaattaactaaaaaaaaatatgttatgtgtggttaatttttaaaagtagaaattattggaaacaatttaagaattaacttttttatagtataattaaataataatttgagattattagactttttttttttttacaatttttatgagattttttatgtcatacttatacttttattatgaaagttaagaatatcatatttttaaatttttgtattattttctcgtgaatattttgatggaaaagacttataatgcaaaaacaagacagagcatgtgttgcaatgtgtgatctttaaaatatctgtattcacaaataattttgctataacagtttctttttttgaaaaaaaggcattttatagatagaaaaaaattagactttatggttattacaaaagatagcaaccggtattaaagaaagatttaccatactagaaattaagttagcataagtccacctgaccacattaaccaaaaaattacaagttctaaaaataaacgaaaaattacaacttaacaaaaaagtagagagtcgtttacaatgattcgctagttgtcaatttttttttttgactagaaaatactttttagtaacaagtaattttgttttgactaaaagtaaaaaataccactaaaagtagtatttttggtagtgatacaaacatttttctttgtaattatttataaagttattttgcttttgagaataatttttatttaaagaaatttattatggtctcttattattaaattgctaatacatttgaaaaaaagctaatatgctgatttcttcaacattgtaaatttaaaaataaattaaaagaaaaaaaaaggaagaaaatattgagaaaatatggaatggatgaggtgcggtcgtctaggaaaagttcggcagtaattaagagtctacatccgtcgatttagtcagtttatagtatatat

SEQ ID NO: 205833 - DNA, 761 bp, Cannabis indica
caaaagtgacatttgttgtagtgaaataagaggaaaggtaaatggagtttataaatattatatttgattcaatatgataaatgttaaaaggtgtaatgttcagtattaggtatgatattgttattaatataatttaataattttttaaaaaatattactaactagttataaaatgtttaaaatgttacctataattagtagtagacaatattactattgcttaataacaattaacaatccttaattggtaaaatataattagttggacatgatataaccggaatatgaggagtggtgatttttttggaaggtaatgttagccggcgaaaactacaattcttatatttttgttgaaaagtcaaggaaggcaattgcattgtagatgccggttgatgtaagagcaaagagaaatgctaaccaacaatttataaatgtattataaaaggtgactaaatattgagttatatataatttaatttaataaataatataaaaattgttaactactatcaatatggtgttagatatactaatgcttgttagggatagttagttttctgttacttatttcggtttggtggttagacagctgtcattggtttgttatggttgttagtgtttgttgtactcttatataaacactgttgtattcattttctaaatcaatgaagagttgtctttctctctcttttctttctctgtctttctctgcctttgatctgtttcttcttctttctcttcttgctgtcttcatgcctaag

SEQ ID NO: 205834 - DNA, 516 bp, Cannabis indica
aataaaataaaaaaaaaaatattcatattcaaatatacataaaaaaaaatgctacttacacttataatttacttatgagttattaatttattttatttagttacaaaaaggtattttgtctttgaattaatattttttattcaagtaaatataattaagataatagttttttttatttgacttatactgttagcgatatttggtaacacttttatttttaaattttttaatcacaaaaataaaagtaagaattgtatttttaaaattttgttttcaaaaaataaaattgtgttctataaccacttttattttttaaatttaaaaaacagaaaataaaagtgtattctataattttcatttttattttattttttaattttatttaagttgggttcaagtctgggtctgagattggggttgttgtctgagtctgtgactagggttgggccagaatccgaatcccaatgtctagattggggccaaaatctaaagtattatttaaaaaaaatttaaaag

SEQ ID NO: 205835 - DNA, 846 bp, Cannabis indica
atttctatggttgcatacaatggttacttccaagagtacagcttaacaatcagtagccgggacgagtattcatggagtttggaacgtgaatttaatcttcaaacggtaatctcagaaaaccccattagctcatgaaagtttagacatatcttctctctataaatattgtgacatatttaatctgtaaaactttccactgcttagctgtgtacataggtagaatgaaaagtgggttcaagtagggcttaattaccattatacataactttatgttatattatatagataatctcgttaacttctatagatgaaactgatactgagatttatatgtactgtcatcttgaatgtacactaaattatttataccatagttgtttttaaattgatttataccattacaactatcaatatatttcaaaccgatagttataataaataaaccatggttgtctcaccaattttatgcttgcatgtgaagattgaaacatattcaaatgagtgacgtttctgtgaaattatatttgaaaggaatgttattgcaaatagaaaaaaaggatgtgattgcttgtttgaacggttgaatctttggtagtaattagcattatagttgtaagaaaatattcagtgcatatgtatttttcgtcagtctttaagctgcaatttttgtcaattgagaaggataaactttcattctaacttaaagcattatatgcttccatatatatttataaatatttatatattttgagtgtagataatggtaacacttgtttaaatttacgggtcttactaggttcaaacttcaaccctcttcctttttctcacatctccctcactattgag

SEQ ID NO: 205836 - DNA, 750 bp, Cannabis indica
acttacgaaattcatggttgagcctgctaaactttcaggcagagactcatctgaatccaaagtgttggaggtggaaacaggaggagccatggagaaaccactcggagctgaagaatccgattggatttgaatagcattggaacgacaacgcttaagaacatttcgaagagattccgaatcaatttgcctcttaaactgcttattgggattaaaattctcagagtcatcatcagaaatgagaatagctttgcctttagagttttgtgaatttggctgagttgtaatagaagaagtggtagacatgatggtgctataattcggaggcatgaaagaggatgcaacaggggcaaaaggagtgcgaggagatgacttaacagaggaagtatatggtggataagtggctatcatgggtgaaaaaggtaggtatgaagggaatggaataattgggacattattaatgtgattagtgcaggagtcaggtaatgtagtggaagatatagatgaggaaaaggatggtaagggaacacacaattgtgatggtatgctcgaggaggatgatgtttccctgggagtcatattaggaggcaaaggcagcgatctcttagacagtgtaggaatggctgattcaaaggacttcttagcaagtctagtcattaaaggccatgccccgcccttaaaaaagtctattctatatcgatcgtaacccgctcaggaaagcgaaccatcatagcaggaccataggcaagagat

SEQ ID NO: 205837 - DNA, 762 bp, Cannabis indica
tttaatttttttattccactttgttaataggtggccgaacttgccagattctcgtcccaacccataaattatcttattttttttattctccctcaaatctcatcaatggcagcacggtttctctccaaaaccttcccagctcgaccctcacatctctctacacctctcactgccctttctctctctcttttgcagccccaccgatctcgttccacgctatccggccgccatgacggcctcatcgaggtcgacctgtcgtctcagtcgccggattgtgaatcggaggctttaatgatcaagaagctcgacgacatagtccataggatcatcgtccagagggccacccctgattggcttcctttccttcccggttcctccttttgggtaccgcctcgacgtgacccattcaaattcaccgacttagtcgacaagctcaccgatcgcctcaccgacgaggagtctctcgcgctctcgtctgatcgtggctggccttgcgctcatttattagtcaatcgtaagtgtttttattccaattttgttttcctaatttgtttgtatgattagaaaatgaaaggaagaaaagtaggtttaaacaaatttgttttaaatacatgaatgacaataggagaactaattaatttacgtgaattcctcgaattgttcatttttaatatcctttcgaaattaaaactggtttatttttctcctcaaatttatttttgtagatatttgtatgattatgattgttaagaactaatgtaa

SEQ ID NO: 205838 - DNA, 609 bp, Cannabis indica
aagtattccaagggcacatattgccgttctaaatgccttaaagtgaaaaagtgagttaaaacaaaggtccctacccaacaccgcataatgtcccaaatgacatccatgggagcatctgacttcaatcccaacggatttacatgggtccctgaaatacgatatccagcattgatcacagcagatctgaacatcacagcagaaggagaagtgcactttagagtggcacagaggttgtgcaaactcaagaacaaaggaacatcaggcaactcctgcaaaaagttggcagtataaaaatagtcacatcatgagctatgtgatttgaaaattgcaaatcctatagagatttatcagtaactgtatgaccaattaactaaacatcaacatagtacaaaaactcgatctctaaagataacaatcattaaccaaaagcctcaatcattttattaactgtatgtttggtataggggaaaagaggaaggaaaggaaaatttagagagaaaagtgggaagatggaaaaaaagatgtaagtttggtaagagagaaaatagaatggaaaggaaaagtgaagtggaaaataaaaggtgggtcccagtaaaaaaaatctactcc

SEQ ID NO: 205839 - DNA, 2986 bp, Cannabis indica
aacaccttcagatgtgagtatgatacatctttccttgtccgtactctttctagaatatcaaactttaaaggaactaatggagatctattgatcagataacaagcagtctctaccgctgctccccaaaatatttactaattaataaaagatgaaaaatcgtgttatgctgtttggttcacatgtaacttttatgattatatgtttaatatataaattctgttaaatcctgaacatatcgtgattatagtattgcctacacaatagaaaataatcatgattatacgcttaaaattatttagtctcatgatttattagatttacactaacgtgataatcaacgatgtagtttatttacacttgtataagtggaatgtcctttctaggatattagcaaagtaaacttgtatcagatgtatcaagtatacatcgaactggaccgacattgatagtggaaaattaagatattataaacttatcgttatgtcttttctaagtcgatgtcacttagttgatcttaggtcaattgatttcagtcctgagatgattaggttctagcttaattgtactatatgggttctttgacttgtttgttaccagcttacccataggactagcccatacttatatcttgggaattgaatagtgcaattgagtgggattgttaatcatagatatagaatctatagtttctttaactacttagaaatgaaccaatggttttcttagagcttaactaaaatggtataaatggaatagatcttatttcggtagttatattactttactgagatatcatttataagtagacaagtgttttaaggataaaatacatcgaagcgtaaaatgataaaattttccttattcaatgtaaaccgtttatagaggatcactgatgatttatattgaagcaatagataattcatagcgtatctatatttggtatataaagcgttctatgtaatcaagagtgcaattctaaatctatagtggagtcaggatgaattaacaagttaggaaatttattcataaattttgagaattgtttattgggagcttggttacataggtccatggtccccacattatctgggataatattgccttgtacgcctaactaattgatttataaatcaattagaattctaaagaagattatgtcttgtttatgaatttcactgagaagggcatatttgataagaaaagagttgtaagagtttatttattagttaagacactttgtgggtgtaattaatatatatatttaaatagtaattttgtttgataatcatttataattattaaatagataaaattagcatttgaataattagaacagaaaaaatggtattttttaattttctctctctaggtttcttgcagctgtcgcgagctagtgccatggcaaaaacaagatcacgggttcaaggaaaactgaaagtctctacgaaaaagaagaaaaaaggccctaattctacaactgatgtgaaaaacactaaatctacggaggaaattcttggtgttgatcctcttgagttcacagatgatgatggagcttctgagcatggtgaggcgtctagcttgcaagatgtgctccaggaacctctgtcaccaaagtcctcactggtaatgttttagcaacaagaagctattaggtttgattttaatttctttctggtagctaatcaaaattgctctaatttgttgtcaaaaagcctccaaactattcctccaattcttagatatggaaatgtggtgaggaactgggaatcttcttttagaaaatcaaaaaaggatagtaaaatcaaaatcaccatggaggatattgaagagaaaatcaaattttggaattcgtctttagtgtgctatgttcttggggctaatccccctctctctatgctcgaaggctttgtaagatgtttatggaaagagaaggtggataaagtaggtatgatgtcctatggaatcttcttgatttgattcaacaatattgaggatagagatgaaatactaaatggtggattcatcttcttcaacaaaagaccagtgatcatgaagccttgggatccaaatatcgatttcaagaaggaagacactcgtacttctccaatttaggttcagttggatgatttagagctaaaatattggggtcaaaagtctttatttaagattattagccaggttagagaaccactaatggtaaatgatgtaactaagggcagaggtaaactcaactatctgagagttcttattgaagtgtcaattcaacaagaatttcaagacatcattcacttcgaagatgagtttggctctaatgtttttgtagctgtaacttacgaatggaaacccattatttgtagtcattacaaatgaatgggacattttgctagtgactgtcgaaggaaagaaggaaagcagtaagaataggtaatctaaaaagacaataggaagacagaggagactaagacagggaaacaagatactgatgagtttcagttagaataaagctacactgaatggtaccgctatatctaattcctattatgttttagatgattctaatgcttcaacaagtggtattacaggagagattcaaaatgaaggaaaccagaaccagctggtggccatgttggataatacaagaggggagggagagcctcctctcttgaatggataaaatactaagctggaacgtccgagggatcaatagccatcaaaaacaagatagagtgagacattttatagcaaagcagaatgttggcttagttggtcttttcaagacgagggttaaggcttcgaagcttggagccttatatgtgcatatgttttctgggtggtgtttcacttcaaatatttttggcacaaaggaggaaggattatagtggcatggaatcctttaagattcaatgtaagtattttgagttgttccagccaacatatacacttgtttggttactactgttaataataagtatagtttcttggctac

SEQ ID NO: 205840 - DNA, 1385 bp, Cannabis indica
gtaccttccaggtaaatcataatatactaggctaattattggccaagtgtcttcttaagtacatttacttagactaatggtgatcctaagttgtgcactagactataatagattcactaacaagtctcatacacagttcccaaaggggaccatgcataagactatagttttatatgcctccaaggccaccccgagaccctagtcgaggtcaacaaaggataaaaagctggctcccacttggaactttggccttggccgactagggttcccaagccttagaggttggccaggtcccctagcctagcctaaggccggccaggaacctcacttctaggcatagcctggccagcctataggatgccacccttggccggccaaaccccttggtggcaacccttggctgcctaggtcttaaacaagacctccttggccggccaggatgtgtacgagattcgagcatatgatttttcaagagctcaatcacattcttcttgttctttgtcttaaaatcacattttgttaatcctaaaatttacagatcaaaatactgaaaggattacaatctaacatgggaatcaaaagacattcaaagtaaagaacaaggttcatgcattcatggaaaaatcaactaaatgaaatgaatggcacgaatagaaatcttacccacaacaagaaatcgttgatgaagatgatgggaagcttcgatcatcaaaacgacgcaaaaaatcctaagagaatgatgctatgtgggtacatccctctagagagatggaggagcttctttaaaagttacattctagtgagagagtgaaaattcaaaaagttaagagagttttcccccaaaaagatttaaatagtttttgtgggaccactccttcacttgccacacatattcagtaaagagacatgtaaaagcagttagttatgtaacaaatgagctcagacgaccaagaacaggtatttcaaagagctaaaactacaacaacatctattcaataaatgctacatcaaatccaacatagctcgtaagtccctatatgcacagacgtttgcatatggacttggtgggaaaatattgttccaattttttctcagctgatgtggcatgctaatgtggaaaatattagtgtcatgtgataatataactcaccaacaaggaggtcaagtcagtaccttagccaacgagggtcccagcactcaaacaggattataagtgatagaccagccaaccttaagggagctagctagccctatggccgaccagcttctgaacaacacaaggctggctagcttgcttcctgtaagtgcctaactagccaggattagaccttgcaggattttggtatgcagcccagtacggggataagatgaaaaatacctctttt

SEQ ID NO: 205841 - DNA, 890 bp, Cannabis indica
ctatgctttacattcatttgtacatgtttaacacatctttcaacagtttgcgttttgttattccaaaaacaattatttctattaatccaaatttgataaaccaagcttgctattaccccagcataaactttctttttaaattgagaaagtttaactcgagatatccacctgattgtcgcccttaaggaacaagcagtcccttaccatcccagccatttttttgatttcatcaagacacctactactaaaaacacaatagaaaaagatatgttcaatagtttcaagagcagctccacataacaagcaagatccatcttgacagatcttaaactttaagagccggttcctagtttaaagccgatcttgaatagccaaccacaatatgaagttatgttttggtatgttgtatctattctaaacttctcaatgctaataaactctatttttatcatcacaaagttggttatatgtttggtggatactatacttactaaagaatgatgcaagtggagaaggtgtttataattttctttaatcttcacaatttgtctcaaataccaactcccccttatggttgcttgatagttcaccaatttgtgtctcttaaataaatactatgaactcatttcactcacaagttgtcttattttgtcgcaactgcccaaatttatttcccaagaacgacttcattccataacaatgtgttttggaaccccaagctcccacctgttttcgatttacaaagctgagaccaagagacataacccagattattttgtatcagctgttcattttcataagaaggctctacaaatggcatttatcttttttaacactatttttggaagaaccattatctgcgtccaagatgagtgtgtagcaataaacac

SEQ ID NO: 205842 - DNA, 748 bp, Cannabis indica
acttttaaagtctttaatttttttttttttcaaactttgacatgtacgaaaatatcacccctatacctacctattagtaaaattaaatagaattggacaaaaatccttaaattaaaaaatttcaatagttttgaagaaattttcaacaaactaataagttcgaaaagacataatacatgtcaaatttcggtggaaaagaatctcaattagcgaaaaataaataataatgaacatactacatagaaagaagaaggaatcctcaaaaaataaccaatacaagattcacatacacaaaaaagccatagaataatgatcattgttagcatagttgacaatcaataaagacaattaatccaatgaccaataaatccaacaaaatattggctttttgttttcttgggcagttttcttgtagaaataaaagaactaaattaaaaaaaaaaaaaaaaacaaataaataattattttattgtaatgctcgtccttttattccatgcacattatattgtcctactatatatatgctgcccaataattattgtttttttaatgattaatcaaatataaatacaataaataatcaaatccattatcttaaatatactagagaaaatattttatttaaaaaaaacttctaatttaatataaaaggatcaagtttcaatttggaataattataaataaaaataacatttaaattgtacattcttaaatctcgtatattcatagtttataaatttatttatgt

SEQ ID NO: 205843 - DNA, 810 bp, Cannabis indica
taaatattttgttattaaaaacatatatcatgatttgtgttgttgtaattaataggcttggaccctagacaagatattatattgatgaagcaaattgaatatgaagatgggtggttgaagcacaatggaccctaggtagtgccatagaagctttctcatcaaaatcattaatagctaaactttgaccacgcatggtcccccaaaataaatcataaataaataatgttggtaagatatgtggatgtatctattttatattaaatgtgactatttaatagaaaatattagtttaacttattttttttggttaaaattaacaaaatatctaattaacactgttaagtcaattaataaattattattatttttttaaatatttaattttaatttaaaagtattaacaaaattaataattatttttttatataaattataatttaaattgaattagacgttaattcaattgcatattactaatacttagtaaatatatgtatgagtattgctattagatatcagtagtacccaacacttttcatacgccgtggtgtcctactattagtgtaacgtccccgcttcaagcttttattgggtccttacacccacagaataatggcttcaagtggaaacgttacattagacaagagaaaatagtggatataaagtggtttgaatctttgtaaaggggagttcaacaagctattggcagtcctattataaggggctgtttaggatgtaaaatttttatttgtttgtgaaaatacaatataatctgtttcatcaaaaaaaaaaaacaaaaaaaaaaaaact

SEQ ID NO: 205844 - DNA, 2203 bp, Cannabis indica
ttataattataatgttgttttttttttagtttttttttaatatgaggccatatggggacgcgcattgtgtgtatgcaaaagtgtatacccacacgctatgcgcgtcactaaagccacatgttcacgtggctttagtgacacgcatagcttgtgggtacaaacttttgcatactcgcgtagctcgtctctatagtctatgttttttttattgtataaaattataaattttgggttttagtatttagtgaccctctatatttttagtgactctttcgggtgataaacaccaaatatttagagtctaattgtgtgtgtaactaaaaattacttctaactctaatgtgacccacacttttatgtgggttactatatagtgtcactaaaagcctaaattgtagtagtgaaagggaaggtattgattatgaagatacattctcccttgtagttatgcttaagtctatccgcacactcttgtccatagtagccatctatgattatgaaatctgacaaatggacatcaaaacggcttttctgaatgataaacttgacaaaactatatatatatggaataacccaaagggtataaaaagaaggatcaagggaaaaatccataaatggattaaaaaaggacatcaagatcttagaccataacctttgataaaattataaaaacaatgtggatttggaaaaaaaagttagacaaatcatgtgtttataaattacatcaaagagaaagttgcaattttttttagttctatgcattgatgatatcctactcattgggaataatgtaggaacattatcaaatgtaaagaaatggttggctaacaaattctaaatgaaatatttgggagaatcgagttatgttctgggcattaaaatcctaagagataggaaaaataagctcttggaactttcctaagaaaattatattgataaagtacttgaaagattctctatgcaaaattctaagaaaggctagtttctgatcagacatggaatttgccaagatcagtgtcctaattaagacacctcaagagcaagaggacatgagaaagttccctatgcatcaactgtagggagcctaatttatattctgttatgtactagaactgacatatgttatgcaatagtcattgttagttattagtcatatctaggtttggaacactggattgtggtgaaacacattctcaagtatattaggagaacgagagactatatgctagtacattcaggtagtgaccttgaatctactaagtacattgattctaatttttaatcagagaaagatagtagaaattctacttctggattagtgttcactcttggtggtggtgcagttgtctcggggagcattaatcaatccaacatagctgattcatctatggaagctaaatacatagcagctaaatacatggcagcttgtgaagcagctaaagaggtgtagtttgattaaaaaagttctacacagatttagaagttgttccgaaaatagataatccacttgttatttactgtgacaacagtggagcagtggctaattcaaaagaaccaagaagccacaagagaagattatacatagagcgtaaataccatatggtcaaagaaattgtacatagaggagatgtgtccatattctgaaaattttattaaaacacaacttgacagatctgtttacgaagatgcttccagcaaagcaattcgagggtcatgtaagtaatatgggattgaagcaaatgcctcacttgctttaaccactagtaggagattgttaggagtgtgtcctagctaaaaacatgtaaagagatttattattttaattgaataaataaatacaatgatttattattatattactattatatttgaattattaaaattattgattgaataatttatataaatatcataaaatttcatacttattattgagaatttgtattagtacgagagaattaagatcgcatgaatgaatgaataaaatagtgaacaactaattaaagttttaaaattctttaattagaaatgtaagtgtggtttaaacaaggagattggcaaggagcggttgttgaaacggattgtctatctgtggttcaagcaattaggagtgatcttcctttattgtcatattttgggagtattgtttctgattgtaaaatgttcttagaacaattgcatggtgtttctgttatttttatta

SEQ ID NO: 205845 - DNA, 811 bp, Cannabis indica
aattttaattttaattttaaagataaaaatacgttttctgattatttttgttttttaattttaaaaatagaaaacaacagtgtattatgtaaattttatttttatttttatatattaattttatttaaattaggttcggggcccgggtctaggtccgaggttagggccagggtcagtccagattttaaggtctagattatattgattaaaaaaaattgtaaataaatttagaaagtaatttttttaaaaaaaaaaaactaattcttaattaaaaaattaaaaagtaaaaacaattttaaatattttttaatttaagaaataaaaaaaaaactaattaaaaaaatattacaaatgtacccttattttaatcaagtatggtatatggaatagaaataacaacgacttaattatatgatcttctctctctcttttttttttaatttcattaaatcaaatcttccaaaaccaagaaagtaattatagtaggtaaatcaacactatcaagagtacggtcagccttcataagagaagatcgcgccaatgcatgcgcaaccttattagcagaccgctttataaaattaaaagagacattatcaacattggcaaacaaagccttacaatctgaaattatatggccataaagagagaccatacttttattcctctgtaaatccaaaacaactctaagaccatcagactctacaatcacacttgaccatccgttacctttaatccaactcaaagcctcttttattccaatggcttcaacttcgtgagattgtaatgcaccaaccttcttcaatgccttggc

SEQ ID NO: 205846 - DNA, 642 bp, Cannabis indica
ccccaagactaattggaaacagtcctcccaagattggatcaaattaaattgtgatgttaagattaaaggggagcatatgtgcattgcagttgttgctcgcaaccacctgagcaaggtggtgtgggtggttctagccaaactagagttttttgatgctctttgtggtgaagctgctgcggtttgcctgacgcttgaggtagataaggacaaagatcatcgatttatcggggtagaaagcgattcaaagatagtgttccatacgctcaatggcctcgaaccccgatggaaaattgataactatgctttattttgtaaaagaatcgttacttcttttattttctgcttattttgttttacggctagaacttgtaactttttggcacataacgtggctaaatagacttttacccataatcacaatggtcatattaatgttgctactatttctatgaacatttgttataatgaccaagagatctaaatcttttattatataaatgaacgtttcctttaaaaaaaaaaaaaaaaaaaccaaaacttaattttgtgtccaaacgggttcaaatttcagttattaattttttatattgtgtcaaattagactcccttatgtacactcatgtaggtatgttacatttacat

SEQ ID NO: 205847 - DNA, 774 bp, Cannabis indica
ttgatggggatcaagagacacttaacctccaacaccaacgatgggagccgattgtagatgatgctttagctgaggaagtgtgtattttgcctcgagtcgtgttcttgtatctgttcttaatattttcattagcttaattattctgtaatgttattggggtgttatgtattaacagggtaaaaagactgatcttcctggaccagactcttcatctcaaatgtaagtttttaacttgtatgctttaccaatcaattgtaaacatctttatgtatggtcaaatcatagaaaagaaaaagaatgagagtgtggactaccttttctttgatactaaatagtaaatagtttgtatttccttatgctattctttgatatttatatttcatctgttctacatattcagcaattcactagaggcagtaacacctgttcaagtaaaaccagatcaggctgatgatttctctgatgaagggttggattgctttactcgtcttttcaattctttgatattgttttcatggttttaactttcatacttgagctgttgagcaccttagatggtagctacagagttttgatggtctgtacattgtgacccttttgaactttttcttgctgattctatgtgttcagaattccaaagggaagactgagaagaacaaagtcggttaatagaaaacaagcgaaaagtctcagaccgagcaaaggctgtttctccttcaggaaggttggttacatgtatttttttttctcatacactcaaccaccatggttgtg

SEQ ID NO: 205848 - DNA, 496 bp, Cannabis indica
tttactgaaattaatatatctcaacttgatcctcaaaagctccgtgctcttattaaattactctaataaatttttctactatatctttcaaaatacatgatcaaaacctttatgacatacatcaacttttctatttttctttccacattatttaaatataatatttaatttttttatttaattaaaataataataaataagctataaaaaaaagaaataaaatgattattttgttaaaagaatcaaagagaaagtaataaaataaattttttcaaaattgctttattctatctctacatatagctaaagatttaaagggtcgtttaaaatgaagaagcatttgaaagagttgattgatggccattttacgcttccaaagttttctcttcatagttttcctccaccaaaagtaatgtaaataaataggatgatcacacaaacttgatttatttatgtaataaattatataagtggaagcattcatagttaaagataa

SEQ ID NO: 205849 - DNA, 707 bp, Cannabis indica
atctaattccgctccattcatcacatataaattagaaaaactaaaatatgattaccaggataagatataccacccaacaacacacaaacaaaactgaacatattaactacattaaatagagcataatagagcataatcattgtctattccaccataatcgaaatggcttagtaaataaaccgtcattacgatatctaaaagaaattctaactgtataattagcatctaccacggtccatagttgaaacaatgaaattaatttaaactcgaattatttaaagaacaaagaacaagaactaacccataactcactagaaagaaaaccaaatacaaccccccacaaaaaagaaaaaagtactaaaatcaagtatcaaagacgagctaacagttcaacacatctaaacaagctcagaattttaattattattattatgtaagtgaaaaagcataatgcaaatactaaacgaggatccaaattcaccaaacagataaagtcaaacccagttgaacacaattaggaagcaaatattttctgaaagagcaaccaaccttgaccaatctgggatcgaagaccacgtcggccttattctgtagcaaagcgacagaagcccttaaaactccattaacgctcgtgagagctgcttcaaccgaatttgagcaagcagcgcaggtcataccggtaacaccaacctggattcgcttcatcg

SEQ ID NO: 205850 - DNA, 578 bp, Cannabis indica
ggtctgagttcaggtcctaagtcccaggaggtttgggtttgaggtttgaatcttaaattaatttttttaaaaatatattgaaatcggattgaattatatcatatctgatccaaaataaaaattaggcggggtggagcagaattaatccgagattcagtaagtatctgaatgttttggatgagaaataatttgtcacattggaaccccaacccgctccaactataaatctttttgacatctctaaatataatattactattagtgtaactcaatatatatcaagtcgtttatagaaaatcactaaatattataaagccacacttcatcgtactgttaaataccatgaatacttcataataatattcttctatattatataagctaaggctaacgtgttagtctttttctttttcattctttttttttaaagctaacgtgttagtcatgcatgcatatacaatattatatttatgttgctctaaattaacgtgtcaacgtgtgcatgcatgcatggattagtttttactacgtgtgatcaaattaaagcatccaaggattgtcccaatatatggtcttta

SEQ ID NO: 205851 - DNA, 662 bp, Cannabis indica
agaagatcaagaaaacaaaacaacagtaacaatgtggaaactacttcgatgtgatttccatattctcttgtgttctcataatttaatttatttatgttcttttatttagatgtattttaatattgtattgcaatctcatctatcttctccttttaaatgcttgttatggatttttcaacgcacaagtatacatatcgtttataagtaatagacgactcacaagagtgaggtcgatcccacaagaactgtagttaattattaaatgcttcaactgagctcaaagtaaactgtcgttttacttctaacatagtaactataaatttctatatctatgactaacactcccacttagttatgctaccgaattctcaagatgtaagtatggactagactgtaaggtaaattggtaacgaatgaacaagtcaaagaactcgaataacacaattagcttaatcatgtcaggatttaaattcaattgatatacaggaaactaagtgatttgactaagaatatatataactgttataattacaacacattatggatctttggattgccacatcatcaacttccctaactaactttgttagcttcctaacaacctaaaccaatagtaactcttacactggtttagagttgttttagattaagatcacttagaa

SEQ ID NO: 205852 - DNA, 857 bp, Cannabis indica
attattttataaggtgaaagttaaggtttattttacttgcggataaaaaatggtagtacatatagatatatagtcccctgtaaattaaaataattttcgagttttcttttatatatttatttattaatttactttttaaatgatattatttttcgagctttcggtaactcataataggattttaataatctgatgaaatgctactttgagcatgattaaatctaattttaaaaaaaaaactaaaaatattaattttctaagtttcaattaattactaatgtaatttaaaaaaactaataattgcacgcaataaaatatttaaattttattttcgtattatatataaattattttaaaaaaaattaaaatttacaaatgatgttaattaataattataacatatgcacgataaaaaatatacactaaaaacttttaaatatataaaaatctaccgaaacacatgtttaggagtgtagtataatagactcaccctatattattaattttgtcaatatctttttaatatacatgttatggatagtcaatgataacttaattaaggtcactaaaataattattaatagagaaataaggtcctagttgggacgtattaattaagttgactaatttctttttcacgcaacgttaatgtatttatatgttattttcacgtgtaattgcgtgtacatatattttcattttatataagatatataaattaataaaactaacatttgtataaattatattaaaacgatgatatatttatttagtgttaatttgaatcttaattttaacatactagagtatgaaaaaaaaaattaaactaattttttttaattatattatactaaact

SEQ ID NO: 205853 - DNA, 954 bp, Cannabis indica
tactcgttgatatatacgctgtcgttctgctttagttactcaaaacaagtattcaaaattcagggcacacttcctaatggacaacaagtagctgtgaagagactatcaaaaggttctggacaaggtgcaatcgaatttaagaatgaagttgtagtgttagctaagcttgaacacagaaaccttgtaagattgttgggattttgcttggaaggacaagagaagttgcttgtttatgaatttcttcccaataaaagccttgactcttttttatttggtatgtactgtcttattgttagttacaaattattttcattcttactcgcattgctaggtgcttacacattttttgagtaacctttcaattcagacgctgaaagacaagaagagttaacgtgggcaatacgttacaagattatagcaggaattgctcgaggcattctatatctccacgaggattctcaacttagaattatacatcgtgatctcaaagctagtaatattttattagatgcggatatgaatgccaagatttctgactttggaatggcaagaatgtttgatgttgatcaaactcgagcaaatacaaatagaattgttggtacatagtaagtttttcaacttgttgctctcttatataaatttagctataacaaactatatacaaatacgatacatattatgcatgccatattggtggcgcagtggttatatgtctccagagtatgcaatgcacggacaattctctatcagatctgatgtgtatagttttggtgtattgatcctagagattattagtggcaaaaagaatagtagtttctatcaaaccgactatgctgaggacctcttgagctacgtgagtatgattaatattatatgtaattaagaattttcttttgataattatgatcaaacacgattattattcatgtgaaattacaggcttggaaactttgg

SEQ ID NO: 205854 - DNA, 1005 bp, Cannabis indica
attgtcaacagaattttattcaacccacacactaaaattaaataaagaaaaaaataatataaactataaaaataattaaaaataaataaataaataactaaataactaaggaaaaaaacttgatagacacgacagttaatctcccccaccccgcacacttaatattagcattgtcctcaaagctcaatcaaataaaatcaatgaaaaataaaaagaaaaaggtaagaaaaactcctataagtttgctttatttaacgtcgttagctcgactacatgttgtggtcattcttccacatacactgggtcaacaagatggattatggcagcttggtcctcaactgttgactgataataatatggctttaatttctaaccattcaccttgaaaacctttcctctacttggactcaaaacctccactacagcatgagaaaaaaccttcttgactacaaatgggcctatcaaccgtgacttcaacttccttgaaaagagtttgagtcgagaatgatacatcaaaactttctgaacttctacaacattcttttgatgaatgttcttgtcatgaaaagccttggtcttctctttgtaaattctcaagctttcataggcttcattacgaatctcttccagttcatgcaattcaagcatacataagtttggactcacagttttccatacaccaatcaatatgatgacatacagatatgtgtcttgttaagaataagtttgacttctcagttagagacttctacttgtccattgttgataaggtaaaaccaccttgtgagtgacattgtaacaacaaaatagtggttcaatgctcttattgtaaaaatgtgggcccctatcactaatgatacatttttgtgtaccaaagcgaacaaagatgttggagcgaatgaaatccaccaccatttctgaattttcgattctggctgcaatggcttctacccatttagacacataatctactgccaaaagaatgtactcaaagccaaatgaaga

SEQ ID NO: 205855 - DNA, 1163 bp, Cannabis indica
tattttaccttatttgaggcacgctatttacctaaataaggtgtgtcgtttaccttaatttaagatagtgttttacctttttaatggtaaactaggttttgttttaccttatttgaggcatggtatttatctaaataaggtgtgtcgtttaccttatttacaacaggaagtttgcataataaggtgtgtcgtttagacaaggtgtttacgtaaataagacacatcgtttaccttattttaaggtagcgatttacttttttaatgataaattatgtattattctaccttacaatgtttacctaaataatgtgtgtcgtttaccttattttaagacagtgtgtttacctaaataagatatgtcagtggtttatcttttttaatgataaataatgttttattttaccttatttgaggcacgtgtttacctaaataatgcgtgtcgtttaccttatttaaagaatgaagattgcataataagacatgttatttatcttattttaaggttgggtgtttacataaataaggtgtgtcgttcatcttactttaagactgaatgtttacataaataaagcgtgtcatttaccttattttaaggtagtagtttaattttttaatgataaattatatttttgtttaccttatttgaggcacagtgtttacctaaataaggtgtgttctttaccttatttaaggtatgtcgtttaccttactttaacgcagggtgtttacctaaataaaatatgttgtttaccttattcttaggtagtaatttacttttttaatgataaattatattttgttttaccttatttgaggcacgatatttacttaaataagctgtgtagtttatcttatttaatgcaggaagcttacttaataaagtatgtcgtttaccatattttaaggtagcaatttacatttttcaagataaattatattttattttatcttatttatggcacagagtttacttaaataacacatgtcgtttacattatttaaggtaataaattacccttataatgataaattatatttttctttactttatttgaggcacgatgtttatcatttactttatttaaggtaatagtttaattttattatgattttggttcactttattaaaggcatggtgtttacccaaataaggtgtgtcgctt

SEQ ID NO: 205856 - DNA, 990 bp, Cannabis indica
gagagagagaaagagagagatgggaagtttgggtgtgtgtagttttttatttttttaagggtaaaattggaacaaaaatttacttgtaacatgtttcgcatgatgcaaaaaggggtagcatagtttaagtacctaaacccaatttaagcatagattgtcaaattttctttttgtgaattaccttgagatattatttttatatttattttaatttagtggtaatgaatgagaataattttccaatttattttgtttgtagttattgtggtatgaactttttttgtttctcattattgtcatatgaaaattgggcaaaatgaaaataaatatttttataccagatgtattttattttttgtacatttatataaattttgtatatagaaaagaactatttcacttatcaaccgttatttaaagtaatttttctcaataattataaattgtcatttaaagtgattttttccgtctattactgtatggcgaacgccttcctcaacattataaactatgtgatttttctcgacagttgttaactatcatttaaagttactttttccaacaattataacccatcatttaaagtttcgtatttatgacacccacatagctaacggttttaggaactggcgaaaatagtataaaaaatagttttaaactaatggaaaagactaattttgtagtagtaggagctgcactgtcaatggtttacatatccggtgatgattatcggctgcagttagtcctacacttacctgaaaaagctcaatgtaaagtcaatagtgaagacaatcaggtgattgagttatcacagttggtattgggtttcattattgcagttgattgtatgtaaaaataaataaataaatttgcagcagcaatccaatgaaaataagactttttaaacgaaaaaaaaatgtcatcggtaattccataaaaacttaaaacactttggtaccaaaataactctattttcatgcttcataatgt

SEQ ID NO: 205857 - DNA, 1026 bp, Cannabis indica
catatatatttatatgtataatcttatgcctaaaatttgatcatgatcgaaactttggcgacatatacgaaagatttgtcctcgttattagtggcttaataagccaatatttctcttcttcatgtaatttatttgtagtaattttggttatatttctacatgtacagatgggcaaagctttggatatagatgttggagagaatcccacctaattaaatctgactggtttagctgcatatatatatatatggacacatgtgtgtatatatcacattccttaggcagcaatgaaagttaggtgggtacttcctttgtctcattgactgacattaataggtttataattaatacaattatctacccaaattgcttcctacactttcactaaattattaattgaactgttgtacacgtacgtgtaattaataagtctctcagaatataggaccctcctcatcagttccttaataaaaaatatacataactttatagtcggcaactacaatatgactaaagcctcatatattacattttgttacaattaaaaaagctttgtaaataaaataattgttacatccaatgatgataagacaatacttttttaaactgtgggtcatgttttaatcatatattgaaaaataattaatcatcattattagtgtagtagtttgcatacttaatttgtgcatcatcaactcaaaaaatatttagttcatatatataacttattatgctcatatatatttttagtggcattgtcactaaaatcgttcaaattttagtcacatttttaaggattatatatatatcttgattagtttttgtggacacattattataattaatgatgattctttaaatattagtatggaagaaagtaagcatgtatatatatgataagatatatgtatggaccatttttgttttattatttatttaaataattacctacgagtttagaacattccaaggagagagcttagataactaagttatactaataatatactttgcaaaaaaaaaaaa

SEQ ID NO: 205858 - DNA, 1149 bp, Cannabis indica
aataaaaataaataataataattgctctagtatattatatttcaaagatatgggttatggttttttcttaattattaagaaaaaatatttagtttttttagtattattattggacactagtggtatccagtactttttatatgtgacgtcctataatcagttacttagtgatattccttaaaacctatttttttaaattatatggaagctaatacttaattacactaataataataggatactgaatagagtacaagacaccaataatatttttttttaacaattctcttatttataattattaatttaggtatattattcgttggacattctcttatttataattattaagtttgtggtgccccaccctaaaccaataataccctttttccattttccaatatagactatagagcactttcatgcttgccatacatgtttgaaagacattgtactaacaatttccaaagcttatcaactaattaattacattgctagttacttaattttggatggtagccaagataaaataaacagcattgttataagataccaatgatgtctagcatcttcttgacatgttatgttacgattggctagcgatactccttaaaaattattatattaaattacatgggactcgatacttagttggaccaataacgatactgacacataaaatgatgctagacaccactaatactctttagcatttctctaaaacaaactagcaattcataatattatttatttctatgtggggaatattatgttaacattttttattattacaaatacgaaaccatcttatatttaacacgtaaattagttataatataattttataattattgttttcatgagaattgttgcaaattttgtataaacttttttaaaaataaaaataatttattgtgctaaaaatataattttccataaaaaatttaaattgtcttattggtactgtaaataaatttagacttgtttttacagcaaaaatatattatcaccagagctctgttataagattaaaaaaaaaagtaatgtcataacttatttacttgtctttacgagtaaaaaaggattagcttatcacatattccttgtatatatgcatgaggagtggtaattacaattttctattacaat

SEQ ID NO: 205859 - DNA, 1403 bp, Cannabis indica
agcacgagtacgcaaggacatgcatcgctctacaatggtagtggtggcggggagacaactatgacattgacaaggaaaaggcgggcagtggacccgtagcctggaatgtgcacgctgaacttttacgggcgaaaggcatatcccgaactgatgcacactggtggaaggctcatacccttcgcagaagcaaagggtcccaacatttataatggagagagtcactaagttaccaacatctctttcgtggactgttcctaggaagacatctctcacgaggacctattctgcgaggttcatgtcgctatctttttgacgcacttaggtggcttaatgactcctcagctttctgtaattagtatccacatgtcgtcttggcaaaaatgcagataacatttactcccaagcttctggaacataccatggcacaggagcttgcaacatcttctctttagagatttttcgcacacgtggcatttatgatgagtcctttaatacattgtatcatcagccgtcaaaccaaagtgtcattgtgtggaggcatgatttctcctgttttcttgttagagtgttaaatgctaacttttggattttcgcacgcgtgctcggcgcgtgtctctgggaagctccaaatggtagtgattggacttaggcagtcttcttatttgttgggtgttctttgcgatgcatccaatgatgggagccatccatttggaggttaggtacccttttagcttctcacatccaatcatcagacgcctcctagggcgaattgaagcgtcggcttcttatgaaatttgccccttccaggcatcccataaatacctttagcggccattccatatttcactcttcttgcctgtcaagttaaagcccttgagtttccttcttcccattcgcattttattgctattattgttggacaatgatcctcccattgtgtatggtacatcaaaatcaccaattccaacctcctctcgtcaactggtaagttcttcgtttactcatcgttaagagtttttgagggaatcatgaaggttcacccgcttctgggacacttgttttagtagtgtaactcttgggaattttggggttagaccatgacccttttttattttaccctcggaatggggggaatgggggacctccactaacctccctactcccaaatgaggctgggccaaccaagatctctccccttgaccctgccagaaacaccttcggtggggttcaccttccctaggagggcagttccttttgatccactcgatatgtagagtgaaaaggaagcgaacaaagccctaaaaaggcgtctggaggtcgagaggctccaagttcgccgtcaggcggccctaatgtcggtggtccacaaggctgagatagtagaatatgtccacacggtccct

SEQ ID NO: 205860 - DNA, 1613 bp, Cannabis indica
aaaaaataaaaaaaaaaaaagttaaatgatggatacgtaaaaaatggaaatctatatttatcacattgatttttctttatattatgaattactttttctatgggtttttactacttaatattacagtatataaccttccaaaacagttctaataaaactaaaaaaactttctaaattaatattatataatttcggcaccaattaaataattatgataatagtttttgtagctagtatttataccgaatttttttttttaataattaatgtttataatagaaagttttttaataattatatacaatgtaaaatcattaatcatctcaaaattacacgtaagtaaatgtaattatattaccagataaatatgctaaattgtttaattacactaaataaattgattcattattaattgggaagaaaagaaaagaggcatagaaatagaatcgaaatgagattatattataaagagtaattactattttttatgatactactagataattatcataattaagcaaaagtagttttcaatatcatattaaagaaaatatggttatttattacatggtagaatatatgaacaaaaaaaaagccaaattaagtaaaagctaattagacataattaaattccaaaaaagcataatttgatcaccatataaggccaaatcccataatggaatcaaggcttaaaatgatgataataccaactataacaacaactattaggtggcgtttggttgagagaaatataaatataaaaataaaaatagggatgagaataaaaatataagaatggaatgaaataaaatttaaaatacatacaaaaaattgataatttcaaatcgtccattggaattgtctaataatcattctactaaaataatggaaaagtctatcagaaattccaattataattttaaatgtaatcaaacaaaaaaatggaaagaaaattgtttccttttcattctattctattttattacttccaaccaaacgctatcttagcatttgaacaaatcttctattaactttgtcaatatatctttgtgaattgaattgtttataattacaaaataaaagacaaattaagattgcattatttaattgaatcttttataaaaaaaaaacactatcccataaaatgtgaataaattaattactcaattgaaaaagatttggttgattgaaaaaataattaaaaacaatatgtatagtatttaatacacgacagcattaaatacaaaattactctctaggctctcaatattctatttatttcttttttatatacattttgatttatttatatattgctttcttgtattactaactcatgatagaaaaattaacctttgatcgtagaggaagaattgtgagaataatttgaggtattactttttttttgtcttcttatttatgtagatcaatattatgtatgatcatactttaatctcttaaattttgcattatttatatttatatttttctaatttatattattataagcctctcttcacacattttagggcatgacatttcctttgcacaaaaaatgcatgatacccaaattttagcttaagtgattatatattaatttagattatgataca

SEQ ID NO: 205861 - DNA, 1359 bp, Cannabis indica
aattcactctcaactaccttaataattattttcattcgtctaagtttgcaattattttctttctttatatctcttctcagtatgactatatcacctaacatatgactattattaggtatcatcatacttgtgctcatcaagggcataataatggtatccaactcttgaacgaatttatcaaattttgattttgataaataaaataaaataaataaataatagtttgaaattttcccataatcattccataataggagaagattattattatttttttccttcattttaaccgtttttatcttttatatcaaggaagagagatttcaaacttgagacttccttattacaaaaaaaaaagtgtgaaacaagacgctatggttatggctatggccatctcactttaacatcttttaagttaacaaaaagaatataaaaataaaaataacgcaaaaatcactaaataatattaacgattatactaatattatttcatttataaggtggtccatcactattatttagtgcaacatcttttgttaattttggaaaaaaaaaaacaaaaacaaaaaattaattgcctcaaaagttatttattagtatgaaaaattagacttaagtttcttataattttattaaaaatgctactaagatcatcaagaatacgttcagatttacgcaactcagaaaagaaatcaactctagaatcattagagttatggagactagcaacccaatcttgagctttagagatattcttcctcatattaccatatttcttaacatgccacgcttggaggtgagtagaacattgttgaatattggtcacaacttgtcccaaattttggtgagtagatgaagtccaatgacaaacaacaatatcttgacattcaggatcatttaaccacaagatctcatatttaaaacgagatttttgttttggtgtggagtgaacataattcggctggtgagaaacaacaactttgagagccctatgatcagatgaatagtcaaggtgatgtaaagtagtataggggaaaacttgctgccagtgagaattagcaaaacaatagtccaaacattctttcatatgagcatcatcaggggacttattagtccaagtaaaaatatcatcatcatggtcaagccgaaccagatgtccatagttgatggcagagtaaaaattctctataagttcattatctcacctccaattttaagggcatgagagaagatcttattgaaatccccaagtgttaaccaaggatcctggggagcaacatcaactagccttcttaagacttttcaagtttgttttcaaaagtgagaagcaggggcaccataaaaactaaaaaaactaag

SEQ ID NO: 205862 - DNA, 658 bp, Cannabis indica
ttttgagttaattaaattaaattgattcaatataattaaatttatttgtagtttgttcccatgatataaccaaaaaattacttataatttaacacaagtgtccaacaattaataaaaaaaatcaaatatcaaaagcaaaaaaggaagcgatgtcattcatagaatgtgtgcaaggttctagtggggagattctgatgtgaaaaagaagatgtattagtgtacttgagaagttgagatcatctttacaagcataaaaatgatgaaggtatgtgctttcaaaattttcacctattcaatcaagtcttattttccaaacaagcgggttgtctctaccattttcccacttccttgaccgtccatgttattatagatttttatcgaaacaataaagaatttgggaaaggtttccccaagaagagaggctcttatgtttgaaaaaatattttatggggcaagaaattatttgatcttcatgttatttggagggtgggtaatggtaactttatctcagtttagaaggatcattggctactgctgaactcgaagctcatcactcctccgcctccttcccttggaatggaggcagtggtgtcctctttgggcaactcgcatgatggatgggatactggctttgttcgacagttgttctcatttgatg

SEQ ID NO: 205863 - DNA, 1937 bp, Cannabis indica
ttgatgaaagttccaatgtaattaccaacccttctgataactttttcagacataaaaccaattgacaaattatgtaattgaacccagagttccagagtattcaaaggtattgatctaggattaactccatgtgttacctgctccataatcaaaggcgcccgatcgaaagtccatggactaccatcgataactctctctatgtccacctcatgataaaattaaaaaaggaataggttaggatttaactccttcacatacaaaccacgccccggctgccatagcgacgctattttgttttgcatagcttgaaaatcaatggaccgatttgttaagaaccttcccactaacaaccatctatcgtcgatttctgcaagcccatcctcccctgcctcaaacaacaagccttcctcatcatcatcttcaatcgaaaagctggcataattctctgttaaattctgaaactgaggttgtctattactcattattctcaaagcaccaggaaaatacacacaggaaacaaacaaaactagactttagaatcaaaccgattacaccatgtcaaaatgacaagactcctatatcgtaaacatatttatatttatttaattgagaaaaacatgaattagaaaatcaacttcaacaactctttgattacaaattgttaggaaatagtagactaaattatatacatctaagtaagttgatagcatatatcatatatcatattctaatatatatctttaataatgtttttattattattaattttacgtctcaatatatatatatatttcattttcaaatttttcaaataaaattcatttgagattaaaaatatatatgtaaattactttctatatccaaaatagcataacaccaaattttgctacaagattagtaagataataaggtaaaattgtaatataacccaagcaacattatttctttctacctccagaaagaggggagaatttaattagtaattgtgggtagggagatagaatcaaataatcaaagcaaggagaatcttattaaattggcaataacaatagtgtgttttttaggtttgtgcaatgccatggaatcaccacaatacaaagtggtctacttagcaaaatcagagtttgagatcagactctatactcagttctcatggatgtctgttcctgttgtttcacttatctcttttaaaaaaatccacccgaaatggctacaagtactctcctcatcttcctcttacacgcccattatttctcctacttgacttttactttgtttttcacaaatatatgattttaatttttcaaccaagcaaatataattgaatagaaagaatttttgcccataaaaattttctttaactattaccactatcaaattgtgcagagaaattgagtggtaataattcaaaggaaacttcaaacagtaaaagaaattcatgaggcacaacttgacagtttggggacaaaaattttatttattcaaatattatttgaggaaaattcagagtataaccccaaccatccatcctcatgattccattggataatcagtagactttttgtataatttgaatctcaaaataaggtgttttttttttttaaaaaaaaaaaaaaaccaaatgcaagttgtttcagtatatccaaggagctaacttgaacttctctaaatagcaatgacagttctagtattaacaagcatagtaccaggagctggacctcgtattcatcagcctatttttcagattctacttgcctgtgaaatttcaagctaacccaccttcacctctccccgaactgaacttgaaactcgctgcttaggagagtcactatgtccctgtgagaaagttttttgggtttgcgagagattccaacattttgagaagctgagaagcttgccaccagcttgagcaagtctccatgggcaaatcacacttc

SEQ ID NO: 205864 - DNA, 1034 bp, Cannabis indica
attattaaaatgggatgtatttagaaatttttttgggtgtaaataaaatttcctttatttttttgagagggctacaacccctatgttaatgaattgctccatcagtggtatatgaactaataattttttttttcatgtattaaaaaaattgtttttataattaaacaaaaagcttgatcactagcaatgtaaagataatttagttcttaataattcattgaccagatttattaataattcttttcttcttctttcttttttcttttttcattttgtttgcatctggatcacttcaaacagctttaattaaagttattctgattttggtacattcgcatataatatcacataaattaaaaggaagtaattgcccggaaggagggtatatatgatcacgtatatatagtttgaagttcgatgtatgatcacatatatatctatatatgattggcatgagaatctataaatgtcaatcagcatattaacgtcaaaccaaatacttaatttggttacaatttcttaactcaatcataagcataacttgcatcccaaaaataaaaaactcaagcataattgatgtgattattaaagcattttccagggcatatttaaaacaagaaagaaaagatattcttagaagggtttcagatgagctttcacagattacattgcttattttttttagaaagtcacacattatattctaaatgctcatacagttgcaataacatttatatatctataacagtataaaatttatgaaatcatgcaaataatttaaaacttatatatatgccaaattaacatgtgaacgaaaatagaaaagcaaaatctattttatttaatggtggcgtttgttcacatatttatttttcaatcacaaaaataaaaataaatttattatacctcattttcgaaattttttaaaaaagtcgatcttgcgactttgaccaagatttataaatgttaaatgcatgagttaagacatccttttttagggtcccatggtacctctagaggattcgaaaatatta

SEQ ID NO: 205865 - DNA, 583 bp, Cannabis indica
agtctcagatctttttctttttttccctttttttctaacatgtaaatatttaagtgataatttgttctgttcagcttggaatattgggcgtttgagattctggtgttcttagcaggattgatgccaaattcggaagtaactacttcattaattgcaatatggtacttagctagcttcactttatgttttttcttgttacatcataatcctttctaatttttttctttctttgcgtttgagtagtagtgtcttggttatttatttttcagtgtgaacaccgaagccatagcatacaattttacgtatggcctcagtgctgcagccaggttagggagaaatcaaattttgtactctttcaaattccacattttgaccttatcttggttatttaataagcgtattgtcacaacatacagcacaagggtgtcgaatgagttaggagcagatcgtcctgacaaagctaaaagtgcaatgattgtttccctgaagctatgtggagtttttgccttgatactaattttggctctaggattcggacacaacatctgggctggcacatacagtgacagttctgatataataa

SEQ ID NO: 205866 - DNA, 824 bp, Cannabis indica
tgcagtagcccatcttgcacaccaatgacaatagtgtcaaccatgcctattagagtgggcataaatattagatgtttcattgtgatcgaatcgaatgttagatgaactgtttaaaaattcaaatacattcaacatcaaattggacgaagtaatatttttgcatttaatttaagtgatcagtaatttaatttgttataagtaaaaaaaaaaaccaatatatgcatacataaaaataaatattatattttatataggatagattcgattcaatctaacaaatattaatgtatttaaaatattaaaatatttgataaatataaattaatcaaatagacaagaaatataaatggaatcgatctaatctaatgttggatcgattaaatgattgaaataaattaaattagatggtaaaatttagcatttaattaatatataattggatcgaatctaaatagtactcttaatctcttaatttgattaattacattccttagaaataataaattaaaattcaaatgtgtaaaaaaagtagtttggataaataacatttttttcttagtaatttttggtaaaagatatgtcaaattataaattcttgatattacatagaaatttccaaccattttaaacctaattatttttatttttgctatagtttaacccccaattaaaaatagataaataaaacatggtggtggttgagttgaccattttccaacattatttcataacttatatatattaatttatttttattggcacttgtcacaaattaactagtctttgattagttgtcgtggtattaatcaatttacgtactaaaa

SEQ ID NO: 205867 - DNA, 1034 bp, Cannabis indica
tatatatatcatttgcatgcaattatacacaatgcaccttatttttctgacgtttttttttttttattgttgtggagattatttctctcttagttgttgttggtggtagttcctgttgtaccatttcgcgtgttgcgaatggtgtgttcacgcactagcaaagtctattactagttttacaggagttgatttgtagacagatgcttgttttagatttattagtgatttgatttaatgtgatacattccttaaaaaaaaaacagtcttttggtattttacgaaaattgatataaaaattaataactgaccaacttaaattgcaactaaaatttacataacaattaccaaaacaatccaaatgctaaaaaaacaaaattattttgtatttaatttttgtaagaaaatgattaaaatattcagaattttataattcaatattaattagttattaataatgtttatatatacatgcatgtaggtaatgactgatcctgatgcgcccagtccaagtgagcccaccatgcgagaatgggtgcactggtatatatatatttatatatatatgatgtgatatatgtttttataattttattgaaaggattttatttatgtaacaattttcaggattgttgtggatattccaggagggacaaatccaaacaaaggttaatatataatataattattatttccatgatcgaaagttcaattaattctgcaaaatttaaaagcatatatatacatatacatacatatatatgggtttgcagctttgcatgcatgcaaaaactgtatcaatattggattgaaaaagaaataattacaccatattttttgtacagctctagtcacactgtaatgttttagagtattccttttttacttgttttttttttttactatttaatgattaaatatttgggggagtttattaatttaatgtcaatattttggtaaattacaaaaaagaataaatctctcattaatttcaacatgcatgtacaaattaatgtctgtttaattaatcttgtggc

SEQ ID NO: 205868 - DNA, 939 bp, Cannabis indica
aataagaattcattacactaatactcttgaactttagagttttctacgatcaaccatctaaactgaaatttaaaggttgaactctctaaactacagaattattttactttgtaccccttctgttagtctggctccgttatttgccaggtggctcttttgtggcaccaaattaaaattgccatgtcatatgccactctttacataagatccataactaattaatgcactgtaaaataaagagactaaaattaatgaatccataattaaaatgaaagaaattaaaattaattattgaaaaaaaaaaaagacagagaaaacacattaatgaaacaatcgaaaggaaacccatatagttctttattctcgtaaattggaaagtagaaggcgatgcgtggtcagaggaggacctcgatcgtcgatggtggcaatgcaatatttcaaacaatcttttggcgatcccccacctgattatggtaagtttctttggttttttgttacggcttgtctcatttttaggttttttgttttggataaactcatttctaggttttttggttttagacggttggcagggtttttgagtgagaaaatgttggttttataattggattcttggttgagtttttggttagaggttcgaggaattgtgttttaggtggagttgtagataaggtcttaaaggtgctttgaatattgagtaaagagttgaaaaagtgagttgtaaaaaaatctttcatgtttatttgtctgtgttagtgaggtacatctgcatatgctatttttgtttttgtgctgtcatttttcatgggtgctaaatgtttgaggggatttgtccaacatgtccaataagatggattttcgcctgatttagggcccttagaatagtcatcttactgttctttcatattttcattgcagggggtaaggttgatcagttca

SEQ ID NO: 205869 - DNA, 735 bp, Cannabis indica
ttttttctatttgaacggttattcccctcactattcggattgaataataatgggtacccttaaccaatctatttctatccctaaaacttgaccccaacttcgaccccgatcatggaatcaaatcccatcctcaaatctggaccccagacccaaagtttgggattgggggtcgggagttgcgtgtcgggtccaggtgtagagttagggtctggatccgaagctagatctatctaggtctgtgtccaatttcgaacccaggtctgagtccggttcaagatggggttggggtttgggatcgtgaggtctgtatgaatgggcctaatttacaaaattttaaaaactaacaataaaaaaacaacaattatacatatgttttgtgcccaagatttggagaaaattgtattgtatacccactttactttatctatttaatttttaccttcatttccatattcattgagatatacccacttttgtatatgatgttctaattatatcccttagattaatataaatcatgtgctttacttaaatggaagggtgagattatattagacaacctactcacaaaagtgggtagattttaatgaaatctaatatgagagtaatttttattaatagagatacaaaaaagaagtattcctcaccttattctcaaaatttgggtggactttaagtatgggactagcccgtttaaactctaagtgaggtctgttaagtaaagatataatacct

SEQ ID NO: 205870 - DNA, 539 bp, Cannabis indica
ggtggatttggacaaatacattcacctattaattacagcagtgaatagaattcttaagaaacctcttggccaggtcgaaaagatcttacctaccgaaatgggttacatgttgtatgaactgaagcgactttctgctgcattggacgcaaggttagttttgattcatacatttgtgtttgtgattactgattagtttgtactagagaatcagaatagtactagttaagctttcattttctgtaatgtatttcctttgtcgggctatttctacttcagggagaaatttctagtgaaagaactttctaagaggatacaatcaagaaaaccaagaatggaaggcgtcttgaatcagatttttcaccagcataccacagattctggcaacacaacctttcagggtgctgtcaaaaccgggaaccagggcgatgatgaagaacgcagtaaagcctcgtctgagaaaattagctactcggatgaggttgagtcactgatttctaaagctagtacaacttcagaggtttctgaacctattaaggcac

SEQ ID NO: 205871 - DNA, 513 bp, Cannabis indica
tttttttttgaaaaaatatatggtaactttattaatatatatatgtatctacagttaattatataatatttggtctataatatatagctatatatattttgttaaaagaagggaatagaattataatagagtgcttttcataattataacgagttaaaaattaagaatgtttttagctactttttttaatatatataaattcctattatatattcttttttcactactttaatacttttatgcgtaataaaagtctttttagttgctcaatgtggtgtgttattttagaaaatgtaatatttaattaattagtaggggggtatatagggaaatataatgtgtaatagggcgacagtatctagatattaatgtaacatatagttaacgttaatctagttaattatgataattataaattatatatttattagcaaataaaagttcaaatagggctatattatactggcttggctctagctattaatgaatgtatatatatgtagtacggtataa

SEQ ID NO: 205872 - DNA, 650 bp, Cannabis indica
ccatgacctcttcttgctggaccttcttggacatgaattctgtagaaagaaagaaaaccaagcagttaactacccaaactacctaatatagagggggagcatgggaatccaaccccataaactacttggagaggttcccaaaaataaaaaccttcaagagtcattcgttccaaatagaaaatcgggaacattaagaagaagaataaggaggaaattgacaaagtacccaaaatcagaaggaccctcggtgtggaaaaatttcgtcaacatttctacagcaacacaactattttccagaaattcctaagactaaaatcgaaggcaataaggttcatcacatttaaaactaccagaagtattggtcactggcctaagaaatcctaatttcactcaaagaaaaatacgcaaaccctaacttttataatgaattcataaacacaattaaaggcgagaaaccaaacaatcccatacctggcagagaagacgaaggctcccaactgatctttgtcagttttgggaagcgcaagcgagcacggctttcacgaagacggttggctaaggcaatcaacaaatcgatttcaaagttaaaattgagattcaccaagtcactcatttgaaaacaatcgatcactaagggtggatggtttagt

SEQ ID NO: 205873 - DNA, 502 bp, Cannabis indica
aactaaatttaataataaaatatgaaaaatgataatagtaaatataaatacataacattaacatttagtgtgatgcatattttgcatcatgctgatttttattatctgacaaatttacatcataacttaatatatcattaaagtagattatttacgaaattaattatattttatatttgtattatttatttgtcttcctataagaatgctaaccaccataagtaaagcaccatgagtggggtttgttctcttttatatgtttgaggaattgtttttgttttgttgttaatattaattatatcttatatggaatcctaattaattatagatatccgacgaaaaagaaatataggaatgtataccatgagcaccgcgtgcagcgcagtacccattagacggcaactattgtcttatctcttctttttcctaagttcctcattgtttttttcgtacataatgaagttaaaggcgtgattcactatatatttaatattaatacacc

SEQ ID NO: 205874 - DNA, 1233 bp, Cannabis indica
attaaaagcatcaataatatgacaaacctaagcgcataaaaaaaactcaaaaaaaaaaaaaataaaataaaagccataaaattggacaaagttgaatctatatcatatctctatataacaatacttatattttcacgtcaaaaaaagaaacaatacttatattttaaataaaaatatatataatttataaatttattaatgtagaattaataattttattatagtgttaaggattgtattagtgttgttgttacattaatattcttttagtgtagctttatttagttattataattttataatcagaatatagtttatttagtctcggataaatatttttgtatttatatgaaaacatatatgaatacaacaaacacaaacacttaaaataatactcaaatagcaggctttcaatctacatttagtaatatatataatgtggtcaattgattaatctaacttgtatttgtttttgtttatatagaagagaatctctacaaaaagagctatagagtactactgtacggaactttagccttataaataacctgtttctagccttttaatttcaaaatattgtaacaaagatagcatacatatacatagatattgctactatcaaatgcatatgtataatgtattataatttatatgtactattgattaatataattgagaactataaacacatatatgttggagttataattttttttatataacaaaataaatattagaatttgtggataagatggatgaggttttatctcaaaattaattggaatgggaggagtagcccattcctcttatatattttattatctttccactacattagtcaatgtgggactttctaacatcctacctcttaggacaactcgattataagtcaactttttttttggcttctaacttatcttctgtattctactaagtggctcttttgttctacttttcggatcagtatttttagttttttggtggctcgtttttttttttttattatttttggttcactatccccgaatcacaagtgactttttttttttttactttggctcttggatcaatttttttttttggattaattttagtggctcttttttttttcggctctagttcgatcggttataccatgttaaaatttggggataggataaatgagatttcatctcaaaattaattggcaatgggaggagtagcccattcctcgtatatattctattatctttc

SEQ ID NO: 205875 - DNA, 795 bp, Cannabis indica
tttgtcagtacaactcataattacactgttaaaagtcatttttctcaatgctatcttctgaactgataaaagagatttatgttggcaaaacaaatttttacgagtacaactcatatttatgttggtatagcaagctagccgtacgtgtaaataccagttctttgatattttttaccagcacaaaagtgcgctagtaaaagtgacatttgacatttttcactagtattagtgtaatgcactgataaaaattacttttacacgtgcaaaatggctggatattttacattttttaggtttagattttttctcagtttaaaaagctcaaacacaaattcattttcattcttgctcacaaattcaatatttgacaaaaaattttgtggtatttctaacaaagtttttaaaataccattatgtcctcatgaagtgattttttcttacaagttggaatttatatttctaaagaaagaaaatataaagagagtttggcatgagaagtaaaagtgggaagagacctagctagtacagggcagtaacgtagctctcgagagagaaaaaaaaatccactcagacctactaatcttcaccacttctaaataaatgtcattttctaacgtattgggcgctttgagaatgtgtgtactgagattgaaaatagggttagcccacccagtttgaatggttttattatgggattttttcataatatacgtaatgtacaaataaattcaaaaaatacttaacaatactcaattacaataatatcttgccacgtcattaaaaaaactccttaaa

SEQ ID NO: 205876 - DNA, 839 bp, Cannabis indica
aaattgaagagtaagaagaagttatgtttaagcttaatgaatcttgcatgtgatttgctatattgcgaatttgtaatgctgtataatgtgttctctttaatcgtttgtattttgtattttggtgagaggtggcgtttgcaacttttaaggtttattggttgcattttcactttggatgagttatcggctataacactataacctacagagcattgatgagcattactttgtttaacacaaaatttttttggaattataaggagttttgaagccaactcactccaatataatagtaattgagcgttaaacaaagtaataataatacctattctaactaatgaacttccatccaccagtgatcatcattgaaaattttaaatatcattgcagaggtgcaagacaacttagacaagatgaagatgtagtactatttttcatttgaataattacattgaaaacacaagcattcaatttagtaaaaatgggctttttttaataatcttacgtgggcatatgaacttgaatgatcttcttacacgacatcctggatacatatataacaattggtaaataacggttcatgtaactcagagcattgatacagagattgcatatatatattttaccactaagtaggaatatttgaaacttagttttaatgaataacgaatcaccttgataaataaatgacttgaaaaaaagtgtgccttgacagtcccttaactacaaggaaagtagaatattttccacaagccatgtacactatttgcatctactattcacttttgttcatacgaattagccacatcataagttgcatggagtccaacaaaaaaata

SEQ ID NO: 205877 - DNA, 394 bp, Cannabis indica
cgtgctttcaccatctctatactcaatttaaagattcgtgcgcttttaagttgataaattataaacatactactttttggtccaaccctgacttggactccagacccaaagttaaacctagtttggacctataccccaacccctagcccagactctggaccctaaccattagcacagactctggttcccaacccggacttaggttcggacttgaatctctgacccctgacccaaactcaaaaccccgaatctagtgttgaactctgacccactttatctgagtgttcttttaaaataaaaataaaaataaaaaaaattactaaaaacatttttattttaccttaaaattaaaaaaataaaatagttatcaaacatattttaattttcaaaaaaa

SEQ ID NO: 205878 - DNA, 1252 bp, Cannabis indica
gatatctcaaaggtaccattcatcatggattgcatatcaaattctctgattctctattgatcacaggatactctgacaaggactgggcttgctgccctaatgatagaagaagtgtggctggatattgtgtgtacttaggtgatacacttgtgtcatggtcatctaaaagcatgcaattgtgtctcggtcaagtacagaattggaatatcgtgctttagctcatgttgctgcataaatttcatggattcaggcttttcttagtgagttcaacttccctttacatggtactccgatcagttggtgtgataacatgggagctagtgctcttgcttccaatctagtgtttcatgcaaggatcaaacatatatataacttgatgtacactttgttagagacaaaattttaaagaagcagctagaaataaggtttgtgccatcataggatcagattgtggactgtttaacaaaaaacctcactcaccataggtttcatttcctaagtgacaaagttggagtagttgaaaccctttccagtttgagagaggttattaggaaatgagattatttcctttgtatcctctcccttgctgtcaaacagagtcgttagaagtggtcccaactctaacaaattctatcatgatgtcaaaatttgttagaatattttgtgtatatttcagtatgtaattattaccgtattattgtattttctagaatatatcattcactaatatatatagtctaattagctagccacaaaattttttgagcttagtttttataattctctctgtatctctctactaccttttcttgtctttttcttgttttcaaactaaaacgacattattaatggttatgtacacttttaatgggtgcatttgttatgtggtgagtgagccaaccataaccaaactaaacccaaatcagatctgagtgtattgaagttggagatgtaaagttttcatcattattaatttatttctttaccaagcatagaaattgacgcagttaactcaccaagacaccaaccaaacctatcaactatgaatatcattatatataagagtctcatcactgtcaacactataattaagattaattacatgttactatgtaaataatttgtacttaaatgtgtcacaatctttttcaaaataataataataatgtgtcacaatctttttcaaaataataataataatgtgtcacaattacatttattcccttgcctattgcaacttgatttaggaaca

SEQ ID NO: 205879 - DNA, 1006 bp, Cannabis indica
ttttttttttttttaaatattgtcatattggagtgtattataaaatttctcggtaaaaaaaatgactaattttttaggggttttttttaatttttacacttcaaaatatttttttttttgtatttttacaaaattctacatagaaacttctattgcaactaccgctgcaacctaaattacaacaaaaaatcatttagaaaccccaatgacaactagcgctgcaaccactttagaaactcaaaccgttaattactttaactatattcaatataaatataatattataatatttatatttttataatgttacatattattgtatctaattcaaatgtagaatataattcttgattcttaatgcatgtataattcgttttctttttaattaggtaatgttaagtacatatgtttaattttttaataaggtaatatatttttttctaaacttttgaaatggtccaatacattagtgtgatttttggatgtgattatatatacgtattttatatgtacaataaaaactaagtgatatcgtggtgaataactaattgagtgaaattgtcttttattttaatttaaagttaaaccaacaaaattaaaagagtaattaaaaatatctacaacattttaaatatttaaaatttaaaattaaaattttcacatataaaatatatttctgtaatttttttttataaaaaatctacacaatatttattctgttaaatcaagaattttattttataaccacatttttctaatacaggattcataaaatgtgtaactaaataaaatatagaggttatgcttatttataactaatttaatttggttgttcaaaaaaaaaaaattgggatttattctttttttttatctcttattttttttaggaaaattaaaaattattcttaaatagattattctcaaaattttatgtagaaaaaatgttggacaaaactgagacaaagaaaataaaaaatttacacaaaatactattttggcaacattt

SEQ ID NO: 205880 - DNA, 669 bp, Cannabis indica
gataatacaaagtgttccaaatatatatactctcttgttacattttgaatgaatggattaattttgagagatattgaaaaagtcaatgattatatacaaaagtgcttttctttatatatcaatttaatttaattaatttagctttttatcatatccatgcatgtctcaaagtatgaacgtactagtctttttcattttcttaaaagttaaaattaatataaatatagtatatagtactacatgcaagaaagaagcatatatatttagatagatatatgtcaccaaaaaaaatataatagtaaagaaaattatattaagactaatttaagaaggaaaaagaagaaaagtaaaagctgcaatatataaaagaaagcacattataacattatataataataagctaattaaacaaaaattcatacatcttatatatatatatatatatatgcactttgacaatttttttcttttaaatgaaaaagaaaaaactagatttaataattaataataatttgagagagatcatgagtagtaagtatatatatacctagatgagtttgcatgatcaagtgtgtagattgttacaagtgtgggccaagtcatcctgttaataagtaaaacttgattaattaataaatctgcattatagtatatattatttttttttta

SEQ ID NO: 205881 - DNA, 1252 bp, Cannabis indica
aaaaagaaaaagaaaagggtattgagttcttgttttgttctaatttaaaacaattgatttattaatagattttattattgatttttcttggccaagtttggatctacaaaaaaacgtagagtcacatttgtagctagttatgggctatggccattggccacttgccaccactaaacaatactttagaagaggatggtccactgcccacacactcaaaagtactcaactttcatttaaagtaacatttcactttaaaagagaaaatgcatttatttgcatacttttctctttctttatttctttgagtaactccaaccaaaaatacaataattgtgttgaaccaacacatgaattaagtaattttagcattctatttttgaatggtgatagctgattttattaaatcataatctacgttataaaaaacagatagcaaatcagttaaaacagactctaaactaaaattacgactatagtataaaattcatactctaataaaactatgaacaactacgttagctgatcgtttaacaaaaagaataaaaatatttctcaaagaaccaagcgattctgtacagtctttaatagcttgaccaaatataaaaatcatctcaatagaactctaaaaggcttgtaccactgttaagcaatctgtttcaagtattacccattgctatttatgttctttgatcctgatgaatgtttttcaaacttccatttctacaagttttggttcaactgtaccttaagagaactgcacccgctaataaggaaacaatattgaattcacgagttataataccaagaccataactacggccatcattaaacaatgttacatctacattaacattgatactattattatttggtaacatttattgtttagctctgtcccccaccaaataagttagggtatggcgactcaatctcaaacattaaaaataaatcattaagactaaaaataatattattgatgtaatttagtaagatgtcatttctaccaataatgtaaggtgttgaacaaaatgatgctctttacaatttttcttaaagttaatacaaaaatttattctcaattaacatataatatatgaaatttttctgtgatcttaaaattaccgtacacctcgtctatttgtacatttctcaatacttattttctctctcttacttgcattccgtaaaaggatataaaaataatctcaatagaactctgaaaggcttgtaccactgttaaacaatctgtttc

SEQ ID NO: 205882 - DNA, 1553 bp, Cannabis indica
aataatttatattcagaaatatataataattttttaataatatataaattttattttaatttattgttatttttattagttttgaataaaaaattaatttttttaaagagttgaccgagttgaccgggtcaacccgccaacccggtcaacccggccaaccgaaacccgcaaacccaccaacccgtgccatatccgggtccgggttcggtttcatttttttgaacccgaaacccgtaaacccaaaacccgcaaacccaaaacccagtaaacccgcccgatgttcagctcacatcaacaatatcaataggaatgaagatgcaatattaaaaattagtgtattaaaccaatttaaatcatttagggctcgtttggaacgccgtattaggtcgtattgtattgtattgtattatattgaattgtattttatgcaatatttttatgtaaaactatatgtggtattaacttttatggacacttaaatatataatgttttagtataaattaaagtttaacatagtattatataaaaatatgatatataatccaatttaatataatacaatacaatacaatacgacctaatacgacgttccaaacgaaccctttagaagaagatatgtacttaatttagatttatataatttattataataattttttttttagagtattactaactaatcatatgataccacttctagataatgttaataacaatactcaatatttaaatatcaaattgcatatatcttaatatcttcttaagtgtcatatcgttattgatgcagttaagtatcagatatcacataatttattataatatttttttataaaatataactttttagatactgctcataagaatgctcaatatttaattatcaacttgcatatatctaaatataataattattatttgtaacgttgcttttgtaaaaatagttaaacaaatgctaaatcataatgtctaccactactacttaatgttatggttaagtgcaattatagtcatcactccttcactcccatgtattttaaaaagtacttaattgattgtacataattataatttatatatataaaaatgaaaattcacataattataaaaaagaattctatacacatataatttctaactttttattatacctgatttttatttattacacaaagattgattttatttttatttttttagaaaattaaacgttataattaataaatcaaaagtcatttacaataacagagaaaattaaataagaaatttctcctattcaacaaatatcttcatctaactctaaaacatattttgctaatccatgtgtagcttgattaatatttttcttagaatgagaaacaataactctaacaaaaaaagataagagaaataacgtaaataaaaaattaaatccgtgtacttgataaatctaaagataaagcatttaaagcattgaagactcgcaaagcatcagtttcaatatgtattattgagagttgtaactgtgtgacccaattaattgcttattttttttttttttttttcttttttagtc

SEQ ID NO: 205883 - DNA, 683 bp, Cannabis indica
attgcagttatcttgtgcgaagggattgttcttgcggttagttcgggccagagatgccctgttgggtcaaagaaattcctcccactcctagtcatgatgacaacgagattgaagaggcagtgactctggctttgttcacaaatgtcccgtgcaaagggactattcctgcagttcatttgggccagagaggccttacttgataaagaaaggtattcctcccactcctgactcttcagtgtaagaggcgggtcaatcattgatttttaaatgcaaaaggccttttttccaagtcagatccttagcaactacatgtgcaggcatagagaggctgcatctttcttggggatgttgggctcaacttattttgatgttccaagaaaggactctatttgcgacttctctaagcaaattcctcctgcggtgcatgatgagagagaaaattatgtggtggagccaaatcttgacatttctactgatccacgagagacattgaaatgcaagaggctggaggatatgacccatcttgagatgttggccttgatgatctctcccttgatgagatgggcttgggtgtattgctttgtttttattaatctgtcacatttactccatctgacctagtctcttacttttttttgtagtcaacgatggaagtcttgggcttagtatcgattctttaagca

SEQ ID NO: 205884 - DNA, 823 bp, Cannabis indica
acattatggagaaaagcttcagcaactgctcgagcaataaatggatgtttcagcggtataaaatgagcgtacttaaatgatccaccacacaaagatggtgtcaacactatcggattcgggtaacccttcaatgaaatctatagttagatcctcccaaacccgctcgggcaatgccaaaaattgcaacaaaccagcgggagacatggccatggtcttattccgttggcacacctcacactctcttatgaactcaaccaccacccgcttcataccaacccaaaaaatgtcaccatgaagttgttggtaagtgcgagactccctagaatgatcgccaatcagagaacaatgatactctttcaaaagggaagggagtaaggtcgatgtagcagataaaaccatcctcccttgatacaccaagcgatcatgttccaaggcaaaaccagggaccatagtaaccattggctaaatcaactcgaacccgagagagaagggcatcttgttgaatttcttgttctacaatatcccagtttaaccaagtggtagaggtgagaactgagcatgccactatgggaacttgagataaagcatcaacgacaccgttggccgccctaggcctatagacgatttcaaaatcatagccaagcaacttaaccaccacttctgattgtcaggtgtcacaagtcgttccaacaaagactcgaggcttttttaaatctgtatgcaccacaaaccttcgtcctagtaggtaaggatgccacttgagaatagcaaggacaatagccataagttctttttcgtagatagatttgagttgagcgcgggg

SEQ ID NO: 205885 - DNA, 594 bp, Cannabis indica
aaaactgcgtcgtttaagggagaaaagccttttgaggctgttggtcctaatgtatttcatgggagagataggattactgttgaagtttgaagctttaagagagaatctggttcatgcagtgaaagagagagaacactatatagaaaagaagaaaaagaagaagaagataaaaaagctatctttatatctctcttgtttcgaactctgtaaattgaaatgaattggaaaaagagataaagactgaaaactgaaaagggtatctgtttttggttttggtttaagggttcgaggaaagcttgtctcgagagaagaatggtggtttgtgaagagaaagagagagagagagagagtgtgtgtgttttaatggttaatagttataaagaagaagaagacgatccattacagagctactgtcacagacccttttctattcatattattattattataattattaattcattaaaaaaataatataaattcataattttaataataatattattattatttgtattatggacaaagaagatggcaatgttacataagctatgatatggcttgttcagatatttagaaaattaaaaaaaaaaa

SEQ ID NO: 205886 - DNA, 428 bp, Cannabis indica
attgaaactttatacataaacaagttagccgccgatgacctgaaacttagtcattttttttccatgtacaaaattattgcaaccatcttcaaaattgagaaaaaaaaaagataagccaaccaaattcgaatgctagagtttgcaattcttcctagaaaaaaaaaagaattgatctttcgaaatttggttttctaattttttttcttcttcttcttacaattataaatgtaatcataaaaatttaaatttaaacaaaaaagaaaaaaagaataatcagaaaactaggccatgaaaattgataagcatttacattacatatatattaagatataaccagaaaatcgaatgtgatgagcagagtgagactgactgaagatttgtgccacaaacacgtaacccgcaagttatagcttctctctctctctctc

SEQ ID NO: 205887 - DNA, 777 bp, Cannabis indica
ggagatgctggattcagtactcttctaaggaatgtgacaatacgtaaatatatatcactatcataatcagtagtactattatgtaggtcctctctatatgctcacaatttttttcattttacaattattaatttcgtcggcagcctatatatacatgtgtgtatatatatatatttatatagtaaagtacaaaagataaataattaaggaaatttatgtaatacaccctttaaggtattttgatagaccttatatttatttcggtttccaaaataatattttaattcaaatatatatatatatatattttcataaccacataattattaagatcacttaagtcagtaaagttgagttagcttcaataatttttctaacatagaatatactcgatccacacttaattattaacgtgaatcgtgagaacaatactccctaacaaatatttatatatataaaggattttcctctcttcgtttttttttttttttgaaaatgacattttataaaataaggagttacacctcttggtcattataaaggatagagacaagtatggaatgaacatccacctttctgaaaatagaattagcaaaagctcacctggctacattatgagccaaatagttataagttctaaaaatgaaagaaaagttacaacttaacatcaaagtagaaagctttttacattgttgagtttcctctctttttcttttatacttaggaaactaatatacacacattaacacatagcttttttatttttatttttgatat

SEQ ID NO: 205888 - DNA, 1071 bp, Cannabis indica
agagcctcttctatttttgaatccattcttcttcttcacactaattttgaagcctatagtgattgagaatatgcccaaacatgttaaagtaatacctagcatagtgagaaagattgtgtagaaaaactgtcaactgaacgagatttagattcagatcttaatcatactctccaacagaaaggatcaatgattagagatctgaacgaaaggagtcatattagtcggctacaattgatgtaaggttttctataattttatatgtgattaatttattattttaggaaattcatatttaggatgttagattatagattataatcaaacatacatgtttgtaaatctatatcttggtaaaataagttccaatatacaggccgaggaattcaaaaccctggtagacaggcccctcagggagtaccaatcgcctaagtacctaagcctgtttaagctcccacaccaagtaattcttatacatcaggtgttgctatcaaccatatccggaggcccacacattgctagaagtaccaaaaatgctcaaaagatctacctgaataagctagataaagaggggaaaaatgtgatcttgtctaaactccttcttaacatcaaccaatgatgaacttcccaattacttttatcgaagaagtttccaagcatgtgcatttctctcacaatgatccattactaatcgaagcctagattgttaagaaaagggtgtcaaaattactagtggacaacaaaagttcgatcaatattctcttcaaaaatgctttccaagaaattagattagtggagaccaacccgatgccttctcctatccaaatacagtgctttaatggagattttatattgtcaatagggaaaattcaacttctaatcacgctaaatgggggtgtagccaaaattagaacaaaatctgccttcaaatactgcactttcatggtagtagatcgtccactgcctacaacattattctaggacagtcagttctcgttgaatttggagccatagcttccattcggcacctacgcatgaaattcccaagtgataatggaagtattagagttgtaa

SEQ ID NO: 205889 - DNA, 611 bp, Cannabis indica
gttatttccatatctcttcagctatatgaaggcgtatgctctggagttattgtcaggtaaaagcatgggagggatgttttttctttttcctttcacttaggactaagaagttcgtctataagaattcaacttgttaatttaatggatttgtatccatatacatatttctattagatagaaatttttggaggtttatgtgcatttcatcttgtaatgttgcttcattgtgaatttctgaattgatttgataaaattttattgctttttcttctagaattgtgtattaatggtatgttttccttttaatgcattagtatatagcaaattaggaatgcagctcaaacttcacacaaataatttggaatattttcttacggtcttcttatgtgtctggtttggtttttgtagcagtggaaattggaggatattagaaactagatagttgcataagctctctaagttaaatatgtttaagccattagtgaggactctcaactaatttgggaggtcattcatggacatgtgaccgttgaaaatgttttaggcttctcatctattgtcttgagaggcagttttcttgacttaaacccttcattattatgcatttacaa

SEQ ID NO: 205890 - DNA, 673 bp, Cannabis indica
aatatgtcctagcattacagcatatatgtctagcctatgattgtattctcactaattcccttttgaagataacaatatcaatcgatcggttaaaatctaatactttaaaagacataggctacaattcccaagtgtcaaggcattttttcctatcaaatgttgaagttagaacttttgcattagatagaattgtaatcttggagcagtggttttattttcacccatcttttgaaatgcaaagatcattgcttgcaattctcctttgattagcagagttgaatatgatgctcattaaattcggataccattgaccatgcactttagtgatccaaagcactgcaatccctgctaccccatctttcaatggagcatctgtgaagaaaagatgctctgcatctttggtataaatgatagggtcacaactttgatgaatccttgctctagtttctattgtttcactctccatctccaatttaaattcatgaaattttgagacagacagggcaaaggcattggttgttgaagatcatattgctaccaaatttcatatatgaggcaactagtgtagagtatcatgcatttaatgtcttcctttgccgagactccacagattctcaataattttttgaagactcgtttgaaatgtcattttaggtcgtactgtattgtatta

SEQ ID NO: 205891 - DNA, 659 bp, Cannabis indica
aaggtcggtcctgagttgaaatgagtttaaaaaaaattttgatctcttaatgtaaagataaatggtatttttaaaaattattaaaaaatatacatatttttcaaaagtatttttttatttgagtccctaaaataagtgggccctaggcacggtcctagcccgccttaacctagggtcgaccctgatcactggtgcctaacatcttttttgatatcttttagtataattaagtatcaagtctcatataacttaatacaataactattaaaatatatatagctaattaaaaatggtaaaacatcatttataaaatatggtaggcacctctagtgcccaatgataatgttctattatttaagatgagttttacttcttaaaaatgacttgcagcataagtgtgtgatatttgtgtataatttatgtgtgtagatataattattcttaggtaatatagagtaattttatatgggaagtagcgtaactttatcataactttatcatgtagaaaagctcttattagtaaacacccattttataaattttcaaaaaaaaaataaatagtataaaatactgaaattagagttggatttaaaaagaaacaattgaagcactagttattttgacataatgttcaacaaattagtaataacttgtatata

SEQ ID NO: 205892 - DNA, 602 bp, Cannabis indica
ttggattgaagaaagggaggtggacttcagaagaggatgagatcttgaccaagtatatacagtctaaatggagaagggtcttggagatcattacccaaaaatgcaggtacatatgtatgtacatacaaattattataatcttctattgcattgcatggcattgccgatgttcctgtatatatatgtaatatttaagattacctttttttaatttttattaaattataaatttgtaactttttatactataatataatgcaggattactgaggtgtgggaagagttgtcgattgagatggataaactacttgagagctgacttgaagagaggtaacatctcttctgaggaagaagatatcatcatcaacctgcattctacattaggcaacaggttagttaatttaattattattatttattattgtatatatatattaaaattctatatcttcttaattagtttaatcttgttacatcttacatgcacgcataaattaaacataaaattgtcaaatatatgtgataagtcaagtagctataggccttattttaaataaatacaatttgttaaaaaaaattgtcacataaatatgtcactacaa

SEQ ID NO: 205893 - DNA, 703 bp, Cannabis indica
ttaatatttttttaattaaaaaaataaaaatattttctaaaaacatgttctataaatttgcttttacttttcaattttttaactgactgaaaaaaaattcattttcaaaaattttttaaacaattttttttcttagtcaatactttggactacgacctcaacctgaaccttgagacccagactccggcctcactcctattcccggactaggaccacagccccggtcctaaacctgaatctggatgcaacttaaataaaatcaaaaaataaaaataaaaatataagttatagaacacacttttattttctatttttaaaagtaaaaaaaaaatagttatagaacacatttttgttttttaaaattaaattttcaaaaacacaaatttgatcactttcatttttgcaattaaaaaattaaaaaataaaaatgttaccaaacactcccttaatttttaatcattgtttaaggtaaaatcgttaggaaatatcttttgtacactctctaaaaggttgtttcagtagactttgtttcactatttagataaactgtttagtctaatttttttccgatcacctacattaattgtagctatttaggattgtaaatttttaaatttttttaatagtttacagtgacgaaaataaaatttgaatagttgctgaccatttgtataaaaaaagtaataaaatatttaaactttat

SEQ ID NO: 205894 - DNA, 765 bp, Cannabis indica
tataaaatgaaaaaaaaaaaaacaataatattgttcttctcacaattcatttgttcaatttttgaagagtgtactgggatttctgcctattttcaataccaaaaagaaacatcttaatatccttcaagatgttagcggagttataaagccaggaaggttagtcaaactaatttttattaattatttcgtctatcaatatatatttgacaaatcaaactaatttctattattttttacaattaccatgaaatcacgtttagattgaccttgctattgggacctccaagctctggcaagaccacacttttattgactctggcaggaaagcttgcctctgaattaaaggtgaataaaaacagataaattaacatcgtcgaacttcacatttattgatttaatgtaattctttttattaaagtaaaatttttggtacagttttcagggagggtgacatataatggacatgatatgaatgagttcattccccaaagaacagcagcctatattagtcaacatgatgtccatatcggagaaatgacagtaagagaaactctgtctttttcggcaagatttcagggagttggtactcgttatggtcagttaaaaacaaatatacatatataaatatcaatttatattttcatcattaattctctttatgtatttatgattaatatataatatttttcattattatttgcatctactgccagacatgctatctgaattgtctagaagagagagagaagcaaatatcaaacctga

SEQ ID NO: 205895 - DNA, 936 bp, Cannabis indica
ttaacttaattattacttacttaattattacttatttactcaattattattgctgtgtaattattgtttgttcaaatttaaaaaaaaaattgtttatggcattttaaaacacagtcgtagagtttaagattaaaatatatggtgatgaagtagagcctaatgttttgccacgtcatttgttcatgaaaataattttgaggttgggggtgtgactgttgtaaggtgtgggtcaacttttcatatttatattcgtattaatatacagtccacttgttatttttatataatatacaatattagtgactacttttatttatatgttattattatttggaaaagctcgagaataataaagaaaaatgtacacgatatatacataacatttataattaatcaactgtaattaatataattaatttaatgttgacagtatgattagacgatccaattcaatattttttccctcatacattttaatctaattagtaattaaacataaataattattattattatcaatttgctattttttttattgagaaatgttagaaggcacttcctacttgtgaaatttataaaatgtgatattgttattagtgtttattcagttatacttattttattttaataataattttattatttctttcgagaagaaaactccaataaccatatttcaagcaataagcttaaagaaaaagtggagttgagattgattatattaattcatctcatgtaagatgagatataaatacaatcagctcaccaaacttagctaataactttcgacaagatatatttaaccaaaaaatgagtacaaccttaatagatttagaataaaaagaaagaactcgcaaagtgaaattcaaaaataactatgcctaaaattgttaaatattaaacacaacaaagtagtcaaagaaacctagtattaag

SEQ ID NO: 205896 - DNA, 1418 bp, Cannabis indica
tcaggtgttcttctatatggaccgcctggaacgggaaaggtaagttccgctgttacaagaattccctttaaaaatttatcaagtagcagatttattattattattttgttattttaacttttatatgttgtcttactttttaatgtcagactttattggcaaaagctgttgcaactgagtgctctttgaactttctcagtgtaaaaggacctgaactaatcaatatgtacataggagaatctgagaaaaatgttcgcgacatttttcaaaaggttaaatattttttttttctaatttagtcactgcctcttctataggtgaaaatatgattgaaaaatagcagttttgtctcttatattttgatggaaaatgtaaattatgtacttgctgcaggctagatcagcacgcccatgcgttattttttttgatgagcttgattctcttgctccagcacggggtgcttcaggggactctgggggtgttatggacagagttgtttctcaggcaagataatacatagtattatgttgtcacgttattttcattcattcaatcagcttcttaatgtgccaacttctttttattagatgcttgcagagattgatggcctaaacgattcaacacaggttaatcttttggcaaatatttcaatattattttattatgaaaatgtcttctgctttgatactaaagacactttacctctgatatatttttggttcgtttaggatcttttcataataggagctagtaacagaccagatctaatcgacccggcacttctacgacctggcagatttgataagctactatatattggagtaaattctgaagcatcttatcgagagaggtcaatttcgtatctgtttcctactagcctctctctttacttgttattgatgtgcacttttttctttacatcgttattgtgctacttctagggtcctcaaagcactgacccgaaagtttaaattgcaccaagacatatcgttatacacaatagcaaagaagtgcccccaaaacttcactggtgccgacatgtatgcattatgtgcagatgcatggtttaatgcagcaaagcgcaaggtgattttagtcatttctatacttggtgcattagtaggagggacctaatatctttagctattatgaaccgaaattacactggcaactgaatagcagcatttagtgttgatttaaacttacttaatttgttgtaaagatcaaagatgttttcatgctgctcgttcttacacatgtttgccttttgttataggctttgagttctgattctgattcttccatggataatcaagctgattctgttgtcgttgaacatgaagattttatggaggtatgttgctgttttacatactcaagttctatgaaatgagagctgaacttttgcagttgacttt

SEQ ID NO: 205897 - DNA, 551 bp, Cannabis indica
acttgacagtactttgagcttgtggagtgggagctgctagagtgttggggtgtggcagtatggctcgggttggaaagtggtgaggctttttggacacttgtgttactcatcatggtattaaggagggaggtgtgagagggggtaatggtctcgggtgggggcttgttgggagggtaggtggtgtttatgttggcaagggtttcggcttggatcgtttgaggtggttcttgggggtaagttgatgggtcggacttgtataggccaacttgtagggtttggccgtgcggggggggggggggggggcttcggtcaagggtgccataagtgggaaaaggtggcatgctctccggtggggcaacacagacagcgcttgcgggattagtggtcatgaagcttgccaccgggggattggcgaagttaagctgttcagggcacaacaaggcattagtggtaaccttaactttacccatgatagttttgatatcataccttaactccggagggaacgggcgttcatcacacgccttcatgtagtctatgcaccctttgtt

SEQ ID NO: 205898 - DNA, 841 bp, Cannabis indica
ggtagttgcggtgaatccgtgtttggaaggcgagaaaattaatgagaaagtggtagaaagtaatgaaaatggctttcatgatgatcgtgagattggtgaagaggacgattcgcccaatagcgagattactgatacaggtaagtaccatttgctatagggataataattgttttgagaattgttctttttttaatggtgaaatttgagtaagatcatttccgagactgaataatgctttcaaattttatgaattttctttcttggtttgatcaaataaatttacaaaagtcttccttccgaagtatttgaaattttcgatcctactgaaaaattactttcgtgaattaattagtccgatcaggaaaaagaaagcagtactgttctttcagaatctgaagtgacttttgctgtttgtttcccgagaaacaatatattctctgtattataaaatttattttcctctgcttatgacgtgatttcatttatagtattttattcaattttttatatttctctacagtttactatacccataaattggcttttccaaacttaagtaaaataataattacaaaaataaaaggctttttcatccattttcttaggagccaaatatgagacatgtttcctcaccagatccaatatttttaaaattcccatctccgatctccttctttgaattcaaagttagactatgatagttttgtaaattaaaaattcaaaaagaaaaaagaagtttctgttgcgtacaaacttctcaaaaatccaattatttcttgtgataaaaggacaaaacatgtcaattaaattctgtcactcaagttttcttttcttttttttt

SEQ ID NO: 205899 - DNA, 565 bp, Cannabis indica
gtgacaaagatcagatgaaggtataattcaaataaatatattttggggtttatttaagtaaaataacaaaactgatcatgtgatttgttgtgctgtgtattttgaaggttgccatgggcacgttagatggtataattgatacagtttcagcagtccactctcttttgcctttcattggtcttttgaagtgtcatggaaagctggttatggttggtgcaccaaacaagcctcttgagttaccagtttttcctttgctcatgggtatgtattcgtatacatataaatctcttatatcataccatatgaaattttgagaaaatttaaataaatattttaaaatgcaggaaggaaaatagtagctggaagttgcattggaggaatagaagagacacaggaaatgattgaatttgcagcaaagcacaatattggatctgaaattgaagtcattccaatggattacgtgaacactgcaatggagcgccttagcaaaggagatgttagatatcgatttgtcattgatatccaaaaacacgttagaagaattaagcttgtacttaatttcttc

SEQ ID NO: 205900 - DNA, 893 bp, Cannabis indica
ataagttttagtattaactgagatgcgttgccaatcaaattcatgttctcaagttttttcaattattttttctttaatttcgttgcagggtagatacatatatctttttagggtgtacgagtaaatgagataatttttctaataataagtgctgttttttcttataaaaaatagtttgttaaaaaaaagtgctgtttctttatttaaaaaaaaaaaaaaaagatttcagggtcttaatatcatagcacatacaatcgagcccaaattaatatatggtaacgacttttttttttttggaaggaaaagattttattaaaccaataaatcactgttaccgtagcactaaggacaggtatccgtccaaactaaaactcccaacgaacaattaacagatttagctagtgcatgggctataccattcgcagaacgcgaaatggcgcagcaagaaccatcaccagctgcagccatcaacatagagacatcattaacaatagcactaaacataacattagtaattgtactattaatccatgagaccacaactgaagaatcacactccacccgtagcccagcaaaccccaactgcaatgccctttgtaaacccaatcgcacagccaagagtgccgccaatatggtaacaactttacagttgcataaattttggggagttgggaaacataaattatatttattgtaattataataatattatccatgaaattatgaaaagtaattttttattatatacttaaaaaaacaaagagacataacatacaacttatttcctataatggaaggtttgtaacatcttttttttaataactatttaaagtaagaattttccattttgtttatttttatatttttatttcaaattttgaaataaacgaatt

SEQ ID NO: 205901 - DNA, 1095 bp, Cannabis indica
aagaatataatgaattataataatttaattttggctcgttgttgaatcaaagggcaaaataattaattaattaattataattataaaaatacaaattcaactagccagccaataatgttccttaattataacgatcatgtttttttaaggattaaatagctttttattcaaagagaattttatacttacaattgcccatgttaaattatattttaaacttcaacatgaacaataaatccttaaataattaaaatatataagtataacatattatatatctttcttcaaaaaaagaaaaactatattatatataataaagatatattatttcaatgtttgagaaccaccttgttactttattatataatatttaatataaataaaaaataaggaccaccttataataattaagaaaatatttaatgtataatgatcaaaaagaaaagtccaatcaaatagaagttttttttattattattattaaatcaatcaaatagaagtttgtgtattgagatattatatcaaaatatatgatattttatctcaaagcaaaagtagggacacatttcgttttcaattaatccttcaatggataataataataagggttaatgttagatcatgtaaattcttagcttcaagtcttcatggaaaattttctaagaggtcatttcttttatgataggttaccgaaaaataaaatacacattgttgatatagatagtatatatttaaagcttctttaacagtataattttatacttacatagtctcagaatcatcacacttgacattctcagacagtgtaggattttacagcttacccgaaatcacgagactactgactatcacagactttgtatttttgcaaaaattattgattgaattttgtgttttgttaaatgataaaatgataatcctgtattttctaaaatgaactaaattttcgataattttttttaatataccaacttgaagacaattcctaacacgaacaaatatagtaaatgtaaccagttttgttataacacattcagattggttattatcaagtttcatttttgactaaaaaaaatacagtttaggtacgtattt

SEQ ID NO: 205902 - DNA, 1157 bp, Cannabis indica
taatattttttttattaatgttatatgtaagtattatagaaagcatattatcttgtagtgtttttttttactttttactgaataaagtgtatttatgtcattttaagtacatttttataaataaaaatttggaatgttaaaattataaataaaagattaagaaaaagtatttctaaaaattttaagaataaggtttgatgagatctattaatattgtttagtatgggcacccaataataaatatgtgagttggtatggggtatgcattttattgtctttcatatatttatagagttgaggaattaatcatgacagttgaacatctagaagtccataataggtgatagtctagtctggtcttattttggtagcaatgatttactaaaaaacttctttttattgttgaacaagtttgaattaattggaccattattagtcaattaggcaatttaatcaaaaccaacttacttaggctgtttacactaattaagtttgcggatattattaggtttgtaattaatgactcaaactttaagatatatgtactgtataagactacactactatatatctcggggttaagaagtctccatttgacaaattttggtagacttatctagaagaataatcacaaaagaataagttgtatcaaactacaaaaagaataaagattatatgttaaagtgaacaaatactatgtatgtagctagatttttcacgtgacaaaaataagtcttaatagcttagtgctggtatctttctagaaactgatattaaacacacagaaaaagacgactaaacctagctatgtcttaaaaagagagtatttccctcactagaaataaatgttgaaatttgaaatgtaggtttacacatacgtgatcatacacactcatgtgacaagtagtttcaacttgtgatttattacataagtatatatattatgtttataatttatgtgtatacatattaatattaattgtaataaataatctacagaaatcatgatacctttagagaaataatcattattcgtactatgtgtatacatcacaatatttatgtgatgaaccaattataattatttaagataagtctcatttatttaaaaaaacttatctatatctaagttagtttttatgtgaagatatcatgtc

SEQ ID NO: 205903 - DNA, 1009 bp, Cannabis indica
tactaaaatccactgttaaattttcaaatttatttattttattactcaatttttcttttcgaaacatccttaattttaattttaaaaggtaaattacacaaattatataatttattacacttaaatatatatatatagcaagtaacacacttcggatagtttaacattaaaatagtggtcaagtatttaaatggaacaaataatacaattcggataatttagcagctacattaatttttttttaaaaaaaaaatgtatgtaactattttatctgaaccaaaaaaaccataaaatttgagtaatttaacggaaattaaccctatgtcatataactattatgttttttatgaatttagagaatatcccggggtcttatatgaatcaaaatagactaacacaaacacaattatgtatttttttttcaatgtatttgtatatctgtgaccgaatcaaatacaaatgtatcaaatatttgatgtatacagatttacataaaggtcaaagaaaccaatgtggaccatttcttattgatggccttaatggtaagactttagcatgaaaagtggggctaacatattgaatattattatgtttgccaattgccaattggcattaagtattaaccacttcaccctcttcatcttcattcatggcctcacttctcctccctttctcactatatagagatattaatgttagatattagcaacaaaattacttgaattatacaatttgtaatatttaaccacgcaacttaatttttttcagcaaaattactaaaatctcacttctattgtactatttactctttcgtcaagatatctcacttaaatgccatggtgacatgctacaatatactctaatgtacacgtgacagatttttaatagttcacgtaattttaattttaaattttataaaaaaataatttaaaaattatataaataaaataataattaaataaataatttttttttttttttttttttttttttttttcttttctttttc

SEQ ID NO: 205904 - DNA, 721 bp, Cannabis indica
accgtcgtatttagccaaatttgacacataataatgattttttaattacaattttgtcattgatcattaatgaaaaattttaatacacatttttaattataatagtgtcattaattctttaaatatttaatttattgataattattaatgatattttactttttgtcataatttgcatcatagaatgttattgcgtattggagcacaataacaaatattatagtaaacataatagcaaatatagcatttgtaaattttcttatgtcaaatttagcaaaatatttagattggagatgatcttagtggaaaacagtaagaaaccaatacacaaataaaaggctcgaatatatataacttggtttggttatttaattattcattaattattaagcttatttgtattacaggtccctaaattatatatactttggcaagttggtctctaaattttattttttggcaaattggtccccaaattatataaattttggcaaattggtcctcaaactttatttttggcaaattgatcctcaaactttcattttcttagagacataaatacctcaatcttaaatgttggtactttatttatttatttatttttgtattaatttaaatagtttttatcaaattaaataaatacattttttttatttatatgtatttttttaaatatggcaaaacaagaagaagaaaagaataattaaaaaagcttaaataa

SEQ ID NO: 205905 - DNA, 1286 bp, Cannabis indica
tacttgtattttcattacttttcttcttacatttattttttcttcttctttttgttacgcgtcatgtgtgtgtgtaatgaatgtcaatggaggctggtacttatttttcttcttattcccttagtgtacaccttatttactctaattagaaagctcaacactctctgtggcccacaggttctctttgtttcctattctcacatcgtcaactagtataaatttaagtgactaccacatgggtgatgatgtggatggattcaattctctttgtaacttgaccacgtcactgcttagaatgttgaattcttatagcaatatgttcatcaattcctcccagtttcaacttcaataacccttttaatcttgcatcattttcattcccttggcactttaactttcattcgtaacaaaaaacaaatgtttaattaaataaacacaactaagcataactatattacaagactcaaaagctagtatactagatagacaatcaagacaaaaactaaccaatcttaacaaagaaacacactttcattactctttacacaacatattaagtttaaagatcataacaataactctatatcatggagttatcacacctcaaacttagagtattgattgtccccgagtaatgaaaaattaaaacaaaaagaacaataacaacaaacaaaatagcaacaacaaacaagtttctaaccgggagggtactgctcattcaaaatttatttatcgaagaaaatgctcttaaaaaatatatgaaatggattgaaattatggtagtgaatatgttttgaacctatgtgtctcaatcaaatttcaaatgttatagatattattaatgcctatgtcaagtaatccaatcaattgagtgtgcaaatactacccacaaaaacttttgaatccctattataactaaccttgatcttcaagtttgaaaatttttctcccataagttgaattagtgcaatcctctcaactaatgtattctagctttatacccaagatctaaaggactctattaggcttgtgatgcgaggcttatgttaggatagcataaaacttaatatttatatggcttgtaacctaacctcatcaatttattgaggacctttctttctctctcaagctctcacccaaaatgcacttttaacccaaaatgaatgatttgattcaaatttaattctctttctattgttactttccagcaaacacataaatacagagagagagagagagagagagagagagagagagagagagagagagagagagagagagagaga

SEQ ID NO: 205906 - DNA, 590 bp, Cannabis indica
tctgattatgaatattcaatgagataaagtcttttaccttgtctattttgtccgtccagatcctggtgcaaagccttcaaggatgtgcagaggaggattcgagcctaacacataacagacaatcgaaggtgtccagaaatctatctcctcctcaatgacttccatcgtgattttcactctgttcgaatgctcatttttagccagacgaaaagaattatccaagctcctaatcacagagcccgatcgcagcacaggtggtgtcgagtgaatcccctgcctaaggttactattacattgaatattagcttccaagaacattccaaaatcctttcgaacctcctcctgcttcataatacttctcagtgatgcatcaggggacagaggaggctgaaatacatcaaccagtaacagatccgaagcttgttcttctctaagttcatcctctttgtctgaaaactcaattggttcgattccacttaccgcatctccatctgtaactttcctagcgattccaaagttctgcatccctttcttcctcagatttttagtgcctagattttttctttccaatccccttcgatctagttttt

SEQ ID NO: 205907 - DNA, 922 bp, Cannabis indica
tgcagaaaaccaactgatactaagatactaattcaaacaagaagctattaaagagaacacagctatgcaaccaccaacaaaatgcaattatcagatcattaaggaactctagttctacaagaattgtattacagtgatatgattattcatagttactatcaacaattacctgccaccacactgactcaaccacccgagagaaaatccaggattcaactttttctagagcagctgtgaaggttcccgtctcctgccaatcctcaacaaattggaaaaaaccatttgtctgtttactaccaagactcgccttccacttcattgttgcagatttcaattcacttctctttccattcccatttgactcagccaatcgcatcgccggacttgactgacgcgaaccaccaaatgcttgagaaatgatttccctcagtacgacagtgttcgatagccagaaggtcaaccttaacatgccaaaaataagatcatcatgttctgaaagctgaaatttatataataacaaatacatttaaagtataatgaggaaatgcatataccttggaacatcgttaccacatgattttgcaattaagagcaaccctgatactgtgtttctagcaatggtggctcgtttgtcttgagtccaatatttgcaagcatgaatatataatcgagaaaggcgacgagctggggtgtgcaccttatgtgctgagctcccgtgttctggcacaacagaatacagagaaatttcaagagcagcaacctctcgtaattcttcctcaagtttttcgattctcatttccattgatttgatctttttctctaaagctgcttccttctcactttcattattttctccagcaccaacttgaccgttattgtcagcaacgcagttgagtccatttgaagtctcattcaatgtatc

SEQ ID NO: 205908 - DNA, 978 bp, Cannabis indica
cgtttttcatcatcgagattactatctggaaagttttttggtttttctgtataattatgtatgcattattttatttgtgtttttgcttatgtacttttgtatatttttatatatatatatatttgtgtgtatttgtatgttttattattgcatatataaatatatatattatatttgtatctgtaatagtttgtactctccaattttcttgtattgcttatagtatttcactatttacgtatgttttattattgcatatatatatgtatgttcttcttttaagtttttcttttatttctgtatatttttctttatcatttttaatttcaaaagaatatgatgtggttagatttcgtgtttttatctcaccaccttctgccttttcaccctttctgactttgttgtgggtggtcgcagctttttaagttactttctcaatggtatcggccgatgtttatcgcgctgatgagtaattatgtatttattatatttatttatagtatttaatatatttgatttgtttttatatgttataatttttaaaaaagtcaacctcctcttttaattttatgattctatcataattactaatagtttttaatgctgtttattttttattctttctatgttagttttaggtgataaaaatttattttatttatggttgattcctattatcttgcactatatttattattattattttcaaatcttattaacttttttaatttttttacttttttagttaattaataattggccaattttaaattatttaccttttcaaaaattaatctatctattatttacttgttatctattttatagtcttggtttttataaatattttttataatttattgttgtgtaaacaattttttattcttggtaaaatttggtttttattttatagactttatctatagtttattattgtgtaaatattcctttcacgtagtaatttatttttattagaaa

SEQ ID NO: 205909 - DNA, 549 bp, Cannabis indica
aacatgtcctgcttaacaacacactatttattactaatcagaatacaaaatattagacatgtagctagctaggattaaacaataagcatacaagtaaaatttaacctcttaaagttgttttgctaactctgcgaaataaatcaaaagaagacattcctctgctgaccttgcgtgtggctgatttcggaacatctgttaataattaagttgttacattcattagtttatcacaacgtaaaaaggtaattggaggtaaaatccttttatattttatagatttaattcctaatttttttttgtagcaataccccctccttttttttttttgattagctttgtaacaataccttttaattttacttttgtttgtaaatttgagacgccattttaaattttaatgttaaatgccaattggattgtcattatatacactcatgtatgcgtgacatgttttcattgactttgaggttttagtatcacgtgtacacagtgacaatctctaagcccgtctcaagccaattgggaaccttggaccaaaaaatctaatta

SEQ ID NO: 205910 - DNA, 698 bp, Cannabis indica
ttttaaattttattacattccattgctatttctattcacattctcattcctattccacctaaaatataaccaaacaaaagataacaattatttcttttacattctattttatttcattacctctaaccaaatgacaacaaaaatctaattcatattctgttcaaatacaactttatgtatgacctatcgaaattcgtgattgctagattgtatttcaaaattaaatccaaattaggaaaaaaaaaatagaaaataaaaaaaccatattttaattctccctttttagttttttttttctttccaaaaatattaaaaaccaaattatatctttctctactcttttctcttcagttttcgacaaaaatgggctatatttctcttccatcaagagtacacttccagttacatattcagtattttcaatcaaaaaacttctaacaatattaatactggacgaacatttttgagaaacatatttttcagtcacaaaatttaaaattttatttgaaaatcacattttttaaagggtaaatacccattttggaccctctgttttacaaaagttaccaattggaccctgtgttttgttaaatgataaaatggaccctgtattttctaaaatagtacaaataggaccctgaattgatttttgttcaaataaagtttaattataatccgatctaaaagtgctatatgac

SEQ ID NO: 205911 - DNA, 793 bp, Cannabis indica
gactttaattgattgtggttgtttatgtaaacttaagtataacggttgcatatatgatcaacactcatgtactgtcatatcgaatataatatttttggaaatttttgtagtaaaccttcttaaagggtaattatagtaaattccttatctgaattgatattaagaacacttttttagtctattatttttttaagatcgtgtatattatatctatttaggatcaaatttaaatttttagaaaattccgaataatttataatgtcgaaaataaaattcaaacaattacttaacacgcgtataaaaaaaatagtctcgtgtgcatcaaaatatgtgaattttatatttggcattataaactattttttttaaaaaaattttacaggtggtcttacataactataatatacgcaaaaatagactaaatgccaaaatagatagaaaatctacagaaacactcctttagggaatgtacacttaccctaatatttacatatatatttttatatgagctagattaaagtagtttctgaattcatcatattgcagatattgtccatatagacttgacaatctattgagtacaacttttatctgttggtaagtacataaatttttttaaagatacatagctttgcccttcgtacgaaggaatacatggtatgtatgtataactttttatactagcacttcgttagtcattgaatatttttctggctaaaagcgtataaatatttggttataatgtaaattctatatttatctgtttagatatctatagtaaatttaccttttt

SEQ ID NO: 205912 - DNA, 1110 bp, Cannabis indica
ataaatgttaaaaagtagtattggtgtctagtatttttaggtctgggattattaatggtacaattaagtattgaattatatataatgtaatataataaattttaagaaataggtattgaattttatataatttaatgtaataatttttaaaaaatattgttatataattatataagagccataattaaaaagtcttggtacccagtactcaataacaatgcttattaataaaagttattactaattgcaatataagatcaatggtttttcatataaaataatgttagtgatattatttaatatgagttttttattatatatatttaatttaaagtaaaacatgagatcagttacttaaatattagataactaataatcttatatattttaatttaaggtggaatagttagtcaattgcacacttcaattcaaattatgtcatatgattgtcattataaggtgttttgggcattatagcaattggcaatgctcttttattttattccttacaatacattagtttgggtttgaaaattactagctaagtttgtgattttacttttcaaaataattatataatattgaattatttgttattgttactaatatacatgattaatttggttgtgatagatattacaatgggatatttttgccacaaatgcgaaaacatcaataccacagccgtacaacaaatcgcttgataaattctcatcacgcttcaggcaacaaactttaccttattattatttgcttattataaaaaataataataaaaaaagtttctttttaaatattggtcttgcagtacttttgtggcatggaataatggattatgtcttgtaattgtaagaggcaaaagtataaagagaaagccatattgatttatggtatcacttgattaaaaatcttatataataaatgacctttttcttttgcttttaccttatatattcttacattatatagatgacataatctaggcgcaaattatgggcaggacaagacaggctatgccccactgtggttgaatgcaggtctcctatttaaaataagagcttatcaattttgtattttgcacaattgcttatttgtactctctttttaact

SEQ ID NO: 205913 - DNA, 902 bp, Cannabis indica
taataataatctcacttaataactaataatattttttctttaatttttaattgtatcacaatattcaactaacatagaaaaaaactagcataaaatttagtatacgtgccttgcacgtagctttttactagttcttaaaaaatatacctatcaaacaaaattaaattacattttaaatattatggcaaaaaaaataaaataaatttttttatgaaattttcttaagaaaaaaataaaaacaaaatatacatgagttagaaaaaattatgaaaatgaaatcaaaataagtattgaaattaacataaaataatgtgaagaaaaaaaattaagaaaatattaagaatactttttaaaaattatttaagtttatattttttttaataatggagtgtatttataagtttatggggtgcaaatagaattcttcctatttttatttttaattatttttgtacattaattataaaaaataaaaaatttaatttatagggtcacggcaccctttcggtctcctaactctgtctttggttaatgggataaatataatactgtcggcagatcctacttctctatacatacgaagggaactgaacaatttaacattttgtaccaaaaaaaaggggttaaattgtaccgtttagttcttaaaaaggaaaaatgataaactaaaatattatataaacctggtcaaactaattatagtaagtaggtggtgttggatgagtgaaatgtttatattatattcttattcaatacacttttaactttttgtgaaatgataaaccgacttacatgcacacacacaacacgtatatgtcattataatacatcacacgtggaaccccataaatgaagattaacaagatcatgaaacttttacaaaccaaaagaataataattaa

SEQ ID NO: 205914 - DNA, 1018 bp, Cannabis indica
aaaattcatcaaactggtttaagcaaattccaacttctcaacttcctaatcttgcatctggtctaattttcaatcagcttcttccatgtaacaaatgtgttaaaagcctcatctttccttttcaacataaacacccacactttccttgaataatcatctataatactgataaaatagctagcaccacccaaggtcttaactttggaaagaccctagagatttgaatatatataggtcgatctctccttagtagtatgcacacaagtgctgaatttgattctactactcttcccatatacacattcctcataaaatttcaatttccctttcagtccaccttgaaacaagccttgcttgtccatttcagtaagtcctctttcactaacatgtcaaagcgtcaaattccaagtcttgatgttttcaacatcatccttaccaactgcaggagctacttctccaatcgttgtattctcaactagatactacaacccgtttctcaactcccctttaacaaagatcaaagacccctttgaaatattgagtgtacgattgttaattctaactgaatatccatcattatcaaacatgctaattgatataagacttctcttcaaatcgggaacatacctgacttgtttgatcgttcgagtgacaccatcatgtagcatcaaatcaatggagctaattccatgaatctgggaagccttgttgtctcccaacagtactattccacctggttttccaatgtagttgttgaacaagttcttgtttggtgtcatgtgaaatgagcaccatgagtccaaggtccattctccacctgattctgaactaagaactaaaacccctgcaaattcatatccactttattttaaattagatgcaactataaacccctcaaaattcacgtacacttgcaatatcagcttctccttgattcttgtacttattcttcccttgcttgttgtctctcttcaacttagccttctaactgacatacattcatctcaaaacgtgttct

SEQ ID NO: 205915 - DNA, 1306 bp, Cannabis indica
tgtttaaccaaagggatgtcaatttgattttaagcatacctattagtttcactgctgatggtgatttttggtcttggagaggtgaaagttcaggtgagttttcagtaagtagtgcctacaagctccttgaggatcaaagagaagtgtggtctggtgcaagcaactctggtttttgaggtaaattgtggcagttaaaaataccacagaaagttaaaaatttcttgtggagagtttgttctgcgtgtcttcctactcgggttcaattacacattaagcatgttcctctctctttggactgtccattatgtggtgaagctcaagaaactgaatatcacctttttgtttcgtatgtttttgctactgcctgctggtctagagtcggactgcctgctacagagttggataatgccaatattgtttcctggtttatgaagcaatttgaggagctagatgaggagttgattcgtagagtggctatgatctcttgggccatttggaaggctcaaaacagttgtatttggaaggacaaaaggctttcgattgtggaagtgttaacagtagcaaacatactttacaccattggagaaaagctcaacataaggatagtattccatcctatgatctgcagcagccaggggatggtaatgagctttggattaagtcggatgttagtgtggttaaagtaaatgtggatgcagctttctttgaagatgaaagtcggtttggttttggtatggttgctagagattatacgggaaggcttcttgatgcttgctgtcagtcgtttcatggacaacagaatgttgcagcagttgaagtgctaggagtcaaagaggccctctgttggattaaaggaaaacaatggtatcacgctgtcatagaaactgatagtaaattgactgtgcaagcagtccgtagttcaatagatatgaaatcagtttttggactccttgttgaagattgtcattgtttgttccaagctatgcctaatgccagtttatgttttgttaaccgatctgctaatcgagttgctcactatgttgctaggcaatctcgtttttatgctgatcgtagaatgcttagctcaaatgtttctgttattatgcagaatttattgtatcaggattcttgttattaataaaagtttgcttttgatttaaaaaaaaaaacataaactatattacttatatatataataattattgttaaattttaggtatattatttttctctaacaaaattaatattatttattcttcttaatatagatgtgtaaacttctctaaaaagtatctagatgtaaatt

SEQ ID NO: 205916 - DNA, 909 bp, Cannabis indica
tgtatcttaaatattaaataaactatttagtcacttacggtactaattggatattgattgattatctctctaaaaaaatattttaattaattgacttaaatttatatttatgttatgtatattaaatagaacaatttattatgtatgtaaactttagttttaaaaataaattttaaaattacaaaaatatattttaattccaacctatatctcaataaaataaactacatgaataactaaaaaaatctactaatatacaatacgcttaatagttaccttctaataagctctctctataacttttagtaattaacaagattatattttttctaacttttaatattttaattggttatagtttattttagtggtaatgtaataattcattaatgcctctttaattttagtagtttctttgttagtttattgttgtggtttatatttgtgagtttattgtagtagtgatttcagtagtttatttgttagtttaccaaggtagtaattttaaggcacaaaattatcaaccaaccaactactttaatgcttagtatcttaaaaattaatatcaagtaacaaaaaacatgtagcaagattaagattaacatgcatattgtaatatataatgaataattacggtaattatagtttacagtatatgttaagtgtgattatattgttaatgttagttttctgatacattttatagtttattttttgtgaagataacgtaaaaagttataacattaataacaacaataaacatgtagcaagattatagaattactatacaaattctactatactaatgaattaattacactaatggtagtttactttacaatgtatgttaaatgtacatattgccagtattagtttactgaagctatttattgtctgtgaagataacat

SEQ ID NO: 205917 - DNA, 961 bp, Cannabis indica
actaaaagtagttattttttgtactggttgacctgtacccctacacgctcgaccaaattatgagagtcgaaggggagcaacaaagaaaattatgagcatatatctcaatttatattttataatttatttgagtaattagttttatataatatatgaattgtatattttttatttaattagttaaaaatatttgttaaattaattaagttagtttcatgtaactaatttttattaagtcagttatattacaaacatttttaccacaaactatgttagattaattattctagtttattgtaaaaatatgaaatatatgtacaagcaatgttgggaaaaagatagtagaaaatttacaatttttcattattctgtaatccaacgttgaaaaaaatcgtctttgaaaaatctattttttttggttttgcacagctaactgattgtgcataaccatcggcaataacggtataggcgactgtttttgtgactatttaaaacagtcgcctaaaatgctcagcatccccgatggtttgtatagttgggatttttttttgacggctttgcactgccgcttattttacccacttttcagatgaataggcgatggtattcgagaccgacatgaatactttactgactgtttaaaacaatcaagaatacccaagtttttagtagtgtcaacttaacgaaaaccaaccaatgattaactcccacacataaaaatttagattcgatttgatagaaaatgcaaagagaggaagaaagagggtaagaagcggtggagataaaatttggggctcatggttatgaatgccacttatcaaataattcttcgcctcatatcaatttctaactcctaggtcgctaaccttactgctcctccatactacaaaagcagttatttttagtgacaacttttagtcacaacataaattttttgtaactaaatgtgacttttagtcac

SEQ ID NO: 205918 - DNA, 1111 bp, Cannabis indica
ctaatttttttaaaaattactactaaaactaaaaatttaaataaaaagtatatttattaattattatttgtctttttacatttataaaaactgataacatacattaaaaaaaaataacataatttttgacatacaattgagtttttttttttttacaaaagtcttaaaatatatcacttcaagaaagatgctattaattataatcaaatattacgttaagttaggttatgtgtgagaaaaattatttattatatggagataaaagagttaaaataaatgatatctcagagcaaaaataaaaaaaaaaattaaataatatttaatttaattttttataaaaaaaaaatgacccgtttcaaatttcgtcctaggcctctcaacaccttgagacggccttgggtgtcggtggggcggctgatgatggtggacgagactggaaaaaagagacggagcattttcaaggcttttagggctttaaatagagtgagactgctgggttttgttagggtattttacaggattttgctaggagttttattatggattgaagctcacttataagttcagagatccttaggctttagttatttggaaataaccgaagtcataaggtgctttgtgttactttatggtttcggttatttctaaataactgaagcctaggaggttctacgttatttttttccttttagatttaattttttttaatattacctagctagatctgagcaactaaacctaatattgtagtagtggaacctctttgacgtttatatatatattcacacacttttacattaaatgtgataatttgatattattatattttatgtccaacttagttccacatgtatttttttttttttaatataaataataaatgattcaaataagtattattacatgatattatatattgttcatatataattaattttttttattaggaattaaaaaaaaataaaactaaaactactcatccaaataccgaaataaataaaaaaaatttaaccgaaatacactacaaaaatttaagttttaagttcacacaaaaaacttagtgactatataatattattctatatattgtgactaaaggtaccgtgtacta

SEQ ID NO: 205919 - DNA, 519 bp, Cannabis indica
agagagagagaggaaaaaactaactaaaagtcatggctctgttcttttgtatccaacttatatatatatttcttttttctttcttaataatgaattagattagttttaatttaatgacgaaagttaattaattaggattagtaatgacttgagctgtaagtttatgattaaattagcctcctaataagagtgaattaaagaaagaaaaaaacttaacaaatgtcgagggcattggttttcggcacatggcaagcgaggtgtcggagctgggtcggaccagaatggaactgtgtaaaaacgttttgtcgttttgtgagaaatttctcagtaaacgacaggtttaagtagagtcaaaccccatcatctcttgcttctagtttcttcaatttacacaaaaagtcaaaaaccttttacaactatcttgtgttctgatccaatgcggttttgacacgttgtgtgattatctaagcttgagtatgtttgattattgctctctttttttgttttttcctttttttt

SEQ ID NO: 205920 - DNA, 2018 bp, Cannabis indica
  modified_base (109)..(109): a, c, t, g, unknown or other
ttttttcaacagagaaaaattgagaagacaaaccttcacaaagtcttagttacaggagaaagatccttattattcttatttatattccatttaattattataattttanattatataaattataatgtatatatgcatgttggtgtacatttaaattaagggaaatttgtttttgttgaataaatacagaacaattctgagaaatctaaggacactgaagatctcaaacaagaccttagaagccgaggactatgtttggtaccagtttctagtacttttcctatgacacatgagaccgctgttgatttttggacccctacatttggtggcactttcagatagaaaaagaaagaaaaagaaagaagaagacgaagaagaaaagaactctattctctctgcttcaactaggttattcatgtgaatatatatagtataagtcctatcagaaaccctagacaagttgggaatgataaggttaaacaaaaaaaaaaaaaagcagaagagacacgcccacatattgtaaccggtcatgggatcgatgagaaaaaggatttattaagtttcagtgaaggcaagatgacgattctacccccaaaagggacaatatgctatccttgctgggccagctagaggcagaatgatgcagttttgcccaaaattgggaccattggaaagcataataattgttgtaataaaaattgaagaattatattatatgattagagagtagggttaggaacgagagaacagattctgaacttagggaaaagttttaattcttctttttgttaatttattagtattattaatttatagtgttagagatcattaattaaaccactcatcaataaaaagaaaaaaaaaatcgaaattaatatgaatttgttattgatttagaattcataagctgacaatatcatcatgagttatcatatagtatgtgtatttaacattttatatatacatataaataaatcgagaagagagagagagtaaaagaagatataaaaaggagcttttattccttattgctatattgtgaatagtgctggcactaccttttgttgaagagaaaaagaaagaagggcaaaaaaagaaattaaatattggggaaagggaataattgaattttagaatagaagaagtgggtaagtgtagagatgggattggattggcaatctcacttttgcatttggtaatgtgtttgaaatatatgtatgttagtggaagtcagaaggtcgcccacaattttccttactatcttcctttcaggtttttctagatattttctttttcctttttttatttattttttcgttattccatagagaggaggactagagcttaaaagaaatgtattgttatgagatgctatatggggtcactgattttatgctttttatcgaatggtcacattgaggggcttctattggaagctaatggaatagctccgctctctctccctgaatttttctttattatcgactttagaaattaaatttattttaaaaaagataaacttatattaaaatttgtacaagatttttcataataaataaccctaatatattaatgctcttttttatctatatatatatactattatactaggtatttttatatgtatgtttatataaagttgtattagaattgtgattatttaattattaattcaaataataataataataaaattaagtggttcttatattttaagattttaaagtaggtttttttattatatatttttacaaaaatctacctagcaactcatatagcaactaacggagtaactcaaattgtaatttttttaaaaaaaaaaataaaaaaataatatatgggtacgtaatttccttaaaattagatctaatacaattcaataatatatataaatatataaaatctaatctcaaattgatttataaaaaaatatatctaattaattttattaaataataaaataagtaaataagtttaaatattttaaatataataaaattaatatatttattataagg

SEQ ID NO: 205921 - DNA, 1826 bp, Cannabis indica
ttggaagaatgtcacacactaccaaaacttgttatgtctaagattaataatatttgaactcacaaattatatacaaatgtcatacacacttatgtgtgacagaagtcacttaaactaattatttttatttaagagaatctcacttataaaaattaacttgccccttagtatttgtcatatttgtgcataatttaggtgtgtaaatgtcattattctatgtcgatgagtgatgatatgtgcacacaattacacacagatataatatgtggcaagtcaattcaacctgttatttttattttagggcatctcacttatcaaaaataacttataatttaggtgtttgttacatttgtatgtagttatgagtgcacgttgataatgtcacttccataaaacttccataaaaggtgaatttaaccagttacttttatttcagggcatctcacttattaaaagtaacttgtaattaaggtgtgtcacatttatatgtagtttataagtatacgtcgataagatcacttccatagaaggtgaaatttgcctattgtttgtcaggtgaaacccctgatatagttggttaaagatatggctatatttgattacagaaagtagagtaaagcacttacccatttttcacacaaaaaagaatgtgaaatttcaatatataagttgtaatatataagagtgtccaagaactttggaaacattttgagatgtctaattgtggtatctcaacttatttgaaagggaattgtcgcgaatataatgtttttccggaaacttgctgcctaagagtatgagaacaaggattaaaacgtgtctgatcatttttttttttcaaaagtgacgagtaacatgtcgcctgttgccaagtatatgggaatttcaataacgtttagaagtttgaagctccaatactttaagcaaatgttctaatctcattagctaaacttgatggtagttcctacacaataaataaaagttatttaagtttaagcttaatcacacttttccattctctctcctagctcgccaagattaaaagttctctcaaagaattcatcaaaaaatgattgaatgatgagttcaaaggcgtgttgtcctcactcgctcctcgtttcattgttgtaatctcaaccatcaccctagggattgcaataaatattttattacaataaaatttctttcatgtgaaagtcttgatggtcttaattgattgaagggtatctcactacaaccaaccatgagtatgaagaacggagttttgtttctcgtgtgttctgtgcttcgattcatgtgcgactttcaagtccttttcaattatattctaatatatttcctttggggaattactttttgtttttcattgacagatatttgaggaattacttttagcaaaagaatgaagagatgtttttgctaaaagagaacagaaaattttcagctgatttttttttttttttttgtttacaatttcacattacactataaaatgtcatttcctggtagagaaataatttcaattggcatgtgaaatgtaacttaacctgtaaccatctttccttttttcttaccttgggcctcctaaggtagctctatgattattatctgttgtggtaacaagtttccttcaaactgttcaacatttattgaagctttgtgtggaagacttgtggaggtccactcctctttcacttcggtagaaacggagtagttgaaaggaagcaatatttcattgtttaactttataaggatacaagttagtgtcgttttccttacataaataagatttatgaaaatattacatatacagaaccagagaattc

SEQ ID NO: 205922 - DNA, 858 bp, Cannabis indica
ccctaaaaaatttattcatagatcaatatcccactaaccattattcttaattagtagtcacttgtttacgttttttttttttttttgcttctatttttaatttggttcaaaccattataagtcgatttttttttttcaaacatatcattaaatgaaaatggacaaataaagtaaggtacgctcgccaagtctgattttatagttcattatttaattatatagacaaattctacttggatttgataattccaccgtacaagcttccaaaaacatattgaatcaactatcaacagagtattgctataaccttgtactagtaccctctattctcttgtggttgattaattacattaaattatataaaattcactacttaattatttcaatagcgatataacatgttaaaagatattagacactactattattttttaatattattaattatcaatgtcactctctgtaaaattaatacaatcacactcacagctacaaaaataaatacatatcatatattttaaatgagcattattattaaacatcagtagtgtccaatactttctatagtacttgtcaccttatgatttgttagcaatattttttaaaatttatcttattaagttatatagaacccactatttaattacactaataacaataggacactaaaaataataatagacaccaatgccctttagcaattctcatcttaaattaattaatcttaatttataatagtggtgccaaaataggccaccaaagcattattataaaccatatatatctttacagcttaaaacgacgacgtcacacataactattttagttaagtatgtatatatacaatagctaaccatc

SEQ ID NO: 205923 - DNA, 1087 bp, Cannabis indica
ttaggagatataattttataaatttcaagtacattgacaagattcaaaatttttactcttgggaaattatttattataaaaaaatattatacttacattatgattttttttactattttagtctatgattcaaattaaaaaaatctacatttaattttttaaaaggtaatatttttgttagtaaagactatactctcccacattaatataagtggattcatcactgttcggaggcatgatttagtatatcgataattgttacattaacaatagtttttaaatttaataattataataatttaggaagaatttttaatgatatgaaaaattcaaaaaattagtttgataatatcaaaatttaaaaggcaaacatctaaattattctttattttatttatgtataaatagaataatgaaaatgaaaagtaaaataattgattgaaataaatttagggggtaaaggaatgtttatagggaggaatgaaatgatgagaatatatataaatataaggttggtttggttacctggaaagatgtttttggttactattatgcaagtggtgtttgtttgtgctcttcttctcctattatattatatataccctaccaccaccattatattgtagtagtaccatccatatatatatatttatatataatttatataatatttgttagtgtatgatatcatttttctttcttgcttgctttctggtgcatgcctttgttatgttcctaatgatgctccttattatctgtaaatcaaatattaaaaaagaactatacaaaagttttgaacttaatatgtgtatatctctatattttattattattataattaatacatccaagcaaggaaaagaatgtaataattaatatgcatatttattatgtaattttgtttagaataatttaagacttaataattaagtttaagtcttgattatagattaatacttaagtttaatttttaataagataataatatttaaattatatttttaaaatttctatacgtatatgaccgttaattgtcaaatcaatgactatatggcactccctaattgatctagaatattaaattttt

SEQ ID NO: 205924 - DNA, 794 bp, Cannabis indica
gatttatttaatttcagtcatctaatctatcacttaattgtttgattagatcaattttatctgtttgatgtattttatgtatatctattgcattgatttgaaattatctaatatttttttatcaaattggatccattcaatctttagatccaatatttattaaaaccaatccaatccaataaagaaaaatagtaaaattgatttgaacttttgcacctcacaagtagtggatgcatgtcgtgcaagtgtggtatctgccgttgggaccacttgacatcccaacaaccatgaagttgcagccactacccctgtagccatgactctgctatctgaaaatacgcaggtgtacattatactaattcgctggtggtaacgtatttcaacgccctgcaacgagaggatcatcaactgctgaatggtgctgtggaaaggttctatgcagctgttcgcaatcttggaaattggaaggtcaagaagatcagcaggggggtcaacttcttggcacacaactctgctaaatgggctcgataccatggctctgttggggaacttgcagtgagcaccatggatgaaggagtgtttatggatgatactgaatgggtccctgatccgggatagactttgctattgttgtagtcttctggtttcgttttggtcatggtttttgaccgtgtgttttatttccctgtttgctgtagcttttgttttaagttgtcttgtgtttttctgtttcttagactttatcactagcctttggttagttgttgtgctgtattgtgtttttgtttcaatga

SEQ ID NO: 205925 - DNA, 705 bp, Cannabis indica
tggaatttgggcgtgggtcttttatcgaaatggaatggccttactcacacaccaaccagggaaaatgtagaggaaatattattcttattgatttagatttattaatcaatattgatatgtttctatgtatttttttctttttagtttttctaatattcttcatataagtccaatttatttatgtgagtctttctcgtagaaacttcagctgcatcaagcaaatcttcccaaattagttatagttggattaagattcattaatctcttccaaacaagaccagtaatgtcccacaaccctttttctcaattaacttaaatttggcttttctcttttttccattttttatcaaatacaaagaacactaaaagaaagtttgcataacagctcaaaaaaaatataggtgaagtaactcacctttacaataatgaaccatttgtggcagtacaaactctgattattgatacctgtcttacatttttgtatataaccaaatgttgcaaaatttgttacttacccttttgagtttttgatgcctagaggtgttttggatcaaacattaaacttaaaaagaggtcaattgatgcagagacaaaatgggttgaatctatctgctatctataaaaaataataactatgaggcttctttgcagtgaaagcctgttctgcagattcacatgatgtattatctacatttggtgtctatc

SEQ ID NO: 205926 - DNA, 655 bp, Cannabis indica
attgtggggcttcttatccaatttaggtaaggagatggtaacctagtagcttggacctaaaaaacagttttactcatgtccatattgttctatgctccatcctcgggccactccttcctaatcaataactttccattaataagtcaagccatgttctctaaaatttccacgaaatcctcctcaaggtcgaaaaagatgccagatagtcttggcttcaaagtgttgaacctccaaagacacttcaatttcactttctagatttggcccaagatcacttttaatctggaccttaaaactccaactccttcaaagaaactatccaagattccagttctcgtaacttcttcattagatcaaaatcaggttctaagtcaataatcataggctaaaggaaaccctgatgaattttatccagttcctcaacactcttctcatttgcatcgtagtgttgttcttcccaaaattgctcgtctctttcctcagctgtctcctccaaggtgcctttatatgcctttataataataaatgtgttgttctcacagcacagagggtggttacattcattacaaaccatcatttcctcttttaaaaccatattttccacgttcgcaaaatcactaatttatggttgtctcccattattacgcatgcacca

SEQ ID NO: 205927 - DNA, 958 bp, Cannabis indica
attaattaataggagtactactcaaccgattgataaaaccctattggaaagtacgtagttgactttgagaaagtcaaaatgtccaaatccattttactatatattgcatgctgccatgtcttaatacatatatcgttgaatttttctatctatttatttttttttattttctatatatttgccttttaagttttttttttgaacaagtgtacatttgtcttaatttatgaataattaatataacaaaatatataattatataaatacttaattatttgatcagctacaaaaataaaactatttaattataagttaataattaataaacctcaaatatatatatagtagctatatatgactttatttccttatacaaaacattagagataatttgttgaatgttactagcttttttaaccctaaaatactagctatcatagaatatttagtgatattttctaaataatgaaataaatcttacaaatagtgagctagatatgaaaccttatatagaaaattaaaaaaaaataataaaaaaatctattttatttgaccgattattacccgaaattttattgtgtgtttaacttatttatatactattattattttagttattattttgtgcataatttctatacaatttgatatagcattttgactttggattttacttataatcaatgtattaaatataattaagtttatattttgcaatccaatgcattatgatgcaaatgcacataaatgtaaatttggtatatatatatatacatatttgatcatatctaattaataatatgatgcaaatctgcattattatgacacagtacacgcacaattaaagtactacacaatatataattaataaattgaaaaggttacaagtggcatttgtagaagaaaagatagttttctttatataaatatattttgtcctagccttttgagatctcta

SEQ ID NO: 205928 - DNA, 1734 bp, Cannabis indica
tttttttttatttaggtccctaacattcgtgggctctatgcgcggacctaatccgtctatgcctaaggccagccatgcatcattcataattaatgcctatcttaaaaacaatatttcgcaaatatagatgattattgtttattaattaaaagtgtacatttttcataattaattaattttgatcttgattcatcaaattaaaaaaaaaaagtaagaaaaattaatgtgtattaattgagtatacaatatatactcttgcgtcacattcgtacccaaaaactatacctactcaggaaattcgtctgatatgaaacccgaaaaacctgaaataaaaaacaagttaaaaaaattatagggtgtgttcaagttacactcgattacccactggaccaggttcaaattctaaaattgtgacaccctaaactcgggtgaaaccccaaacccacccgtgttttgaaattctaaaattttgtcctctggactttgaaacatatatcaaattatgtcctctgaacttttcaggtcgttaaaattttctgttgaactattgagaatgtcagaattaaagacttttgtttaattttaccaaagaaagtctgacgttcatgaaaattttaagagcacaatgcacaatttagtatatgttaaagttcacgaggcatgatttggtagatatcaaagtttggggcacaatttagtatatggacaattatcacattagtaaaatttaatgaaattagacaaaagtgtttaaatccaaatattttaataatttaagagaaatttttaatgacctgaaaaattgagaacataatttggtacatgttaaagtttaggcgataaaaatcttaattaacttctaattaattaattattttttttaagaattaatttattatttaatattagtcttaaactaaatcttagtttaattatttttacttgggagattaatattgctattgctgatatatggttgacctgatatctaaattaattgaccaccatgcagctagctagcaatcttttctctcgaaaaatgacacaattgaaatgacacaaatacccctaactataatatatattatataatgagccattaattaattctttctcccatgtcccggaagacccagacaagtgtagtgactgtctaatagtgagtattgagtaataatttttccaacatataaatataccgtacactataatatgcattattaaatagagattaattaatacaactcaaaataataagaatgattgttgttatttaatgctatatatacatagaattacatgaattaattatggaaaggaaatcaatatcagtagctaatattattaaattattaataataaataaataacaaaaacgtaatacactattattattattattattattattattattattatagaaatattaaaggacactgataatatcttctttccttttcttcttttttcgttatgtttattcttcttctttcttttatgacccatttaataaaagcattagctggattaattcaaaaatgacccaaactcatttaagacaaattcaaacttgtttattttgtacaaattttgagtcgggttatctgatgctactcctatccaaactattcatagtgtcgtaaagtggtacttctatcaggttttcttacatgtacgaaaaagaatgttgatatagcagtttaaactactgtcatgtcagtgccacatgtg

SEQ ID NO: 205929 - DNA, 522 bp, Cannabis indica
atatatgctatataatgatacgtaatattaaatgtggaacataattttataaaattaaataaaatttgatttttttaatgaaatatatttatagataaataaatatatatatttataagagacggaaacatcaagagtcgatatgtccgagtggttaaggagacagacttgaaatctgttgggcttcgcccgcgcaggttcgaaccctgctgtcgacgattttcatcttttttatttttcttaatgatttttttttttaaggaaagggattaattcataaataaataaatgaataaaaatgctaaaaaatttatatttttacagatttatttttttaaacacttttacgggtatttttttttgttttataaaaaaatacagatttgattttttgttgtttccgaaaaaagttattttaatgttgttacagaaaagtaatatttgtttttatattgcttttttgttgtttctaaataatattgtttgacgttattgctacaaaaaataacacaaaaataatat

SEQ ID NO: 205930 - DNA, 517 bp, Cannabis indica
cataagaagatgatttataaaccttttgtacaataatatactatctaagaattttcttaatgaaaaagctaagagaaaaaataaatgacaagagcattttaggcagtaaaattgttgatttcttcatagttagaggatgttattacttagtaattttagtattttttctcattttaggaataactcaagttttggaagaagatttatttttatgagtaaaagatgatgaattatttgatgttttttattctaggtgatgttggtagatgaattgatgtgccaaaaaaatattttttaagagttttcagaagtccatgaggagcataaacccatgggttatcgttgtagcgagggtgaaagcgagcaaataaaaaaattaaattttgaggcattaggccccgtccccgcggcaaggaggcaaaatttgaactgtgatttttttatcttttttttttgttaaaagatgaattatcatctcttttagtgagatattcttagtactataaataggacctct

SEQ ID NO: 205931 - DNA, 892 bp, Cannabis indica
ttttaacaagttgacgactcatgcaaggctatcactgtcaacaatacgtttgggtatggacaaaggttatcaacacaattggtctcacctaactgatccaaaagtagttgatatttaaatgtaatttactccatcaatgagatttttttcagtttacacaaaccctaatggttcgggttaacccgacccatcagtcaaaatgactataaataaggcttcatcccttcatgcaaattgttacaaatttttgctaaagaattcttgtatgagaaaaagtaataaaatactccataattaagagtataataatattaactcgtggactaagacttttaatgcccctcaatctcatattgttcctttcttaatctaatttcttcaacttataacattttttttttaacttgtttctaaaaaactcaataaataataaataatttttaacttatccctcgtaataatttgaagagaacataactcatgtacaaaaattattcatgccttgaattatagtttttataatttaagagaatttttaacggacaaaaaaaattaaaatttgaaagaactaaaattagtaaagagtaatattataaagaaaaaggtttttttcttacaaaatataaaagttaaatatgtataggctaattagaatttttaacccctaaactttaacatgtaccaaatcatgctccttgaactttcctggccgttaaaaattctccctgaactattgagattgttaaatttaacgacttttgtttaatttcattcaattttactatttgagtgattgtttatgtattaaatcatgctccgcaaactttgatatctaccgaatcatgcccctcgaattttgacatatactaaatcatgctccttgaattttgag

SEQ ID NO: 205932 - DNA, 1669 bp, Cannabis indica
cccaattagattaaatgagtttagaggactaaagattgaacttttatatgtgtcaaattttttattaaatgtattttagatttttatgttacgttttatttttatattgttattaatagagatttattacttatcatgtcaaatatatactttaaaaaataaaagtaaaatcttggtaaaaattatacaattatcttaaaaaatgaataattataaactctgttcaaatcgtggtttcgaaccaaatcaaaccatttttaaggtttggttttagaaatttattaatctggtttggtttccaataaaaattgttatagtggtttggttcaaaaaaaatatgaaatactggacaaaaacaagaacaccaattttctttttttaaaaaaaacatactcttcttaatttgaagacaaagagaaagtggttgtgggtgaaaaagtggttaacgagcatcaaaaggattttaaatatggtttgggactgtctgattcacaagctctgatcaaaagagacgtaccttcaaattgtcattttccaaaattattgttggctttacaaaacttgtcacatatcttgattttggtggttttctaaaatgttcagtattgcctcaaaatgtatcctttttataaaatagtgtcgtttttttgtttaattttgttatttcaggcaaaaaatatcggttttctccgttattattacaatgtgtgtcaattttgtcattgtcatttctcaaccatggtcataagcttattgttgtttaacaccgtaatggaatgtgatgtttaagagagctcataaaatcaaaaatataaatggatggagtagtagattaggggctcgtttgatatgtcgtattatatcgtattgtattgtattatgttagattgtgttgtattgtattgtattagtattatttaatacaatacaatgtttggtattgacttgtattaattgatcatgtaaagttataatatatttttctatacactcgaccctaacaccaattatgggcccgggtcccgggttcgggttcgggtcgggatcggggtccgagttcgggtcgaagttggggttcaggtttaggttggggtcctataggtcggggatcgagtttgggtctgggtccaggccccgggtccgggtttgggtcctgggtcccagtgctgggtccaggtctgggtcccaagtcccaggtcgaggtccaaactcgggtctgggtccgagtccaggtacgagtctaggtcgggtccgagtctgggttcgggtccaggtctgggtccaggttcgggtaagagattggtgtttactctaaatcctttgtaaatataataatacaagctaatacagaccatttgttatgtattaaataatacaacatacattaattttgatcgtaataattaatacaatacattgctttatccaaacatagtattatttattatttaatacaatacgatccttagtagtcataaactgccatattaccacaaacggagggggtgttcactcctctctaaagctacaattgtattttttaaaaagaatattgccagtaaaattatttgaattatatgatttgtgatacttaattttacaaattgatttttcttaaggttaacttctaaatcctacttcttttgatatactatttaactttctatta

SEQ ID NO: 205933 - DNA, 520 bp, Cannabis indica
ttacaacatatatttgtaataaaaaataatatatatttatagacatattattatttttggtgaattggcataatggttaagatagattgcatataatagaagtaaggattcaaatcctacatcctcactttaaatcctaagtctcgactccgaacaattggtgacatgtgtctttgacagaaaattaatatttaaaaatattagcaaatgcaattataaatttagggtaggaacaaattaatcacaactatatatattatcggacaaaactataataatgaccacttttataaactatatatcacgatgaattatatattttaacacataattagaaataagatatgatactataattcttttacttgagatcattatagtcacgactcacatctctaactcatatttatgatacatttagaaattgattgcaaactttatcacataaagggatctaggacaatatgtcgacccagaataaatagggggaaaaaaatgagacaatatgtttgtttagttt

SEQ ID NO: 205934 - DNA, 1288 bp, Cannabis indica
agtctgttgtttttgaattggacagaagataatgtcagttacaattctaatgcaaattaactttaattacaatttcccaacattgaagttaatgagaatcaacgtacagaattaatactcttaaacgaatgctttttaaataccaatttaataacattgaacaaccaaatgagttactaagacagtgcaattaattgtctataatgaactgatcacacaccttgggtaatgagtccaagtatgctctgggaatctccatctctgcaagcatattactgttaatagtcattgcagccttaagtatctgattggtacaatccttacattgctgcaacctcttccgggcatcatctgagagtccattcggaggaacttttggatatggaagccaccacttatcttcctgcctaattgaaggtcttccaccaatcatgtatccctttccatcattagaatcgtcaagagctacatttcgatcgacataggagaattccgtgttggaaaacccatcaagcatagccagaagcattgcatcaagctttcttaatgcagggaggttaatgtataagtctgcacgaggccgactctccataacttcaaacgctcccccacctgggaacggctgtgtcgtaggtacaagctgaacaatagaatcacaaacagataataaccactccatttctctacgccacatttcctttttctgctgagcaagaggctctaatctccatagctcaccaaaaacagttgctgcatcaaagatcaaaacaaaatttaaaataagtaaaaacattacagatgctagaatccatagaaatacaattatataaacctttgtaatcattaagtatggagattaacccgaaagattggttatggcattagatatggctagggcagtacagactccttttccacctccagacatatcttctccaagcagaagcttagcaaatctctccttcatcaactcaacctctgcagatttataataacaacaaaaattatcaaatactcagcaaaagaaatgacacacaggatctctcccaattctacataaataaataaaaatacctacacattcctaagaaattggtatgattaaagctcattaattttattttatttttttcccgggaaacaaacaagaaaaatgcaaattacacaaaaaaaaaatacaagatctcaaaaaacgttcaagattaatttcattatatatatatgtatgtatatgtatatatagcaccatgactaaataatctctttccagacaaaattcataaataaa

SEQ ID NO: 205935 - DNA, 1194 bp, Cannabis indica
gaatttttgaatgatatacaagtctataatgtttactagcttgcatataagtgtctcatttcataacatgtaatatgaagtgtagatatgtagtaaatatgtatcgttgctagctactactactaactattatattatatgtatagtttgttattattatttagtttcttttcttatttgattaatactttgatcccttatgtgtgatttgttttctaccattcaaacaaatagtaggaataggagtaatatatatagtaggtgattctattatacataactcttcttttttacctgcaagtgaattatttttataaagatattattaatatatatatatatatataaattcttcattttcatatttatttttactaattaaaaaagtattttcaattttgcgttttaatgtttctgtttctttttttttttaataaaaaaaaaacttttggtttttagtatttacgaagttccaaatgtgagaaataataacagctctggtttatagctatgtatatccacacgtgcagttgatggagcaaatgtcgttttagcatggatataggcaagtagatataattataaacactcaaataaaatgtgcatatctttcagccaaatccaataatgaatttatttagttaaacttttacttttatttttaatttctagaaagttctttctcaataatattatttaaattagagttttatagagtcaggaaattaatttaaattattagagtcaaattataaagtttgagaaattaaacttaataattaaaaacaaattttattgaaaaatttacactaaagcaatcggcctttcatattttttacactatgataatttatatcataattatttaagatattatataaatttttaaaaaaacaaaataatttcacataataaaattcaaacaacttagtacacgaacgtaaatttgattacgtgatgtgaataaataatttcacttttttatattttaaattatttctaagctcttaaaatttttgtaaataaatattaataattatattatataccgtgatataaaataattaagatgacaattatttatatatcaaaaatacaaaaaaattgtaatcagtacactcgtagcacccattttcataaactcagaggccgcaagttctatatctgattagatgagaccaatgtttttttaat

SEQ ID NO: 205936 - DNA, 822 bp, Cannabis indica
tatacttattaattttttttttgtcattttgaaaaagttttcttaattaaaatattgcaagcgtgtattgatttttattatggagcttaatgatattattgtttataattacttggcagtctttgctaacttttttaataactttaaaaatgtaaagtggtttaaaataacaatacatacaatataaatatataaatagttatgatgagtaattatatatatatattattattataaattaaatttcattcagaatggtttacttttatctgacgtaaacaatataataataagcgaaaaccatttttgtttgttttgaactaaggtagaaaaaaaaatgtatatataattaataattaagaaaaaattgggataagggtcattatcagtttgtggattataagtttgcttctttaatttctttgtttaattaatattgtaattatcagtactgatttcttttcataaggagaaaaaagagtttgaaagaaatgaattaaattattcaataattatcaataaaatccatgatactttctctataatatacgttattttgaaggaactacgtatataattatttatataatatatatgactttttttggtatgcctatttcaaagaaaatatgatattttttttagtacatgctctatttttcaaaatttataataaaacaagttggatatactaaatataaaatcggatatgcccattataaaaagaaatatgcttaatatgttttgtgtatctcgtgttttctggttttacatatatatttcttattttattcgtaccattattaattttttatttttttt

SEQ ID NO: 205937 - DNA, 867 bp, Cannabis indica
tcagctgtccattttctaagtttcgaaacttcttgtaagataagaaattctcttatggaaagttagctttgaccatggttatttctctttaatgtgttcgattgtgtcttgataaaatcatatcaagcacactgtttttggcatgtatcaagtccatatacatgattgtatacaattttggcaggtttctttttctggtctggtttgttgctacagaacctgtctttgatgctgcaaagaggattttcttttaggaaagtttgtacagctttggaatcaactttgtggctgtctctagggttcatatgctctataaatagaacctagagagcagtcaatcatttaactattctagctttcattttttacatattctcatttgtgaagagagagtttttttttgtgagaacctagttgttcatccaacatccaacttcttgtagcaattggagtgtgaagggtctttgtgtcagagagatacctttgttgtagtgagctatttcgaggcctagaaagaaatggagactaccaaggtcttttaatttaaacttaggatcaagatgtgaaatgaaggtggtcaattctgaagtgttgttagtggcaactataatgtctccaacatagattagaagggttagaaaatcactcaatttgtgccttatgaataaaaagtggtcattttgggattaatgaaaaccttatttataagagtggtactaagtttagcatacattgtctcaaagattgtttgagtccatataagcttttttacaattttcacactacatttttgggtaccactctttttggaatgtaaccttaaggtagttcttgtaaacatcctcatgtaaattgtgaggtttagct

SEQ ID NO: 205938 - DNA, 626 bp, Cannabis indica
atttagttttattacctcttgagatgatgtaccctccaagtgccatcacaactagcattgcaaaagatccaaatgtgttagcaactatcatatttcggcccaaggatcccataagacgaaagagagctatcgacatttggtgcagagagaaatacaacaaaaactgcttaagaaatctgcatatgaaaatcacaataacaaactccattgtaactcaatcactcataatgataaaagtaataacagaagagagtagaagattatacctagtgactgctggatcatatccaatcacataatatgtgacggcaacccaaaacccagactccataagtgatgttgggatactcagaacccaagaagggagtgtgtagacccagcttgggtagaaccgcaagtccctatgcttgtaaagaactggaagcttggccaccaacattgatacctctgtaaagccattgaaaagaataataaccattgaaaagtatagagccccgagatataagccaccatcatcgattgtatcgtggtgcaatgtcgttcgaaagaagacactcatcgttatcagagcaacgaaaagtagctggagcacaacaaatggtacttataaaccagagtcgaatagc

SEQ ID NO: 205939 - DNA, 1114 bp, Cannabis indica
gtatactaataaaaatttccctttaaaaattcactacaaaaatcttattttcagttacaataaaatttgtgactaaaagtaaaatagttatgactatttataaatcatcattcatatgttgtgactaatctgtggctaataatcacaatttgttatgactaaatatatttttagtaacaatacttggtgtgactaaaattaaattagtaacaagtacttgtgtctaaatatatattatgttttagtcacaagtaattttttgttgtgattaaaagtcacatttaaccataaaaaatttatgtcatgtgactttatcattataaagatagttgattttttttagtgattataaaaaattatttcaaaatttataatttttttaattaatatattatttatttttataattttatttagttttgaaataaattttaaaataataatattaggtttaccaatataagtgtgtcatatgtacaatagacataagtagttcatattgcagttaattgtgaaaaatacatgacaccctaaatttacaaacaattcaatagtttagagggttttattgtcaaattttaaatttaaaaagttaagtacaaataaaatgatagtcgaagagtttagccgccaaaaattcaattcttaatcggatggggctttatgaactttagttgtaactctttcaataatgcaatacaaaaaaactcatttttaccaaaaaagtgtaattttttgcatataaaaaatcgattctcgttttaattattttatataatataacactacaagaaattttacttttagtcacagcaaaatttgtggctaaaagtaaaatagttgtgactaattacaaatcaccgttcttatgttgtgactaaaaatattagtcataaaaatcacaaattgttgtgactaaatatgtttttagtcacaatacttgttgtgactaaaactaaattagtgataaacttgtgtctaaatactatgttttagtcacaaataagtttttattgttgactaaaagtcacatttagtcacaaaaaatgtatgttgtgactaaaaaatgtcactaaaagttgctatttttgtagtgtaatatcgttttaaaaaa

SEQ ID NO: 205940 - DNA, 535 bp, Cannabis indica
tagtccacaataaattgtaatttctgtgactaatacctttagctatgaatcttttagtcacaatataattaataattagtcactaatttttttactttagtaacaaattttattatgactaaaagtaagatttttttttagtgagagaattcacatctaataatactatataattaatagttgaaaaccatctttattttttatttttactcattttgattataattaatctctataggttttattgtttatttgaagaaaattgttaacacttattgtgagtgttagactttttatttgggtctacattaatttttattatttttgttaaaacttgagttgttggatagtttcttagtgtgttagctcatattgttagtgatcaatagttaatgagtttaacatctgtgtgtaaagtctaaagcagaagtatgagattttctagttaagtgaagactttgattatcaggccaatctaactaaatttatatatacttaattcttatctattattatgggataatttcaaaaaaaa

SEQ ID NO: 205941 - DNA, 545 bp, Cannabis indica
aaaaaaaaaaaaaaaatcaatcacatttatatgtgtatacataaaattatataataactatacgagtaggatatgaatgaatcatataatatgtaacaatagtaacatattaatttaaaaataattataatagtgcggtgtagtttgaattatttttttcgaattcaaattcgcacactgcaccaaactgtattgttttgaaaaaataccaaccgcacaacaaataattttaaactataattttttatgttgtgtggtgcgttgttggtggctaattttatggacacccataaattacattattctatacaactttgttaagagttattgtatttgacattaattaccttttgcattagttgtcttaattttgcttaaaatttttaatttatttaataattaatattttagctttgatttaggaataattatgataactcttttatttgggtaatttataagattgtgtaaaaactaggtatcaaatttcactcacccaatatttctagaactaatttttttatggagttttttttttattttta

SEQ ID NO: 205942 - DNA, 830 bp, Cannabis indica
agagctcctctagctcatttttgcatatttagagaaatagccacaaggtcagagcatctctatctagtttctctctctagaaattagagcatacaaacttagccatttttttgtaataccatctcgtaagaataaaaactcgaagtagatgtagctccattactgtcccaataaagggaatgaactactataaattgttatgtccctctatttatactcaactcacaattcattattgccaatctagcaagtgggtgcggcttaggaatctctgtcaagatttcatagtcaacattttagtgctctcattgagagccacaacccaagaaagtcacttacaatatggttgcaacacgcccctcaagcgtcgaaagaggcacccccagcaactagccagcaaactgtgggcacgctagttagtgaagctataatggagactactcctacacgtcacgtttcaggaggaggccccagaaccagctccacaactcgtcccccaaggccaccaaatgctctcagcactggaaccaactagcatattccacctggagagccacatgtgcagttgaaagaccttgagaagaccgattctaaagctaaatagcatagccaaactgtggctgatctacaacaacaataactatgggactctctcaacaagaaacacaaacactttcaacattggttcgtggagaactggtggatcattgaaagacaatgagttgagcaggaacaacgaagacctaacatttcttggttaacagtattaattttatccacttgttaatccatttattttactaatgtattctataatttcttcttcctat

SEQ ID NO: 205943 - DNA, 1030 bp, Cannabis indica
atagatttgagttgagcgcggggtttcaaagcctgactgaaataggctatgggacgcccctcttgcatctagtcggccttgattccataactggaagcatttattttcgccacaaaagttttagaaaagtctgggagagcaaggaccggtatcgttgtcatagctgtcttaagagcattgaatgattttgtagcagtatcagtccaactaaagcgatccttcttgagttggtcgagcaatggtgccatacccagccacaaactttcggtaataaccagtgaggcccaaaaatccccggagttctttgatggtttgaggtagcggccagtttagcatggcttggactttagacgagtcaaatgccacaccttctgatgaaattatgtgccccaagtattccaactgtcgctgacctaagcaacacttcatattagcatataattgatgcttggaaagagtttgcaacacaatgttgagatgctcaacatgggtagcttcatcaagactataaacaaggatatcatcaaagaatacaaacacaaaacgacgaagaaaaggcctaaaaatttcattcatgagtgcctggaaggtagctggtgcattagtcaacccaaacgacatcaccaacttgtaatgaccttcatgagtgcgaaaggctgtcttatgaacgtcttttgcatgaacacgaatctggtgatatcccgatcttaaatccaactttgaaatttattagctcatcgataattggaattgaaaatttattagctactgtcaccttattaagagctcggtaatcaacacaaaagcgccaactgccattttttttacaagtaataccgggctagaaaaagggttggtactaggttgacaaatactggcatccaacatctctccgaccaactgctcaatttcatctttcactgacgggggataccggtacgggcgaacactaatcgaagaggtcctatacggagaattatggcatgatcatggctacagtttggatggaggcccgttggtggttcaaaaa

SEQ ID NO: 205944 - DNA, 1322 bp, Cannabis indica
aaagatcaataaacaaataaagaacacacgttcagatccgaaagatatatatctatttgaaaataaataaatcttatatatatagatgtagatgtagatgtagcatacagtaacttttatttaatttttcagggttttaaagagaagttattgtatattatatgcatgaatgaaatatatatcctctttaggttaatgtgatttcgtttatgttagatacattattagattaattaacatttaacacgaataataatattgacctgtcactcacatgttgtagactgaaaatgaaaaacaaaatgacaaatttacttgcaaatgagaataaaaaaatattacgtttccagaaccatgctaattaatttctttcaaaaaaaaaactatactaattaataattcataataattttttaaaggagcttttttatctttaaatttaaaaactgttttttttttaatttttatatatgtaacttcacataaaaattctaatagcaactaaagagcataagaattattatagaattattattagaacaatttaaaccgtaaattaaaaaaaaaatatatgaaataatttttcatttttaaactataattccgaatagttgttatctttcatacatcatttttttttatcacggttgtatattgagcaatacaattggcacaacagatatgcatttgctctcataaaattgtattaaatgataataaaaaaaaattataataatcatacagtatatgaaattgaaaaggcacaaatgtatttgcaacagagtttattttctggatatataaaagcattcaaaataagcaaatatcttagaaattatttgacactaacgtttcttctatataaatataaattttggttgatttagcgtgtgatataattttatatattttttattagagaaaaaaggaatgaatgagaaaacagcgatttttttatatatataaaaagaaaaaaaaatgaatgccaatatattattattaattattatacaaaattagcggatctgtcattttcttgaaccaaagcttggattgcttgagcaggtcattttcttagggaaaaaaattaaggtaacattttttactatgtgaagagacaatattatattaatttatttcctcacttatatatatattttaaaaaaattaaaaagagagagaggcccacttaaattgctggctgttctttcttacaaatttgtgtcagttggacacaaagacaaaacatgcatgtttttcctctatggaggaagagagtaagcacatgaaaatgatgaaaccaatacccaaaaggcaagaac

SEQ ID NO: 205945 - DNA, 994 bp, Cannabis indica
tagggtttagggtttagggttagtagggtttaatgggaaggaaaggaatacaagaaagtgtatctatatatgtatgcatgtatgtatgtatattcatgacttgggtgggatgtgatatggtgttgaattaaacagaaccattgtatgaggttgcttgtattgcatgcatttgtgtttttattaagactcttttccatttcaaattagtgagtagtgtgattcttataatttagggaatttgtagtgagctttcagttagagcctcatgcaactatgcagaagtatatattggagataattaggagattttttttgtaggactgtagtagattcaatctttgccttaaatatagaaacattttgtgatagacttagaagttggtatgactatacaagaatttcttgaaagtctgactaacattcacattgctacaatgttgtaaaatcagtgaactttaggtagttgtttttattcctttgtacaatgacacaaatatagagctttaaactctgatcatacggctataatttgggttgtgaaggagataacggtttggtttttgaactcttagctatatggtcttattttgaaattctaaagtagttggaatgagtttgataattgtgagcttatgaagttgtttcatgataagatgatttgacacaacaaaatacctagaactttagctgctgaaaggactaagattgttttgaagtttgagaatatttgatatgatagttggtaatcaaagggctttgttttcttttacatgttttgcgcattttgcttgaaacacagtggtaattaaaagaatctgttattgccgtcctttttttttctcaaggcacctaatgtattaactgatgtttgtagcgtagagtttgctagacacaaagggtatgagtggcttcttctttttccctttttttttaataatgtagttcgaaggaaactggtcagctatagaatcgtttggtgatctagttatcttgt

SEQ ID NO: 205946 - DNA, 946 bp, Cannabis indica
taaataaataaataaataccaattactctcatttatttatccttacatcttaattaattcattaatagttatgttttttttaatgaaacaaacattgtgcattgttggaagatttaagttattaaaatgataattgttaaaatatattattggtgcttaatatttttttcggtgttatactattattggtataattacaaaaaaaaaagtattgagtctaatgtaacttaagaaaataatttttaaaaaatatcactaaccaatcatatgacacaacctataaaaggtattggacaccactagtacccaataacaattctggaaagaaagtttttatagtgtttctctatttttcttttctttttttttttaaaaaaaactaaatttaactcctatatatattttgatcgaatatgctattaaaaaatattcttaccaaaactaattagtataagatactatattaaatctattttgtataatacaaactttgaattattatttaacaaagtgtaaggattaaattagtattttttatacaataaaatataataaattacaatgtttgaattgaataatatttatttgttacaacaccgttatttttaattactcatattttattagttaaaaaaataatatatttagaactaagctcaaatctctatggaacatttgtttttgacattttttcattttcaaggcacattaaataattatttttaacatgatctattttttttttttttttgagtaacggctgctatttaataataaaatataaggtattttttaagaaattatattccacaaaataagaaggaaaaatctaaaataaatgtgttggagctttcaataattttcacataaaacattttgttttatttgccaaaacatcttattcaactaccatgatgaataattgaatatgtcaaaaaaaaaaaaa

SEQ ID NO: 205947 - DNA, 785 bp, Cannabis indica
aatagctttaataatacctagaccactaatttttattcttttaaatcacatcattattctagatctattattcctatttttcatttatgaattaacatttacaattaacaatatttataatactttcaattggttgcccacttgccccaatgtaaattttaatattaattgttatggaatttttacagtattaattgaaaatatactacatggataattaaccctgtaaattaggggtaagcaaaaatcgattttgttacggtttttttacaaaaaaaaaaaaaattaaatttatttttcgattttcatagttataatttgaaaaccgatcgactatatacaaatgtaaaaaaaaactgattgttttaaaccgaccaaaccgaacttcatttttttaaaacattatacaatgtgcccatcatgattcttatacttttattctcataaaaagtgtccttaacataaaaattagttagaacactaagttagaccaaagatatatttaattatattcctttcttccccaaaagaaatatataatagtaatagataaacactaaagaaaataatatatatataaggtactttttaggtgagagtacgctctcacacataagagcatttttatagcttttaattttaaatttaataattttagtttgtttgcttagagtatctctaatggaggtataaataagtggtaaaaagctaaaatatagtttatttaataaaaagtattctttaatggtatgccaaaaagtgatataaatttggcacataataaa

SEQ ID NO: 205948 - DNA, 734 bp, Cannabis indica
tgttttgctgataagtttatagtgtattagatttggagagtgcaaaattgtagaactttgggaacataaggtccttagagtttgagtgtacaatgattagaatcaaacatgatatttgtaatggagttaggagctttcataatgaaaaaattactcagagagatagagattggttgataagattacatgtatagttttgttattgtctttagttttggcttccttaattgggagtgctattcttaactcgtggttgtaatagagtttttttagcgtatgcttaccaagaaaaaaatacacattattaaaatttgagacactatttttttatttggggtattatttgcaattgtagtattttaattacatttttgtttaatagtttaatattttattcttttaaaaatcttaaaattatgcctctaataaaatctatttttattttcttaaactttagtgtttttttaatattaatttatgtattagtttttttcatgtgaaaaaattatgatagaggtacaatgccacttaatttttttttttttttgaaagaacttgaattgcaaccacaaggaaaagatacaaagcagtacaaggttacaataaagtcatagaaactcttgaattgagccattccaaagaccctccctctcaagcctaacagcagccttagccaaattgtgggatagaacattgtggttccttgactcatgaataaccgctgcattaggaaa

SEQ ID NO: 205949 - DNA, 949 bp, Cannabis indica
ttgaaaaatagaaaaatagaagaaactcattatattggaaactaataacattcatcatagaaattaggaattcatgtcttgggttttgaaataacccttaactaaatagaaactactttaaactagatattttaataaaaatcataataaaaagtacgagattaaggagaagaaaaagaaacaatgatgatgaacaattggtgctgcaatctccttcttcttctctttctcttttggacttctctttcaaaaacatagttcaaaagtgctcaaaatcaaaccctaaaggtcctatatatatcccctcaaaaattagcaatttaaaaaaaaaaaaaagataaaaatttaaaaagatggaatcgagtcctagctgcagcaagcttctccctttgtcatggccacgaccccctgcaagcacaattttcatttgtttgctacgacgaaactctaaccttcgctacaaccccaaagccagggttttgggtcttcatggattttcatactctaagaaaaatattattttgatgagtctttacaatcctctaacatcacatagtcaatttaaaacaacaaattcattaaatttctctacataaaattcaatttactttcaaaaactcaaaaaattcataaaatgatgaaaaacactaatgttaagaaacaccaccctctaaatatgaagagatcaacaattttatagcctaaagtgctcttatcaaattcccccacacttaaattttctagtcccttagcaaaaatactaattaaattcaacatacaaataaacaaccaaacaaacaaataaatcaaataatggtttcatcgacagtaattttagtctcaaaaattggtcaaacagataatactataaagattcttaattccacaatctttagaatttcaactcaacataataacttttcaaattcaatttttttgtgtgtttgtg

SEQ ID NO: 205950 - DNA, 500 bp, Cannabis indica
aaataataacataccacaaagtataagtagcaccgaacgtatcgatgataatggtcgtttaatagtgtgcagttgctgtcgttataaatcatataattcatgtgtggagtggatgagaagaaaaagaagtgaagattaattaattaattaataatatgtaaaaatatcacaaagcaattattgccacgtagtgaatcagagatttggtatgggatatactctcaacaaacaaacacatgactcatttttcttctcaaaataaaagagatgactcatttttatttattatggtcactttcatatattcatttaatattgtatttgtatcacagcaccaactaacctaatcttctttcctttcctgcctttcatcattcagtggacttaatttttttatttttagtttttaagcttctttgaaagaaaataataatataattttttctatttttgggtccataaaataaaataaacaatgaacacattgagctaagtttcag

SEQ ID NO: 205951 - DNA, 1386 bp, Cannabis indica
atatataaaattgaagattttcaggcaatctcttttaccattcctatatatatacttgtcacaacaattaattgcaaatttgttaataatttttcaaaaaccaataatttaaacaactataaaagctctttaacacataatagtataatctaaatattaattaaaattttaaattctaataaaagtttgcatagtatctagtttataattagacaaaataaagtcatccaataattaattttgtccaaaaattttaaaataaaataaaaagaaaaagaaagaaaagagtttacttttccctcttggccttgaatgaaagagttaagctcatgtcatttcaaggggcacctaaagaatcataaataacagtataaaaaatattacaaaccagcaagtgacattataaaccagtatataataaccagtaacagagtataaaccatgaatttagatatggagtcaactttgcatctgcagggtctggtgctacgcctcaaattaaccaaggaatggtatgtatatacatgatgagatatgaaaataattgatcatacctagaatcatgatttctaatctaattaattcgaaaaagttctatcaatatatatttgggctagctctacatcttgtattattaattatttttttcttttacagactatagaccttcaaactcagcttagatatttcaagaatgtaagggaggagttgaggcagagactaggagaacagaggccaaagctttactctcaagagctgtgtacttgtttagtgctggaagcaatgaatatgtattccctttcacaataaactccactgttattccaacctattctccccaagaatatgtaggactcttaataggaaatataagttcagtcattcaggtacttttttcttcttttttttttttacccaagcaaactgcaggagtattcaagataatcattctcaatacaaaaagaactaataacatcaatcacacacctctacgaaagtagagcactactactctgctattattgaatattacacttcttgcaccatttctatattgctaaaaactcaaagatcaagttaatacaaatctgcagcaataacagcagatgcacaaagagagatacaccccaaccctttgcaactagtcagtttaaagagttcaaaaatacacatacaggagtcctatcctaatccaattcagaatacaatactcaaactccatgcctgactttgactgatttggtaataaaaaaccaatgcaactgagaagatgatattgaaacaaatacaaaaaacaaataagatatcagctagcttcttcctaaatacccccatacactggtcttacaactaaaatagaaatcatattaattaagattaccaagt

SEQ ID NO: 205952 - DNA, 909 bp, Cannabis indica
ggtttatttatagttattatgagtttatatttctggttattttttgtttgtataatttatttataattgaattatagttatcgcaaccttactggttgttttttaattgtctttttttagtttttgccgaacaaaatgtatttatgtaattttataactttacaaatgtatttttataattaaaaattttaacagtaaattcgtaaataaaacataaaaaaaaatatttttatttaccatattaccattatttaaataataaaaaataaatagtaataatttttcatattcttaataaaattttattaaataatgactattaatataaccaatatttttttctttatttgatattgtctctaatgagcacaattataaatagtagggtaaatatatataagacaatcaaagggattgataatgtggtgtgtaatattaatattaatattaataataattaaaacagttttctagaatccaaaaaagtcttgttgttgttgtgttgacgagaagctaagtggtggaggaaggaggagaagtcagtgtccatatagcgttttgggttggtttcatcgatgagtttaggtgatgcctcaatcatgcagttcaaacccacgctgtgaagtgaagcaatggacattcttgactttgaactgttcacaaccactctgtgtaacacgctcttgtatcttccattactcaatatctgaacacagaacacacacacacataaaagtcttatattaatatttgaattgtttctgttcacataatttctttatataaaagtcaatacatatatatatgatagtaaccaaccagtgcatgaagattcggttaatggcgatgtctcatgctttaaatatatatatatatatatttttgaaattattattaaaaaaaccccga

SEQ ID NO: 205953 - DNA, 580 bp, Cannabis indica
ttcatatcttttttttttttaaagtggaaaatgcaaaagcaatttgagaaaatgagaaatgtgaatttttcatggaaatttaggcaacattctttttgtaacatacatgtaatactacccttcttcagctgataaatagtttcataatagagattcaatgtactccctttttctttttgtagcattgctattgggcaccagtagtgtctagtaccttctaaacgtgtcggttagtgatactctctaaaagttattatattaaattatatgaaactcaatatttaattggaccaataataattatattaaagtgttagaaaatactttttagcctttttttatttttcttttccttttttaaccttatttatttttttacattatttcagaacctccttccttagctgactgagaatgttgtgtcgtttattgttggctctattagaatagagcacgaaatatatgaatagagaggaaaattaaataatacatttcggagaagaacacaaaaacaaaaacaaaaaatataatgtaaatttgttttttttttgttgtctaaagaaggaaaagtgataaagtg

SEQ ID NO: 205954 - DNA, 918 bp, Cannabis indica
cagaaattgaattggcatgtgagaaaccagaagcaacaagtgtagtattggaagttggtagttgctgatgtaaagatgcaggagaaccatttgatgggagacatttttctcgatcagttgctgagcgtggtagtgcaggcggttgagtagggtgagttataataggattgagagtgttacgggctaatcaagtgatgaaaggccatggacctgatttagaaaaatcctgacgatatcgatcataacttgatcttggtaaggccgatccttccatgcaaggaccatattcaagagcaggatcaatgccatcgtcaagcttttccaggaagagagagcacttgtcaaaaacatgatcaattataccacattcatagcagaaatccagcagtcgttcatatcgatactcgatccatagttcatctcgtaaccaaggtagagaaatcatttgaccacggagaagtggtttagacacatcaataccaacccggatccttagaaaaggaccccacccttcattaagagagtcatcatgaacttcaagaaaatcatctataagatttccaataatcttggcaagagcctctgatttactaaggaaaggtaacctataaacctgaacccaaaaaggagtgatcgtatatgaagaaattaagtcagataatagcgcagttggaggacataaaattaaatgctgattatgaaaatgccaaggctccttggacaacaccctcctcatatccccttcacaaccaaaagtgaccatgaaggattcagaatcatagtcagaaatagtaactgcaaacctgcctaaccactgtttaagaataaaattcttaaattgattaggattgaaacctctcttggagtaaatacgacagagtacccgaaccttagtaacaccaataggaggagccgaaa

SEQ ID NO: 205955 - DNA, 606 bp, Cannabis indica
agttatatatatatatatataattatatataagatagctacacctacaactagaactaaaaacctaactaaatgactatgtatacattatacaatataactagactatactcaatttatagtttgtatatatattcaattttgatttatttatataatagttgaagaaatatcatatgtgataaaatcgataattaaagattatatatcatatatatgtatgtataataataacaatcaagctaacatttgtatacatttttaactcattatatagaaaaatgaatataagaataaaaagaactcgtgaaaagatatattattaattattatcaatattgtactaactaaaatataatatagatgtatttaatttatgtccaataaccttaattgtatatatttacattaaaatggtctctatagacagaattaattaatgtatagcattgactcattgagcaataataagtttaaaaaaaaaaaaacttaagatcggatcatttctatgcaatttaggtttgattattttgttttcttggaaaaagaagtaagaaaagaatgtgatttgttttggtacaattggatttggtacagtattattgta

SEQ ID NO: 205956 - DNA, 1112 bp, Cannabis indica
agggctagaaatcttgaatggaaagagtcgttatgtttcgctgcaatcaatgtaaggttttcttaaacccttatgtgtttatttcattattttcgagaattcgtatttaggatgttaatcaacatacttgttaataaatctagatcatggtattattcccaacatatacttattataagttatgaactattataatttatatgtattaatatatataatcaaggataaatcgaggtggataatactttccccaaccctaccccgtctctgactcgggtacgtataattaacctcgtcctcgcctttgatccctgctaagctgaggaatccctcccccattacggggcagatgcccgcgggtctccatccccgtggtgtttatgtgcaacactagtcatggtgctcctatttctctcatgttatctctctcatctattttttccatgttaatatatatttttttatttatgtataactatcttttttattgtgattttcgtgccttcgatccaacagcctagatcacatttaaagaaacacacctttcgaaatccaacggtctaggaatgttaaagatcgccattaaatgtgatgtacagaacctatgaataataatgatgacattcgccttgagatcatctagctgacatcactagttgtaagttcgcaaccctaggcttcacgcactttctcaagctacaagatacatacgaaccaagaaatcagagacacatgcaatccactcacggaatacaagaaatttagcaaacgtctacaacctcccactttgggattttaaagggcttgagctggtcatggtctcgcgtactatagtgaatttggatggtagctgcaagcctctgcgactcttgagcctcgaaggcttgggggtaaatattatccatgtttctggataagtgacacgtgtgcatctagtgttctaactcaacttacgggcccattcacaaagcccaaaaatacaagcggcccagcccaagaatgaagtcaaaaaaaaaggtttggattcaataaatatttggtaaacaggtaaagtctgacctacaaatccagaaggttaacacagctggattatcgagcatctaggaaggcat

SEQ ID NO: 205957 - DNA, 486 bp, Cannabis indica
ttgttcaattttactaatgcgacgattgtctatatactaaattgtgtcctcaaatatctactgaatcatgtcctctgaacttttagctacgttaggtttatgttagtaaaactggacaagagtttggaatataatttggtactagggctgacatccgatccaatttaatctttttttttctcatccaatctaatctaattagtaattgtatttgaaaaatcatctaacctaatccacttagacattaaaatccaatccaattcaattactaattggattatatcagttttataattggatatcgaattacacactaaatttttatataaacttaaaacatgaagaaaattacataaattgatattgaaaacgatttaaggtaaaaggaatgagctattagattcttttcctatgaatttaagactacactcgtgtttggaaaactaaagtaagtcaagcttgttattcttttagttttaggtggag

SEQ ID NO: 205958 - DNA, 1008 bp, Cannabis indica
gttggtggtgattcttgtaatgttatttcgcgctctgtgaatagtgttgctcatgcactaactacttctattactagttctataagagattatatttggactgatgattgtcaacgtttttattagttctattattgttaaagtaaatttaatttaatgtaattcatactttcttttaaaaaaaaataaataaataatgaccaataaaccaatagccattatacatggcaaactatacaagatagtagacttacaatcaaactcgtgaaaacaatccaaaagactaaagacattatcataaacaaatcacaaagaaaaacttacgtgatgtttgctttgatgtaatataatataataggattagtaattgtaatatgaatggtaatgtaatagaataaaaattgtaataagaatgatattatgatgtttggattaactctgtaaatattttaataaaataaaataagtgatatattgacaaaaataccattagttttattatttttaatatttaaaattttaataaaagtaacaaaaaaagataaaagagatattttctaataatgtaatcatcattacattagttttataatgtaatgaggattagaatgtatagtgtaatgaccattacaatgtaaagctattacaaagctttaaaatgaaagcaaatgatataatgataaaaataattctattacattctccaatataccaaaccaaacatgctccaaatgaaaaaggtgtaaagaaaacaaaacacaatgaaagaaaaattattattaaaaaatatttgagagatgaataatgttgtctaaatataaatagctagagttaaaatacataaatatttgtcggagtgcgtttttctttcttctaaagtttgaagagtattatttttagagagagaagagactctttagcatcatatttttttggtctatttcaaaactttgagaaaaaatagagaaatttaagataaatataggcatgaaatttaatgacacaaat

SEQ ID NO: 205959 - DNA, 1636 bp, Cannabis indica
tttttatacatgatctagattgacaaaacgtgtactttgacgataatcaacacatataataatatatataaataaaataaaattattttatttatacacacaattccaacgttttatttttatcatggctcaccatatattgattagtaatactaatactcatagtgtttagtactttgatattgattaatgattttctataatatttattaaagaaaaattattgagatccgatattaaattacaccaataacaattagatataattttagaaaataattacatttttaataaatattaatagtaaaatataaaatatgatatttaaaaatacatttaagatcttttgttaaaagattttttaaacttaagtgggggaccttaggattgggtctctctgctgcctcacccttgaaccttacaacaaaataactaaaaaaaaaaaaaaaattgttttgccatcaaaatattttattaggggtaaatataatttttgcaaaactataaggagctttgttgtaaatttctctctaaatataaattatttaattatagaagtagtgtggtcatgtatggctatatataaagacacataatgagtgaggtttcaaatacaataagtttataaattttttaacaaaatatcaaataactaatggcttatactaatcaaaaagacttatctctactgaatttagggtttcttcttcttcttcttttaattgggtcattggtatctcaaagtaatggtaaagtaataataccaactcaatatgcttctttacatctcaatagaacaagctttccacctggtttcatctttggaacagcttcttcttcttatcaggtataaatttatatatacatacatataaatcattatgttataatgaattatatgtaattaattattataaatatgggttaattaatttttctttgtttgtgatttttggttgattatagtatgaaggggctgccaatgaagatggtagaggaccaagtatttgggataatttcactcacaaatatccaggtttaatttctattttctttcttataaaaatttatattaattgtatttttaccaaaaaaaaaaatttagtcatgtgatccccctctcagtgctgtacattttttttctatatatatattatttaaatataagattaattaaaaaatttattccttaaatttcaatatttactaaattaatattcaataaattattaaatttaaaaattgctatccaatttatttaattttactaatgtgataattgttcatgtactaaattataatcttcgaacttaaatatattttaaatcatgttcactaaactttgacatgtattaaattgtacatcttaaattttcatccatgatagattttctttaatataattaaataaaaattcttaaatctaactatctaaatagtttaaaaaattgagtttgatttatgttagaatttaaaaacaaaaattcaaattaggcatatattaattatgacgtttttttttctttttcattagtggtaagtaagtaggtacatgaacacaaattataattcggctataataaaataatattctgctaataattcggctatttatgaagaagtttttttttttttt

SEQ ID NO: 205960 - DNA, 1652 bp, Cannabis indica
tcaatttcattaattctattagtttcaactttttctcatctcatgttaaggtagtttatgcgatgttagggacctaccgtaagagtgtttgttgatcttaaaattcagaagactagtaagctgaatagaaagaagaagaaattgaaaaaagctattgagaaagagagaaggattaaagttggagaagaaatgatggatcctttgaatggtaacaatggggtgaggcagtaaagcaagctaatggtcagaatcaaccagccggaagtttgagagactatgtattgcctactataacaggggttcaatcttgcattagactacttgttgttgatgctaataactttgatatcaagcccgctatttttcagatggtttaatccattgtctaatctaggggactacctactaaacatttaaacctgcatcttcctaatttcatggagctctgtcaaatatttaagatgaacgaggttaatgatgatgctattaaactcaaattattctcattttctttgagggagcaagctaatggatgatttgacactaaagttcttctccaagttctttcctacagctaaagaaactaagttgagaggggagatcaataattttttaccagctagataatgagtcactttctgaaagcttgggagagattcaaagatttagattataaacataataatctaacatcctaaaaccatgatttactactaggatctatttactaccatgtatgtcagttcgaggaagctattcatgttcatcacttgacaataccctgctataaaaagggaatcaaggattagagtggttgaatggaaggattcgctaatttttgctccagctaatgcgagaatcctaaactatttgtgttatttgatcgttttgttaattttatattttaggatgttagactattattagtaaattaagatcctgataaaataaatctcaacacaacagatattgaacaagctttacaagaggaccaaaatttgaaattaacgaaaaagcaatcaagactagaaatgaattatcaataagaataagaaaacaaaaaaccacttaggcataatctatccactcttccaaaaaaaaaaaaacacataccttatggattcatctacaaaatacttaacaagcccagaaaaataaaaataggtgaagatgtaccaaaatagaagatcaaataaacaagtgagatttaaggcttgacacagcaaaactaagaaaacacctacaaaattgatgcattttctgacccgatctgtctcattgcatagctctattgacaaaactaattcattgagttatatttagctcagaaaaatataaatatatattaagtctatcgtaacataaaaaataaatttaaagaactttaataaaaaaaaactttacttgactagagactcgtgctaataacatattttatattaggctaattgggatttttttcctccgaactttgacatgtaccaaatcatgccccttgaacttttttggccgttaaaaattctccttgaactattgagattgttaaatttaaggacttttgtctaatttcattcaattttactgtttcagtgattgtttatgtactaaaccatgctccccagactttgatatctaccaaatcatgccccctc

SEQ ID NO: 205961 - DNA, 578 bp, Cannabis indica
ctcttgaaggtatccagattggtattggcagactcctcgtttttaggccgaatggcctcttttggactaggataatctggccttgccaagttggtgagctggactcgcgtctatatctggaaccgtagcatgactttgccaatggactagattgatatcttgattgggcccaagtctaggcctgtcttggttgttgttaggctcatcactcaaaaaatatagattatactattatatattaacgaactaatgcacaacaatagcttgaataggggctaagaaaaacagcaagtaaacaatatcattatcggtacacattcttagagcaaatctaacaaccacatatcgctgagttagcacttttacgaacctagtgcaaagaaacacctagaaaaaaagacatcggataaataatatcttgaaccaaatcatgaaatttaccataatgctcccgatcattgttgacgttttgtgagacagttaaagcatcaatctcaatataataaatcagtgtaaacataatgaaacatcttttgcttctattttctagaatttttaagcataacaaatcaaatttc

SEQ ID NO: 205962 - DNA, 1351 bp, Cannabis indica
gaaggagcccgaaagcagtcaattttgaagcagttgaatgtgagggaagcaaatggtcaagaaaaacatttaggtaatccttttgttttcaaacgaagaagaagggaggagtatgaacaattgaaagaaaggatgctcaatcgtttagaggggtggagaatgaaacttttatcttatagtgctagaactgttctcttgaaatcggttgcttcagctttgcccatttatgcgatgacaacaaacaaaattccgattagtacctgcaggagtctagatggtctcatgaggaaattttggtggcttggaaaccttgacaagaatcgtttccttgctgtcaaagcctgggatactatttgccaaccgaaatgggcagggggtttaggtttcagaaggtttgaagatgtcaacagagctttattggcaaaattagcatggagtttggctagtatggaagacaaaccgtgggttcagtgcctctctaagaaatattgcagcaaagaaagcttttggagtgttcctcctaagcagggagattccttccaatggaaaaagattattgaagttagaaatataatccagcaaggtgcactcacaattgcagcggacggtcgaaatattgatctgtgggctcaaccatggatcccttggatggagttcggagagttcaatcatactatgcaacaactaaaggtacactttcctcttataagatccattgctgatatctccaagaaaattcatggtgcagaaacaaagttcttgaaatcttcggagatactttgggaaaccaaatccttaacatacctaggctgcctccttctcgtgaggataggttggtttggaaggcctcccaaaagggaaatttctccgttagaaaagcatatgagagggatcaatgccatatatttggtgatcacaataaactgtggaagatgatctggcatcccaaaattcatcctcgggtggctctctttctttggagatgcttcaatgatgcccttcccatcaatgttaaactaccgtttattcatgacaagacttgcttcctttgtcattcagcaatagaagatggtcttcatctctttagagactgtcccttttccttatgtttgtggttcggcggagcttacaattgcagagcaagtaacataccaggagagaaccttcaagagtttttactgaatcttttagacaccttttctggtgaagattgccacagggtattaactttcgttggctgcctggctgatgagatatggtatcaaaggaaccaaatgagaagacttggagttatggacccttccacaacttcaattgatcgaattaatggtaaattcacggaaatggtaga

SEQ ID NO: 205963 - DNA, 557 bp, Cannabis indica
aaacttgtgattgcaaccaagtttgggtcgtgactattccgtggtggtggtgctgctggtttagggttaggggttatgggtttttgacagtaaaaagaagaagacaaagaaaaaagaaattcaaattatttatttatttaaataataatttggaccaataatattttgacacgtgataattttttaaaaagtaaacggttctattaaaattaagactaacgagcaaataaaaagcatcaccttaagaactattatcactatttttcgaggttgaaaacttatgtgtatcaaattgaactttttgaagacttttgccataaatttcacattaattaaatatgatttcacaattaatggtcctatttttagtttgaaatttattgtttacttcactcttccttactagacacccatttgtgttttctctattagattttatgaaaatttggttataaaatgtgcctcctaattgtgtacctaacccataaaatataattagtgaagtgttcgttggacttgggtgggtgtcaccataattttgtaaagttagaacttag

SEQ ID NO: 205964 - DNA, 939 bp, Cannabis indica
atgatgatgatcacttaacctttttccccaattccctttacacttacaacaccccatgacttgtaaagatgatatagaagaagaacaagagagggagacacagattcttgctccttttcattattactattgttattattagttgacttaaacgtgggatttggggttgtatacgttattaggcacaaggcttcccttttatagaggcactcgaagattagtacaagagaaactgaaaacaatttatataactagaatttaagtataaaaaataaaaacaaaaggataaaataagagaaaaggcttatatgacttctcatgttatggctgaggtgttttcagttgagaaaatcttaaaaggaagacaacagaaattctggtctggctttctataaaggctccctatctagacgttattattattattattgtcattttctctggccaatgagattgcttcttttggagaagcttgttggaaaaactgttagagatcattatatgaaaaataatatatatatatatatatatttatataatccatttgctaataataaatcgagtgtatatgccgattgagtaattgagcttctaagttttttttattctctttagatcaaatttacttttagtataaacgatattctattagtaaatattttaataattaatttgagaaaaggtaaaatcaatttacaattttatgcttaatatataagaatattctaatgaaaacaactcaattctcactttgtttgttacaatattacatatagttctgtttgtttagcttttataagttttttttttagcttttaaaattaaaaaaaaataaattattttataagtatttgaataaaaaaatatttttaatttaaaagtcattttgaattaagctaggatttagagcttcttccaaaagaatttttgagaagctat

SEQ ID NO: 205965 - DNA, 824 bp, Cannabis indica
aagaaatcatacaataagatcagagaatagcaaatggttactggatactattacgatgtaactaaggcatgtttatattaccggcatgttactggttactggggcgttttaggtatgggggctagagttggtgaggatgagaatataaaactcaaacctatgtgtaatgtgtttggtaaattaaatattaatgaccacacttgagtatcatatttccagcgccctctaactctactccatctaagttcaacacacataataaataccatatgatagtattaatgctcaaacagtaaaataatttagggaaataagagaaactcctaacaattaagttgagtttactttgaaggaataaaaatatagcaaaggaatagaatagaataaaataaaatttaaaatgtatcaaatattaatataaaatattattattattttattatttcatattagaatggtatgttctcctattttaaaataaaatagtgatattttaatactttaaaatgcaattaaataaaatattaaaataaaaattatttcatttcaatttatgttagattccatttcattatctccaagcaaatgaaaaagactttccacatgctacacaattactcaaataaaacgaggtgcaatactagtgaagtgacccataatgtttttgaattgtagacaaaggtttagttaggagaaataaaaatacaaaattaaaggtgagaatgagactagaaagtattacagtgtttcttatattgcaatgatttttcatttcatctaaaaatgtaataggcattttatcaaaatataatactttaaaatgc

SEQ ID NO: 205966 - DNA, 1651 bp, Cannabis indica
tgatatgcgagctatacaccactctcctttcttcgaggtgcaatggcgaactcctccaacctacggattgtgtactgtcaagttgcttgaatcacggacattctaggtgttcatcactcgcacggatatcatctatggacatggagctcttaaccccacgtaaatgaaaggaagaacatcattgggcagtagcggaatggtttgcctggacgcaaaagaagaacattttcttggtccaataagatgagatgatttttgggtggggccgtacccgtatatacatagaaacgataagtgctagcctcacatttttatctttttttggagttcctacacggctgggtcttaatcctggggaaccctgggagtgaggaaggtaaaatagacatgacttcgagctccttgtctaaagtaggtggaataacctcaaaagttagtatatgggggaaaagtgttctcaagtacctcaaatgactctagatttcaactagtgacgccttaatcctagaaaggtacacgccagagttgacaaccatgtcatcttgctcaccgcacaaaaccaaataatttttttcttggaccctctcctcgctctctttatagttaatgatgcgtcctagatgatcactcctctcaaacatcaccctaataaatttctcatatggctcctctcaagtaccttgaaaatcagaagacgatatgtcaatgatgtcaaccatgggaaatatttcattttgaggccacttataagtagggatcaagacaaataagttcaaagggacacaatgtatcaacaccaacacctaagaggcaaaatggaggtgttgattttgctaaatataacacatggaagtattggctccaagaagagcccatgcggtgcaactagcaaactactagtatgaagaaggcaacatgcaacacacgacggaaagcaatctaaaagcatggtgcgtggatagaaaaaacaaagagaaaaagaatagatgctatacctcgtgaagtaggacaattcattatacgatagtaaatcacgtcaaagccggtaagatacctgccaaataaagtagaacaaaatcgtcgaaatacaaactcagaagcaagagtgaacttttttatatgatagggacccacgcaaatataaaaaaaaataatgaatggatgaaaaggaaatgttgagagaatactaaggaaatagaagttgaaaagtgaccttggaaagaatcgaactcaagatctctttgacaaagtgaaatgccactatcccaaagtgatttggtataatgaaaattaagcaaaggatgccatctatatatagtagagacctccttgaaaaacgtaaagaagataaggttcgcatttcaacaagaccaagcaccaattccttcagtcaataagaacacttaaaagaatttttgtggactggaggacaagtattaaccccgaaaattgacacttaccattcacggaatatatccaaaaaactcagagatcaaccttatagtagctcatgaatgggagatgacaaagaataaggttgggagcggggggaggcctgttgtgtgcgagtgcatgtgagtgtgtgcgtgcaagtgggtgcgatgcatgtatgtattagcagtgcggaccagaattaaagtgaggggggggg

SEQ ID NO: 205967 - DNA, 703 bp, Cannabis indica
ttttttttgttattattattttaaattaagatctaatttaagtcttaaatctgagactaatacagatcaaatgagaaatgaagtacttaagtaaattaacgagcgagattaagatttttttttttaaaagaaagaaacatatatatatatggttaattgtggcaaaactcaaaatactttcactttatttgtacttaaacttcaaaactcaaattttggcggtaaaaccctcaatactcatatattctgttagtgatttaccactttcatccaattttatctgttaaatgtcatgttggattgtccacgtatacatagtgtacatgtggcacaattttatcagtccacataaaatttacaatttaattatttaaatattataaatttattttaaaaaattacaattttaataaataaataaaaactaaaaataataaatttaatcccttctctctcttatgcaaatctcactctctctcttctctctctctttctgtgggaagaaagttgaaaaaagaggaaactttaaccgcaacaatggctgaaattttccataaaaaataccttctctttcttcctaaaaaaccctaaaatgatttcatctctctttttgcctcgacgagctctgcaactagatgtcgctgccgatggagccccactggatacacctcatgctatccctgatcagcttctctctctctct

SEQ ID NO: 205968 - DNA, 660 bp, Cannabis indica
gggactaggctccctatccttctgttttggcctcccataggtttagaaggtccttttcccatcttctcttgcataggcgggactacagttgagtctacatgaattccagcattttccatcgtcttttcatggcgatcattatttcttgcattctcttattttgttcttttgttctgccaactcagcttcatggtcaataactttttgccttaactcaactagttctgtataaatgtcttcatcgtattcttcgtactactcttgatctgtatcctcaggatcattggtgtctcattttccttcagcatccacacaagaagcctcttcttcttcttcttcaggacccttcgagtcgttagtctattatggaagcgaagtgtttcttgttaacaccatgatacgacgaggctttatacaacttccttttttggcaagcttcctacaactctcaatgaaaacaccaaactgttgaccgaggttttcagcaactattagttagagttgtatgaagcaattaatgaatgttagagaagaatatttttttacgtggttgggacactaatgtgccttagtccacgagtcactactattaatcagagtttttctcataaagaattctcccagagacccattttgcatacatctttggggtatttaaaa

SEQ ID NO: 205969 - DNA, 1158 bp, Cannabis indica
aaagtgaatcaggtgagaaccccctcttctaaacttaatttcactgaacctctgaaaataggtgatcgggtggtagctaaacttgatttagaggaagttgaagttgaagcttccttttggagatcttcaattgtctgtattgtcttgggggccaaccctccattcaaggtgttttgaaggtttcattaaaagaatttgggggaatttgggagttgaaagaatagtgagaatgcactctggttttacattggttagtttcaaagatgaagttacaagagatataatactagaaacgggggtcattcaattcgataagaagccggtggtgttaagaccttggaccgaggatatggatactactcagatgattaggtctgtcccggtttggatttgattgaatggattgggtttacagtattggtggaagaagaatctaagtgctcttgttagcactattgggaaacctattatggctgacaaagtcacattggaaaggtcgatgattaagtttgctagagtattggtggatgctgaaattaaggatgatcctctgagaaccatagcttttgttaatgagaaaggttagctagtggaacaatcaattgagtatgaatggttgccaaccaaatgtgcagcctgtggtatgttgggccatattgtgtcgaattgcaacaaggataaactagttagttggaagaaaaaacagcagggggacaaagagaggaatggaaacatagaggacatggctgctaaggagctgtcattgggtgataaaattggcagtacttcagctgatatggcaggtaatttctcgactgttagttcgagttgtaaagagaaccaggttattcaaagcaccaaggagtcccaggccatacagagttcgaaggagggcaatgatagttggattactcctaagaggaagggctccaaaatggttgacaaagatcagagagaggcaaagactagtaatggctttgaggctttgaaggaagcagatggggtcttcatttctaatcctgttaatggatagctgtaatataattgggtggaatgtgagagttctgaataaagtcgagaagcagcgagagttatttgagtgatgcaagttaaataaagttgattttggggctccctttgaaaccaaaattcatcatg

SEQ ID NO: 205970 - DNA, 888 bp, Cannabis indica
gtgagggagggttgagttcaaaaagaggaagttaaccattttataaataattattattaattgaataagtacaatattattaggcataaataaaactactactaaaagtgaagttttatttagcaacctagtccattttaattacctaaattaaatgtgctctttatgcatataagcacaaaaacaattaaggactcacatataaaaataagatttgaatggtcctaatatatttttaagttatgccacaaatgaaagaaaaattacaaatttacttgtttgatacaaaatatttgatttatctatcagcaaatgtatgaattattatgaatcataagatccatcatcaaattaaccacatttatttagatcatattaaataatagttttataaaaaaaaataattcaaataaaaaacactaatagcaaatagatagaaaaaataggattattatgcaatttgactatctttattaaaatataatttttaaataatttttttataaataactaaatatttaatttcaaaatatctaattttaattatatgtataaattttgaaatttacatatatatatgcattaatgatattttatttcttaaaatttccttttaagataaaatatcaaatagatattttatatttttgtaatcttaaaaatttaaataaaatagctctattttttaaaatataaactttaattaacaatatcttgtttcttaaaaaatctattaagatttaatgataaaatatcacatttttgaaaaaatagatattcatcattttcaaatcttaagattttaaataggagtttttatactacatactcaaattttaaattttttttcttttctactgtgaggggaattttttttttaaaaaaata

SEQ ID NO: 205971 - DNA, 893 bp, Cannabis indica
aatgggaagttcatgtaatcaaatgaactattggtaaaaattaataagagaagtgaaatttgatatggggtgttttattatgctgaaattttacttactattttagtttatatataatgtaaatagtttacatcgaacgttttattttgtttttttatggtagaatttaaacagtaactttaatatatatgtaaaattaattttattttctgaacgttggaagcattaatttttttaattattttaattaatatttttaaattatgtcttaatgcttacataattatgttaatttatgagatatttttaaatttggtttaacataaatttcaagttagattttttaattataattttgttatattaaaagttatttttaaatttagtgtatttctttttcttttttcaagaaatttaaactttatgttatgcttatttatattattagtgggaagacacaaacaagaaatgtgtcccccatttgaatgaactttgaaacaaaaaaaaaaaaacaatgcataataagaaactcttaagtattgtcaattttttttcaagattatttcaagaaaacaacaaaacaaaataaaaaaaaattataaaatacaattatactgaattttaaatatttttattgtttttaagattttctttacacaaacggtcttttgatatatttttatgttaaattattgtaattttgttattaattttttgttatttatatattattttttaggaaaatttgtggcaaaagtcctcaaaaagttcagtttcatacagataagtccctaacctcgaaaaatagcgataatagtcctcaaagtcatgttttttatttgtccgttagtcctaattttaacttggccttttacttttttaaaattaccacg

SEQ ID NO: 205972 - DNA, 988 bp, Cannabis indica
tactacgaggaggacctggtcggctactactagtgtctagtgtttggtgattttcactatgaggggtttttctttcttgctctattctctggttccttggaggtacttggaggtagtggaggtagttcttacctcaaagcaattacctctacagtttcatcaacttgcaactctacatcaccatcctcgttcaaatctatcatagaattattgttgtaaaagagagcatcaaactcataaaactggtcaaatgcattgtcaaccctgtcctcatcaatattagtaggggcatgttcattcaaacctatcgccggatctgtttctgggacaaaactctcaacaatacttcttagggtgacagttggcggagtaggccccaaaatcgcatgcattttaaccttagtcacaaacagtggcagtaagtttttcacactcattttttacttcatttttaagaacaatcttacttgactatatttaactaaaacctccagcgatatcatattgcctttcatgtacatgtaatgcacctctaatttcagttcatacacaagagggtctatatccaactctttatacaaaatttcatgcatcccctgtaaagtagtgtcaatctcaaacattaacatcttactttttggattattaaatattcaattgaaacattcaactgcccaaaccccatcatacaatacatccagaaatacagttgaatcagcaaacaaaaatagaaaaaaaaattaaattaagatcgaacatatgtcgagaaatatccccagcaacatcacaaaatatcgtggaacataatatagcaaacaacatcgatagaaatggaatcaatagaacacaaaactacagtatgtcgcaacatacatcgctacacattgttaaactttatcctttaccttcaacacattttcttatcgctaaatatcgctaacaacattgccaaagatcactaaactcgcaaataaaaccagaaaatgca

SEQ ID NO: 205973 - DNA, 831 bp, Cannabis indica
ggagcctttgtttatgcgcctccgcgtcgtgaagatcgtaagaagttctggactgaatatattgaagaggttgttcactgggattccctatggattttaatgggagacctcaacagtgtagtcaacctagaagagaagacggggggcagacagtttactttgtctgaagggcaaggtctcagggattttattttcaacacagggtgcattgatttggaagctactagagcgttatacacttggactaatggccaggatttggttggtctggggaaggagaaacttgatagagccctcgggtcggtggattggtatactttgttcgcaaaggcaggagtgaaaaatctgccttatatggagttcagatcactctgcggtcatcctggatactcagatggactccaaagccagtaaggccctttttaggtttattgatgcatggacgatggacctttcgtgcaagaagactataaaggatgtgtggaccattaatgttaggggagtgagaagcttcgtgcttatcaataaaatttagaataataggaaagccttgtagacttggaacaaggaagttttcgagttttgtaagcataaaaagttgctacttgaaaaattgttagttgaggtgcagaacaagcctatctcttcagaaaatataaaacttgaggaagctattttgaaggaaatggaggaagtggaagctagacaagagagtattttcaagcaaaagtctcgtgaattgtggctgaagcagggcgacaggaactctaaattcttccacacgtcgttaacaatgagaagaaagcgaaaccatatttgggctatctcaga

SEQ ID NO: 205974 - DNA, 946 bp, Cannabis indica
ggaatcactcagtcccataaacacagttttactgagctaacttggttattggcaggaaaactcagatggctactagcagtgcatcagaccttcgattgaggtgattcttgcaatgttggaatcgtctcgtcgagagcttcaatttgatatgtaatagtgctatatttgactctaatattgatttgttgtgcgaagaagcaataaatagcgaaagataacgataaactacagatacaaattttctactaataatatctctaaagtgttttccaaactcactaaagtgtttcccaaagtttggatatacagatgttctctctctcaaattttctaataaacccgattattcaaagttgtacccgaattgttgctttttattacgatacaaatgctcttttaagagctccatatttatagaaagaaaacctcaactaccaaccatatgtaataaatgaggtagctcatcttctaaccatatataataaatgagagagcatgcttcttgataaatgtggcaaataacaagtcctaaaactcttgaaagttgaactacatctttacaactccaagacaagttgacttttgagtcaaacccaatatttttatctttttttctcttcctctattttttttaataatttcttaacatctctataaatgttacacaaaaataaccacataaaagataataatttagtttttgttaactaaaatactaatatatacattttaaagtgatatatacataattttttagatttttttgctattttttagatttttcatatctgaatgctgaaatttgtagaaattttgatagacttcggagagaactcaatggaatcttaaaaattaaaattttcattaccaaaaaaaaaatagataaaactcgatagatgctcgatgggtgctcaatgtcattcctttaaaaaaaattaatttttta

SEQ ID NO: 205975 - DNA, 2011 bp, Cannabis indica
ttgcagcctaattaaaattctaagttagtcatagaacaacctctccataatgtttttggacttgttgctatcacaatattgacaggtttccaatccttaagatgcttaatggtggcattttcaatttgcatcaacattcaacactgattaaaaagaatggaatattggaaaaacaagtcaaacagccacatttgcttctatcaatataagtgtgcaaaacttactttgctgttgaacttgagtttcattgcatgcttccgaaactgattcagcctgcataataaaacaataaatcaccttaaatttgcaataatataatcctaaatatttatcatccacttggatagaacctctacattcattcagtattagagttagtccctagtttagaaatgcagtgtctatagatttgccataccatatctagctagatgttactagcttagagataaattactatgatgcttggagaacataataaaccatgatgacctctctacggttgtttggtattgaaaagaaaaaaatagaaaaggtgtataaaaaataaaaataaaataatatgattttttttttaagaatgtttatgcaatttctatgtattagtttccttctctcatcctccaattttagaaggattcgttttaaaggattatctagatggtaaattctcatattatctttattaattgtttcttccacccttattaatcttccatcttaatttctaaaaaccactaggccgaacaagtgttaacagaagtaaaaaagagaaaaaaaaaatctaaataagtccttaacaaggtattaacagttgtttcaaaataatttttagtaataactattaagtttgaaaaatattggttgacttaaataaattcaaaactaaaactttgttatttcaatctctcgagtaataattacaacctcttattacaacatgttagttaacttttatgctcgaaatcacatgttgaattttttttaatttttttttcatggcaatattatttatagttttattatcatctctctaaaatatttttgaaaaattacaaatagtttataatactgaaagtagagttcttgatatttcagtttaccacgggtgttcaaaaagcttcaaacgtattaatttcaaaaatttaaatagatgatattgtaagtataacgaataccgccgtgaaaaaaaaaattgaaaaaaaaattctgacatgtatttctgggcagagaggttgactaagagaatgtaataggagtatggtagcactcctcctctgaaaatatcacaggagaaaatggtaaaattgcaagttcactaaaaatacttctaaagttaaaaatacaaactatatgcatatatttccgtgtttagatatttaattgggcttcaaaaaagggttttcctaatctaaaggtcgaccccagccattctaaacgttgcaaatcgaactgggcctgcaagcccatgctttaaagtgttaatttcttttacaaaaatgaaatcgtgtataatcagaatcattattagtttttctttatcccaattagtaaaatattattagtttttcttagccaataattaaatgaagtggagtggagggttggtgaagtcatagctcaaatgtaatttattttgaaattaaacattatcatcaactatataaatgacatagtttaagtaatttaatttagcctcccctaatcattattctttttttcaactctttatgtttctatatctttatatgaatgttgtgtttgtctaggaggaaaaaggtcaaacaattgactttatagaagttgttatatttaaacataaaaaccacatatgttggacaaatgcataaattattaacaaatggaattgcaaccattgattgctctatacttttgcttaattaaatacattcatatttccctttttacgttttaataacattttgttctctcatgagtaggtggcgtgtaatcaaaaactaaaaaataaaatgcctattattcatttttt

SEQ ID NO: 205976 - DNA, 716 bp, Cannabis indica
ctttcatcattcgcttcatggcctgatattctactgggtgacacaataaattggccataggaacctaccctagagtttccctcttagccccacctaatcttattagtttaatcaattcagtgttaacgagtattcaagaatggattaatagagttgatcaagtatgtaggtgtttagaaataatattcaagaatggattaatagagttgttataggaaaatatgcatgcgctataacttctaagcaagataacttgtgaattcggtgaatatacttaatgtatatatatataaaaagagaaatggtgggagtatgaagctcccacggattccagctggtactggaagatcatattgtgaaaggaaaaaatcaccttaaaaacttgtttgatgaagagtttcaaaaaatagagtataaaataagtgtcttctatgagggaagatacagtgaaggaattgttggattggatcagaaaatgtaagaaattaaagttctttaaaaaaaatgtaaatgttgctacttaaatacaacgatgtattatttatggaaagctaataacaatagcatatagaatcaacaacaagttcacacagatagtatagtcaaaaagataaaataaaaagtgtatataccaaaactcaaagcagagatttatacataggaaattagtgtaatagatcaaatttggtttagagggttgtaagtccttgtgatgg

SEQ ID NO: 205977 - DNA, 1029 bp, Cannabis indica
ctctctctctctctctctctctctctctctctctctctctctctctctctctctctctctctctctctctctctcctatggggctatggccacttctgcagcttttggctgtcgtcttcttccttcaatctatacatgtatatataaattgttatatatgtgtgtgtgtatagatagctataagcctataagcttatttgcaaatattgaatggggttttgaaatggttcgattgtatatcattgcttataatgtatgtcatttaaaacacaattaataataattttaagatttacttttttagaaatacatatatatatatattttttaaaatatagttatatataatctgaaaagctaaaattgcagattatgttcttattatctgaattattgaccatttttatttttggtgataaaactttgagatttttacactatattgacattttattttttttttattatggggtaaattttttttcaaaaatattgtgtttatttcaaaaatactgtgaaagtttcatactgtctgtgttacattttcactgtagttttacggttattttttatttgttctactgttcttaattgttctgttttatcattttacggttgttttataaaaaaatagtatttttgtaaaaaattccgtgtggtagtaaaatttgttccaaaatccattattttttttgtaaaaatccctaaaacttttcaaattaaaattttcttggcaaaaataagttagtttttgctttttactgtagcatttctatcatctcctatggacattttttactatttagctaaaatttagttaaaaatagttaaaagtaaaaaaaaaaaaaaaattgttaactctaattatgctctctattttagtttagaattaattattattaataaaaataatataaaaaatacttaaaaaaaaaaaaataaagaaactactctatctattttctattttaaagggtattttttttctttgtaggtagacctcaaccttcgagagttgagatcaccacc

SEQ ID NO: 205978 - DNA, 1035 bp, Cannabis indica
ctccgcccatctcgtagcagattttgattgggagcagccaggtgaaatcttagtttcaatgtcttcacagaggaagaacacctccgtttgagtctcagagcacaatccatcatcaaggattgaagggagatccttcactggttcatcagctccaacaacggtggccaccaccttagacttcgatactacctttttcttcctaaccatggggagaaaaagagagaatcacacactcttagttctaatttaagttgatccacaataaaatatactacacatatttcctaaaactaaaactatgtagtactatactgtcttatatatggatgatatgagagaaacactctttgacttagtgttagttattgtgtgtaatgttaaattaaaataaatgaagttggaatttatattcaacagtataagaattaataataaggtgttgaaattgtaactacttgaggctagctcaagtgaccataagtgggtatgtgtgtgttggaggtcctgggttcgagtcccaagtaaaacatgattggttataatatataaacgcttaaaaaaaaaaaaaaaatggatattgttgacccaaggcaagagtggggtggggggcatactaatctcattacatatacattaatatatctcgaattggtaacgtagtatcttttggtagatgtctacaatagtttctgggtttggtttcagaatgttggtctactatataactaagtttcctcgaatacgtgaatgtaatggggtctgccgacatgtcatgctaggtgttatgtatacatatatagtctatactctatataatataataatattatgcaatctttttcttttgaaaacacagtagtttgttctatgttgatgttgtgcacctgcaacatcaccaacttctactctataattgtttcaattattggttattggtgttggtcctattctctcttcgtattattttctaatgggaatggttaaaagttgcatgtacgtagtaattaattagtcagtcttatataatttaatata

SEQ ID NO: 205979 - DNA, 927 bp, Cannabis indica
ctctatctcaagttaattcattttgtttaatgcgttaattatctatcttatatattttcttttacaaggcgtctattgtattttcatatattgataatgtcttgcaacttgatgatatggatgtcatgatttaactaatcatttcattggtacaactacgtacatgtgattcttcttatatatgaccagaatgcaaaagaaacttaggtggcaaaagaaataatttttattctatccatttgtttgattgtattttaaagtattgaaatgtcattctaactattttattttgaaatgaaaggaaggaccattccaatacaagatatatgtgcattttaaatttgattattctatttctattctcatttttattcctacatttttatttcctccaaccaaatgacagaaaagtttattccttattatacagtatctaaacatatttttgttaagtatggtgagtaccctttaacaagtttttgtactttatatattgaaatttgatttgaagtggtgattttctatctttttaaagttatgaacttaatattttcattcacaaatggagttaattggaatggtcctacacactccaatactaggttcccaaatcttagtgaaacaaatcctgttgaattcgttaatgaggtaattcttaaactttctcacgttgcttagtagtatatgttctcttattcctattattttagtgatactgatttttatataataagagaaaattattgatatatattctaattctctagcaatttgtaatagtatatttgtctattattttttcttttctctattcaagtaatttttatgagaagattataaaaatttaatttagaattcagaactaatttcagagttggaccatgagatgagacatttagatatttgtaacttttttttttttttttg

SEQ ID NO: 205980 - DNA, 726 bp, Cannabis indica
tgtggttgccactctattctcggtggtttcatgttgggattgatcatcccgaaaggggagctaaagagggttttgatggagaaagttgaggatttcatttccggggttttattgcctctgtttttcttgatcactgggctaagaaccaatcgtcaagacatatttaatgggcagtttccaatagtgacaattgttagtgtcattgttttggcttttgttgttaaaatcataagtactttcgttgctgctgtgtttttcaacaagatgagtcctcgtgatggtttgactcttggattgctcatgaacaccaaaggcttgctagctttaattgtcatcaactctgcccgaaacgaaaaggtatacatacacattcttattattataactttaataaataaacttgttaaatttactataagattaaaaaaaaaaaacatgtttagtgtttaagataattatttgggattaaactaaattatcttggctcatttaagtttggaactgtattaacctacagaaattgtgtgttaatttagtgtagctttttaatattattataaaatttgttttatttaaaaataattttcttaaattttaaaaataataaattgtatctatcataaattttattgaaatatatagttttttatgtacttaatttcaagaattatttttaatttatatatttttttaacattagaaatttatgaggagaattataacact

SEQ ID NO: 205981 - DNA, 569 bp, Cannabis indica
aaaaaaaaaaagatcttttcactctttctcaatcttttccattccctcttctcatccactcattaaatttaaaaattacaaaacccctaaaaattcacatggtggttgtggcctttgcttggtgaaggaaaggagttttcaaaatttcttcaaagcttttgggaattcaagcaatttttgaggtaatttctaattctttttgctttcttgaaaatttgtgattggttttggtataaattgcatggatagaattattgtgaatgtggaaattaggattgaatttgtgttttcttgaatgtgtttggctatgtgttgtgggaatgaaatttggataggttttgaatttattttgaattggttttcatattagtgatgaaatttgactaattggaatttgaatttgcaaatttggacaagaattgcaaactttaagtataggtttggactatggaaaattggtcccaccaagtgtttgatgaaattcccaagtgagacaaacatgtgtttttttgtcactttgggtgctcgaacacatgtaatttgtacaaataccttgtttgattatttat

SEQ ID NO: 205982 - DNA, 677 bp, Cannabis indica
taatatttaaatgatatataaaaaaattaatgcatggtataatgcaaaagtttgaggtaaattagataaagagtaccctactgactcgaatcaatatcagtgtgtaatatgtcatacaccccaattaattaagttatgaatatttattttttataacacttaattttaattaaataaaatttaataaaggttttttatttttattttaagcccttaaaaaagtaaatctaagcacgagcctaatttatttatacttaaaattagctctagatatattatactgttattattagtataattaagtatcaaactgtttgcatagtaccactttgtaataaccatataattaagatataaattttattaggttgacagtgattttggcatcactaacaaccatggagatacaaaaatatttttttctctcttccacctcattattcattgtggtcacttgtaaaaaatacttcgttgtggcatgcattagtaatgctcttttaaattagactaaatattttaagaaaatattaataaaagaagaaatattaaaaaacattagtagtatctaatatcacttaaggtataattaagtatcgactaccatataatttaatttaataactattataaaataccactaatcatttataaagcaacacctttaatgtcttaacaat

SEQ ID NO: 205983 - DNA, 514 bp, Cannabis indica
tatatgtctgtgtgaccatttttagttgcagtgaaagagaaaactgatcactttcattaaccctttttcttctcaattttctctcctcctccatttcagactatacactttcgtttcttccttcctttctttcttatcaagtaagttttcatcaattattattgttttatccatctaatcagtcgattttgagtttgattctgtattactctttttcaagattgaagggtttagatgggtttaaggtgtataatattgggttgaagttttgagatagaattaaggacgatttttccacaatggaaggaggacagctcgtggattcgaacattcatggattccacactttgcaaggtacgtacgacgtggtctctctctctctctctgatattttcttgtttgtaaatgcgtaattttgtgctctttggactgataatttgggtttttttttcttcttctttgtcttgattgtacttgtctctgttgtttgatttcaattttttttttattagcg

SEQ ID NO: 205984 - DNA, 754 bp, Cannabis indica
aggatcacacaggctaaaacgatatacccaatcagcaatctagcaacattttccaatcatttaaaaactacagccacatccaaatctccttgaatagcgtccttagatgtatcgacgtttaaagttcattgttatgtgacttacccattagatttcatatcaaaacatgaataaacaacaactgttaagagaagaagagttagctttctgttggtctgttatggttctgtttctttcttttctgcctttctcttttcttgtatataaacgattgtattggcttttcataatcgatatatatatataatacatttctttctcagctttcgtttatgtttacatgctatcagagcagattctttctctcttttctggtctttgctttcgtctctcttctgcaacgttaagccttcgttcatggctgtcaatggaggttcgtctcaaagctcaggtctcaatctacctcgttcatctcctgtcactttctctcactccctctctgttagattagatgaacacaactatctcccctggcgacattaagtgtttgctgccatcaaaggatgtcgccttcaacatcatctcgatcctacaagctcctccaaaatttctcactaatgaagatcgaatacacaatcgacattcaccaaagtatgaagtttgggatcaacaagatagtatacttgtttcttggttactttcttcaatgtctgagaaattgctcacacacatggtgttggatatttattttacc

SEQ ID NO: 205985 - DNA, 660 bp, Cannabis indica
aatttcatgtaattttcatttagatagtagtggttcatcagaattcagattctgatgtttttgttacaaaatttactatttacaattggcaatgcaaatgaaaaataattctcaacacttatagtgcttatattatctagctaaatttgttttttttttttcattagaaatttctcgagtttggtggcctggtcttctgcccaacttacttttaaatgatttatgcttgtagtattgatctcaggttctctttgtctttgtgccttttttaatgggtttattcatttttccttaaaaaaaaaacataaaatatgaggttaatgttccctttaaaattgtgtggtaagggatattgtattgacatttatttcttttctttagtaaattttaatcaaattcttgatccaattatcaaaattctattatgggattatgattttagtagctatgtatataaacataacacttgaaaattatataaacttttttttttgttccagtgttatctctatttttttctcttaaaaactatattttttcttttttaacggtctactaatattttttcaaaaattgaaaatatgaaagtaaaaattattatattaattttagaggtaatgtgatgtatgcacttaaaatgttaaaaaagtaatttcatat

SEQ ID NO: 205986 - DNA, 635 bp, Cannabis indica
aaaaaaaaaaaacaatatgaaaaacaaagttgaaacaaattattttccatgcacatacaaaaaatagtcacgaacattaaaacatattgaaccttcgtgtttttggcacagtaaattatttaaaaatattttaaataactatagtttacataattttttttagaaaaaaataaaaaatttacatggtagtctaaaaattttaaaaaagaattacaaaaatatctcttcaataaaaaaaaataaactatttttatagttattttataatttatttatagttgtattataattgtcacgaggttaggttgtttttagttgttttataattgatttataattgatttttcgttatttttttagttgtttaaatttttgtaattctaaaactttacaagtgtatttttataaataaaaaattttaaaccatgaaattgtaaataaaacataaaatttatattttttttttgacaaaaaaattttacatttttaaaaattctcccaaaaatatgaggggaaaaaaataactatttataataggaaaagaaaagtgcacggatacacctctttcttatgctctacaatagattttttgttaaatttttattaaatacataaagttggtttattattcagta

SEQ ID NO: 205987 - DNA, 1034 bp, Cannabis indica
gtgaaagtaaccattgtacccaacaagaatggctcatccacacacgtaaatgtatcatacttaagaaagaactccaccaacaataccctcgccatcaacacaaccaaatctttcccaggacactgtttattatccacggtaggatcttcagtctctctcccattagaccaaaacacatactttagattttcttcacctttccccataaacctataagccacaaacttctctgcattttcaaacactttcgggtcttttgtcgcaaacggttgatacccaaacatcatctccccctttttcaccttaaatgacgcatcatggctttggatgactagatcttccttagcgtggccgtactggaatggaactggaggctcaatccttaaaacctcgtacaccactgacttggtcagtaccattttctctatggcagcaaaagtcacccctccttcttgcttaacgatgtttctgatctcgtgagccagttgggcatgcaaactaggccctgctcgacctatccacttgaacaagtttgggaagaggactttcatgcctccataggtattaaagcacgcgaggaaaatcaagttatggcaagcctcttctttgtcgagtgcgaattcctttgctctgtccaaaactttggtggccgaggtggagaaagcttggtatattttatcatactttgatttgacaaggaaaggtggtatgggaaatgtgtgaatgagaagatcttccgctaattgtaggaacttcgatacacctatggttataagtggagccacttgtgggacaagccacgtgtcaacaatggtgtttgcttgagaccctaagatggtgtcttttggagttttaccacagaagagattgaatacatactcgaatgagtaggtgtcgcttatggggttgaactgaacttctttctttgatgacagttgtgagttgagagtgtggaaaagctcggttaaggattttcgcaagagagggatgaagttgtcgtgtttggaagagagaacagagaggaagtagccttt

SEQ ID NO: 205988 - DNA, 1193 bp, Cannabis indica
acccaacctaattgcataagacacgaggagttaatcatgccgaaaggaggaaatctatttctaatgatgtcatcaatcttcagaaaacagaaaaagtgtgatgtttccgtcatttatccacacacccaaattagttagggcgtaagcaaaaagtttggggtccataattcaaattattgttgagtcaactacatttagctagctcaatgattttctcgcctttggcaaaactctactataaagagtgcgaaacaataagaaaaaagggttagttgcttaaggagtttaccgatcaatgggttattcattgaatcgactgaactttctctctttctctccctggattcaaattctagttttcctgtgttttctctctctctaaaatagaatctatactgacttaagcatcaaagagtttttttgcaaaataaaccccaaggcttccgtcaatccaaacaaagataacattacaccatagattaatttattttcaccttcaccttccaaatttagtgttagcagaatatttagagggaatcgaggtgaaccaaacaatattcaccttccaaatttagtaagtattcatttgtaaatttttcaccttcaacaattgctaaatttattgtaatttttttttacctcaacttttaacattacaccatagattaatttattttttctctatattatttaaatattatattcttaatatatttatttcaattaaaatatttaagttaaaaagattgataaaataataaaatattattttaaagcataaatagttatagctaaatatacctaagctactataataaaggtaaacaaagataaaataaaggagctaatgtactgattttttagttacatttaacatttacattagctaataagattatgggagtgttctaagaatgaatatttatttaatacttaatgttggttcaattaatgattatcttattatgatattttttcgatgattttaatattaatttagactataatgtgtttaataagcttgaaatatctatcatatttgtatttttttttatttgtgcgtgttaagcagatcaaaccactaaaattattaaaaatattgaatatttttatttaagaagtaaaactctacaaatataatagtttcctaataaaaaatactatttattcaaattattattaatattatcatt

SEQ ID NO: 205989 - DNA, 802 bp, Cannabis indica
ggattgagttaaacagcagagttcatgtattctctgttgaagataaaactcatcctcattgtaatcttatccatgatacattggagcatcttacagcaaatacaaactctttgatgcaatttgattttgtttctatgccaacataggtttctagcttaataaatgcattttaaaccttattaaccaaattttgtattagctgtcttatttgctgaaaaaaccatcacattatcaaaactatgcagacaattatgattatggagcgatggcagtgaccgatcgagcttgacgattatgctccggccggccaaattctatacccttgaaaattttgtaagtagttctttctcctttttgttgaagaaatgatctgctatatatttgtaacaaacctcttttaatgggcattttatgtttgattgttactatgcttgatgttagtttgtgccataaagagtcatccataaacttctatattcacaacacaaattttaaggaacaaatgcattgtgttcttttgagttggtttccatttctgccgtgaaccctttacatatatcaatatatctatatataatatatataagcaaatcaagtgtgttgagaatgagatgcagctccaagcactactgcaacatttactgtcattgcccctgttgttgttgttgctcctacaaacaaatgcagtgttatttttcttcaaaccattttttcattgcttgacatggaagattttaagtataaaaaaaaatcaccttgatttggttctctggtaagatttatgacattgacataaaaaaaa

SEQ ID NO: 205990 - DNA, 1812 bp, Cannabis indica
aatttgtacctttttttaataacttttatttgcttgtctttgttggtgaggtatatagtggctaattacacccctgatacgaaatacaatattaatttaagtgaaagtttgcaggctttctataaagcttcaaaacagaggttcgatgatgatgctgctttcaagttgagggcacaacaggcagttgtaaagcttcaggtaagttactattatttattgtagaagatacacgtaaaactgatttcatttgcttaaagctttgaagttttaatttggggtttttgttttgttcgttgaatttctacttctacttgttcaattttataaaacagggtggtgaatctgagtaccggaaggcatggtcaaaaatatgtgaaatcagccggaaggagtttgataaggtgtatcaacgtcttggagttaaattggaagaaaaggtagttttagcttaactttctgcacgtagaaattttggagacaatttagctactttgttgcctactctatgtttattattagggcagttactagcaaattctactactctagtagtaaattatttggttactgttacagtttgaaaacttagaaaagatgaagtattagattttgtagtggaaacttttataatttaagaatttttcttccccataagtctttaaatactgtgagtgcattgaatttgcttttttgtcatcattgattttgttttcttttacagggagaaagtttttacaatccatatattccaggcgttataaaggaattgagcgaactaggattagttgaggaaagtgagggtgctcgtgtgatctttattgaaggggctaacattccccttattgtggtgaagagtgacggtggtttcaactatgcttcaactgatctcacagccctttggttagttgtttatttgatgtttgtgttaacatttcaagtttcttcttccaaatgctaacaacactttctttcacttagtccaagtatctcctagtattcgtataaagttatattcttgcatcacgaatgtgtaaatcaagtgtggaaagtgctaacagcactttatttagcacgctcttttacattcttatttgaacgtgtgacatatgataagtattctatgtgttaataatattaaaagtaattactaaaatccacatgctaaacaataatatgagagggtaaaaaaagtgtttgacatttctcataaagtgctggacatcgtgattgtgcatgttgatgcactgcaacttggcgtgttttcacaggcatgcagatgcacttacatttgtgcaagattggcacgtatactgtgttgattatgtatgtaattgatgaaatcatgttttatattggatttgtgaagcttatgtttgacattgcttcttgcaatgtataggtatcgacttaatgaagagaaagcagagtggattgtatatgttactgatgttggtcagcaacagcactttgatatgtttttcaaggtatgtacatagtatcaaaatttacaattgtatcttgtgttgatggtccttcatcagttctttactatatattcttttgttagataagtggtatttgttctttgacttataattgcctgcctgcttgagagattttaactttgagtgcttagaatccaatcatatacgtgtccctgatctgcatgacattgtacaatgctagttttgcaatcgagattggcagtctaaatggtcttgttctttgttccaggccgctaaacgtgcaggttggcttcctgctgatgatagcaaatatccaaaagctagtcatgttggtttggtctggttc

SEQ ID NO: 205991 - DNA, 1212 bp, Cannabis indica
ccgacacaaggagggctaatcactagaattgaatatatcaacggacactacagtaaaactcagtaaatataattttataattactaagagttaaattctatatttatagtggagtaatcatagaattaataaacatgattatttggttaatgagattcaataaatagtctaatttattgaagcttagtattataggtccatggtcctcaaatagtcaccttgaaatactgtcaagggtatggataaaagttgtataatgatggttgaaaaaatctattttgatttgtcaaaaatagtaattatttattctgcaaaaaataattatttttaaatttattatttatataaataggagaaaagataaaaagttgtctggacaaaaataccatcactgtctagttaggacagaggtggcgccactatcaatgtgttaggacacagtgagagattccttcaatcaattattagatatttaattcgaacctaaatatctaattcagaataaatgtctaaacatattcggttataaaaatttatttaaatatttttattgaaattcaaatatttattttaaataaaacctttattaatttttattaatatgttgtataaacctaaaaactatacatataagttttgaggaaacctaaaaataccaaatttaaatatcttttccatcatcattcatccttaatgttcttgctcatgagttgagataaaaccaagaacaatattatagttaatcttattactccacactaatccttgtgtgtggtggaaggttcagaagatcacgatgtgagtcttcatcaccatcccgcagatacaacttacgaaaagaaacaaggataccctgattcgcttcaagaggtaactatttcttttcgtctatttatttcaaattgaatatatatatatatatatatatacatgtggtggtcctgaggatgtggtacggtgataattaaaaatatttttctaatgtgtatctaatttagtactataaaatcaatatttggaccaattaaactagttagggcatgctcaatgggggtagctaatgcattggagacatttgaatgggcacatgccaatgctttccaggagcaacagtagtgttcgcacccacctatgattttcaaactaacagtgagtcaggcacaaagcgatcctcagcagccaaaagaatccttgttaggtctcctgttgaag

SEQ ID NO: 205992 - DNA, 590 bp, Cannabis indica
atgatctgcaacagtagaagtgagcaaaagcaaagaagtcatttaatttatcaacaggaaaaaagtgcagaacaactcaggaaaccatttgttttttcccatctcaaatataaaagcaaaaaaatgcaacaatcaagtaagacccaaaacaacaaatactgtattcccctttacaatgacacatcgaaagaatgtgagggtcagccccagtttgagtacacccagatggatcattgagcctctaacattctcaaaactcaaccaagactcataacagccaaagcacttatattatctggggttcgaatcctctgggcacctacctaatgtattttctctagtaacaccaacacttgtttagccccttgagaatttttagtcctaagagtttcagtaacactaagcttcttcaatggtgtattaccaatggaaaatctctttgccataatttggataactcataattggactgaaaattcaaaacctgacatgataataattcaacccattttaaatttgtatccatgagttgcaattaccacatttataacaaatttatgtacaaaactcttcactaccataattttaat

SEQ ID NO: 205993 - DNA, 562 bp, Cannabis indica
aatatttatgcctcaaaattattcgatttatggtcgattaaattgtaattatttaagttattttgaaaatttttgaaagatttgaacaaaactttttgtgaaatatatttaaattttatttttgatatattaaattaaaaatttcttttaaatacaaaaacaaataagaatgcaatcatgaactcatttaaaattgtaaaattttttaatattatatatatatatatatttttagagagtgtttgaacaggatttaattttattcctttttaaagtgatagtacatctagaaaagtgtggaagctttacataatttactaattataaatatacgtattcaagtgacacactcacagtatatctttgaaagtaacttacgtcaacaccacacttataattttttcttatattttttttatacttaactaaatatacaaataggacaacataagttggacacttggttttggaatattggcggcggtgttggcagcggcgctagggctgtttctactaggaacaaggcggtaccgtaaccgggttgcggcgggaagcccgttga

SEQ ID NO: 205994 - DNA, 694 bp, Cannabis indica
ctttcgcgctctttatagtagagctactgttcaaggtggaaaaatctttgagtcgactcaacatttatttgaaattggtatccccagattttttcacttatgcccctaactgatatagttgtgcaaattgatggcgttagctccacatgtttctcaattttagaagattaatgacattagcataaataggctcatgctttggtcgtgatcagggaaatctagtgtggcctgaatcttctacttttatgtagctgggatgagagcctaagctatttttttcttaggccttgggacttccttatttactaaggaaaagtagacaaaataagctcaacaaaaaaaattcttatatatcaataacatgcatgcatcgtagctctcttctctattccacaaatagcaggatatctcttggtcttatagttgatgcacgcaagagatgtctgggtgatcaccggttgcaactagttgatgatggggtgattaattagtgcgcgtaaatgtcggtagatttgtgcttgacacatatacatgagatattgacttgtggaagcatccaaatcttattttggcagcaaattaagactaatgcctaggacagaattgtcgtttaatggacaaaacattgagctctaggttgaatgtcaacttggatgcccagtgtggtacctgggggttgaaccaccacttagac

SEQ ID NO: 205995 - DNA, 896 bp, Cannabis indica
atatatatatattaaagaagaaaatcaaaacatagagttccctggcttgttgcagtcggaacatgcctttcagaagatttctattttaatgttttatattttaaagttgattcattggattggattccctaaaaaggtagagcctccaggaaaatatgctaaacactttgatttgaaatttgatagagttgctttgtgccaacccaattacttgtttcacccacttataatttcagtacagttaattttagtaacaattactatcagaaaaatatcttattctatattttactctaatatatatcctgtctttagaccataatgctttttttttagcaaagttgaaaacaacttacaacctagaaatccttattggaatttaccagaaaaataaactagaaaaagaaaagaagaacagtcagtttaaatacttgatggttatccaaacatgttttttcttttattccatttaagactaaaaaaaattacaataatctttagtttgaaatttgatgcttttggtgggtaacataactttttattatttttttttcttcaaaacctaacaacaaaaattggggccacaccaaacgacacacatctggtgcatatgctcaaaaccataccaaggttggtacatagtactaatcagcttctcttatataccccacaaatacaagtacaaaatacaatacaaagctatggctttttttttttaaccaagtaaaatccaatatgtagagaatagatctaaaaaagtgagaataagtattagtgttattatttcaaaagaagaaaaggatcttaataatgtaattccattataattctttttttaaaaaaaagtacttttagaaataattatatatatatttttaaaaaaatactaaaatatt

SEQ ID NO: 205996 - DNA, 559 bp, Cannabis indica
tttattttatttttgtgcagacttagccttgaaaatgattgaaaatagacgtcatattgttcatcaactcgatacaaacggtgaaactgctttgcatattttgtctcgaaaacgacctatggaatttacatttgatcctacaagctattggaacatggagtaagttaatatatctataatatatacttataaaataaatacgaaatatttgatctgatgtatttttatttaataaataatataagaaactgttaatgttaattatataggttgaaaagagagctaagttggtgcttagggtttacccaatctgagggcacaaattttttatacaatatattatttagttaaaaaaaatggtagatttgtgaaataataagacaataaaataatctaatccaactttagatacaaaaagaaaaaggaatcttgggcctaatttaaggttgttcttgcaattataaagtgtcatgttgatataatattaaacgctttaaaatagaaaagaaaatagaattgaaaggaatcaattttcgtttcatttttttgtttgtctatt

SEQ ID NO: 205997 - DNA, 1023 bp, Cannabis indica
ttttttttaaaaaaattatccctcttaaatgggcttctattgggcttttctggtctcggcccactcttctattagcctataaataccccattccctccttctccactcttttttcccgccattttttctctcttacagagaaaagaaaattatcagactttattctcaacaaattttcttcgaatcaaagttcgatttcaatgggaagagataattttgcggagaaagctctgatttttctgcggaccaggctttgtgatccttcttttatcttcagttctttctccaactctcccgattcaaattacaggtcaaaattttctgtttgtttctcgagaaaaaaaaataaatcactacattttcaaaaatagataactttagtaaaaattactatattctgcttcgttttcatttgcctaaattgagttttttcttaatttttttcagtaaattgaaattcatagtgtcgagttcggtcatcgagggttgtaataactctattctgcttcttggtcctcgtggttctggaaaagttgcagtaagctaatcttttgtttttgattttattagggtttttcaattttgattattttagttaagttatttttatttgtgttttaggtgttggagcttgttatcagggatttgttgctagaatatccagatatgattacagtggtatgattttatggcttttttatttttgatattttgctttcatctaactctcctgtttttttttttttattttttgttatgtggagactactaagaaataatatacagcgtttggttggtaggaataatagtaaaaggaataggaatgagagtgagaatgatgataggaatggaatgcaaacaaattgaaaatgcttaaaaaaaattattaaaggattggtgtttcttctatttcaaattggaatagcgattccactaaaataaagtaatagaaaagtcattcggttatactgacattctaatactttaagatgcaaccaaataaaagaaattgtaataaaaatt

SEQ ID NO: 205998 - DNA, 940 bp, Cannabis indica
ttctacaattacgtgtatgtttgaaaaaggctcttttatttttatgtttcagtttttttattttattatatttatgtagatgcaaaaaggttaattggtaggtggtacgaggacgaatgtgtacagagcgatattaagctctggccattcaaggttatccccagtcctggagacaagcctttgattcttgtgaactacaagggtgaagacaaactgttctctgctgaggagatctcatctatggttctcgtcaagatgcgtgagattgctgaggcttaccttggttcaaccgtcaagaacgcagttgtcactgtccctgtttacttcaacgactctcagcgtcaggctaccaaggatgccggagttattgctggtttgaacgtgatgcgtattatcaacgagcccactgctgcagcaattgcttacggtcttaacaagaaggccaccagtgttggtgggaacgttttgatcattgatttgggaggtggtacttttgatgtgtcactccttaccattaaagacgacatttttgaagtgaaagccaccgctggtgacactcatctcggaggagaagattttgacaacagaatggtcaaccatttcgtccaggagttcaagaggaagaacaagaaggacatcagtggcaacccaagggcccttaggaggttgagaacatcttgcgagagagcgaaaaggaccatctcttccacagcccagaccaccatcgagattgattgcctatatgagggtattgatttctactcccctttacccgtgccaaatttgaggagctcaatatagatcttttcaggaagtgtatggagcaagtcgagaagtgtttgagtgatgctaagatggacaagatcaatgttgatgatgttgtgcttgttggtggttccactagaattctcaaggttcaacagttgttgcaagatttctt

SEQ ID NO: 205999 - DNA, 811 bp, Cannabis indica
atccatttatacactaatatatatatatatacacaaaataaaccatagaggtaaagctgtcactagctcacttgcttttcctagaaaagaaaatactcagttttcaaccaaattggaatattgttctataaagtattcaattccatctattgaactatattttgtatataacaaagctttgtttgaaatttatataaagttccaatcttttgtgctcttagtgattcatgggtttttttaatacaaagaaaaaagtatgcatttatacatcattatatatatatatatatatatatatatttatataatgtagaaaagtactagctcacctgcttttactagaaaagaaaatgatcactaatttttaccaaaacatatatactaaaaaaagattacaacaactcttttgattaatatctctgttgattttttcaacctacatatatagacatagtccatatatataataaagctttataatcatcatcatcatcatcatctttcatcatcatagatatgacactattgattaaaatctcaactactttcatcttctaaaacccttttctgaaccaactacagctttttcttcttcttctctgataaaataatcttcaacaaaagatagaacttgaacctgaaaattaacgaaatagaacatgaaaagttactttttttttgcttattattattacctaccaaacccatcaccttaaactttacatatgattaatatatacatatgatgatgatatataagatgggatatgtatgtaaggatgataataatggtgacagaagaagagagagc

SEQ ID NO: 206000 - DNA, 1067 bp, Cannabis indica
gttaatgaggtttgagtatacagctccagcacaatataggatactatcatcgaacaggaatcttcaattaaaggctgtttctggcgtttggtctcactcttccttttacattcttcatctttgttttaatcaaaacattttttcagatttttttctttggaaagtttaaaatactaactcactgtaagtttttcttcatagttattgatatgtctcaaggaaagctgtgttgttctgttggatattgtgtttggattgtccattaacattatcagagtaaaaaaggggtctaccaagagcaggtgttacttggtgaatcattctttgtaatgtatagaagtaattgtatgattcacgctttatgatatttccatgtctaatttgcagttcaatggaagatccactactttcagctgatatgaaccttgaggaagattgccatatggactctgtaagttgcaggagccatctctttttccttcttcccctgtcccctctccactttttattgaggggagttgaggtgggattgatttattactaacgttagttatgtagattgtacaataaattgtgtaggaagtaaacacaaacgaagaccctctaatctttctgttcttatggaactttggtttttgaagggaaatactgagagttattgggatctattgacattcaaattgattgcatctgtaatgagtcatggtgcagtaaagcagcttgactttgttgatttgcttccacttcctgctgatatggatcctatttcctgtcatgctacattgttaacctcttggcaatcacagtttagtaatgggcgctctagtccatccctgttgagggcaatctgttctgcatatggatggccatatcttcgtttgggcttgttaaaggtatctcaatgtatttgggcacctctgccttctataatttagacacgttatcaacaaatgaaaacttaatagttctctggaatagttggttcttgactgctgcttttagttactacttattttactttagcatgtacagaatgattagatttatattggttcgcctatctctca

SEQ ID NO: 206001 - DNA, 664 bp, Cannabis indica
tataaaatatataaataaatattattacagtatgtataaagttttaattttatataaacagtcatattataaaagtacacaccttatattataattactacataatctaaaattaatgatcaaaaaaatttcgaaaattgaaatattttatagcaattattattattattaaatttgcccttacctttgttaatgcttacaattctggtaaagttttttttttcaggtataacaatgtatatttattgtttctctcttctaactcttgcttacattctagcttctttttttttttggacacgtaattgtacttttttgtatttttaataacaatcttattttttcaaaataatgatagattagactcatcaaatatatttttttttacattctactctttttttattttctaatctaattagtagttttagaaagaaataaatgcacggatccgcataaattataaattatttatgaaattatcttagtccattatttgttttaaataccgctacatgtctacagaaattcaaaattaaccatatgtttttcttctacattttactcactttcctagtaaatttacaaattagtttttttttttcaattttaatttttttatgtgaataaacgagacagatattgtaatcattctcactttctt

SEQ ID NO: 206002 - DNA, 1032 bp, Cannabis indica
agagagagagagagagatcaattacataagtttccctttgggatttgcaaaatagaataagttgtgtcttagtactaattatctagaagaagagaaaaatataggaggtttgtataaatagttagtcactggactagctaactagaaattaagagaagaaaaaaaagaatcagatcataggtagagagaagatatgggaagtggttattttggagagccaaatttgggatcatcaaacgaaagaggtggaaatggaataataagtgggtcttctaataattcatcaaggaaagggaagaagtctagttcagagaaaccaagacaaccccaaagaggacttggagttgctcaattggagaaaatcagattacatggccagatgggttgtgctactaatactaatacttctactactacttatgccgctcatccttctcttcattccaccaattaccctcctaatttcagtaacgtaataataattctatactacacatgaaatttcctttattttttggtgattaattcatgatatttattattatatatatgtgtatatgtatgtatgcaggtcgatgatatgagactccatacagcttattcagcaataccatcgtcttctttttcttattcttcttcttcttcctcttcctcagcctcttatggtttcaatcccaatatcatggtacgtattattactgcaattattttgctaattatatatgaaggagacaaataaaactgcctcggcaattacttttattagtaatttatagaggaaattaaatcatataaaagtatttcttttcctttaattttatgaattatgaattataattaattaatattctgctagctgttgggggaatacatgatcgatttgtagagaaaccatatatatagtaaaaatttctcgatcaataaacactgtgtattcttcaaatttattgtggttagaagaataaggaaaacaatactatgtgtattcatttcattcattttagtttgttatgtgtgattacttacacaaat

SEQ ID NO: 206003 - DNA, 814 bp, Cannabis indica
tcatttgaaattttaagtagcagctcacagtagtatatttctttgtttctgctcatcggcatcatacttttctgtaatgtttctcatatttttttggcaaatttttcaaaactataaataatcatacaaatcatgagagagactatttaaaataaaattcttatacagaaaataattctccacccaaaagtccttttccttaacttgcgcttcgtgtggaatggactctcttgagtcaaatagaacttggaatatttagttgtgttacatccaggttgtaagataatacgttgtaagtgtggattcttaaaaagaaattgagatccaatggtactattgaaaagtaggtattgcggaatgaagagagaaatgaattgaatcttattgaattgaattggtaaaattacaaagggaaccgggttacatatatatagtccaggatactaaacaacacgatcttaactaacataacaaccccaactaacttaactaacttccctatatattagcaactaacttaactaaaagatatcaagaatcagttaaggtagtttagagaaaaagaaggaaagtagcacaacttgcagagaacagaagcagagagaacgagctactgaaataaagactattgcagaaactaaagtctttaatatcccctcctcaagatggactgtatagattatatacagacatcttgttaatgtgagtagcgagagtagtagaaggaagtggtttggtgaatgcatctgccaactgtaagttgcttgagactggtattaagcgaacagtaccattgttgattttgtcacgaatg

SEQ ID NO: 206004 - DNA, 861 bp, Cannabis indica
ataaaatggtataagtaaaagattctatgaaaaattcctaaaactttaacatgtgacatttatatattaaaaaagaatcatgtttataaaatggtatacatcttattaaaaagaaaaatagacaatcaaagactatgaaaattttcatgaacttaacttataaatatggcatttatataaaaaaaaaatccttataaaataatattagtgagaagaagaaaaaaaaattgacaaatccaagattttatgaaatttttcgaaaaaaaaaaaaaaactcaacttatacataagtgacattaaaaaagaaaaatggtataaatcttattgagaagaagaaaaaaagtacacaatcaaagatttgatgaatttctccaaaaacttaacttatacatatatgtgacatttataaaaaagatgcttctaaaatggtataaatctaaatgaaaacaaaagtagtgaaagtaaagagtgttggttattaatcattattaccttcagaaaactttttcattcaaaaaaaaacttaatatatatatgtggtatttatgtaaaaaggatggttataaaatggtataaatgtaaatgacaagaaaaaggaatagtgaaaagtaaagagtgtttggttactagtatctataatatcattataagtatggatatttgatgagtagttcttgtctttttgtgggtttttttttttttcgtatttttttaattttaattttttatttcaattttcatttttaattctatctttataatttttttaatcctattttttaggaaataattttttgtactagttattgatatttttaatgtgtttaatgtcatttcgataatgtggtattatttttttgt

SEQ ID NO: 206005 - DNA, 1039 bp, Cannabis indica
atacgatgagacaataggtgagatgatgatgacaacgagagagatacggtgataacaacatgaactacaatgatagcatgaactttatataatcaggatataaaaaataatgcaaaggagtgtttgcttatgtaataataataataataataataataataataataataataataataataataataacacattaacattaatttttatgtaaactaccgatttatttatttaaaaatgaaaagcaattttaaataggaaaattatttcatatattatttttttttccatttttacggtttgggttgctctgggggtagctatgtgggttgttatgtggatttaaattgtgatttaggttgttctgttagttgctgagttgctataagaattaccgtaaaaatagtaaaaaaaaataactttaaaatgtcaaaataaaaaaaaaaataccctttaaaatttctactatacattaataatataaattttaaacttcttaataaataaataatagaacacactaaataaatttttaataaataaaattatcaataattataatttaatatgaaattttatgttataataaataaaattattaataatactatgcaattagatagtataattttattattattattatatattacaattatttttaaattactatttattatattgatatattataatactaaaaaaattaaaaaaagccgcgcgaagagcggctatattgccaagttttatttataaaggacaattatattattattctttaaattccaatttctttgatacattattaatttattactggcttacgtctataacattttgcaaacaatagtaagtaatattaatttaattaaatagcatgaccgacatcattaagtgtaatatttttttcttcacaaatcacaatcacattcacatgtacgtatgaatgaaaaattatgtgatacgataatatcaaaacaggatatgctggttttgtggtacaattcatgaaaaagatgtctcaactctcaaccacaaa

SEQ ID NO: 206006 - DNA, 740 bp, Cannabis indica
aaaaaaaaaaaaaaatccaaaatctgaaaagatccacattcctacaaatcttttacattatacatatggctacggattttatggaggcaagattatccggtcgtctccataaaacatgtaagagaatccaaaagagtagctcaaatggtcaggtatgtggtttgctccaacaaggtccgaggttcgagtcctctcctgaatacctacatagcaattgttatagtttcctggttcctaaatattgaaaggtaatgtgaggatcctaattaaaaaaaaatatgaaaacatgtaagagaattgttaaaagacattagtattccaacattactctaaagttagcaatagtataatttaataccattttcagtagcattagtgcctaatgacaatgcaaagtagcattgtaagctgaaaagccatatcatctatccaaaattgctagaggtatagttgggaatgactacatgaaaagctatatcatctattttatatggtgtgaaacagaaattgggttcttcatggactaaatagagcagatatacagttaataacaataacaattattatatttactgtgtcaaattcaaagaaaattattacagacataatttgggtttttagaaaacatgtttaagctttgcagattattctgtatatctagcatctatgtaaaaatgtcttctcaaccacttgattcactcatttaacattttcctttttaaattgaaaattccatcatg

SEQ ID NO: 206007 - DNA, 547 bp, Cannabis indica
acatgttcaaacccatcagtagcgcaatcagcataccagcagtgacgaggtaaacacacgtcttccatgcaaatcttctccattctttagtcacacctctcttttctttagtaaacactggtagaataacttcttttgtctcttttgtaaactgatctgttccattctttccctccaaagattgggaagatgagtcgccacctgccatttgttcggttgaacttgaaccagcaaggttcgttgcagattcaagctctctgcttgaagcagttgaagttgagcagatattgccaccttcttctaaatcaccttgtccaccacttaaacttagggagtttacttccttctcaacttctgaaacaggactgtcttcagagcaatctgaatgtgaaggagaagtttgagttttctcaagagttccttcttccaaagcgatttcctcgtctttgttagaagacaagaccctccaatacatgcataagagaattgacatattgacagtgacaccaaccagcatggcagggaggagtcccaatagaaattgtcc

SEQ ID NO: 206008 - DNA, 592 bp, Cannabis indica
gagacggcgaacggagatggaggcgtgagagagaaagaaatggatcaagagatcgggttagaaagagaacctcgagctagaggtttcggaatgcaggggagcccggtccgtggtcttcctcgtccatcaatggcagaaatagctccaacggagctagcggaggtcgcacgcagggttatcacggtggtggtgaggttttgccgattggcgaccggaagtaaccgatcatagattgggcagaggctgctaagaaagagaggagaaaggggttcccattcctttcctgttctatttatttactcatttctgttgtgtcgcaagtaattaatgccgccaaaaataaacttataataaatgagttttgtatagttgaatagtttgttttttttttcttatcttaatggcattgtaatgacattaatatattttgataaaaaatttgattttttttttttttttgtaagtaacaagatatgtaacagaaggaagagtatgagagtacgagttacaagatttaattaggaatggcaattatacctgcgggttgggatacttgtgggtacccgctcctaatggagcgggtacgagagtt

SEQ ID NO: 206009 - DNA, 821 bp, Cannabis indica
gttatactgtagcgactataaatgaccattatggtacgtaaaacaactatgaattttatactttagtgactatcatggtcgcataaagtaattaagtgaagttattttataaattttaatattttaaatacttagttgagcaaattttctccaatttgataggataaaattgctaaggtgcaatgaagttagctattgctaaaaatgatgagaaactctagtactaccctttccatcatagaactaaaaaaaaaaaaaaaacaaaacacacacacattgaaggctctttcaaacatctcatatattaattatgataattttcaaacatttcatatattgattgtactgatgtttttattctttcatgtaggtccaagatttcaattgaccttatttatatgtaggttttatgtttttcatctttgattttagtttattaactgtttgattgattgtgttcttgaattttaactttgttatcttatgttttgaaaaacattaggtgtcattttcttaactatcaactcttttggatatgagggtgatacttcaaaagacagaaatcttatttatatatttcgataaaatattttatacaccaccaaagatttctccaacttgttaattgttatacagttgttgtcttaaaataatgaatgaatgtataataaaattaaatatatttgtaaattataaacatatcctatttgtaaattttttatatgtataataaaattattaaaagggtgagacttagaaaataattaaatatatttcattaataaacaaatggatataaagaataattaaaagcgttatat

SEQ ID NO: 206010 - DNA, 619 bp, Cannabis indica
taagaaactagcaaatatggaccagactttttgacatggtacgaaacaagaacgagctcaagaggcacgtaaatgatcaggtatgaataattatagacttagacacgacaagagatgatgttacaaattgacaggacacgagacgaaaaatacaagtttgagcataacacgacatgaaaatataagattatgtatgacaagatatgacacgacaagaataaaaaatatgacaagtaagtacggataatttatctaaaagcacaacatgttaaaaaccttatatttgataatagtaataataatttgaatatttataagtaaatatcttaattttaatagttctaatgattttaatgtttttatataattttgtgtgaaaattgtgaaaaaattatataaaaataattgaaattatagaaaatttataattttagtaattatctcattaattataaaataaaatgtgggaaaatagaatatgaatttgaacctgaataaaagaaatgggtcggcttgagtaaatcacgatataaatctaagaacaacatgaatatgagcacgatatgacacaattttgtattttttttagcacgactcaacatgactcatatattcacta

SEQ ID NO: 206011 - DNA, 593 bp, Cannabis indica
tgtgttgtcccttccataaaaaaagctatgcaaatagccttaattctgttatgatcttcttaggtagaagcataatctgactccaataaatatgtatagtgagaagcacaaagttacctaatgttgcaatctttagaagagatccttttgggattgattggaatacctaggtaggtaagtggtacttcactcctctagaaccccgaggcatcaagtatacgctggggctctttgttagacatcccactgcaataaatggtagatttagtagcattaggatgcaatccagaagtttgggagaatagcttgaatccctatatgagatagtatatgcttttataatccccattgcaaaatagtagtacgtcatctgcaaaaatgagatggttcagcttcagatctttgcacctgtcatggaagataaaatctgccttctgtctgattctccccataattctagtaagatactccattccaaggataaagatcaatggtgacatcggatctccttgttgtagacctctctttgcttcaaaataaccatggagtgagccattaatcatgagtgagaatctaggtgttcggatacaagt

SEQ ID NO: 206012 - DNA, 733 bp, Cannabis indica
aaggacaaaccatcaggatggtaaaatttggccaagcgtctataagcaacctttatttgctcctcatcagcatccctctctaattctgccataaattcgaaagctcctatatttatttattcagtctcaaacacaaaagcataaattttgagagggaagttaagttaccaagagtttcataaggagatttgtggtcgctccaattggcaactttaaccaaagtcctcctctgattgggacgaaaccagggtttagaggcaatagaagaagcagaggaagggggtagtagagaatagggagggttgttattagggtttcgaaaggaaaccctagatcgaaattggtgtctgcaacctatgaaggtggagacggagaagaagaagcaatgaggtcggcaaattgttctgagattactactactactcatcatgtttctctttgtttcccttggatgaattccaatccaagggggaatctttgtgtaatagtaatagaaattcaaagcttggtttggtgggtttggaaggaagacgtgtagtgtaggaaggaattgataaattttatgagaatctgattgaatctccaatttatattttatttaattttaataccatttactcacataatattcgtggacggttgtacttctgtcgcttgacggttggaacttcttactttctcaatctcaagtcaaaaacaataccgcagcaatgaaattactatgttaaccctg

SEQ ID NO: 206013 - DNA, 1034 bp, Cannabis indica
acataatcaagctcaacttcatattataggcaggttcttaaaaatgaaaagcatgtttttagatagtaatacacacatgagctttatgattttcaaaataaggtactgtaataacaaatgaggcctcagcatgattcgacttcaagcctgaaaagtttattaggccaaatacaaacactaaaatttctcatctactacaccttgaccaagtatttcactaaatgcctcaactaactacaaaagtctaaagcactaacttaaatggctagttagtaataataatacaccatcaaagtttataatgataaatatgcaatcaaatacatgacaattcagaagaagggtgatattatatgatctatactttggcttcctctttggttccagtttggggcaaaaaggtctcccaccaaccatattcatacttttgatatggagccacccatttttcaggtttgtcaaacttaatatcagtaggattagaagccaatgcctcttcaggactctcagcttcataactctcagctaatactctgtccaatctcagtttcatgaatctgcaaccaatgcccaacaaaattatcactctcataaatatgatactactaatattttcatataagaatgtactagaaaaaaactcaaaagttccaaatactaatcctcaattataataaaggaaaatattgtaatttagtaagagaattagagagagttacgtgatccaggggccattggtggaaaccagagccacagcaggtctcttcaatcttttagtaatgtttgggaatttatccaagaacttaggctcgatcacaagccagaaatcctgctccatgttcctctcttcaaacagacgacgcctctcatacataagctctttgaaatgttcttcctcatcaagcatgaatttcgcattcgcaaccacaaaataatacttctttgcttctccctgtcaaaacaaaacccatctcgcaaattgtaagaattactcggaaaaactacacaaaaaatgttcttcttttttttttctt

SEQ ID NO: 206014 - DNA, 1083 bp, Cannabis indica
tagcatgtaacaacctcttcttgatccacccatatggcagtgaagtcataaaatttgaatggtgtaattgagacccctcactaattacataattattgtgtgatacatgttaaatctcattattattctgaattacatatgcaacgcagatgccacttattcctagtagataatatatataaatatagaatattttagatttagttataaaaaaaataataaaaaaagagactattattctccatctttttaagtcagtacagtgattcatataagacaaaataagttaaacgaaaaaaagtaactctattatattatatagatttaccaatttatgcatttatatccattatatttttttttttatgtaaatatcaattataattatatggctacaggctagctactataatattgtaacttttccttttttgcggcaatgatatattttgattacatttttttttggttgaataattattgtgaataaattaatgctctgcacatatatataaaataaatttatatctaattttgttagttggtaattatagtacaaaatgatgaagatcgaagtagttaaataaatatataagaaataataattatatatttacagcctatatgatgagagtcgtacaaaatctaattattaattaattaattgtagttaggtattgaggtaaataaagaagaaataagattaataaaatcttgttcagcacaagggatagtaatgggaccctttggatgatgatcaaaaccaaactcttgagcagctttaatcaacaaatcttggaacaaaggatgcttcaaatatgagattggtaccacaaacctcttattcttcattacttcactctctttaccaacatacactgcaaaatgtccttttggaaccccctgatgatgatgaccatgatcatcaacggtcacaaatgatcggtgtttcgaagaagctgatgatcgccgtcgaataatttgagtagcatgaagaagttgatgatgaattcccattgttatgtcttgtggtgtggtttgttgtttgtgtttaaatctaagattggatatatgttttgctat

SEQ ID NO: 206015 - DNA, 1132 bp, Cannabis indica
ctgtacagctgaaggcttagtgcatgtggtattttttgtaaatatttgtatgtggactgtataaatatttaatgggccggccctaaagtatttttgttaattttttttccttttttgtatttttttgtttttttcccttatttttattattattatatattctaataacatattatgaacgcctattagaatgtggattatagagtatatactttgaatctttattcacattttattttgggaatttttagtttttattatgaacatgaggtttgatgaataaattttagtaattatttggttttgaattgatttttgtactttaaatttagaattaatgccttttcttttaagtgttatgtttaattttcataaataaatatagtagaaaaaataactatataaaatttggattaaaaaaaaaataaccgggtcaacccgtccaaaccccgaatgcgcaaatctgtaaacccgcaacacgtgaacggatgggtatgggtttatttttttcacccaaaacttatgaacctaaaaccatccaactcaaaacccaatccacctgtccgatattcaatcttattaccatgcacttcaagaaaacaagtggtagtaaatgaatataaaaaatataaaatttagtatcaaagattttaaaaacatatatttagagaaagttgtatgcaactgtaaattttccaaacaattgaatgtctttcataatttgattacttgagtttgtcttgttttgttttatttttttagtaagagaaggagaagtagtcatgaaaagtcatattcttgttgtcattaatacaatactagataacgatgttgttgttgttattgttgtggatgggatgggttgctttcaatgtagaattttgtagcaacaaaatcaagtttgtcctctttagtcaccacagacagagccatatattaattcattcactccatctttgtgtgggcccaaaattataagctggcccatctgcaataatagcccattctctaatccttagaatctgacctgacctgaggtgaccaggattcctgcattgcatgcttatgcacctgtcaccctcttacaatctatactcttattagaagaaattacatggtatacccactttac

SEQ ID NO: 206016 - DNA, 676 bp, Cannabis indica
ctttttatttttctctttcttcttttgcaattcccttcttcttccaccttccctaattacccaaaccctacccagacccaatcacccaaaccccacccagatcacccaatcacccatgtcttcttcttcttcttcttcctctgaacatggtttctcatcttcgtcaatggcgaaaccacagccaatccattctttcctaaatcgtcgtcttctcttctccctctctgcttcctcttctaaagatgtccatggccatgttcattcgactgtcctagacgctgattgaatgaaaccgtggtcgactgcgtgactaagggtccaaatagagcttcaagctcctcaattcagagtaatagatatggaggtgataatggtagtggcagcggtggtgacaatggtggtggtgataatggtgacaaggtgagatgaggcgatgaggctctgtagaaaagaaagagaaagagaaaaaaaaaatgaaataatatattgttttataatttatttatttttataatttttaattatttattataatattttaataagtaataatacgtgaactactaaaatttagtcacgtgtacatttgtgtacacgtgaactactaaaatttagtcacgtgtacatttgtgtacacgtgaactatatttgtgtacacgtgaacaatccaatgtgc

SEQ ID NO: 206017 - DNA, 891 bp, Cannabis indica
aaaaaatcaaatctatttatcaattttaaaaattaaacaattgatatatatttaaaagtctatttttcacgttttctttaaatgatttttttttttactttttttaagttttttttttattaagatttttacaaaatctatatctatatctatttatatatatatattcaaaaaaaaatatatattattttaacaaatatatataaataacggaacttatataattttagttaacaataatatatatagcacatatcttacaaaaaaataatttcaacctaatcaataattattcaaactatatatggggtatctattattcttattaatattaatattaatatgtacatgtatattttcaattctttctttcatgtttcttgattatagagggcatcaacacattggtagagtcataatttttgatatagagaaagttgaagtgatcaatatagtggtggaaaaggtttattgatagaagcttaatgtcagccaattaatggtaatttctttaaggttgatgaatatagtgaattaaagttttactcatacatgtatattcttatcataatagtcatcaattcatacatttttttttttcaataatacatgcattatcaatattatatatattttgttgtattataataagatttttcatctaatattctataaaaaaaaaaaaacttaatttataaattttataattcgggtttttcactctaatattaagtttataatattagggcgccttattattgtaataattcctttcaaaaaaaaactttattgttaattgattatatatatcatattaaatattttaaatttactaaatttctttaaattaattagtcttaaacactaaattactatgaacttacatggtac

SEQ ID NO: 206018 - DNA, 784 bp, Cannabis indica
ctgtgaaagtctcatgctttatcaactcttttggttgaaagaggtgcatttaaagtgatttaaagtcttatttagaagattgtttgtgggtacttttgttatgtatcataccttaaatttctgtatgcaacttcagcttacttaatggcagctgtggactgaatatgaaagtaacaaactgattactttaggatcgtttttcggagtcttgtaacaaaacaaaagtataatgctttgattgttttgtggactaatgcattacaaatcatgagccatgttttgcagaaatgacctttttcttggactttgtagggaacaggactctctgccaaagaatgtgagatatgcgacttctttgtgtatatcctcaatacggaggggggactgcttcactcaatgttactgttgctgcttctattgttttacatcaatttggaggtaacactaataaataataattggatgctttgtcttcacgagcagcttatgtttataagctctttctgtgtgaactaaacatgatgtttccaattgtttctcactttgtcaaaaaaaaaagaattgtttgtggaaacccgccctacgtcttttgcttattgttatttggagtgggttcagatagtgcattaggttcataaattaagcagaaaacagaataaggtttaaggtttatgattagcattaaaatttatttaaccaaaattttctgagtatagagagaatgttgtaaaactaaggcattacatccctatttggtacgccattgaatgaacctatgccatat

SEQ ID NO: 206019 - DNA, 507 bp, Cannabis indica
tgctccatttgtcttaaccatatcgactccaactcccactcccttttgcattattctagggctggtaagtggtggaaaaagtctaagtttcaactttttttctacaaaaaataaagtttatgacattagtaagaatataagttaaaattaatatagatcaatattatactctacaatataatatggtatacctaacaaatccttaacgaaataaatacaagagttgatcaaattaagttgaattaacaacctaaaagtcgagaaaataagttgaactaacgaccaaaaagttgagatatggatgtagtagcattagaggtattagtagatgaagcagtagaaccagaagtctctctgtcttctcgtggatgttggttagcatcaacaaagacaggtttagtcagtggccgagactcctccaataccgatgacttttttgttttgagtaaaaccacaacttcagacattgtaggcctcatggttggggatgattgtatgcacataaga

SEQ ID NO: 206020 - DNA, 1880 bp, Cannabis indica
  modified_base (11)..(11): a, c, t, g, unknown or other
ttgacgagtangtcattatgacaaatgttacgcaaacgttcatttacatagttgtaaaactcttcagcttctctaaatgttaagccatgcatagtcttcgtacgtagacctaatagttttcatttgtatcactcgaattcatattttatttgtattttagggttatagctactaatcactttcttactttttttctagtacggcaggtgatatatataatatagttatgttcctaattataataggattagaattagatttctctaaccaaaaagaataaaaataaaaatatcttaagtaattatacggtttaaaaagttatctataattagagattagtttatttaattatatattaaaaataataaacaaaaatggacggtataattaaaatccaccaaaatacttaatattattatttttttgttaatatgactaaccaatcatataattaaaaaaattcacaattctaatttatattattattattattattaaattaatgtttgacattaattataattagttgatctcttttaataaataattctatatcaaaaaatcattgtatcgtacaaacaatcaaaacgacatgtctttttatataatactttatgtcgttacaggtatgaaacaattctcttataataaataaagtatatattttccataagagtccattcaatattaatgaattaaataccccttatttatttgtaacattatctaattaaatataaacaattaatattatattttatatgtatatatatttaaatttatatatactgcatgttcattgtaccataacatgaataccatgtatattaattgtgccctagacaatttttttacaactagctattatgtcgtttgttaatatatatagaggtgtgtataatacgatccaatccaatgacaattgactaattcaattataattgattgccaagtattaaatattcaattgtgatcatatagaatttgatattatttttgaatatccaattgaatcgaatcagatgttagatggagtgtccaaaaatccaatacatctaatattcaatcaaactaataagtattttcatttaatttggatgagtaattaaattttgtattactgcatgtaatatatatatatatatatgaaaattaacattaaaaattttactctttttttagattaaattgatccaattaaatacaatacaaactaaatttaaaatattggataattgagctgatttaatctaaaaaatactaaacctaaaatattattagataacctccaaattaaactaataattatatagatataactgattcaatttaacatctaatataaatattataaaattagaattaattggatcaaatttaaataaaccaaaaatattaaatattgtgaacaaaccctattaaatttatatatgtggttgtataaaaagtcaaaaaaatttatgtattatatattaacctttgacattaatgttaatactcattattttattaataatatatagtcgtcttcatttgacataaacatacaataattaaaaaaaaacaagtctttattaattaaatgcaatgaattcactaattacgtaattgatgccataacacaaacatgaaattgtacttgttatttgaattaaaaaacaaaaaagaaagatttatacatattttagactatttataatttttgtccgtaaatacttttcagacaagcttaataaatagaacttaacatctataaatataaaatataatataaatagaaaatgggaatgaaaagtatgtacagtaaaatgtaatatacgcccaatacatatacgtacaaatatacaccaatttaatttaaattatctataaaagaaaaa

SEQ ID NO: 206021 - DNA, 521 bp, Cannabis indica
ttacctctaaccaaatacctacttaatttccataacaaaggaaatgaacaagtttccacttggttaggcaaacatactataagaattttagaatcatattccaaaacaggtccaaagagcatataacatgtaagcaaagaaaaagcaaaaaaatggattttcaaacaaaccatggaatcaatatgtttggaatcaaggaaggtcttatgaactgtatttcataaaacacccatatcagcaattgaagtgaaagttcgaacaatcaacaagtttcatacctttaagaaaaaaaaaatcatatttttacaagcaactaactactcaaaccaaaatatcaaaaaacaacagagattacccattaaaggtaataaagcaataaaatcaaattaacaaaatcccagagctcccaacgagttaaatagtgaaaaatcaacaaatccacattagaaattctaaaaaggaaaaaagtttcaaccttgaaagttaaatctcataccttgaggccaggtgggtaagggttg

SEQ ID NO: 206022 - DNA, 622 bp, Cannabis indica
ggggtgcaaatataactccctttgtaaattattttagcttatattttagttacacatcgatacattaaaattgttactatgagtttttttagttatataacacatttagatagaattattattttattttaaaataataaaaaaaaactattctgatacaatataaaaaaatattaataacaatttttattaattttttatggatattaaatttaatttcattttatacttatttctatttttattcttattcttattttttgtattttatttttcttctaactaaacatacactagattattatgaacggatattaataattaataggcatttcaataaataaatgtggaagttattatatgaaaatccaagtgttttttattgtgtagttagtgaacaaaaaaaaatagtggaaaagaaaaatgattaacgctttaattagaatcaaaatgataattaattatttcctccaaaaaaaatattatatatcagaataaattcttaaatcctcatccaaccattattatccatcatgaatcacctatcataaaggaatgaatggaataatatcgatttatatagaaaaaaaataaaaaaactctctattgattcaaacgctgt

SEQ ID NO: 206023 - DNA, 1330 bp, Cannabis indica
aaagttctagatctctctttcatttttctgtaacatcttgaatggtccaattccgagctatatcgagagagttgtagctaaaatacgatcagtcgacgtagcagaaaactcactgcccaaataaagaagggcgcgcctaggcatcactactacaaaaacacccttttaagtccatcaaagtaggactagataaatttctcgagtccattttgtgttggacataatagcctaggacataaaaagggtaattttctagtccaatattattggactagcaaaacatgttggaatagaaaaatatacttagcctaatatttttggactagaaaaacatttctagtccaatatttttgaacttaaaaagcgatccctaactcctttcatgtcaaattttgctggacatgagacttatttttttatttgtaaatccattcacgtccagcttaaatatggtaaaattaattttatttatttatatatattaaattataaataattgcttttattattatataatataattttttccaaaatattatttataattaatttaattcaattaataaacataaaaattatacaaatttcaaactattattgatatcttgaaatttataatatttattaagcatatacatatataacaaaattaagaaaattgtattcaagaaaaaaaaaaattaactaattttgttagctaaatatatgtcgtaactaataataatttttttttgaaaaaaaaaaactaaactaatgatccccaagtgatgattttgcaagtgtggattgtggaagcatatatgtcgcccagccccagcaataaataaattaaattaaaaaacaaatttctttaagtttaaacataattaacaaaaggagtatttaatatgttttgaaggttaattacctataagctctaagagaggggtttagatatttcatagagaagtcatcgatatatgctcaagtctttctcgtaccaaagtggtggttggagcaatagtcagtcgagaaatctaagctagtggtgattagcgacgtgataatgagggtgatttaggtttaggtttttgagagttagattatttgggcaagatagaaagaaaaagaagatatatcctccatttcagttttttgttttgccgcttaataaatttcgcaacccgctcttatttcacgttgtcccccgccttttttttttggctgcttgttcaaagtcgaatgaagaagaaggaaaatgatgatggactagctgtttggtggggttgtaattggcccaacgtctagcagtgctggacgtggcacaaaattaatagtttttttgttataa

SEQ ID NO: 206024 - DNA, 1977 bp, Cannabis indica
ttttttttattatttttatttgttaagccattgtttttgtgtatattgcattgttttacctgtgcaaaagaaattgctaataactatgtgcttggtttaattgttttagagttttaatttaaaaggttctgtgggaaatttttaatatgtttcacaaatacaatattttggattttattatatatgcttgactagggttggaagtatgattgtttgaatttgatagaaattgcattgttcggcctttgaggtgaattctttgatgacttatgctttgaaaaataatttaggaaatttttttggaacgtttgtgcctttcaagcaaacctgttgtgtaattatccatagtttaacccttttgagccttaaattgatttttttatatatattacacactttttgagctaaaaaaatttgacccatttattattttcctttgtcctaactataccatgagttttaaataagtttgggagaaaattgtaattgggtattgtgttttgagaaagcttaaatatagtgagagagactgttttaatttttcgcaatcattttcttaaatttcttatattcttctcttaaaaagtacaaaaaaaaaaaagaaaagaacaaaaaaaaagaagaagaagtaccgaacaaaaaaaaaataaataataaagagttatgggtttgggttgcaaaaatataaatatctctagtgtattttattaagtggggatatggataattttagaatgaaattgagatgcttagaatctaaaaagcttatggtatagttgagcctaaatgacattttcatctacccttacctaagcctaacgttgtaatctgattaaagttcttttggtttcaaagcatttgttgttggcattagtggagaaggttaaattatgcaagcatattaaaaatttagattgtgattttgattggtatgatttgaacatatatggtgaagttcaaattattatggtcatttgtaagtcctattatttatttctcattgaactttaaagttgaactttgaggtagttgagctgaaattctggttaaaaattacaattaaaatttcatgggaaaaataatgtagtataaataacaatagtagcttacttttgtgtgttttttattcttctttttagttatagcttaacttggtctttacttgagggcgagtaaaggttaagttttgaggaatttgttaaggttatttttatgcattttttagagtccaatttagggagtgttttagtctttttattattttattgtgcagatttatgcttggattttgtttttatttgtttttttaggaaaaatgtttggagatcttcaattttaataattttagtgttctgcaagcctttttgagcaaaaatgagaaaatctattgaagaaaggaaacttcttttagctttgagtaatttcctatttcttaaaatgggtcaaagattgcattttcagtctttaatttcgtggtcaagagtcaatagtgatgactttccaaaaataaattgaaatttctatgttttgaatgttcaacatgctccttttgtgattgaaaataaagtctgaaacttcaagccaatttttcactatgatccattcacttctaggaaaaattaatgaaagttctagatctctcttttatctttctaaaacatcttgaattgtctgattcctagttatattgagagggttatgaccaaaatactattagtcgtcgcaacaagaaattaaaaacgaaaaactgcaaaaattagtacagaaaataggaaaatgcgagcaagattgcgaccttagtgagaaaaaatgggaaacttcaatttttggctttatttaaagggggcttattcgaaaattgagaggattctaagtgtagaaggagagcaaggagcagaaggcaccggtggaggactccaaacagtgttctttctcttccatctcaatcttttatgttttttttttaaggattattat

SEQ ID NO: 206025 - DNA, 1014 bp, Cannabis indica
tttttctttgttcttcttcgtcttcgttggggtgtggctggagatgaagaagacgaagatggtgagatctcagatgactagagatgggtgacgtttcttaagctgcaacgaaggaggcttcgttgtcggcggagagggtgcattgtgtaggagatcgacgaacctcaaaggagaggtaactgggacgaagctcacgtttttccctttttctcttctcttttatttttctttttctttttttttttcagtaataatatttagtttttcttaaagaaaaaataataataatttatttagtttttatgatttttaaataatttatttatttatttttaattttttaaaaatttaaaattataatttggaccaatagcatgttaatacatggccattttgatttagtaaacggatccattaagaaaagggctaacggacttacaaaaatagtgaccttaataagaactattactgttatttttcgagatttaagattaatttgcattaaagtgaactttttgagattttttatcgcaaacttctcctaaattaataaaagttcactcatttcgaagaggccacatgtgtattcaatcatttacaataatttaatttctacaaatttatattttattgtatatcctagaaaatttgaggaatgaagataacatacattaacaacaacatgcagaaataaagttgaagaattattatatatatctatatgtatatttgtaaagtaagaaataattgaaagaactacagttaaatttttagttttggaatcatgttgaagatattattaagtaatagaggagatcgagttaaagttagtgcactgcaattattattaagattttctttaaaggagaataaaacaaaatattaggtaataaaagaataaacaaaatcacattatattttgtcattatgctttctatagattcttataaagtgtgatcaagtgtagtcaaataattgaattatctacatttcaaaactcaaaaaaaaaaaaaa

SEQ ID NO: 206026 - DNA, 969 bp, Cannabis indica
aagtaaattaaagtccataaaaatgtgaagaatggcatttttcagcacaaatgtaaaatatatatatatatttatatatatatatatatatttatatcattttaagtattttgtgtgaaaatccctaataataattgcattgagtggtatttgtgaaattaaaccatagcccatttcaactcactgatcccaaaatagcaactctcacattttttttatgaatagaaccttagggtgtgtttggaagtaattgttatattttaaaatgcaaggtgtgtttggatataaagtggtaattacatatgaatttctaatattttgtttagcaaaatagtaattacatggaaaaataatattttttagtagctaatgtttaatatggaaagtttttcgtaattacacagtgtaattacattcaattctcatgagaccatgagaattgtagagtgtaactggaactcctcaattacttccaattacacagttacagtgtaattacatagtcagataaacatgtcaaattgtgtaattacctccaattacacacaaatccaattatattgagactttccaaacgtacccttaataaattccaaccttacacctatgccaatgatgctactaataccttttttgtgagcctaagttccttacaatattctttttctttcctattttgattctcctagaaaatttatagtgaaatgtgaagtataaagaaaaggagtttactcttcttcttcaaagtccaaaagaaaatcagtcaagttctcggaatcttctacagcctcgtccaacgacataccgccaccattctttttaggtttagttttggttttgccctgcaaaattatgagccaaaattataactaacaaccttgaaatgccatcaataagcaaacaaatagactcaagtaaattcaccaagacacaaagtaataaagtttccatttacaagtacagtagaac

SEQ ID NO: 206027 - DNA, 1365 bp, Cannabis indica
ctcttacttgcatgcttcatacagctaacccattggtccaatacaaatcggttagggttggagacctctctgtattttcatttccggtaagatatatatacatatctcttctatatatacgtataaagtcatcatggctgcctcatatgtactaaacaaattaattaaaaataaattatatacatagttatatttaatatagatcattaaaaggcaacgtcaataatagtaattatatatatacattatttgatttgaatattgaaatatatgggcatcgctaataatgacaatgaataattatgatgatttgacaataattaactctctatatatacatcacccttaatgttttgttacgtactatatatcataaaatatgaatataattaaagtattaaattaagaaccacaagcttttattaatgatttaatatatatatatgatgaaaaactttggtatatgtattgccttaaaagaagcattgttatacttaaagaaatagttacttttgacaattttttagtcaatataaatttttttgtaactaaaagtaatttttagttaccatacaatgttacttatgattaaaatatagtatttaaatacaagtggtcactaatttaattttagtcacaataaatattattattaaaaatatatttattagtcacaacaaattataatttttatgactaacttttattcacattataagaatgataatttatgattaattataatttttttacttttaattcacaaattttattattgtcataaaagcaagagatttcgtagttgatatatataatgaggtcatactttttattaaaaataaattataagatttctcttttaattaaaagtaatgttgtacttgctggtaactataaattaactagtgcatgtacttatagtgggcaatctcttaatattaccaaaaattgttgattattaattaattaagtgtgcatggtccaaattaataagttgatttttttgactttaatagtaactatatgaagtatatatttgactcagagaaccctaattattatattcactttgttatccttaggttaggtggtgataattaatcagaaaacattataataatatattaacaactcaagtgcaacaataaaatatacatatatatataagtatattgtatatatgataacaattaattaataaattaaatttgtgcaggcatacaatttgaagataatgttctctaggaatgcatttctagtggatattgtaggcacaagtgtgggacgagttcttcaactcgactcagttcgaggtgcaacattgtggaaaaacgtcgacgttttgatcttcaacacctggcactg

SEQ ID NO: 206028 - DNA, 1114 bp, Cannabis indica
taaaattagatttagatttttgagtctacaattttggagttttaacatttttttttttgcatttctagcgttgatttttaattactttaataattaatcttacgtttagtgacttaaattaaatttatcaataaaaatataagttaattaaacactaacatactaaaaagtacaaaataacaataacaaaattataaatattaaataaaataaaaataacataatactaaattgttaataaaattaaaagagcaacataaataaaataattaataagtaaaataataatttaataaacattaagtttgaatttatttaaggttttttttcttaaattaaatgagtaatgtttaattgacttaattaatattttattttattaagttattttaaaattttaaatttttattagtagtgatgatataattatattagttattttgaattattaatctaaataatataaaatgtgagattttttaaataaaatataattgttaccaaattttatattaatttgtagatttaaattagtataattattgaagatggtcttaacaatcatgcaaacatagaatttgttcctaaaataaaaggaaaatttatggaatgcacacattctaaattctaaataatatgggtatgggttattgtctgtttttgatacatggaatgggtactgtcatctgtgatcattaacaagtgtttttttatttttgctaaaaagatcaccaataagttattttttaattattattattattatttatttttcttttatttatttttttttttttttgaatgggatcaccaacaagttattagtatgaagataagataattaataagatacgaacgagtgtaaactatcgacaaggccttcaaatatatatccatattcaaagaaaaacatatgtagtaataataataataatttgaaaattaaccaacattatcatttttctccaaaagaaatacaattaaagtcctcctaactttttaagtcaattcgatgaagaccagcttttttggttttagagtcatgttaaatgaataaaggacgattcatcgttcatgtttagacttgagaaaaggaattcattgaacaacttaa

SEQ ID NO: 206029 - DNA, 542 bp, Cannabis indica
aataaatatcattttttttattaaaaaatgtttaatttaactgaaatttataaataataaaaacatgaaattttttcctagtatttaattgtagcaccatgggcgattagtagcacgtacatgtatttaacaaaggatgatccaatggagagagacttctcaacctttaccattttcccaattttgttgtcaagatatgttcacaatcagatttggatctctctttctcgttaccgatcagccaaaggaaacaaccgaatcgttgacaagagccttgactttgaccaagttgatagagaaagaaattggtacctacatatatatataaatatatatagctacattactaatatataaatacatatattttctctgtttttttttataataattacatatatttataattattagggatgaccaaatattgttcactgcaatactgagttatttggggacccgtataattccaaatggtagaaatgtagctatatggaagacagatgggataattataacaattctgcttcatgtttttgttg

SEQ ID NO: 206030 - DNA, 1313 bp, Cannabis indica
gtaaaaattaacaaagtaacaatctcatgtcactttctacaatttaaataaataaagaaaaaaaagatatttatttacactgtcactttctacaatttaaataaataagaaaaaaaaagatatttatttacactctataaaataaaataggttataaatttttttagtgcaaataaaactccctttaacaaagtgcatctaatattactctaaaaccaatcaaaagctcgaatggtagactccaaaatttcaatatttaacatatatgacccttatgaggtttgacatatctttcatatcaaactcaaaagttggcttttcttaaatttcaacaaaacaaaaaacaaaaatcataaaatacaaatattatatattttgagaccacaaaatatatggattattgatcatatatatttcattttaaaaaatccaattatttttgtgagttaattaaccaaaacgacgagcattaatcagaagttaacatgtcgttcgtgttaaacgacattaaaacatagaaaacgacaaaaaaatacgtgtttaggaggctaatgaccttaccttttccaaagctcgaagttttcaattcaaagaatcaaaaaccaaagttttcttctccaatcttaaagtcccaaaacccaggaaggttacagtgagtttccaacaatggcggattctgagaaacaaactggtcttggagattccttgaaacccttcttccatagagcctccgaagccgaggtttgagttttcttttcctttaatttttatatgttgattagtcaatgaaataaatactccattgttgattcgtgttagggaatttcgggtcgaatcaaattcaaataaagtatcaatttttggtccattcagtggattaattgctgtaatcttttacttatgttttgtcttttaatttttattggctttttggataaaaatgaattcttttatacacaccatactgactcaaaatatcaacattaattttttataacctcatatatatatataaatatatattttctacagtgattaatgtactgtgatatttctagccaaaatattataattatgccatattttatatatgtatgtccttgtctttattttcagaaaatatgttcttatttcacatttccaaacatactgataaaaattagtaagaggaagacttttgatttgagaatgttttgtgtaaatagtctatgaaaacattttttaaaaaaatttattaacaaaataatcatatttggtcgaaaagatttacatgtggaactattatggacacataatgtaaattcaatgcagta

SEQ ID NO: 206031 - DNA, 626 bp, Cannabis indica
aacagtgatatattaagttccaaataaacacataactcgtagcttccaagccttaacccttcgtaattggataaaagctatcaataataataataataaaaaacacataactctatatagtaatcctaaaatttctctgacaataaatatacacaatgaagacaaatttaccgcttaagaagaacctttccaccctcactaatgtttaaccttgcaagatgtttcttcttgtctaatacatgagctttatcagtctttctttttggcattttctgcaactgggtatcttacaagaagaacatttcagaactcaaaacagcaacaatcaactcaaattgaaagaaaaagaaaaaaacatagtttgcataagataaataaccaatctcaaatgggtctattaacaaaatttcaatccttcaattgggtttaggtggtttcaaaactgagaaaaacaagttcatacagcttaacaaggaacaatgatttgtagttaatcgaattaagcatacatactactaacaaagatacaaaggtaccttttcctaagctaaattgaaatatatatatatatatatatatacacacatagttttttatagataaaagaaggaatgaataccagtaat

SEQ ID NO: 206032 - DNA, 540 bp, Cannabis indica
caatccttcaattgggtttaggtagtttcaaaactgagaaaaaacaagttcataaagcttaacaaggaccaatgatttgtggttaatcgaattaatcatatatacgtagttttatagatagaagaaggaatgaataccagtaatgaggacatgagatccacagtacttgcagtaatagacgaagaggtcagaatcgggaccagcaggacgtgcgtcctcgctcgagtaggtgtgggttgtcctcttcggcatttttctgggttcgaccaccgtaattttgaagctacaaactaataaacaccatttcttccgatcaaaaaacgggtcggctggcctactctggtttgctctctcctacctaaaacgttgtcgttcagtgactttggcaattgggcctagttctccaactttgggccggcacaatattatagtttttcttacacaaatacacattttttttgcaatttttaatcacttttcttctacattttcaccgtacaaagctttcaaacaatactgtgtaaaagtttcaaaattata

SEQ ID NO: 206033 - DNA, 1190 bp, Cannabis indica
gatacaattctaattagttttttagactaatgatatatatacccaattttgacaccaaaattctatatactaactaggtgactttttccaattaattcaattgattatagataagtttcactaattaataggggtcaaaagaattatcatgcggtagagacctcatatttttcttgtttgaggaaattataaattttatgggttttcatatattttgtgcaaatagtttttttttttttgctaggaaaaaagaattattttatggacaaattaaaaaaaaaaaaaaatatgaataaaatcatgcaaggataactagatatatttatgttaactaaagtgtaattacttattataaaatggtaactaagtaccttatgttattttttttttcatatttttcttaacttttttaaaaaaaaaaatccaaaaaataacttttttttaagaaaaaattatacttacaaatttatactttaaaaactataagaataaaaattcgttggggaatccatttcatgactaaattttgataataatcacttcaatagtactttaattataatttggtataaaatgatacattctttttaatgagaatatatacttatttaatacccatgtatcatgtcattacatttttctctttttcaattttaaaatttctaagttgactacactttagtgaagagaagattcttcttgccaatcatgtatcgcaactccctaaagaagagaattaagtagtgtttgtttatttgttaatggaaaattataatcaaattacaatttacaacttaattaatttatcattatcttctaaaccaacgtgtagcgtactaacttctattgttctaacgagtggcatcttattcaatttcataattatttattgttatatattttttagtagtgttattggactgagtggtgctactactttctgaacatgttgtcttatgattgattagcgatatttttaaaaagttattatattaaaatatatgaaactcggtacttaattacgctaataacgatattgacacgtaagagtgtgttagacactacctgtgtcttttagcatttctctgtatatatttttgagaaatgctaaaagacattagcggtgcctagcactctcctatgtgtcaatattccaacatgtatagagttgctagacatcactagtgttc

SEQ ID NO: 206034 - DNA, 527 bp, Cannabis indica
ctcttagaaaatggaaaactggctattcattgtgttcaaatttcatcttcaaaccttttatagagtagaacattttacgtaaatgattctatgtatcataatgatagacccacttttgcaaaattccaaatttattaacgcgtatgtcgggtttcggtgtgatttcctgtaaaatagattcatttatgcaaaataccaaatctatttgaaaaactatgcacgtgcttgtcccatgcgccattatacgaaatcacgtttattttttttcttttttagttaaaacatgtataaatactattcctctttcctcgtggtcaaatttgtcattttatcgaggtcaaaatcgtctttttgttggtatgccacttgcattgcaatttctatgggatgctttgtcttttgtctgactagcaatgcccggctagtggtttgatgatttggagtgaacaaaatgggatgggagagtcaacttgtaattattttatttaggctaattagaattgttgccccttaaattttaacatgta

SEQ ID NO: 206035 - DNA, 662 bp, Cannabis indica
ttcgaatgataagagctacatatacagtttggttttaagcaacatagaaagttataataattacattttatctacctgtaagtacactaaaatgggtgtgcccattgcaaatagaaaagcccttggtgcatcactagtcatgattcaaaaataagaactcttttaagtttatttggggccaataataggtttataattacatttccaaataatgacgagctattgaattcctagtttttgtgctgattaatttcaacgaattattgtttcacatttacaaatttgtctcttgttgattccgacttgtggtcatgtattagagtagcttgtatttttttcgtaaatatgtgataatctataacaatgctaataaaaatatcctttttttaaatagaaaatagataagaggtagcctcatgatctattcctcagcctaaaacttttagtttgaccgagagaaagaaaatcatttggggtataaaatggaaggagaaataaatatctttacaaatttgtttcttgttgattccaacttatggtcgtgtattcaagttgcttgtatttctttttttttttcgtaaatatatgataaccacaacaatgaaatatatttaaatatacatgttgaaataatattctaaaaactaaaaatatcctttcta

SEQ ID NO: 206036 - DNA, 919 bp, Cannabis indica
aagtagacctctcctgggactagtaaagattgattcattacatagggatggtccgagtaactattgtgttcgataactcgtcaggaactcacatgttccatattgtcaacacatgagatttccatctatgcaatcaaagatgaacacagacatccatacgataggcccataggccaccgtgtgaatgccagacacacctaaagcatgtgagcttgtgtgagaatatgaataggcaactcgcgctcaacaagttacatacgttgctgcacttaatacaataacaaattaaattgttcttcatttattgtttaaacgtttattcaggtttaatattatcatttattgtaaaacggttttaaaaccggtcagttatgtaatcctaaaggacacttgctttttagataaaggagtgattcaaaccaaataaactaagtgaaatctttacaacagtggactaagaacaccaagctctgacttaaccactataattttcttgtgttcttatttctttttgctttcattttgtttgtttagtagcgaataggttgagtactcgctactctaagtgagtactcgcacattttcaattaagtgttcttatttgtattgaatactcgcaaaaatttggtattgtctaaatttttctgacaagaatggttttaatcacctcttttcctatttactagtttgtatggaatttactgattagttgaaatcaaagtcttcttattttaaaattagccgttacttttttatcatagaattatttaggtagtttcattctttaaaaattaaattttcttattaaaattaatttatatcatttaaattttttgtacatttatcttttttgttattttttagaatgtgtagtttaatttatttaggcttacctttttcattaattaattatatatat

SEQ ID NO: 206037 - DNA, 255 bp, Cannabis indica
ttttttttacacaggcatcgggcccatcaggtctttgtcatcctcaatttttttgtgataccatcagaccgatatcgggcctgcatcgggctacatcgggcccgacgaaatcaaacccagattttttccaaatcacatctgacgaaaaaaaaaagatccgtagagggttcagtccgtggggtggtgggttcatcggtggtcgagtaggaatggtccgtgggtagtgggaattcgaaaggggagagagagagagag

SEQ ID NO: 206038 - DNA, 1494 bp, Cannabis indica
tttttaaaaaaaaattatttacacttcaattaaatttttaaaaatattttattttatataaaatttacattaatattgtaataaattttaaaaaaaaatcttcctatttatattcttaaaaaatatagttatgaaatatattttaaatatcatgataaaaaaattaaaataaaaaattatatgaaaatttttgagaaaattgaaaaaaaattacatggtttaaaaaaatataaaaataaaatcaaaataagataaaataatgtgaggaaaatttttcaaaaaatattaatgtaatttttaaaaattatttaattttattcaattttttaacaataaggtgtagttgtgcaaatagaactacttagcatatattttaaaaattatattttaaaaaaaaatgtataaattctatgaatggtgtaattgttagtattttaattgggtcggtcccataataaacaaactattctcccccttgcttttttagttttttcaacattctttttattctttgaaaaatagaatatgaggtatttatttacgaggaattttatcacatcaaatgattttctaactttaatgaaatttcaacgtgatcattttattttatttataaaaaaaaaaaaaatcaccaatcactctaagtgttgctgacacgtgtaatttcactagctatacctattttataactagaaaaatctcatttttaatctcttattgatgctctatcaagttttaactcttgacttttagtaatttgataaatagtaaacattatagtgtgatttatcaaaacaaaaataatatgagttcaaattaaataagaatttgttaaaaaaaattaaatacaaatctacacaaaatctaactttaaaaaatggtttttttttttcacataataaaaatgattaatttgaaataattaaaaattggtagtgggttcttttccagtttcttttgggaagtgagaaagtcatcataacgtgcaaagttttctttcattaatgagttgtgatattatactatttacagggtcccgtgttaaatgagatcatttagtattttagtttatagtttattcaaaatcaaacaaaaataaaaaataaaatatgtagaaaagtggctgtccaaccctcaaattgcaggccaaatagcgaaaatgtatgcgtagtatcagacacgtatcaacatgtctttaatttgtatgaatacataaatagaaacataaccaaattttttattatttatatttttcaattgatataataatatagcaaaataggaaaattccatgtgcactccagtaactagagtggacacatctaatccaatttaaattattttatacaattatctcatataaaaaattagatatttaattataattagattaaattaaatgttgaaagttagattttaattagattgaatcggttattgaaggttaatcttaaaatttaattaatctaccattcattattcaaaaaaaaaaaa

SEQ ID NO: 206039 - DNA, 556 bp, Cannabis indica
aatacatcaaaaaatcgtattttaaatgtcaaaatatttaaaattctgtacaactattttttttttggtatatttgtgaaataactccttattagtttgggttgtgatacttctaataagtagtagtgaataatgcaagataaatgctacaaaaatattagtgatatctaatattatctaaaaatattatatgtttatgggaaatttgcagtaaaaatagggttttttgaaatttagtgagtcataagaaaaaaaaaatattttggggctcttatttagaaaaaaaaaatgtagtattttttaaaatcaataaaaaaaatatgtaattttaaaaggggacaaaaaaaattttgggccctaggcacatgcttagcccgcccctgccccaggtaaaaaatttcaaaaagttcagtttgatgcaaataagtcccctaccttaaaaaatggcgacaataatccctaacgtcacatttttcataagttcgttcatccccactctgttagggtgctaacgttacacgtatacgcctttgattaattaatctcaatttttttt

SEQ ID NO: 206040 - DNA, 1631 bp, Cannabis indica
tgaaacaattgatagatctgcattttgggcatatactccttgtccttagtgccgatacatagctcgctagctaggtaggttattagtgcctagcctaaccgtcaatgtacaattaattaaagtaaatttaaatataacaaaaaaaaaaaaaacattaatcactagcaaaaaaatcaaaacaatacaagtaaaacgacagcaaaaaaaaactgcccaatcaaaaaaactaaagtttacattttaatcttatgaaaaaatttctttcatctaaagataacttcctatactataatctgtaaacaataacctgttttatctctttgactatagcattaatattttttgggaagccttcaaaaagacacttgttatagttagacccaatgtgataaacacaagctgcctgtgtggcaattataacagcagcaatcacccctgatgtcttgctaaccagccaagtggtccaactctcgtagtcttttggccaggcaaaaaaacctagccacaaaaagttctcatctgtaactttcttagataagctacactagaaaaataagtgggtatgactctcattaaagagcccacaaacaacacatagaaaagtcttcaaggaaatactaaaccgagttagttgatccctagtgagcaagtgagagtttaaaacttgtcataacataaatttatgtttaggcatattaactctattccaaactgcacctgaatataacactagttgttgaagaatggtactattataaagtaaggaagctttaaacttacccttatgaccagctgtaagaatttggcctttggaaagactttgtcttaaagcacaaagcttcctccaataccaactcaaatccaacttcataagagtttcccaaaaagtcacattttctcatattagttgaatgaatccagcaaacccaaagcacatcatgcttttttaaaatagcccagctatactttgctatggtaactctgttccaagtaggcccatcaagaaacccaaggcctccaaactttttaggcaagcaatctttttcccagaaagggatatggattttgtatctattaccttcaactccccaaagaaacgctcgacaaagcctttctacttcttttataacactctgaggcaagatgaatatactcatccaataattctggagacccagcagacagattgtataagttgaactctccctgcaaacgaaagatatttactagcccaagtaggaagccttaactttattttttttttatgttaagaccacaatcttctttcctccattttgtaggccttcttccaaacagatagtatgaagcaaaactttttttcctcccccgaaacacctccaaagaacacttgagctttttcaagattagctttcagccttgaagaagcactaaaatcatcaagaatagatttgctaatttgagtgggttgagcatctcctttgcaaaagataataagatcaactgcaaaacaaagggagattatcctaaggcttctacacatgtagtgatagctgaacttgctgttaaagctgcaagatgaagtcttctggtgagatactccataactagtacaacaagagaggtgaaattgggtctccttggtgaagacc

SEQ ID NO: 206041 - DNA, 1648 bp, Cannabis indica
cttttttattataaatgtgtttatataatataaaatatttttataacattttaatttaaattcattgtttaaatctaagtatctttctattatttattttttttactcaattcacattattttaaataaaaaaaaaaaaaagaaagaaaaaacttgaaaagataataatgttctcataatactaaggagaacattgagcatttgttttttttaatgtgcttataggaggaaatgcttggagaggataaaacattgactgaattgggatgtaaacatttaacttcaaccaatattgcgatgtatttctcgagccgaaaatttcagcaacaatcgacaaaacatgctatttgttgtgatggcagatgtgatctaccatatatgacgtgttctgaatgatgtcttttggaatcaaaaattgtaaatgattgaacaaactatttttaggattcaatgtgattgtaaatataagattcttagttttatgccttgtaaagctagtaccaaagatagagattgatttatgagattataaatatatatattgtataaatatacgaatataatgacttcaataggttgtaaatgttcagtttgaggaatacaaaaatacttattcataaaaaaaaataaatcaatattcatatttaaattaaattataattaacaataaatttcaaatattgttatattttcttttaaaaaattaaacttaaattaaatacattttaataaaaataatattatttattgaataacaataaaaaaaactaattatatagccaaaaatatacataacgaaaataaaaatgaaaaaataaaattaattatacgtgcattacacataatattaacatagtatatatatttatatatatgatctatagttataaacatgtgtgtgtcatactagtcagacccatatattttgagctttttaaaatatgggtcgtgtcgtgccataaaaaaatacggttttgtcattctgtgcaacaattttatagggtaggcccaacatgacctgcaaatttgataattttgtgtcgtgctcaaattcgtaccgtgctttattcgagttggcctgttttatttcttaaatagaccaacctattttctgatacggggtcaaaatcgggatccatatttttgtatttttatttctaatggatgagccaaatgctaaaaaaggatttttttttttttttatttcttacacttcaaaacaatttttttactatgtttacggaaatttacataaaaactcacatagtaactaacggaacaacctaaatcacaattgaaatccacatagcaacctacataaaaactactggggcaacacaaaccgtaaattaaaaagcaaaaaaagttaaaaaatggtatatagggtaactctacatactgaaatatatgtatattatagttttaattacatttatactttttaataattacacacaatcatataaaaaacaaaactataattgttataatttgagcattactatcattttaattgaaaaataattatctatcactattattatcaaattattgagctttttaatgtgttatgcttttgagctaatctattcgttcttatatgtcgtgtttttggacttgtcgagttgtgtcatgtctaagtccaccc

SEQ ID NO: 206042 - DNA, 509 bp, Cannabis indica
tatggtgtagattttttcttccactctttcaattattttactaattttaagaatcaagtattagttataaggattttatttatcaggttttagtttttgtagtcattaataattatttcaagagtttttatttacacaaataatattatctataatagctcgtttttagagggctaatcattttttaatctcttcaagagaggctataagaagtttcaaaaccttaacccaaataaaagagaatactagtaaaaataatctctactacactacacaacacacgattaacttatactgtgccttgatattaataacttaatttaaaatttcgaagtgttaaaaagaagaaaaaaaccgaagtgtttgtatgtaagaagttcttgatgtccttcctagcttaaaagagatcaatatatgaaagtcaatgtagtcaaatggaaagagtcaacaatgtttatccactcataactagctctccatcaacttatcctccaaaagtttacaaaaaa

SEQ ID NO: 206043 - DNA, 1710 bp, Cannabis indica
gaatgattgccacaatacaacttaatgtcattaaaatgtaattttgttgagtgcaatattatgatttgccaagatttagtaaggcattatggtaggaaatctaacaaaccagggtgtgtgttcaagttggacattcaaaaggcatatgacatagttgaatgggcatttatagaagaaatgatatatgggcttcagtttcaagtcccatttgtcaaattgataatgcaatgtatcacaacacctaggttttctcttatgttcaatggaactctacatggtttctttgaatttaagagaggcttaaggcaaagggaccctatatctccattgctttttgtaattggaatggaatatctatcaaggttgatggggaaagttggggacaaggaagacttttgttttcatgacaggtgtgttgaacttaaattgaaccatcttgcttttgcagatgatgttcttttattttccaagggaggattaaaaagtgttatgtatttgctccaagctttgaagttgttctctgtaacttcagggctgcaacctagccccacaaaaactgcaatttattgcagcaatatggagaacactgttgtaaataggttactacagctatctggtttttcaaagcaagacctgccatttacatacttagggatcccaataaatgcaaagagaacttttggcaaagagtgtgagtttctgactgagaaaatgactgctaggattaggagctggagctcgagaaacttgtcttttacagggagaatagtattgatcaattttgttctgattgcaatacaggcctactggagttagatcctaattctaccaaagaaaataatcaggggtattgaagcattgtgtagagcttttctttggaaaggtcaatcaatgtaccagtggggcaagtgctattaattggaacactgtctgcattgacaaaaatagcgagggggtttaggcattaagagaattgaagaatggaacatgtgtaagtacatttgggcaattgcaaataataaggaaagtttgtggatgaagtaaatacatagtgtgtatctaaagaagggagattggtggagccacactgcttccatacatgccagctggtataggaagaagttggtggctctaaaggatcaaattagaagcttgacagatgtaaaggagtttgctgcacataaatttccattgcataaggctacaaattcctcactccctcactaaacaagctacactggagcaaggaggtttgggctcgattaaattcaccaaacattattttattttatggctgactatgcatagcaggttgaagacaaaggatagactgctaagatttggaatccaaatagaagagaattgttgtctatgtcaggaagagaaggaatcgataaagcacttgttctttgaatgtaaacactcaaaggagtgcctccaaaggatcaagggttggctgagttggaaagcaaggagcacctgcttgcctcatctgatcagatggataggcaaatcgagaaccaggaagcttaaaaagcaagtctggttgcagcttgtgcttcactggtttataacatttgtaaagcaagaaatgctagcatctggaagggagagcaactagtaacaagcagagtagttgaagagataaaagagagttaaaaatgagagttcaactcagaaatcagcaagagtacaagaatggatgcaatc

SEQ ID NO: 206044 - DNA, 2002 bp, Cannabis indica
gataagtaattaaaatttgtctgcagtacaaaatgtgagtacccgtgtactgctaaaagaagttaaaagtttgacaattatgaaaaaggacttaaggaactagagtggtaggatcatctgcgaccttgcttgcagcatcatcaacgacttcctccgtgtctgcgttctcaacctctttagggaaaaggttgccaccatatcctcgagtttggtaggcgacatagcacgaaaagcctcagctattttagctggcttctgccccaaggactgtgaagtcgaaataaggcaatttggataaagtcgtgtaaatgtagtgagaaacagcctgatcatactgtctcttcccatactcctcgcgatcataagtcaattcctcaactcgtgcctctgagagcttggctttgtcctccgcctatttagccttctccttagcctttttgaggtcctcggcgtctttctctttcgaagtcacatcaaacttcagtttccttacattcagtttccttacaacctcgctcttcctcttttgtaggataacaggagaggtcattgcagttccagccttaggctttctgttgagaattggagcttgcttcaagaacgtcatttctgcgagaaagcaataagacaagtttaatttttatactataaaataacatgtacatactgaatgtattacccgatgttggtcttgatgtttgtttattctttccttttgtttttcaaaaggctccttgtatactggctctcgctgatggctggcgttctcaggaattagctgatgttcttgcagtttggcaatcgtaataatcgccaatcgcgatcttgaacaggcaagctacctagaacctcagcaatttttctgcgagcagtgtccgaacaggtcgagctggcctatctgcgatcaacaaaagataaacattagcggctttgcaaggtaataaaaatatactaagttttgagatacgcgacgtactaggtcgacgattgaagtcagtcctacttcctagtactttaaacacatagaaccacttagatttctaatcccccagattggaaaccatgccttctaccccattaatttcagaatatgcccatttactaaagcagtaaaagccattgtcatagcctacattttctatatcgtaaaagtagctaaagtcctccatcgttgactccccttggacatactttatatacatcgcctaaaatcccagaactatgcgataactattcggtgttagttagaaaggagagacatcataatgtctaaggacgacttttacgaaaggatgaaaaggtgaagatacccacttcgaagaatagggattgagacaaccacgtcttgcgtggtgatgatcgtagggttggtaaaagggagatgaggtctttgagatgctgaaggacgcatggtccctattcacaacaaatttaactgtgcaaatgtatgtaggtcagatttggtaactcgcgtgagcaggttctcgcatgcaaatggttcattcagttgagcattgtcaactgaatctgtttcactaccctcagcattctcttcctcctccgactcgcggtcaggaacctcaaagtcttctcttatttcttcgacttcaatgtcaggggcatgccttgagtgagtgaggtactcttgggctgacaccgtagatttgctatcacgaatctcgatcgttcctgcttcagcgagttcttgaaccatcctatcaatctcatccgtggatagtgagccttgacggatagccctagcgtcaggaacctcctcctcagagatcgaggtgggtataaagctgtcgctcttctccagttcatcagcgaaggccccgcctccaaatcaagcatctgactatccgacaggtcgctcatctgaaagataaacgatcttttcagtgtggtgaaagtgcaagaataacaccagtgacctcacccgcataaaaaaaattcaaaaaatatgaaggattaaccatacatctcaagaaatggctgggtg

SEQ ID NO: 206045 - DNA, 986 bp, Cannabis indica
atacaagaacaaaagcatggtgttatcaactatcaaataccatcatcatcatcagaagaggagctatcaaagccctcaactacagccttccctttgcccatagaagtaggcacaaggcgtgtaggtctctcaaaaacctagcctctaggcccaatatgaagggaagcatcacctactagacccccgctggccaggtgccgacggagagccttctctctcctctccaaattgtgtgcaatacaagacaaaggtacttcatcatcatccatcccagggccctgcccatctccaaggcaggcctcatctgtagttagcactcttgcagctccacgggtaagagcatacaagctatacatccaaaaattgtctacactggtcaacaagatgacgtttctctgctcagtcgataaagaaaggatgtgattcgctctatcccttatttgcaaggtggggatggaacgtctaaagagtagcaaatactgaaattcgtggtgctcgatcctgcgaagaccctatgcaataaaatactttttgcgtaccttccaacctttggcatggctgcacagttggtgtagcccagccattggtgaccaatcttgctgaaataaaaaaatccagtcctgccctacttcggtacagacttcaaatcaaaaatagtatccaatctcgtaaagggtaggcagaggccagcctagctccctgtataagacggacatcaccgagagatactttatgctctttggcatgagctacattgggcacattccaaagtaagcggcgacatgtagaaatattggtgatgcagcaacacgccccatgttcaatgtagtgcctagaccatgccaatcagcctaaaggcggcctgtgagccctatagtttctagaaggaatctcacaatggacattccccatcagaccactggtaagcatgttaccgaaggactcattagagaaagtagaagcaggaaaaacacaacttgctttaa

SEQ ID NO: 206046 - DNA, 585 bp, Cannabis indica
aggtgtgtaaggtttggagtactcttttgtttgtattctctccttattataattttatatagtttatagggacatgattttgtgacactacaacattttgactcaatatcggcgggagtaataccggcagagccaaaccgccggtattaatgggtttattaccggcggaaaaggcattccgccggtattacttttgaataattaaaaaataattaaatatttatttaattttagtattcccggcggaattttagtattgtcggcggaaaatctgcctctaatagtttgggcgggattttgaccgcccaaattttgaaaagactaataccggcggattattgccggcgggttccgccggtattagtaaggggattctgaccgttttattaataccggcggaacccctattaataccagcgggtcccgccggtaataaatttctatataatccccccccccataactcagaaaacatttttcatttccccactacatttcacactaacccaacccgaccctcctcctcctccccctctgcatagtttgagtatcctcctccgctatagtccgcccgttttccaccgt

SEQ ID NO: 206047 - DNA, 814 bp, Cannabis indica
gaattcatgactgaaaggtgtcaaagatacaagtgtttccttttttttctctcctaatgaatcacttatttccaaaaaacataattactgaaaagatacaattgaattagttaaccaacaataacattttattcagttgataccacaatattttataatactgattgagtggaaatagagtactaaaacatctaaagaaagaggactatgagtatgagaggatttcaaaagatcagatagtaaaatcataacttgtatttagattcaaatattaaagcaattttatacattgggttttcatttcagttcattaccaccatgaattttcactcaacaactattttctgtggattgttgccactgtttgactttgacccttcatagaagaatataatatgatcataatattagacttcctagaatcaaattagcatcatgataattcatcactaattgcaacttttgtgccatgtactctatctgaagcattattcacctgaaaaaggagataatagtatttagagcatataagataagatttccattaaaagaagaatcttaatttttaaaaaggtttgatttacctctttttcccaatcagtgcatattgttataatagcaagacacaatgcttgcatgattaaggccactatgattcctatccaaagcccctgttgtcaaacacattttgatcacgtggtgctttgacaatcccgagaaccacgtgctagttatagggagcttgtacttcatcctgtcttacttgggtcatcggtaattatccctcacaatgaggggcagagtgagattcgaa

SEQ ID NO: 206048 - DNA, 1508 bp, Cannabis indica
aattataaaaaactgtgctataaaattttaaataatttaagtataaaaaaataaattgctaaaaaattcttatatagtaataaattgcaaaaaattaattaataattataattaatttaattttaaaatataattaatcttaattaaagttttataaggaaataaatgattaggttactttcaggttacaagttattttttatttatttttatttaatttccaaattaatcacaaccattaaatagtaatccaatggcttaaaaaaatgtaaccatgatggttacaataaaaatgtaaccattgaaacctcttccatatatatatatatatttatatatatatatatattttaaagtagtaaaaataaaaaaaaaattatcaaaataaatgactattctatttcaagacaattaaagaaaaaaactattctatttcaaataagtaaaaagatcattccaaaataagatgaaaaaaatttatatgttgtttattttttcttttttatgccactatgtgtgagtattgtagtactctatttgaattaatcatgttttataaagtatttaacagtattctaatcattacttaaaatgtaagttagaatgttgagtcaagttgtaatcatgttttatgatattatttgttttgagtttagactctcatgattttgtttttggacactttcttagaaagactcatatcctaatggagtaggtaaaatacttatatccaaaataactcttctctatactttaatgtgagactttagttgataccccaacaatcctcccctcaaaccaaggaccagatactcgtgatttcttctccagcgaaaccaccttatgccgccgctatcaccaacaaaactcgcagcctgaccatcacttttgacaggaggactttcgacacaggtcaacattaatctctatcttgtaccacagtaatcatcaacgggacacaccacctgactacctcaatattaagtagattttcgatataaggcatcatatagatcttcaatcgcgaggtcatcacattgaggaattatcacacacatcgtaaatacagtcatctatctcagtactcctaaacctttggctttgatactactttatgggcactatttttccaccttgttaggtcgctaccttattttgactcctacattagtatttagatttagaccctcatagttttgttttaagtactcttccaaaaaaaagtactcttccaaaaaatctcatactaatggaaatagagagtgtaggttgaacacttatatctaagacaactcttatctattttaagatgatatcccatagctacaacttttttacaaacaaagaaaaaggaataataataacccaaaaaaaataaataaataaagaagagaaaacaatttatacaaaaaggaaggaacacacagcctaattctcattatcttattggagtccattaaattcacattgttaatcacttataagtttggaagggaagcaataagaga

SEQ ID NO: 206049 - DNA, 681 bp, Cannabis indica
tttgtagtgcatagaattcaatactggtcaatatctttgtaaatatgaagactactaaagttataaacacacacacggtcacaccacattaaattcaaatataataaaactctatttattagcaaattttattattttatttttgtataaatgtgcgtacactgtagccatgctccaaaagaaagagactttaaagtttttcttttttaaaaaaaaataaaaaataaaaaagaactattgcttttggtagctctctctctctctcaataagaaaatctctcactcttggactttgataattcccctacactaccaatcagggattagagtaagataagcttagtctaattattaaatattaaacacatcagtttgtcttgttttctgctctttcggtcctgtccttgttaacttttttattttattatattttttattttatgcattttgacaaattaaaaggtctctctctctctctccaatgaatggaatatttaacggggttcgctctatactctagttcttacacttttagattctcagttggagaaagaagaaaaaaagaaaaaaaactttaaaataaagagaaattcgtttttttttactttttcgtcacctatagttcaatcagcactcagctctggattctaactacgtctcatgacaaatactcttttagtt

SEQ ID NO: 206050 - DNA, 1113 bp, Cannabis indica
tatttggcaaggatcaaatacaagaaatgggtgtgtgaacaatgcatttgggggaaatcaaccaaagcaaagtttggactgggaatttacaaatccaaaggcattctgcgctatctgcattcagacttatggggaccctcaagaatactttcaagaggtggagcaaggtacttcctaactgttattgatgatttctctagacatgtttgggtttccatcttaaggaataagaatgatgcttttaacaagttcaaggaattgaaaaccctggtggaaaaccaaactgaaagaaaaattaagaagctaagaacagataatggattgaagtattgtgtagaccaatttaactattgcaaacaagttggcataggaagacacctaaatgtgccaggagctccacaacagaatggattagctgaaaggatgaacaaaaccatccttgagaaagttagatgtatgttaattttctctagtatgtcaaggaatttttaggcagaagctgtgaagacaacatgctacctaattaacagatgtccatcctcagcaattgaatataaaactccaattgaagcctggacaggtaatatagtcagttatgaacacctcaaaatttttggttgtgttgcctatgcacacattattatgcaagggaagctagaacctagagcaagaaagtgtattttcttgggatatccagaagtggttaaattaaaggctacaagatgatgagcattgaatctagtaatcaccagaagtatttcattagcaaagatgtagtttttaaagaggacaacatgtacaaggatgtaattaaatccaggccagaaaactatggtgctaatgtagatgatttcttacagtttgaggtggagatacagggaaaagaaaacaataaccagcaggaacaggccatcacagaagaagttttgaatgaagaaaatgaatctgaagttgaacttgaagctgaacaaaaaattgagtatgaagagcccttagaagacactaaagactatcaccttaccagagataggagtagaagaacaatcaaaccccaaacaggtttcgttttgttgatatagttcattatgcattgagtgtagcaaaactagccac

SEQ ID NO: 206051 - DNA, 903 bp, Cannabis indica
gtaatgggccaccaaaccataagactctgaccatcgaacatctcacaaaaagatgtaaaggattttcagattcggaccaacaaaacgagcagtcattagaattacaacccccaaatttatcggacgttggtaatgcccctgctatcgttctccagagcatcatgctctgtctgggatgaattttactatcccataaccacttccataactccttcttttcagcaaatctattcctctgattattcaggaaggctcctttaaccgagaaggcaccaacatcagaattcttccagataatcacatccttctccgcatgagtgttgatttgaatagagctaatcaaaccccccagttcgcagcacaacagaaactcaaggaagccaaggttccaagttttgttacttctaaacataagatccgcaacacagcgcaaagaaggggctttggaacgaatagcctccatagtttctctgaattcatcatactccatccacggaatccatggctgccaccacagattagtgtcctcgccattagcaataatagtgcaggatccatcacagattagttttcgggcctccaaaattcctctccacaccggactatctgatgagcgttcttgaacactccaaaatgtctccaaaggatagtatttaactttgagggaaacaagcccaaggtctattactattatccgccagaaaccaggccaatttggccagaagggcattgttcacatcattgaatctcctgaaacccagacctccacaacctttcggttggcaaagcacatcccaggttttggttgccaggaatctagagctatcaatacggcctttccactagaattttctgactaaagaatccaactccttgcaagaggtgattgggattttacaagtg

SEQ ID NO: 206052 - DNA, 551 bp, Cannabis indica
aaaaaaaattacaagtaatatatttcaacctttttttttcctgaaacgatttttaaatcttataccaacataacaaaccccttattactaatggcttgactcttttgccaattggaaaaaccatgaagtttgataaatgtcgatccattaattcaatgagtttattatgaaatagcaataaaccaattcaaatttatccaatagtatctgtttggatgttcattttattattaggacatcaaactaaagataataataatttgacaatactggcataaacttgtggctgttgttgatggtggactctttatcttaattttctattttcaatcaaaagtattttatttaaaactaaattggccgcaatattcaactctattaattaatatgaaacaaaaagtaaaaacagagctatctaaatcccattattctcaaggatttggagatggacatccgagcaggagcagtaagagtcggcgccgaagcctttctcatcctgagcgaatcagaaccattatgaatttgcagtaaaggtagaagaccccattcat

SEQ ID NO: 206053 - DNA, 744 bp, Cannabis indica
atagaaacacaaaatattttcataacaaagcatcggtgagaaagaagaaaaaatattattacggagattatgatggaaactggccaaacgtaattatgtgtttaggagaagattattggtgaagtggcgtggtattttacagtatatttttcaaacagccaatccgacaaatgagcaaatccagcctggtatagatgttattactttgtgtatttcgatggctgataataagcgcctaatgtgtaaagaccgcttaactttaatttaaaaattagcagatatttagggtttaattatgaaacttgcatgatatttatggtttatcgttttatggagatttatttgaattcagaatgcattgtatatgccatacatggaattttatgtttttgcatattttgtgcccaacaatattggaacgcggtgtttggccattagaattacattttagtaattttttagtatagcggggcaatatagtttgacattagaaatgtcaggattagtcgacaatttataattgaccaaaatacccctaattgtctttgaagctttatggttttagtgaggaaaaaatagtccttttggctatttagattttttcctttagagatgttatgtgatgttaataatctaaaaatataccttattattaattagatgatatccccttttatttcattttatgcaaaattaaaaatagaaataggttaagaacaacatcctctctctctttctctctct

SEQ ID NO: 206054 - DNA, 860 bp, Cannabis indica
atattaacagttacaatccattacaaaagattactgaagaaatatttttacggaatgaagttaaaatcctagctttgacaacatagaaaatataaagcataaataaatttccacttttcatatctttaacgaaatgaaagttcaaatgagatgaaaaggtaaataaatataataaataataatttttttaataacatttttattgcgctttttctcttgttcaaaaatcttaatttggttatgcaatccgagagtagcctttgtagattttttagcatgagatttatcgatccaacaaaagtaatcacatcctcgacttttattgttctcttgaagtgaaaataactaaattatcttattgaagaagcctagtataataagtgcatttgaatctaagaagttaaaactcttacatagtgtggacatccaaagaagctagatcaccacagtagtaatgggggtgtccctaaagtgaatttttccatttgttcgctcttccatgtctcactgagccgcctaacccaagtagttgtcggtcgttctgttctatcattccatgcatggaatgttccttccctcctagcaggggcagatgtagtagtaggtttagggtggccttggccccccctaaattttacacaattttgattaatatacatatatatatatttatgatagataatggctactatataataaagaaaaaatgagttgaaaagtcaaaattcaaaattgatatgtacttagtaattaagtggaaaactaatgagaaatatctcatctaaatatatagtattttaaaataaatactaaaaaataatgtttttatttttcatctgagttaatgttaatgttaatca

SEQ ID NO: 206055 - DNA, 580 bp, Cannabis indica
gactttcatcgttctcctgaagtgaaaataactaaattagcttattgaagaagcctggtataacaagtacatttgagtctagtaagttaaaactcttacatagtgtggacatccaaagaagcgacgaccaagatttgctctactaatagaagtcccaacataagctagatcaccacaatagcaatgggtgtccttgaagtgaatttttccatgatgggacatccctctcgaacacggatgagtcttctccaccactagccaccatgtcttattttttaacctactaaaatttgtgaggcttcaaaaacatttttgagttgtcctaaaaatggtggagagagtgtatggtattaattttggaagaagaaaagtggggtctctatacatatagtcttgtggacatgaattaatgggggggggggggaactgaattttttttaaaacgtttgtaaattgaaatttcagtaaataaatcttggtgcccaaaaaatatatctgtcaaagtcttttataccctatacctataaacatgtacaactattataatccctacctatatttaatggggcatggctcatgg

SEQ ID NO: 206056 - DNA, 895 bp, Cannabis indica
attccctacaaggagacaggtgcattatcatccatcatcccagaaccgtgaccattataaataatgttatttggtatcgagacaactccaaaactaccatttatattttgataaacgtctacttagttaaattatgaacaacgaagttaaaagatctaaaaacttttcaaaattacattccaaaaagaagtttataaagcttttacaatgagcaacataattattaattttccacctagtgtttgatcccctgatagttttaataactatatcagctcacattccacaataacaaattgaaagtctttcaatgccagcaaacaagaagtaactgcccactaagagcattagcaaaatacatccactttgtactagcccaaatcatcctcccaacatgttctcgagccataacaacaatcatcatagccctcactctaactgccacatcgcagttaagtttgatctagtccataggcggaggagcccactcagtgatagcagtggatggatgtaattagtataaaagagtgaccatattttgtataacaatgagcaaagagtcaagataataatggatgttatgcagatggttgttatgtactaacatttttttgctttccatacagtgtcaaatatgataaacgcatattaaaacatatcatcaacattcacatctctcacttgcaacctccaaataaatttgacccagtcccacatcttagtccccaattcctcaacatgaatggagacgctctccaaagatgaaaagccatattacaatgaataaaaagattctccattatttcttcctctctcccacaaaaagggcaagagaaatcttcaatatttattcattctctaaggttggattaaattggaagtgcattggatagaa

SEQ ID NO: 206057 - DNA, 1069 bp, Cannabis indica
ggttctcagttttaatcttaaaacatttattatatttatgatatagtgactaagatatattattccacttctgcgtacatggttatattctacttttgcatatatgtttaatagatagaatattattattagacatcaatcaaacttagcactactataacactctataaataacaatataatcataattattaaattacctaaaactcaatacttattattataattctacaatacaatacattgaattatatattgcacaagtaataaagtttaatatttatcacatacatatcaaacacattttaatgggtattacttttactaaacaaatttaactataaatattaattttaaaaatatcgaattttaatctaataacgaataatgaaatcacaaatttaaattatatacttaatttaactacttaattaaaaaatatattaaaaaaatatctctttttacactatatcaaaaatatctctttttatatatatttccatcactaaatttggatttcgactattgatttattaatatatatttggcctttgaatttctaggtgtacacatttcaacaaaacctttctttgattattttctttagggaaaattattattattagtatattataatgaaaactatccaatatataggctgaatcagcagccgtagagcatagaaaagtgaatctttcttttccccacttggatatgtcgtgccaaatagtacctaatccagtgactatatgcgtatttttttatcccacttgcacctatgcacaaatagttttatatgttaaaataggagtattcttattaggtatttaatattataccgatatgatactgaatggttagcaaaattaagatgtataagattcgatattaattaatttatactaataataatatgtcacctcttatagtacttaaaatatctattaatatttttcgttaaaataaattatatatagtgtcttcatattttaaattattaatatgatttattaatctaaataggatataaatagtaggggtgtttacagattggtttagcctaaatttt

SEQ ID NO: 206058 - DNA, 503 bp, Cannabis indica
ttggccacttttcagcatcaacaaagtaatcaacagtcaacaatgtgtttagtgtaattaaatttatatatatataaatagtgtgtgtgttttgtcctacattactcacgtattagtgatttgtggtgtttatattaaatttagcagctaccaagccataatcccacgatagtgctgtaagtacatgtcgtgtagcaaatatatggatcgtgtcgtgtacctcaccataaaaatatatgagttttatcgtattgtgctataaaaaataagttgtgtcgtgttcgaattcagattcaaattcatatcatgctttacttagactaacccgttttcttatatgaactcaaattcacgctttctacttttccatattttatttttacgattaataagaaaattattagactatatatttttttatagtttcaatgttatataattttttaataatcttttacaagaaattaaataaaaaaactataaactattaaatttaaatattt

SEQ ID NO: 206059 - DNA, 1238 bp, Cannabis indica
aataacttaaaacaaccgtaaaacaacataaccgaacaattaaaaacaacaatagaacaactaaaaaataaccgtaaaacaactgtaaaaatttaacacaatatataatatatagtataaaacttacacaatatttttgaaaataaattttgccccacagtaaaaaaagaataaaaaattaaaaatttcaatatatgttgtaaaaatctcttaaagaatgtagtattcatatgtataaatatatatatatttatataaacacatataggaattttagcaaaatatcaattttgacataattttaacatttatatggtatgaaaataataattttttttttgcatgtttacaatttttccttttaatttgacctttttttattattttaattacaattttataaaattctataaaaaacaacattaaaacaacgtgaaaacacaataatgtgaatcaatattctatatattcataaaaaaaacttttagtctgtaaaaaatatttaaagttccacacacaactgtataaattatgaaaaaaaaaaaattatctccatccttccaactttacacttttaataccaaataatactaattgctaatcttttgatttctaaatatacatcatactctccctccatcctaccaaacacaaccaagtttaaaagtttaattttttttttttttatcatgaaaaacttcaattatttgtatgataggtaagtgagaaaatggattacaatgacattagggtttcggaaattaagtgtattttaaattgtgtacactgttacacacacatactaattattaattgttataattttttcttttccataatggtttcaatcagccttatcaggatttggtaggatatttatacaagtatatatatatatacattaattaaaaataataactatatacacttttcacaataattaatttctttttattaatatataattgtgtatatgtttatcttataagtggtagtggttgtttcatgttgtaatgctatcttggatttatgcagaaataaacattccgagccccccaattcccatatataaaaaaccttttcacacaccaaatacatatttactcaaaaatcatatcatgatatgttttggaatgtcacttattgaaattgtactattactacaagccaaaaccaaccccctattccctacaaataatcaactttaccactattaacactcaaataccatttttttt

SEQ ID NO: 206060 - DNA, 1306 bp, Cannabis indica
gcatggaccaccttggatggatcacccgtagggatgcaatcctactattggattggtaggttgcgtattttccatgtggcttttatgggtattaaattctaccggctgtacaacctgggcttcggacgcgtgtcacctcagggtcattctcatttgaagtcccattgctcctagtcgtcggatcacttagcccagtacacaaggacacacatgctctacacaatagcgcgtcgtgggggacaacctctgacatcacacatggaaaagcctggtcactgggttcgtagcttgacacgcgtgggtcgaacctctataggccaaggcgtaccccgaattggtgcatcctcaaggtgcttggtttgggaagatccatattcctcgtgggagcaaatagtcttgacttttgaaatggaatgagactctagctcatggatacccttcgtatggccaatcagtcgggctttcacggagacctttcccgcgaggttaaatgccattatcctcccggagtgctaagtgaatcatttgggcagcttaatgactcattggccttctttgattaatatccacgtgtcgtgcttatgaaaatacaaataacatgatatatagagcattctatgtaatcaagagtacaatttcgagtctatagtgaagttaagagaaattaataaatttgaaaatttactatgtaaatttcagatcaacttattgagagcttgattctataggaccatgatccccacattacctgagataatatcatattgattactcaattaattgatttaattaatcaactaaattttaaaaattaattatgtcaaatttaagaattttaactaagattgggctatattgagaagaaaaaataaagagtggttttatctattaattatgacactttatggatcaaattaataaatatatttaaattatattttatttgataattatttataattattaaattaaaattggtataaatagtttagatttaattaatgctaaaattagaaaaggataaaaggttttattaaaggctttatttattgaaacaaaattggcaaaaatcaaaacatggaccacactatagtgttaggtcatgcattgatttttagcccaataatatcttttatttggtccatttaattaaacctaataaacataatgagaatagcataaaaggaaagatatgagagcctttgttagataactcaattcaagccaaaatttaccaaaaaaaaaaaaaaataaataaagctctcctttctctccctactcggcctctctctctctctctctctct

SEQ ID NO: 206061 - DNA, 674 bp, Cannabis indica
aattaatgagagggaaaggtgactgacttgctagatatgaaaatgagaccagattttcaaagttgaaggtacccaaattaatcagtccgcgcgtgacgtctcgctcttgccaatttacgtaccccatgacattgcatgatgtttacgtaatcctaaccatactttgtatttgattaattactattaaaatctgaatcaataattacttatctataattacatgcttaattcttccattctacattatgattacttttttttttcctttcatctttgaagtcactatgcacgtttctagtagtatcgtaataacttcaattttttgataaaaataacagccacaacaatatatatatatatatatatatatatatatgtttatattgggtattacttaagtgcaagtattcgcttttgtactcacaaaagaggatattttgtaatatgtgtagtgttacttgttatactatatgtgatctctacaatggtcactatgtaaaatggtgttacacttttaatttgaattttttaatactatagatattatggtgtgtgaatgagttatgatcataaataatatatacaaaggtctagggagctcatattgaaatgatgaagtttctttcagaaaaacattttgctagaaactctaggcttgataattctcaaagata

SEQ ID NO: 206062 - DNA, 667 bp, Cannabis indica
gacaaatacaatatatttaattaatttagtatatatgtattaacattcaattagtttagtttaatgttaagtacaacaattagtataacggaagagggtttcactgctatattttattaggattgtacatgtaacacgggtgtcgaatatgccaaataattaatgttggattctcaatatctcttgaattataatgtaaaataatttataattagatttgacgttgaacatattgcttatatatatagacaggatgagatgatgaatgtaccaatggacaaacaaaagagtactcgtgtatgagtctttctttgtcagctaataataagcttaaacatccaaaattaagccacaactctctctctctctctctctccatacatatcttcttattttctccagcaataactttgctctctatccatggcggagggttttgaactttttcatgtaccccaaaaggtagtgagaacagaaaataaactccaatattctgcaccattactcttccaaaccagtcctactcctactactcctcgctcacaacaaccttcactctccattttccccccaaacgacgccgcttttagttttcacaatgaccaaatctcattaccgtcttctcatcgccatgcaacgcccaccaactcaccaccaccatcatcat

SEQ ID NO: 206063 - DNA, 652 bp, Cannabis indica
aaaatgaaaagtatattaatattataaaacatatgttcacctttgatttgaatatatatcttcctataagtatcaacttaattaaatataaagtatgattgaatgatatcgattagcataatttttcatacagatgcactatatatgtattaattaatcattaaattggtatattactactatatatatatttaaggaatattattattattattttgagaaaaggaatatcattattcaaaatgaataacccaaaaagaaaagtagtagtggaaagaaagaaatagaggaaaattgttataaaaccttataattaattatatgtgtgatatttcgaagtttcccgatcaatatttcatacacttaaattaggtgaagtacatgaattggaagattaattaatcatttactcttgccaattaattgggaagaacgattaaattactcgtatatatatagataaagtttccttcttcttcatatatctcacgatcttttcctttttaagatcatgatatatatatatatatatactgttttctcgtcatgagttacatatatatatatcctataccacaccaaatattaatttacgttcctagctattatatatatatataccagaaagatcattactgatgagatagataga

SEQ ID NO: 206064 - DNA, 1202 bp, Cannabis indica
aaaattgagaatacgacttttagatcacatgatgaagtctgacctgttcttttgttttttatatatcgtaatttctttaaaaatcatttattatagtttacaattataaaacaaaagtggcaaactactatattgaatatatatatgcaaataagtccctgaaaatcatggaagagagtaaaaaaaaaaaaaagttgtggtccaatatctaaatacatagcccaaatcacatttcagagctcttttgggaggacccaaaagctttaacaaacaaactcaataatcttcattataaattaaatctcaaatatatatatatatataagtaactttacaccattcttactcaagtatataataactttctttatttattatccttatacccttttttttctggcttaattattttacacaatcatcaagccacaaaaatatgttagctttaggcatgtgggggtgctctagtgcaacttttgtgaatggatttaatgagtttggcaagtgactcaaaactatatatattaattaaatgtgttattaggaagaaagttttatgtatatatattataataatacactatcaagtataaaaatttgacatattaattaattattaacaagaatatatatattaattatgtgggctcttagtaaagtacttgtgtcttcaagtttccaaaaccacacccctaaataacaaaagtatgcttattctttctcatgcatgggcataataaaaaatcacaaaatattttttaaatgaataaaaaaaaaggtgaactctatctattaattatttacatacatggaggaggcaacccaataatataattttattgaaaaaatataaatttttgtgagaacaagaatgaaaaatataaattttataaggatacaaataaaaatatgtgagataaaaataaaaaaaaaaaaaaaaaaaatataagaacaaaaaaaaaaaaaaaaatataagaatataaataaataaaaaattatttttatcaagttaaaatataaaatacttaaaatattatataaataaaagttagggagaggcaaatgacccacttgccccccttactatatatgaagacatttctttccagcaaatgtatagagataaatatataaataataaaagtgaggaattgtagtgtgaatctttaaaatgatgggcaaattgatattagcaatgattt

SEQ ID NO: 206065 - DNA, 850 bp, Cannabis indica
ttttaattatatctagtagagttgacatgataatgccaaatcatcgctcgtagtgctaattcaattttctgttatagtcatgtacgtaggttcctggaaggctctcttgtacttccaggaagggtattataggaagctagccttccttcagaaaagggtttcaaatggctagctgttcccttcgagaaaaagagtacttatggatagtcgactccagtttgctccttcctattcgaaagctccttcagcgagtaactttgatccgtgtttctggaagctctcatactcgatcctggaagcacttattcttatgctggcgtggagatctcgctaaaagtaaagttggttaagatagttattgtctaactaacttaacaacctcaattcttgtagtcaccgactttaggatcttgatcctaaacctattatttaataccactaacacttagcatttcaaacagtcaaacttcaagacgatcaagtcgatcagattgaattaagaggtagagctagagagattgggtttgagttttgtataaagaatcttctatagatgaataagattttttagtaagagtgtgagagttgaaacactttgagaaaactcaatagagaatcaatctcaattataatgtaccttgttcttgctcaatcaataaagagaatttcttggtgttccagaactgaattagagctatagatcacattgatctattagacttgaaccagtatatatctctgtgctaatttattatttcttgctttaatttcgtttccggttttaatatgctctgttcatccctgttttctccgattgatatatttgtaatttattaatcttgtcattgct

SEQ ID NO: 206066 - DNA, 1234 bp, Cannabis indica
gagagttgagagagcgaggaagcccgattaccactgtagtcaatttcctttgcagatcaaagcttatgtgggtttgaagctcaagattcaatggctggaggtatttcgatcctttttcatagtgtatatatgtttgattaattccgcacttaatacttaaacatatacattacagtttatatatataaatgtctaacagttaattctaataataataataataataataataataataataatagtaataataataataataataataataataatagtaatggaccccacaaaatacattgcgaatcaacaaaatgtacttatataaaatctaaaaccttgatcagtgcacccatcgatcgatatcgtattctgtttttgggggccagatatatattaatttattatatatttataacgtagttacatgtatatattccacgtaaaatagatgactataaatacctaagccaagccagcttgataatataagattatgtacatataataatattttttctcatcatatcaattagtaactattaattgttaactatatatatcggtataattaaaaaaaacggaaaagtatacgatgatgtcataattaatcacgattatattatattgacaatgataatataatggttaggaaatattagctagctatgtaggtttgtcacaaacaatatatatgaaagatgatacgtacatgcatgattaattaactattgatatatagtacattaattaatacgtatatatataactatatattttttgttataattttttctagagaatcgtaagtaattgctcaactatatatatggattattatctcttctattattcttgcatgcatatctttttttggaagtatgagacagagctcgtggttgtacaaacgtcattttaaatgtgtttcatattattttgcatatagtgaaaacgatagatgagattaattattaataattagatatatagtacgaacgtcactataaatcaaaccatataaatttcacaaatctggaaatcaacccatctcaccatgatatatttcctaattaattgaatttttcataatgtacgtacattcccatgtttgaaaatattgatataaacatttattgtttttcctaatgtagtcttaattattctgtcctcatgatcctccatgttttaatattttggttagttacgaacaaaataaagaaaaagtagcacatat

SEQ ID NO: 206067 - DNA, 757 bp, Cannabis indica
atatatcggtataattaaaaaaaacggaaaagtatacgatgatgtcataattaatcacgattatattatattgacaatgataatataatggttaggaaatattagctagctatgtaggtttgtcacaaacaatatatatgaaagatgatacgtacatgcatgattaattaactattgatatatagtacattaattaatacgtatatatatataactatatatatttttgttataatttttctagagaatcgtaagtaattgctcaactatatatatggattattatctcttctataattcttgcatgcatatctttttttggaagtatgagacagagctcgtggttgtacaaacgtcattttaaatgtgtttcatattattttgcatatagtgaaaacgatagatgagattaattaataattagatatatagtacgaacgtcactataaatcaaaccatataaatttcacaaatctggaaatcaacccatctcaccatgatatatatcctaattaattgaatttttcataatgtacgtacattcccatgtttgaaaatattgatataaacatttattgtttttcctaatgtagtcttaattattcttgtcctcatgatcctccatgttttaatattttggttagtacgaacaaaataaagaaaaagtagcacatataataaaaaattaatttgggaaaaataaataataagtaaaatatttatactttcctctcgcatgattccttttgcattatcc

SEQ ID NO: 206068 - DNA, 799 bp, Cannabis indica
ttataagagtcccttactttagcttcccactggaatttaacaatgtacatattagaggttattacactattttgcactacaaaaaaaaaaaaaaaaaaaagacatggtggtatgtccaagggagaaagagtagttaaattgacaataataataatattaatagtaaaacacataaaggatcaccgtatatgccttttttttctcaatgcttcagccacaaatacaaacttgtattcccttgaactcttcaaccatttattaaataaactgtggctttctttcttatactatcatttttctatttttcttttctttatttgcataaaccattttggaaatttcttctagtctgcagacatttttaaacatctgttttctgcagacgtttttattgcacacgtgtcaatttgtaagaattataggattaagtcgtacgtggcacattttgtattcttcctctctctctactctattacatatagtgatcagttattttgaagaagatggcaacaaagattgtttctgtcatcggataatgcttagctgccgtggaaaacggcaatttgtgaagccgtttctattattatttgctaaataccactcacacgagggagcgtgctgcgcaccctccaaagaggtagatgtttgttatacacgcgcggaacagtgagtgatagaggaatctgatatcgcgggcccagctgcagagaatgacacgtgcagctttgttttgtttgctcacaattttcttgtttctcttgtttagttaccgttttttgaaaaaaaaaaacaacacaca

SEQ ID NO: 206069 - DNA, 753 bp, Cannabis indica
gtactttcacagaatgtattccgtgatatacggcagccgttagatggagggagttatttgatttgagggctggggttgatctagagataattagagttaaaaaaataataacatatgtgagacacatctaatataacctgaaatccatataatgcatcaggaaatacaaactaagaatacaaaatcgtttccctatattaatattaatatagacaacacgtaatttaataatggaaaccgctaaatgtcaaaaatctattaaaacaagttctatttttctcaaataaagaagttctatattaattacaataattgaaaataagataataacaaaacaaaatatatgttttaaatatttttttatatgcttacaaaattattaattccatataaatttgaatatagacagcaaagttttgagcacgattagaaatattagataaagaaaatgagaaataatagattattattattagtgtatgttaatctcaagtaatacattttaatttaataaataatataatattttaaactccttaaatagcaatgatgtattagataataatattttatttattaattgctatgtatattttggttgataatatattaattatgattaatattattattacctgatggattcgagcttctgtttatgaagatcctcttcagaaatgggaaacaatcttggtgaaccagaagccctaatgggagtagaaggtgcggatttcttcttctgaagtgaatgaa

SEQ ID NO: 206070 - DNA, 2396 bp, Cannabis indica
gttagggtttctacgtttcgttttacttttatattactagtagaatgtttcacgtgcaaggcacgtgttgatttcacataattatcttttatttatatttttaaaaggtaacaaatggtcaattaatttgtgaaataaaaaaatcaagaagaaaataattaaacgataataaaaggtctattttctttttaatataatgactaatttattagtggaggactaacaatattgttaattttatttttaacatatttaattgaccaaaacattttataattatttcttttgataaaggagattcgaacttaggattttctctttgtgaagaaaaatgtgaaactattaaactatgcctataaccacaaaatattttatatgatttttttttatttttactaatttatgaggctttctcattttgtgaagaaagtttgatgataaatatttttaaagaatctcacattgtttaggaaccattttggatgttgtcctatatagtataaacaagtctatttgtttgatacaccatgatgtattgtattgtatagtattgtgttagattaaattgtattgtattagtattatttaatacaatactatgtttggtattggattgtactaataggttgtgtaaaattataaattcttcacaataaacttgaccccaaccctgaaattagcttaaaaatgaaccctgactaggactcagactctagaccttgaccccaaactcggacccagaccctgatcttagtcctagtctgggtccgggtctaggagccgagaatcgaatctgggttcgtggtccaggtcccagtttgtgtctaagtttgggtctgggttcgggtccaggattcagggtcaagtttgagttctggtttggggttcgagtttgggttcaggttcggggtccgggtacgtgtccaaattcaaggtcgggttggggtttggggtcaggatctaagggttgggttcgggtttgggtctggggtccaagtcagtgtctgcggttcggggccaggtttgagttcaggtttgggagttagggtctagggttagggtgtgggtttgggtttgggtttggggtctggggtttggggtcgggtctggggtccgagtctgggtccaaagtttgggtctaggtctggggtccgggtccaacgtccaggtccggggtttggggtccaggtctgggttcaagtcaaggatcggatttgggtctgggttcaaggtcaaggtctgggtcttgggtctgggtccggagctggggtcggggttgattccaaactctttgtaaatattataatacaagctaatacgagtcatttattatgtataatataatacgactcacattgtattaaaaattatggtcataataaacaatataatgttttattcaaatatagtattatttattatttaatacaatccgacttttatacggcctaccaaacaagcccttaaacttcactttcattttcaaaattaattttttagcagtggttatataatttctttttattattcaatctaatcttgtttaatataattttttattcattgttttatcaaaatttaagtattaacaaatatatattataaaataataattgtaaaaaaaaaaacctattattcataacatggttatttgacaccttaataaaaaaaaatctgacatgtatatactagaggtgggtatcttaaatattatttctattcaatttatatgtgatttctaaggatttgttttaccaatttctaataattaagtgtaatgtttatcaaaaattaataaacaacaaataaaaataaaatttaaatatttttttattatatatgaataaatataatatgtttttaatatatatattagatgtaattagattaaatcgatttttaattgaattttgaaatttttttcaataattaatctaatccaactgaaatacaactattcacatccaattcaatttaactgtaattagacgtccaatcttttgtaattggattgtatttgactggttgagtgtaatttgatcaatccaattgaaatacaactactcacaaacaagtatttcatctttatttcataactttaaactattaaattcatagggaaaatatgatggaaatgagaatcataacttgtccaaatttgaaagctgcttcagtccaaggatggtttccaatcaagtgtttctccagcatacattgggactagttcgccaaaagaatatgagtaagaattaggaactttccatggatttttcctcagtttaatttttgagttgtttctggaaatcccatagaaatctggcccattaaagcttgtaaaagcctctagtttgtcaagagcaccagcctgagacgataaaaaatgttgcacaagagat

SEQ ID NO: 206071 - DNA, 1171 bp, Cannabis indica
tatgttatgattaaaaaattgtcactaaaataactattttttgtagtaatttattacatgcaaatataatttaatcatattttattcttcttcttctgatttgatcctataatattgatttttttcctttaagaacaatcaggatgtttcaatataagtgggcaataaaactaaaataaaaaaagaacaaaaagcaaaagccactagtgatatcaattattgattgctaaagtttaaatgtaattaaataaatattttacataaaaattgatatacaagataccagcagttgttaatcagtgggcttatttgtagcttagataatttttttttaataaaagaaaaaagtgtgtgttttaataattataataataataatataatttatcttttttttagtttgttcacttagggtttgtcgaatacaagcaacgttggtggttgcccaagagctctacttttggctttcagccaatcgaagcttataagaaaaataaaattgacaacgttgtcaataatgaaaaagttatgttgtttagatcatttacaatacaggcaatgttacacattaattgcttgacccaacattttattttcatatataaattaaccaatttagattataataaaaaaaaaactagatagtattaaatccaaacaggaacaccgtaacaaataatttttttgaaaaattaatactttcatccattaaatagattactattgccaagcatacaataaaactcctgcattggagttggccttattaaaagcctcgcctaaggactcccatatcacttcagcaatgatcgagcaaccggtggtcgagttgcgttgataattgtgagtataaccaccaatagtcaattttttgggaattatgtagtaatgaataataataaatttactttattattatcggactcatatcaacttatttactgatcattttttaaaatacatcattaaaattcaactttatttattttaacttacaatactatatatcaacttctttatatttttcttaaaacatttaaatattatattttgaatacttttgaataattaacctagatataattaacaaatattatttgaagaatcaaaaacctaaaataatctcaacttgtagacataatagtaattgtgactaagtaaaaaaaaaaaa

SEQ ID NO: 206072 - DNA, 911 bp, Cannabis indica
caagtattgcaaagctccaagagtgcttttatactgagttgcacatcctcaaaaggttcaccatctttgagactcagtttaatagtgctgcttgttggatttggacagcttttagagccttccatgtgtagtttaacaaggagatctgtaatgtatttattctgactcaaatacattctagtgttgtttctgaaaatctccactcctaggaagtaatgagcatgcaccaagtctttaaagagaaactagtatttagatcttgaataagtttgaaaataagctcactattgggacatgtgaacaatatatcatctacatcaacaagacgataaaccaaagaagaatctgatttaaagatgaataaggaagtgtcagacttggaagcttgaaatccccaagcatatagagtttgtttgagcttttcattctaggcttgaggggctttcttgagaccatacaaagctttgtgaagaaggcacacatgatcaggtttttcagtgtctataaaaccttgaggctgtatcatgcatattgtttcattgaatgtgccattaaggaaagcattactcacatcaagttgcttaacgttccaattggaggatactgctatactcaataccattcgaatagttgttggcttcacaactgggctgaaagtatcagcataatcaatcccaggggtctgcagataatctttggctacaagtctagacttgtacttatcaatagtaccatttgccttgagttttattctatgcacccacttattttcaataatctgcatatctggagaaaagggaataagtgtccaagtaccagttctcaaacgagcaacaagctcatctgtcattacaacattccacttggggtctttaagagcatccttagttgactttggtttattgggcaag

SEQ ID NO: 206073 - DNA, 1324 bp, Cannabis indica
aaaaatattaccaaatgcacccaaaaatattaatgttatggcaataatggattcatatctttgtagactaactataaaattgtactctcatcgatattaatcgacaaaaatacccaatccaatataatttggacgattcaacctaatgcaatctgtaaaatcgcaaagtgcagatatctgcacttatatgcagattggatttaattgagaaatctaaaatctgcacttgtgtagattgaatattgattcacatgtaaaaataacaaatcaaatcgaccaatcatatttatataaatttacaaaattgtatatataattaatattttaaagtaaaataaaaatagtaatttgaaaatcttttgcatataatacaattatattttaaaacttaaaatactaaatgtatattctattcatataaagaaaatataatttaaaacaaaatcgaatttttctttttacatacaatttttttaactttcataaattatgttatttttttatcttatttattttaattttttgttggatacaaaaataaaaataatttattttatttaaccagtccaatatgcactattgcaaataggattgaatttaagctattgtgtctatattaatttacactcagtgttgatcagatgcattattaaattagatgaacatctctaatcgtgaggcccgtgccatacgactcaagtaataataaatcatccttcactaattatggaagtagaaggaaatagtgtaaaatagtgtatgtaatcagtaaacacactcataagttaatttagaaagaaaatattcgtgcatctcaagaaacttaatcaatccaaattgaaacggtcagtctcttggaaataccaagtaatttcgcaaatattggttgaggagataaaaaaacgtaaagcatcatcacgtaaaaattggatgacgacatgcatgcaagaaaactgtgttactagaaaatttacagcaaattattgcctattatgattatgcttcttaatgggtgaattgactcacttattcattaaaatatggaatggatctaatcatctccttgtctctgttttttattttattttttaaatcgtttttttactttcgaaagacctaaatatatccatgtgtattttattttattttttctttattcaatttgtacgtttatattattttcttactatcatcaattcattggctcaacatttcatgcaaactcttatgcttttattctcattaattattaaaattatattaatttctttgtattttcgacaaatatataagacgatatggaggcaaacttacacctataaac

SEQ ID NO: 206074 - DNA, 519 bp, Cannabis indica
taacatggtatcagagctgtaatcgtccacagcaatggagcaccaaacggccggcaatggtggagcctcaagattgaaccaggctcaaggtcaaaatcagatgcaaactcttcttccaagatcatttccagtttcgtttacccactcactgtcaataaagctcgatgaacacaattttttaccgtggaaacatcaagtcctcgcctcgatcaaaggcagcaaacttcaaaaatatcttgattcaactcaagctccctcacgatatctctctgttgaagatgaagctcaaaagaaaatcaacccagaattcgaagattgggaacagcaggataatcttcttgtatcttggctcttatcgtccatgtccgagaaaaccacgaatcgcatggttggatgcgatacaacggctcagatctggacaactctaaatgaatattacactgctctaaatgctgcaaacgtcagtctctacaaaacgcaactcagaaataccaagatgacaggttctttgaatgatta

SEQ ID NO: 206075 - DNA, 866 bp, Cannabis indica
aacatgattatgtgaaatttgcagttgttttagggtcggtttgtatgattttaggtctgttttagagtcgtttattgtaaatttagaaaagttggtttgctaataatgtgcttttgaaaggtgacatttgatgtggctaagtattgttgtgaactgtttttttatctttttttggggaaatattttgtgttttatcaacaaatttgatcaatgtgattaaattattatgtataaaatatgaatttaaaacttacatgactaaagtctttttaatcaatattgatcaaatgtgagtataaattactaaatatgtacaaattaaagttaatatgtattattgaaatatgtattattgaaaacataaagtattaaatttgtatttcgataaatcaaattaccaaataattaccttctttcttttccctttaagatataatagtttactgtttaaatcacttaggtagtgtttggttggaagtaatgaaatagaatggaaaggaaacaatttttatttcaatcctttgtttggttgcgttttgaagtattggaatatcattctaatagaatgatttttctatcattttggtggattgactatttcattttgagatcgaaagaatgaccattctaatgcaagatgagaaaaattataataattttttcatcaattttttttatgtgttttaaatttgattccattccattcctatttttattttcattcccatttctattcttatattttcattcatcccaatcaaacaaacgtcactttaattacataggtttattctttaaaatgatttagtcttaatacacatacgttcattatagttaaagttgtttctttactctttcagggagaa

SEQ ID NO: 206076 - DNA, 2124 bp, Cannabis indica
tctttatttttattgaaatactaaaacaaaatatacgaattaaatggctactaactcattttttctaattgtatgtgtaacacgagaaattatcccaattgcattgcataatattattatagttaattatcaatactaaaaacaaatttaacattttctgaataaaataaaatatgataatttggatactaattaatggtgcttaaaatgcccaaacaattcaaatcatgaacgtcgaatgacctctcatcttttgcctacaattactttataaataagttggaaagaaaaacagacaagccaattaatcagaaacacatttcttgaaaaggttcttattttgagctcaaacatgtaaggagagaaggatctcagatacaaatgaatggatgagattaattatcctcatgttaaatcagattaacgagattatgatatctcatcatcatcgaacctttcttcccctaatatctcaaaccaaagagaaagatttaacttaataatcaattttaagtactaaaagaagcctcagaaagccagtaaattcacatcaaagaatttcagtcggtaattccaacttgtaaactaatcctcattggcctcgtgaaactgataacataataaaatagaaaatgtaatcgcacaaaacggctcaatagaccaatcaaaaataaggtctacagattcctatcaaaatgcgaaacagagaattgttattggaccaatcatagcatcgccggtcagagctcttagagagctaccgtagacgtggcatcgatccgtacaaaatcaaatgcagcagagttcattataagaacggtgaaaccctcagagacccgtttaaaatcacacacacagagtgagcaccgtaatcaaatactctatcccaaccaaacaacaaagaccccggaaaacgacatcgtttccacagaggaaaatagtcgaaagggctttgtgaatggtgaaattgggagtagagcaatggctacgattgtgaacactctgctgtttaaagtgtcatacggcacttcctatcaattttaggggagtgcttcttcattgggatatttcctatttctgtaaaaaatataaataaaaccctaaccctaaaaacatatataaaattaaaactctaacaaaaggggctaagccaaaattaatagttagcaaacgcaaagtggtgttgttaaagatattgaataaaatgtaccaaagaagttgggggaccagagaatcaaggaaagatgttaacctgggcagcaaagaaacccccaacccttcgaaaaatcaatatttgccaatagaacaaagcttgcaagaaatcgatcaacagatctcaagcccttgcagccgaaaggagaggcattgtcacagcgcttaatcaaaacgaaatcatatacgaccactacagtagtttacacaaacaaatgggatgaaaaagaaactaagaggaaaaagagaagcagcctcagctgctctgttattcaaaaagagtgaaacttcgggtatatatatacgcaagcttaagccctaactcagccacccaagataaagaaaagaaaccctaggttattttggacacgtaatcaacaaatctaaaacaactagaaaatgaataaaattaggggtaaataccattttgaacttgtgttttgcaaaaattattaattagaccttctattttgttaaatgacaaaatgaaacatgtattttccaaaattatacaaatagaatcctgaactgattttttatcaaaataaacttaataataatccaatctataaatgttatgacaaaattggttacattttttatatctgcttgtgttagaaatcgccttaaagttagttatattaaaaagtaaaattattaaaaattgacctcaatgtcctatttttactatattagaaaatataggatttattttattatttaacaaaataaatagttcaattagtaactttgtaaaatacaaggcccaaaatgatatttaccttaaaattaaagaagtttaacatacgagtaatttgagcataaatagataagtttagctccaattacaaacctcaagttgccatagaaagtattaagaagtaggtgtgtgggagtcataggatcaaagta

SEQ ID NO: 206077 - DNA, 1336 bp, Cannabis indica
aaaaaaaaatgaaaacttattaacaaatagaattggccattacaatagataaaagttcagcaaggatatcatccattaaaaaagtatgatctaggtataaacaagagctacaaacaacacaatgagtagctttgtttatagaacgcttaacaaaagagaaattgacaaagttgagagaagtcaaaagaagcttaaatcttcgtattttcacttttccgacaaagtgattttcggaaatcaggtagtttcgagtctcctgtttttgcaaaatagcaacatctctgaaaactgatgactagcttcaccagagcacaaaaatggactaagcgatgtgaaaatattacttagacatcaaaaaatacatcttcagcacgttttcccactcacccaacttccaggttgacatcacatgtcaacttgggcttggatgtcaacctgggcgctcaaatgtcaacctaggtgttgtgcccaaaataaccttcaataaaacggtcgtaagtcactcaatattgatcttattcacgcgattcaacttatgtttcgaacttattagttcaatgctctatcaagtcatttctcacacttcaatcacaattctaaagctatcaactccaaattcaaacatttatctaattgaattaattaaataattaattaacctaaaaagacaaaactaatagggaccctaccatagggtagacgcctaccttgtcttatttagggcaaagatggtgtcttttgtcctgataatttttgtctcaacaaattttatcttaacagtttttgtcgttttcctatttaattaattttaaaaattatttatttattacaaaaataaataattactattttgccaatttaacatagatttctctgaacagaattatacaactctttatcctttctcttgacagtgtttcaaggtgccaatttgggaatcatgaacctataattctaagctccaataaactagattatttattgagtctcatcaaccaaataatctttgtttattgatttcataatcactccactataaatatagaattgaactcttagtaattataaaattatatttattgagttttactgcagcgtctatattgatataatcaattccagtgattagccctccttgcattagttcataattaattttggtcaaattaccgttttacccttttaattacttctttatcttttagtacaattaattcactaatagaagtataatttcgatctcatctaaatttgtgcacaattttttagttccagaatcaacacttaaagagaacctacatttgatccgttatgaaagtcaggattctataattgt

SEQ ID NO: 206078 - DNA, 709 bp, Cannabis indica
accaatgtaattttcattgatggtgggataatccatggaatattcagagtcaagagtgagttttttctctttaattataccatttttcatgtttaatcgccattcgtagggagaatcatggtatgaattattagcatttgtagttggggtgtcaatttgttcttgtgtgcttgatatgattgagtcaagagccctacaaccccacactataatctgccatattccaacattttgttagtaaataaataagtagtataaatataattgtatatgcatgataaatattattttagaatctgtgttttgtaaaatgtactcattggactgtttgttttgttaaatgacaaattaaccctgtattttcgatgtacgttagagatgtaatatttcaaacgcacaatgtttagtaaaattaacttcaaagacacagttaataaaaaaaaaccctaatcgaatcattttaaaatccaagttcttcacaacgagtaataatgataacattgtcgatttattattagaagagtttgaatatacacatacctcgtcatctccatcttcaaaacaattaaaaaagtagcattgtgctaatttggttcaatctcaaaccatttgattgaatctgcatcgccatatcgaggcataactccaattcttgctatattcatccttatcatcttaatcaatctacaaaaaatacaaaatctactaa

SEQ ID NO: 206079 - DNA, 1392 bp, Cannabis indica
ttttttttattttttctgttttgaaagtgaatataacttcattaatcaagcaaaaagccaataataacaataaaataacaaataattaatcaaaggccataaacaagagggcaatcttcaccaccaaacttggattttccagagaataaagctaatcgaacaaaagagtgtgcaatggcattattgtctcgttcaagctgtggtcataattttaaaagcaagccaagcttcataaatgtctcggagaatgcggccaaatttagaaggaccaaatcttctctcaatttttctctgcctgtcctcatctaattaaaacaattaaatgtatatctccttatttaatagatttaatatatttaagaactattttattttacctttttttttataattattattaaatgttcttctcatgccatttttttaaaataataataataataaagacactttaataaaatcagattttagttaataataatataattctatcaaaaaaaaaaaaagaactgatttaatattatgttatattattcacttaaaactaattgtattaattacgtcagtaacctattttttttattgctccttcaaaagaaattagattggtgtatctttaatatttttaaatattaaatgtattagtatagcttacgttagcatcaataatatattggggtaaaaattgatttattcaagtgactttattattatttaacaaaaaaaaatgtcacatgaattaaggataaaataaaataatccttaaatatattcacataaataaggggatatattgtttcaaaagaaaaaaaaaataagggatatagttggagaacttgaagcattttaattaaagtgggacagagaaaaaattgggaccaaagatttggctccaaatttagagtgatcaatattttttgagctgcacttttgacacaccctatttggttatttaaatgataaaaaaaaacacccttctcattttttaccttaattttttatataaacaaaataaataatatttattttagctattattggatagaattagattagagaatcgagattaaatctttactcaataatattgacattatttaggataatctttttttggaacaaaataagatgacatctatcttttatcattacttatctgaagcagtacgtacgtacctaaccgtgggcgaagagatcatatactataccacacgacagctaactgtgcactctcactcacaagatcacactttcccaaatagattaaagagacaaatcccaccaccactaccttcctcatagtctcaacaaagtcccttgaattcaaacagaaccaaatgccgtcataacggtccatcgtcgccaccgctctgcaaccgttgaaatcaattt

SEQ ID NO: 206080 - DNA, 883 bp, Cannabis indica
agaaatgatttagattaatttccattaaaagggtaataagttaatgattatttaattcgaatgtacatcttgatatatagtatggtaacactcactacatcatttaaaaattaagttaggacagttgtacttagattgtacattttgatgtataattagttataagagaagtgcttgctcaaaaatcaatttcatggatcttcctcttgatcctgtctaggcagtgcttttggctattaaccaaggtattatggtaggcattattaggctaaatctaccttacctagaatctgattgtttgaaggctgtccgtacaatctctggtcctcttgttgggtgctcttcggcggatgaaaatattgaagatgttaagatcaggcttagtaaaatttcatagtttttattttgtgggaagagttagtaatcgccttgctcacattctagcaaagatagctttggctaacaaagcttctactccagggaatgggggagtttgtgcccttagttgctcctccaattatgttgttggacttgccaattccgttgtaatctttctttggttcacttcaatgattccctttcaaaataaaaagtaatatatatatatatatatatatatatattatatggctaatataataatgcatgtgtgtaatttgaaagtgcatctatttttaatagagtattgttattagtattagtggtgtcaatgtcaaacactatctataagtgatattttgtcaattgttgataacgatttaatagtttggaggattttaccatcaaaatttgagattggaaagttaaatgcaagtgaaatgatagttagaagagtttagccgccaaaaaaaaaactctttaatttaataactattattcatct

SEQ ID NO: 206081 - DNA, 569 bp, Cannabis indica
tattatctacttatttatatgggtagtagagattctttcacgattaattaatgatgccattaatgcctcagccattaagggagaagttactcttagtagaggagggcctaaattatctcacatcttctttgttgatgatttaatcctaaataattgagctgctgttgaagaggctaaaggctattgggtatcttgataaattttgcagctgaccaagtcaacggctaaacaaattaaaaactagtcttttttttagtaacaatactagttctagtatgaatttgaggaataagttgacccttaaaatcaatagtttagagggaaacatcaaatacttgggcctccttctgtttcggtccaaacagaaatatgattttcaatttgcattgaataatctcatttttaaacttcattggtggaaagctaaaaatttgtccaaggctagtaggcctactttaattaaaggtttgtctctcccattctatgctatgtagacaactcaattctcgaaacgactagccaagaggattgatggataaattaaacaattctggtggggttttgagaaa

SEQ ID NO: 206082 - DNA, 887 bp, Cannabis indica
cttttatgttatttgctccattcgcttggggatttgcctctccgtccttcttatattgactgaaatatcctacacgaatcaattcttcaaaaatcatcctacaaaaaccagcattccaggatagtatggccaatatctttgtgatacttacagtattttttgtgagtctctttgattgtacttgcccctaattagacctaatcttctaaagatgcctttatgttcttcaatagcatatatgtggtcgtggggaacattcaactatgtacaattatcaaattgagggcttatgttgcactttggtgaactttccttcctaattagggactttacagttttaggcttcgacgtctcgttgagctacgacttgggatgcatcttctcgagcttttgcactgcgaactccttgatcgcgccctagacacttgagaccattatttttctctggcgttctcgagctctactagttagttttcaattcttttatggggttatgccatggaaaagaacttgactaacgtattaggatgtcgtgcttgtaattccttccaaaaatcagttgttgtccatacccctgtaataagcatacattcaacaaaaattcgggagccttctctacttttgttactttggcattaaaatgtttgaaataatcctgcaaagtctcaccttttctcttgcttgatatttgccaaatttgtgtagggcaatttataagtcattgttgcctggaaatgggtcaaaaatagatctacgaatgtttcccatgttgagatcgttgcttctagtaacggactgaacttgtcgtgcacgttttcctcaaaatttgcaagtattcgacacttagccaattacccccgtcaacctctatactagtgttaaattta

SEQ ID NO: 206083 - DNA, 787 bp, Cannabis indica
gagataattcaatacaataatttggttaatgtatatgttatgacgttaaaagtttaataagatttttttggtattgtttaaactttacaaaattaaattttaagtttttattataatgttcgataatgaaaatagtgtaaattgtctaaattgcactacatttttacagtttggttttcacggttttaaggttttgtagtgtggttacggtttgagaaattataaaaactgcatatatagtttggttttataaaaatggccaagacccacactacttgcactgcaaaaaccccaacaaaatattaccttgatctagagttattatgacaagtatgtctattttctttatctaaatttattaaaaattatcttcaagttcaagttatattattatataaaaaaaatgataaaaaattaagctcaaaatactattttatatcgtttttaaaaaaatacatgatccaattataaaataaaagatttaggtgccgtttggtaacatttttgttttataattttttaatcacaaaataaaagtaaaatttttatttttaatttttttttgtaaaagtaaaaatgcgttatgtaatcacttttatttttcaatcctaaaaatagaaaacaaaatatgttctctaaagttcattttcattttcatttcttaattttatttaggtcgggtgtaggtctggagtaagatttaggttcggatcaaaggccgggttcaatactagggccgtggggggatttggatccagatctagttggagtctaaaatattaattaa

SEQ ID NO: 206084 - DNA, 643 bp, Cannabis indica
gttctcatatcatcttgttgtagatggatgaggtgttcattattaaattaggtttttttttttaattgtttaccaagtttattctcaaggtttggaggtaaatcataaatgttagtgctcagcttgtgtaaatttttagaagttaagattaaatatatatttcatatctcttgtatttgtaagattataagaatttagaatttggatacatgctaaaagaatttttaagtttttttcttatacaatgtttatgattgctaacaatttctgttaaatgttatcttatctacctaatataactaatagtttaggagataaaaattctaaataatttcattaatttttcaaagatatatgatggcattcttccaatcaacaataatctatctaattactttttgaaaattttacacaaaatatttgatttcgttctattttttatttttttaatataataattaattttattatgagagtcaaataataaaaatctcgttttctatctttagtgcatatcatactcactatttgctgtgctattactattactatttcacattacaacaattttaggattactctctacaaaaggaacaaaaaaactcaacaaaaaaaagaatagagaattgtcttagcagcatga

SEQ ID NO: 206085 - DNA, 1665 bp, Cannabis indica
agaattttttaaacggctaaaaaaattacaagaaacatgaattggtgtacaatattaaaatttaaaaataaaaaattactaattaacctaaattaaattaacctgtaaaataaatattaattttattaaataaccataccacaacaccttacaatagactaaatatcactaattcaacttctaacattttctcgtgacatgtgtatatatcatttcaaatatttttattatctgaaaatatatatttatgaattatttttcttacaaaatctttcacaacagaagtagtgagtataccagccaagcattttagatgagggcccaacaaaaaggcaggccagagttgtataattctatttcactttattcactgcaaaatatatttattattttttacttacaacatcattcatattcatgtctttcaaaaaagataaaataaagtctgctaaattcggtgtcagactcagactgaaagaaaagagattgtggagtagtgatggcagctcggattttcatgctttttttttttcattttttgaaaacataaatacataaataaaataaaaattttaaaaaaaaatagttaatagaaaagagaaggttgagaaagaaataaaagaagaagaagaagttgattttataatctgcttttagaaaacgccgcaaactcgatgagtttgctattttttctcactgttgttattgtcggtgtaggacacgcgccatgaaatggagagtgagttgtggaggtgctgacgtggcagataacagtgaaactgcagtaatcaactaaatacgctagtacgtacgtataaacaggatctattttcaagtacgcatacgcaacagtaccctaacataaataaataaataaaataatataaatatataaattaacaattaaattcgactaatgttttagtttcccatattaaacggtctgctaatcaagcagttcttgggttagctaaatttgctttagggttgaatgatgacatgttttggataggagagattccctatcctattttctctgttgttgtaaatgactttaatttataataacagtgaatttctcaaaaaaaaaaacaattaaattcgaagtaaatcatctttctatatggactaaaaataaattactaagaaataaaatccaaaattatattatattatctgtaattattatttttttattaacaatattttaatttgatcaataatatctctaatttaaacacaataaaacacaatagaacgaccactttttggaaagaaaaaaaaagtagtgtattggcttttaaaatagtaatgggtaagtaataataccccccttaaatgagttttttatataaactcttatctgtttttggcatgattttttacatattttactacacatgattatgtttttaaaattattatagtaagtaattatttaaatttaatttttgatactgtaaattattttaaaaattttaaaaaatttataaataattttaaatatctacaatgtcatttttctttttctaaatactaaaataaattagaatctactagattatttaaaggatctactactacctaaatttccaatagtaatactaataacattgtctcttactcaatatttcaatgctaaaatcattgttacccttttccttt

SEQ ID NO: 206086 - DNA, 962 bp, Cannabis indica
ggtcgttggtcgagcttcttgtcatcggtcatgggtcgcaaaggatagtgccggtggtgggtcgagttgttggactttatatggataaaatattagagaatatataaaatacaattataagataaatgatatattaattataataatataattattaaatatttaaaaattacttattcacatggagaatgtataatcttgtaaggaagagaaataaaattatataatataaataaaacaagtcagtagtataattaaagtaatggaaatctttaatatagaattgctaagtgcgggttactatacattatatttttagtgtgtgattttatatcaaatcgtatatgtaaatagacatatagtgaagttgttgtgtataattcgattatgcatcactgaaccgatatgtaataaatattttttattaatttatcgtttatcgtgaaagaattattcatatcacaacgataatcattagtaaattaacctgaatcctaagaatacattaactcctatttgtgttcattgaattctttaattcactcgttaaaattttttaaaaaaaataacttacactgtagattttcgctaaaataagaatatttttacggtgcaattaaagatttttacttaaaaattgcaacatatttatatttttaaagtgccattagagatggcctttaatatttctcaacacaaaaatagtgaatgtggagaaaccaaaaagtggaaatacacaaacaagattataaggaaatagtttattgaagagaaacattggaaattaatgtgtttgctttctatatccatatccaaaaacggttctcgaacttaggactttaaggcaagaaaaatgttactttaccatgaagaccacaaagaggttgttcttggaatagaataacacattaaaaaatcacttctatagagacaaataacatgtgagactaaattcattggtt

SEQ ID NO: 206087 - DNA, 787 bp, Cannabis indica
aacatgctaaatccttacaagtgtaagcattaaagaaaatattatatagaatacaaaataagtgttgtgtcaatttcgctagccactaatgtttcaatgctcgcaagtccgtctccatatcattagcgttctttccaaactgtaaaattaaaatgtaagttattacttaattataagttaatataatagttatgcatatataaatacattaattatatatcttagtttttcattcataataatgaatggatttagagctttcaacatgtaaattatgtaccttagtacataaaaatcaaattctatcttaagcacatgaaaacattcgaattaactcattgaaacctacaacctttgaatatgccctataaattaaataatttatattagattcaattgttcaaattttatgccataaaaaaattcatttcaatataattagattttttttttgaactagaaaatgatctttattcaaaacagacaaaaaaaacaacaacaagttgtacaaggacagcatccgcacaaacccacactaccaaccagtaattacatttataatatacctctccagatttttttactctcaatacaacagtttaacactctaattttaacagcccttttgacttccccactaatataactggcagtattacatttcaaatcaaagacacaacaattcctattgatccacacaaagtacaaagtagccatgaccacatcattcagaattttatcacgaaagttgtgagaaggtctcaatagccactctctaatgttggtt

SEQ ID NO: 206088 - DNA, 845 bp, Cannabis indica
tgaagcttgggctagggagcaattttgtgaggaaaccattaagaaggcgtggggtttgaggggtagtaggagtcaaaacatttgtggaaggttgagtgatacgaggattgctctccaaaagtggaaaaagaggcgtttggggattgcgatattctgattagagaagctaaggagagattaggttggatacaaggccagcccgtgttagactctcttttgcaagaggacgctgccttacaatcaaaaatttctaagttatggactaggaaagagtctatgtggagacaaaaaatcaagggagatctggttgaaagtgggagatcggaattcaaagtttttccatgcttccacggtaattagaaggaggagaaatgagatttctgcggtgaagaacaatcttggcggttgggaaacgaaaaggcataagattgggagtgttttcaatgagttttttaaggaattgtatagctctgaagacacaatattagatgaggccttctatgattttctttctcctgttgtttcggtggaggagtttctatagaagatattgggagatagtggggtgcgaggtgatagacatggttcaaaaattcttttaaacagggataatggagggacaattgaactatacttttatctgtttgatccctaaggaggagaatgcgtgtacggtggacaaattcagacctatcagtctgtgtaacttcgcatacaaaataatttcgaagatttttgctaccagactaagggaggtcattgataagttgatataccccttccaatcagcttttgtcctggaaggtggattgcgaaatcttcgattttgactcaagaattggttc

SEQ ID NO: 206089 - DNA, 1085 bp, Cannabis indica
aaaattcaactggattatttctttttcttttcctctaaaagttattttgttacatgagctccacaattgtgagtcaaaaggggttcttgttcttaaagatggtcaaattaattatagttttataaagattgatatataagttacatatgtgatcaacttatataatgaaagattaaaggaagactagtgatcaataagtggagcaatcataacatgtatgatcatcatgagccctaccaaagaattaaaactcaaaagagaagagaaattagagaggagaaaacaggttaaggcaatggaccctataaacacccataattggtgctatcatgtaggaccaattctcttatcatttgaactcaagataagatgagtaactttaacaaaataaaaaacaaactgtttaaaccgccttttggcgaactgtgtccttgttgggcatgtccaaaaagtactaaatagctagaagagaacacaaaatacattgtaactagctagcacttttgactagtcttttaggtataatattatatatgcttcatgcaaaatagttatatacatcattattcattatcctccaaaaacttttctacattattgtcttcattaattgtggtgagtttaagttctggggaaacaagcttttgttgggttggtccctccaaatattattttagcttggatttgatctccttgtcttaaaccaaacagcatgagcttcatattaaattaatataatcctctacgccttgtctccaatttggaaatcgtagactgctcatccaaacacccccttaattatgggacattgtggtcaaaacgtgaaaactcgtactgttcggaaacactgctactcttgatattatgagtattgctattagacacccgtaatgcctagcacattctcgacatgtcacgttgcgattgactagccatactacctaaaagttattatattaaattacatgggacccgatacttagttagaccaatagcgatattgacacataagaggatgttaggcaccacaggtaccaatatcatttttctaatattattgttatgtattgccttccaacccacat

SEQ ID NO: 206090 - DNA, 601 bp, Cannabis indica
tgtgtacaaaaaaaaaaataccacatacactgttttttaattttttttatttacagtttgggttctaaagtggttctccagtatttcgggtttctaaacaattttttattgtgatttaagttgcagcgctaattgcaataggagtttcaatgtagaattccgtaaaaatataaaaaaaaaaaaattagttttaaaatagtaaaaaaaaaaaaaaaactaccaaaaaaaaaatcataacattaattcataaaacatttttcacactcacaatgattaaatcattattcataaaaataatgatttattaattaatcaaatttttgtgtatgtgtggtacgtatattaattcgcatgcatggaagcctacgtacgtaattaatgggagattctcttatgtatcgtccctcataattttatattttattttctttattattatattattatttgtatcacttaattagatgtattttctcaatagcactacatgcatctttctacttgagattaattaaaatatgtatcaatttatatgagattaaaatatgtaccaatttatattctaacttacaaaattccacatgctatatatggagaagta

SEQ ID NO: 206091 - DNA, 1006 bp, Cannabis indica
tttatattattaatactaggtagactaatgaaattttgtcagtttggcacttaacagactagtcaagttgattcattagtacaagcacaaataaatcaattaagagcctcgctcaaggcctggccggctcaaaacttatagatctagaacttaaaccggactagatgatcatcattctctctaaaaatcaacgctctcgacctaccgcccaagtttaaaatgccaacacaaaaattgtatataggcaaagaagattctttgtctcacattaaatatttgaaatgcaaatggacttacaagcggttaaaagtaaatatacggtgtaaaatcttctcagctactttggcaaaggctgcctggcagtagtacttcaaattagctccaagaaagtttaattcgtggaattctttcatgttagagttttgtacacagttttcctcttctcagcaactcccatctcacttagaaaacttgatagaagtgaagcaaataacaagggaaccttcgagaacttgcatcaataaatttatgatagaagcaacaaaggtaaaagggtttacagaggaagagaggctggccgcaatcttaaaaggtattaaacctctagaagaactgttgaaagacataaaaagacatactataggatcaataaaagaattctcaaactgagcagataaatttataaagctcgaagaagcaattgaacatgtaataaaaatagagtaacattacaattatatccttcaaaaaaataatattattaaatgtgaaatgttttggcacaaaagtcgattacaatagatacaattccacctgacattagcaatttgtatcgtatgtcaaatatgaaaaacaatagtatattcaactgcactcacagccacattatagatttttttttttacagatccatgcccaagactatatcagaatcatatataaaaaaaaaatatatgaattagtaacatttgccaacattaatttatagaaagggaaaaaaactata

SEQ ID NO: 206092 - DNA, 716 bp, Cannabis indica
aagagcattgctaaaaggtaccaaggtgtatagcaccttctctgtcatgttgggattggttagtgatactctctaaaaattattatattaaattacatggaacctgatacctaggcagcactggtaacctttaacatttttcttttacaaaatatataaagccgacattttcaaagattatttaatttatcttaataaaaacgttttttctttattgaaaataaaaacgttagttgcaagagactttttgcttgtacctaaaaaatattaatgttctcttggaaatggtattaataaaaaaaatgtaagataagcactgacacgatggaatgagttggatatagaaaataattaatttgccgtacacacgcagttgagtcaagtgccctacataatctaacttgatacgcttcaaatcaaaatgcaaattgattaaataatcatcattattttaaagttctaaaagaatttgttttaaaatttgccaatacagtcagtcaatactcattataatctgtcacttgcccatgtagatatcatattatattccattaagcatgcttccaaccagtaaagcaccttatcatgtcccttcaaaatcatgtgctctaattattttttttaacatttggtagttgtgtttagatacaactaatgcttaatgacatttattttttactatttggtagttgtgattaaaaaaataaatttaaata

SEQ ID NO: 206093 - DNA, 634 bp, Cannabis indica
ggcaaaatcagtattgtcgaaagctcaaacagtaaaattgctaattattcaaaaaacaaaaattgaagaatatgtgttaaaaatatgcttcatcgagcgagttaaaatagctcaaaattttacaatatgaaagtgttccgctatatatagtgaagtattattcattctttaaataatattttaataatttttctctcttctctttctatttttttcatttaatatatattttttttgtttatataagtaaaatatattataaatataatatttaaatgatataaagaaaaaaaaataaaaaaaatgatgtatgatataatgtaaaagtgtaagttaaaatagagaagtaatttacggccaaactccttgaattttgaagtttggcatgatcaaccccctagactaaaataatttgggttgaactccctaaatttcaattttcttttgctatgtactattttcatctactttggtctgttaagtgtcaaagtagactgtcacttcccttttttcttcttcttcttttcctcctcttctgcgagtccaccccccacccaaatctttgtacaatatatatcataataataccttaatccatacctaaacataatataattgaaaaaataaaataaaa

SEQ ID NO: 206094 - DNA, 803 bp, Cannabis indica
aacttgtgactaaaagtgaaaaaattgtgactaattataaatcttgattcctatgttgtgactaaaagatctatgaataaaagtattagtcattttgttgtgactaaaagtaaaaaaattgtgactaattataaatcatgattcctatgttgtgtctaaaaggtccatggataaaagtattagtcacaaaaattacaatttacaatttgttgtgactaaatatatttttggtcacaatacttgttgtgactaaaactaacttagtgacaacttgtaaatatatgttttattcacaagtaacattttgttgtaattaaaagtcacatttagtcacaaaaaaattatattgtgactaaaaagttgtcagtaaaaatagcagttttttgtaataaatgtgaaactctctaacagttaacatataataatatatgattcttaagttacaaaactaattttagattttataacggctcttatattacaaaaatgtatagtattaaattatatattatataatttaattactaagcatctaattacatatattaatctcatattaatatataattatacgatattttaattttattataatatttgtttgaataacaaataatataacacaatatatatgcatcatgttatcatataaatatatatgtataatgcatatggatattcataatgcaggtattaaacatgatttgttgttgggcagaggaccaaaattctgatgcctacaaatctcatctttcccgaattaaagattacctttggctggctgaagatggtttgaaaatgca

SEQ ID NO: 206095 - DNA, 601 bp, Cannabis indica
taaatatggaaattagattatggtcaatggtcatttcatataatattttcaccgaatagttgattgacatatcaaccatgcctctaagattcttaaaaaaaatttatctaacaacattatcaacagcaaaattatataatttcaaactaaaagcaaaattacaattcaaaaaattatacgaaaaatttattataaataaaaataaaattattaatacgccaattaaagaaattttcaatcaaaactttaataataattattgaatcgctctcgataataataaaacggtacgtccactcagttaatgtttgaagcgctagcacctccacttcgccaaaaggattagggtggacaactaattattttaaattttcatagtgaaataatagataattaattaatttcattaattaattccaaatcaaatattgtaattagttggttaatgacatatagtaacatttaactatactcatttattatggatagtgatctctcactgtattatagtttcttatcagactttattttttattgtgacatatatatatataacatgtaattatttctaatcatctagtactttatatattatttttta

SEQ ID NO: 206096 - DNA, 855 bp, Cannabis indica
tttctggacttgacaagcatgtaatatggggtgtaccaatgacgacccctaccaccggaggtttaggctgaattgctagcacctgtctgtgcacctggcaagagatggaggccagcccttcgactgctgactgtccctgttgggacgtctgggcatgatttgctttgggagttttggtaggagagtgaaccatacactcttcccttccttcttccttgggcttcatggcataagggaattgttgaatttccttctttttccattatgttggtcagagtcatcgttgttgcacttgcctccaccattctcattgtttgagaatcgacagaggtcgtctgtgctagtcggcagtgcttggggcgctatgaggccttgtgtttatttgtcatcatcctgccctcttgtcaagactttctggatagcttcttctaactttatgaaggcatcatctcgctgaagaaacttttccatattgttcattgagatcctcttgatttatttccaaaagtcagtaactggtaggatgcctccgagtacagtcgtacatcgaccttcttttgttaggcctttgaccttggtggcctcagctatgaactgttgaatgtagtccttcaaaggttcatcttgtttttgctttatttcgacaagatcctctattcgggcaggtatttgtcttgaagcagagaattgaatacagaattctcgggagaattcttcccaagagttaagtcttctgggggccaccttgaaatacaattattgggctatttcaaatagagttgccgagaagatttggcatcgcacatattcagatactattggagatcaattcggatctcaaagtacttcaggtgt

SEQ ID NO: 206097 - DNA, 1257 bp, Cannabis indica
  modified_base (1238)..(1238): a, c, t, g, unknown or other
atgtataatgtaaaaattgtataatctaaaccctttcaaacttaataataatattattaatatttttatgccataacagtcaatatcgatcaaatgctgcggtgaagggtgctcgagactcgagtatagtaggtatcaaatctaacctaaaccagaaaaataaaaatattaaatatatatatttgatattgagggaagggggattaattgggacttcctttttgagaatttgtgaatagaagcgtgaaaccatcacatattatatacatatttatacatctggctttttgtggttacattatttgattataacaatataattatgtatactttaaacaaaacactagggagttagacttatagtacacactaataatataattaattgtattaggttgttctttcggactgaacttcatgtgctaatatacaaaggtaaacatccaactaccatatcatttgcaaacaaaaataaactaaagagaaaaaaaatgtaaagaaagaaatgattctcagacacagtatgtatggtatatatataataataataataattcgatacattagttgttatatataattaatgtaattaatgaaacgtttaatattttagtggtgggtaaaggttatgaaagttatgatcatgaaagcgacggctgctgatgaaatgtaccctgtgtgtttaattttgtccattgatttgccccattaccaaccaataatgcttaataaaacaatgcagatctattaaaatggcaaaatgatacttctttaagttggttgttgacatttatataacacgttattgaatcatttaattttatacaaagtcctaacttttttcagctagttaccaattcaaaatattcaatattataataaatcatataaaaattacttaattaacaaaaaaaaattctcaaagattagcaaatatactaataggtaccgccataattctaccaatagtaataaaacattttagaagatatttagatattactggtcccttttagtatttttcaaagaaaaaactctccttttggattatttaccttttactaaatcaggtacaagcacacgaactatcattttccaagtatagttttttcctacaaatatacatgacatgacgatccaaatttatttaaaaaaaccaaaatatttatatattttttgggcataaaaaaaatacttatatttaccatcgggaacactgtgtgaattaagaaattgcncaaaaaaaaaaaaaaaaac

SEQ ID NO: 206098 - DNA, 1096 bp, Cannabis indica
aacaaccactttttttacacattataccaccaattgaatatcgactaaaaaaaaaaaaccagttacattgaacaaataattaaaaaatctaacacaaaaaaaatcagttacactaaacaaccaattaaaaaaattaaacagagaaaccaattacgtaaaaaattaaacagataaaataactaagcaataaaaaaaaaaattaaaacacaaaaatgagttagtcaaaaaaaaaaaaaatataacacattattttgtttaacaaatagcttaaaaaaattaaattatcagaaatcaatttttttatcagctaatttatcttttcacaaaatgaaactaatttacctaaaataacaaaagaatatatataaatttaaagtttaattacttacaacacaaatcaatttcaaacccgtgaaccctcgtaataaaattataacaaaacataaaacaataaataaagaagataactgaaacgactttatcagttaaccaaatagaaaaaaaaatacacaaacaaactaatttaaaaactcaaagaagatgggaattggttttagatcaatttcaaatatgagagaactcctaccttttgttttatttgttgcattattggccactccgacaagttttgcccacgtctttttcatcaatcgattgatcagattgagaagtcttatggcgagttcatgaaagctctccctcagcgtaatcacaaaaatatcggttcaaggtggctccgaaccaaaggctggtgtccagcagcggcggcggcgactggaacttctgttcctgggatgaatgaatctgccaccattaatggtggagctttcccagcagcaagtgccgagaatcagggggtacggccgagaaggagggaggagatctgggaattaatttggctagaatagggggagtgatttggggtgatcaagctggttatttggagggttaaaggaacaataatgttaaggatttggggaaagatatcattactccacaaattgatagtcttgttatttatgataaataaaaaagaaagatgacaaaagagaataatgaagagaatgctgataaggaaaagtgtaaagcccgctta

SEQ ID NO: 206099 - DNA, 676 bp, Cannabis indica
taaaaaaatagtatataggataactcccctatatttatcaaaattaaatatctaataatttagaattaaaatctataccaaaattataaattgtttgaattaaaatttaaattcacatatagatttagttattgttatagaaatttttaattagtatttattataattaataatttattaataaccataattaaaaaaagggaaactattaagagttcattattttaagttagatagaagttagttatagaagttgttcttctttatttgttcagcttggaaaataattccgttcggtacacttgtatatataccattttattttcataaataaaattaagtttacattctctaatatggtatcagtgtatacaacttttattgtcttttgaataatatttcgcttttagtatctaaattttctgaatcataaatcgcacatgtctttagatctgttaatactgttgcccatttattggcacagtttgctctttcggtggaaactaattgttcatgctagaggaaatgcctctaccgttaatgcctattgtattgtaactttccagttaattaatataatagcattttatctacaaaaaaaaaaaaaaaaatagtatacaactttctctgattttctcctttgtttttctctaatatgttgctgcctttatactcc

SEQ ID NO: 206100 - DNA, 707 bp, Cannabis indica
agtttcacgtggcagcctcagtaacattctccacgtggcagactctgaatattgttctccacttgagtgtgcctttcacgcgcatttttttgtctaatcttatttctctacagtatttttgtaaataccaaactttaaaaataatatttttgtatatattaaatattataaatgtttattttttctttgaatagtataaaggtttattttaaataattttagcttaaaacagaaaaattctcaaaaatatacatatattacatgtgaatttttaacaaatgacttacaaaatttaattatagaaaccaattacattaaaaaactattaaaaatcaaacaaaaagaaaccatttttataaaataaacaaattacaaactaacacataataactaattacgtgaaataatataaaaatttttaccatgtagtttaaaatcatcaaacccacacttaaattgattgaattgtcataaaattgtatgcaaaaaataataaaagataatgataaacaagcgtagtatagtaccactttaattttaaaagaaagacataacacattaaaataacaaatcaaaataaaatattgaaactagttccatcaaacactataaacgtaattgatcaaaaagataacattaattaaaatcagttcctatacaaacacaacacaatacatgctctaattcgtcatgctcatttcttaatg

SEQ ID NO: 206101 - DNA, 1014 bp, Cannabis indica
tatgagttaataacggaagtggcaataacggtgtagaattgtaacattagatatttttgccaccaaaaataaacattaagtatttaagtgtataaaatcggaaacattaggtatttatgccgcaatttaacatattgttgtatatagtattaataataaaattattaatattaatttttattaatttataaagagccaatatttagttaattgacaaatattcttgtcaatattatttgatataattaagttacccattataattttctaattgattttttttaatattttttatttttataaaagttgttttcattttagggctatgttatttttattttgagattatgttgtttcattttataaaatttatttcgatgttatgatgttgttttcatttttataaatgaataaaaaaattaattataaaaatataaataaataaaattataaatatgcctttccattttaagattatgttgtttttcattgcaaagttatactgttaccattttataaaaattatttttatttcgaggttaaaatccatttattttttaaaataatttgttcttttacttataattttatttatttaaataactggatattactcaccctggttaaaattttctgcgtcgcctcatttcgaatttctatttgaacattgcgattttgattatttttttaaccaaaactgcacttgtagtttttataatttctcaaaccaagaacaaccacatcacaacactacaaaaatcaccaaataattctctctaggcattagagcatcttttgggcaggccaaatcaaaatttacatgcaagagagagagcttctaatgtagcaattgagagtgtaatatgcaatgcaagacaagaaaagacagcatctatctttcaattcccaacattaactaacgacaattgaactaaaatccaaaaactaacgacattttcaaagcaacttgcttgtatatatagcacaacttcactaaacaaacactaaagtatt

SEQ ID NO: 206102 - DNA, 1234 bp, Cannabis indica
aaaaaaaaaaagatagtgattcatcatctcattataagttggccattaaagtaggtggggatttctgattcttgaatgctttttactgagcgtgtcttaaccctcatgccctattaaaatcactatttcaagttccttgttgcaccacaaaaacaaagtttggttttggaccacaaaaataccttcaacaaccacacttagtcagtcaacaaattgggttcagctaataccattactattggttttgtaactttggattcagctacttttctttttgttatccatgtgtgcccaccattccattttcttatgcattcttccatttgtatctttaccaaataatgggaaggaagctagggtttttttggtaggaaacgagagtgtgaaagaggcattattgtggttgataaacttgatatcgttgtcctgtccatgggggatattacaccagcctgtctaagcttgaataggcactaattaaagcctatagtattacaatcatacctttccactaaaattacacttaataaagattttattttatattcttatttcacacacctgcacaaactgtctacattgtaccacactgcaagaaaaatgcagtttgaaatcttttacaatgtggttgcgatttatattttagccaaatcatgcgatacgatgtagtttgcagttttgagtttaataattgcggttcaatctgtactgcacatactactataaatatgcttatttttttaccatatatatatttttttttaattttatatgtattagttgaattacaaaaaaattcttcataattgaaaatactacaatatatatgaacttaaatatttaatttgtagattttatggacacttataataattttttttaataattcaagagcgaaaataaattatattaataaaatataagagaaaagttattttttttgcaaagtaaaagaaaaggttgtttgacagtatttttgattttcagtttttaaaattgtatttttaaaaatgagaatagaaaataacttttgtcattttaaaattttaatggtgtttgactcaaattttttaaaactatttttagattttatttttactaaaaaaaatttaatattctacaccataccatattatgaacccatcctatcccggacccaaatccagacctggacctgaacccagactccagcccaaatccggaccccaccgaaccccgacccggaccccggacc

SEQ ID NO: 206103 - DNA, 1133 bp, Cannabis indica
caattcacaatttttcatttctcttgtccagcacactcagaaacgaagacttttgagtctctcatttttgcaaaacagcaacatctccgagaaccggtgaccaactttgcctgaacatgtaaatggactaagtggtgtaaaactattaggaatcttaaaggaaataccttggacgtttctacacttgccgagcatccaggttgatgtcagatgtcaacctgggcgctgggactgaactaacttccgtaaaacaaccataacttactcaattttgatctgattgaaataattcaacttgtatttcaaagctaattcaatgctctatcatgtcatgtctcactctccaaacgtatttctgaagctatcatcttcaaaattgaccctcaagggagttacaaaaataagctccagattacccacagctagacctaccgagcaccaaaatttggccatcaccactataaactaattttcaccgttagatcatcatcaacggtcaaaaataattaatttgtctttttctcctatttttgtgggtctcctttacctataaaaggaaggttcccttaactcatttttcacatttagaaaactacccacaaggtcagagcttctttcttagactttctctctagagtttggagtttctaatacttaatctattgatgtaattaccatctctttagaaataaaaatttgacgtagatgtagccccattaccattgcgatataagggtgaactactataaattggttgtgtctctcttaattacttaattacttttattcattctcgccaatttagcgagcgggtgtggcttataagtctagtacaaatttctgagtcaatattttggtgatttcattgatattcacagcttaagaaagttactaatcaagatggttgcagcacgttctacaagtgctcacaaataaactttagcaactggtcgaacaactgggggcacgccagttgaaggagttggaactaggactacttctgcaccccgggcgccaggagcaggccttgaaaccagctcctcaactcgtcatccaaggccaccaccaaatgctcccaagactggcaccaatgaccagaccccacccggagagccacacgtggagatagaaga

SEQ ID NO: 206104 - DNA, 532 bp, Cannabis indica
cataaatcagatagatatgaacacataactttgaaactaaaaaggacctactacccaattttaatatatacaagtaaaataaaaaatacccagataaacaacaaatattggttggattacatgtataattgaatggccaataaaacagtcataaaccaaaaatataaaagggaaaaatgatagtgatgtggttgggttgggtccacgacacaaaataatataattgaattaaaagtaggccatatagttatatttgttgtatttttttcacttatttattaaaaaaaataatatcaaaaagttgtaattattacgtcaaaaaaaatcagttgtaattatgaatcaaaatgaggcctaataaaaaccaagccgttacgccgccggcaacggcaacccaaacggctttgcaggcgcctccgccaacctgtttaacacgtgtgtggttttaatgtttgtcccaaaccaaacttcttttttctattcttattattatccaaaaaaaaaaaaaaaataaaaaaaaataaataacaat

SEQ ID NO: 206105 - DNA, 934 bp, Cannabis indica
aaaaaaataattaaaaaaagaggctataattagatagaggcaaaacagtttaaaaaggattttgaaatctctggcaaagaattgatacgtaagagtaaaacagaaaaaaaattggaagaaaaaaaaaattgcattattcaaggtcattattgaagcttcacaagggtaagtgaaaatccataaatggatcgacctcttcttcttcttaggttttttttttatttttgtttactacaaagtgtcatttgaatttcctctaattcactagacttcagaaaataagttaatgtgatatataatcaaaggggaaaggaagagactaatattctcatgttgtcaatttcatcagacttttatatttctcttcgattcattagacttcataaaataagtcgatatgtgatatataatcgaagaagaataatataaatctttatggcgttatgctacctgatctattgaaaagcttcaaggtttccctttggttcactagacttcagaaaataagtcaatatgtggtatataaccaaaggaaagaataagaaatccaaaaaaatttttatgttgctaaaattatcataaaatacggattcaatttgaaagaaaataataaattgggttaatctatttgggaattatcaatgcaaaataatcaattactcaaattagtcgcttccacttacttgctgatataaaagttatgattaaaaaaaatcaaaattaatttgatataaattttcaagtcaaactaaagtagccaatttatgggcataggcataatgtgtggcttaaaatatatatgttagtgatatgacttttttttttttatatatatatgtatcaagatatatactgtcaaaaaaaattgtaaacagaaaatatatgtatatataaatatgtaaatatatgtatatgtatcattagtttaatagtg

SEQ ID NO: 206106 - DNA, 654 bp, Cannabis indica
tagaataaatgaagagaatgagtgagttattgattgcaaaatatggaactaaattatgccttagtgttggtgcttggtaattcaatgattggatttggatcaatctttcaaagatactcagtacaaataacaaatccaatcataaaaaattatccaattcaatcaatcatatcttacttttcaaacatgatctcacgatcttagtttaatatctcgatgtaaaaagatgctagggcggtataaaatgttaagcactaatgttttatttaagagaaactataaaattatatttagaagagatgaaagctcaaaccataacaggaaccctctgtctctaaatttaagcatgatttccattccatgcactggtatgaagttctactcaataaaaaacaagataacctactgcataattaaggctaaataaaaataagatctaggcattgtaaaagaaaattagatgcacaaaatatcttaacacgaagactataatcatcacaattgaaataagaaaatgtgcatcagaaaataaaacgagatcttagcattcccactggccttccatgaaaaacacaaacaaatacatttctactgacaaatctgaagtaattaaacaagctattaagtcttcatactcacggaggagactggtat

SEQ ID NO: 206107 - DNA, 582 bp, Cannabis indica
atgttcatgttttcatgaagttgttttttttcttttcttaatggtttatctctcttgtgtttgttcacttttcaatgtatgacttattgtaggattcaagtttacttaatagctaaaattttgtaatgggacaagtgaaaactgagagcatgccctatatgtatatatgttatgagaattttacttttagtctctacctcttcccttcgtgttatatcatccttattagtctaattaattaaattttaggtgtcaagaaaataaattttaaaaaatattaataattaacagcacctctaatagtttaatagagtactaaataggtagtgtattattattattcttttagctcttttcaataaaaacttttccattagtgtgctataagttgtgccaaattgaacacattctaaaaattagaccaaatttaacacaagatataacattatgtaaaaattagtacacaataaatactacttttttaattacacttttaccaataatcattaataaaatactttaatacatatattttatttacaatattgtcattagtaatttttttaattatttaattttatt

SEQ ID NO: 206108 - DNA, 1205 bp, Cannabis indica
ataaaatccccacaatgtgacaccttaaaaattttaataccatactaattcacatacacaataattgattaatagttttctaaattatttattaaattaaaatttgtgggaagtgatattaaagtgcaccaataacattatgctatcttttatggtacttggcaatttaatgtgccttttaatattgctgttattaatattacatatttttattagcttctaattatcattttgtttttgcttttttcttttttttttttcttatgaatgatctttgtttaattctttttagtaaatatttttttgtactattattgttaagtggcactttaaggtgctcaatactatatatctatgtagtacccaataattagttagcagatttctaaattatttattaaattaaaatttgcatgagttgatattgaaatgcattaatatcggtatgctaccttttgtagtgcttgacacctttatgtgtcccttaatattttcgtaattaaaatgtacatatttttattaatttcgaatactagaattttaaatttttttattattatatataagtttgtaagaatatttccaaatgtaaaaattgtattatatatggcggaaaaaaaagattttttgatatatttacattaatttttagtattatattccaatgcacaattgtaaaacttaatgtaagtttttttgttgtttttatttgttatgaatgattagtaattacttttttacaatttttttcttacaaattatttttttgtatatcttttctacaatttttttacaatttctgtgggtttttgttgtattataattttttttgtgaattatttttttttattattaatagaatattaatatttggcaccttaagatgtccaatactagatatgacacttaataattcgttagtagtttcacatattattcactaaaataaaatttgtgagacctagtattgaaatgcactaataacgatattccaccatttatgatgtttaacaactcccttggtgtttttcttatcattttcaatagatgatgtataatttgagttaaaaaaataagtcaacattatatttggccaaaattctgtaatagtgcaccaatacattagggcaaaattaatcaattttttgatagataggtacaaaaatgtcaatcaaagcattgaatttttattaaaagtatataaa

SEQ ID NO: 206109 - DNA, 703 bp, Cannabis indica
atgatgttgccgactgacccaggggttcaagtgccaatgcccacacggttccatacaacttgattactatttccaatattaattgttggatttacatacgatatgagaattataataatttccatgaaccttcttggtcgaccacaaaagtgatcagctctctctccttatctgaatgatatacaatatgtacaaaacagagaaaacagaggactttgaagtcctcacaaatatgctgaaaccaagctatatcatctttaactaaccccccataatttaatctatacaaaagtctaattttaagtaacttttctgatctcaactcaatatgcacatattttactctccaagaagctgataaatgacagcactcaaaattgatatacaaatcaaaaagcttttatactatacattaaaacataatgaaaaaaattgcggtataagtatccaaaaattgatatttgatgtagataagtttttaatctcaaaattgatggtaatagtctccatggttccttttctcgtaagtctgttacttcattatttaaactaatctgttaaatactaataacatgtcacatgttaattttttattagtctagatcataattttaatagaaattaatttaaaataaaaaaactaaaaaatttattttaatattataaattaactattcttttttctttattcttttctttttct

SEQ ID NO: 206110 - DNA, 642 bp, Cannabis indica
gagtaggagattttgtttattatatataattataactattgacattgtaattctaagatttttgaaatattgaggtatcttggtcagttttggcactctgctggttgagaaaggaagaaacttgacattttgtttagatcagttgttgtgtatttcacttagttgaatacatatttcctttatcaaatagtgaaaattgcttttggatagactgaattggtttgtggacattttattttatatttattttgtcaaaattacatgtcaggatgatatttttgtttaatcatcttcttacttttatggtctcatcatatatgtactaacattacttctcctttgaaggttgtcttttggttttgacaggattttgcattgtcaagataatgaatggtgggaattctccaacaatggtgcaatctaacttcaaaaagattactgtggtgtttgcttttgctgggaaggacttagtagacatttttttatttacgtttttttttttgtttttttttttgactaaggagtttttattatgttagtttggaacaattttatttgcacacatattagatattcactaccaaaaagtttacttttagtcacaataaaacttgtgactaaaagtaaaaaagttgtgactaa

SEQ ID NO: 206111 - DNA, 910 bp, Cannabis indica
gggcatcaattttgataatcttaagcaattgtttttgttcttcaagtattcccaatagaattaggactttgaattcccttgctcttgtctggggggttattttcaaaaattagttagcaaagaaaaaaaggaaaaacttatcatttttttacttatctcttatctttttctttgagaacttgaaattttcttgtattttttttttttgcattaggataaattgtacttgaatcctaatcctactgttgacagtgaaaactcatcagctaacttgaggtcaaaaattctaaatttggatgtgagacttaggaccaagataaatatttagagatataaaaacctaagaagaaatgtagaaactatggagaaagatagaagtgtatatttctttaggtcatgtgttacaataattttccaaccccctctctcatctgagaatatggtatttgtaggctttgatggcttgagatacacttgtgatcctcaagggacaagctggccttatgtggttgcaagttgcaggtgtaggaggtggtcctaagttacaggagtagtggtttcagagtacctattgtcaggatgccaggggttgcaaacaacacgtctccactacttgtaccatctcaccaccaggccacactgaggacgtgggtgtagtcggtctcatgccactttgcgtgcaagcctcgtcctttgattccttctttaacggtctcttattcaatgcgtatccaaattctcccttcacctcacattgttcataccatatgcacacttacgggctcgcacgcaagcccctcacacaccatgtgctcgcacgcaaaccgccccccccccaaccacacacacacatccacataggctcacatgcgagcccctcacacaccatgggctcgcatgcgaccccccc

SEQ ID NO: 206112 - DNA, 819 bp, Cannabis indica
agtagattttgtttctcttcattagtgtgtgttctctcaaattgtgtactaacagaaatctatatttgtaccatactaacacccaaggacgttaaaccctgagggaccactttaaaaatcaccttgcactctctttgccacgatcctgcttctcctggtggtgccaaaccaacaaaggcacctcttcctgatatacaatcttcattgatgtacctaaataaaaagtgatcaaattcagaaatcggggatttctaaaatcgtaccacaagtatgtaagctgcatgcatacccaccttaaacacagaaaggttggtaacatggaaaccaatggggaaagaaggcattatacaactagaagtagttgtatcttaattggatacctgtccaaaacaagtagtctaccactgacattgcctcgttgatctgatttctgaaaatcctcagaagctgggaaattatatggccaatgttgaacttctgtcatcatctgaatattaatttaatacaagtttcattgtcaatgatggtgctatgttgtttatctctatttgtaataataataatattattaaaaaaaaaaaaaaaaaaggtaactgtctctcatgtcacctgtattttagcatcctcccacagccaaaaggggtcatctcctataggtgcagaattgagatatatgaagacaggggccaaagaccttcttccatggttcaccacctctaaatttgggcaccagatctgtcctagcataatgagtcactaagaaacatctaatgatccagtgaaaacacaaactatctagaatgaatcatatggccaaca

SEQ ID NO: 206113 - DNA, 649 bp, Cannabis indica
tatataattaattaataaatttggctaattaatgtataaatagtacaaaattcatccccatataaatagtacagtacttatgataatcatcattatagtatatgaatagatattctacgtatatggtacccttcattccacgtggccattattatctatcatgatgatctctttttagctagctaagatcagatcacataatggagcatccagtcccgtcatcatcatcatcatcatcaccgtcgctatacgtttgatcggacggtaaagaatacatctctgaatgatgagagaacaaataatcaccatgcattaatgagggagcaaaataagaagcgttatgggttgggtaacttgtattgtaacttaatccgtacataaccggagtttgttggttattgtaactaaaagttggcgggtaaggaaacacgtgctgaattggttgcccatgatgatttgctgacgtcatcacgttcatcggacctatatccccccggagggataaaactcgccgggattatcgccgccggcattattacacgaattattcccgttttgcccacctttcttcttcttcttctttttcttctttttggcaccgtcgtacttccgccaccgccttcgccgttatctccatcggcttcgtcgt

SEQ ID NO: 206114 - DNA, 614 bp, Cannabis indica
gtttgtattatatattttgttttcgtttttaaattgatgaatctcaaaaacaaaattatgaaaaatggccacttttaattaatcatctacatttgtaatatgttgtatttaagacaagaattaattatgaatgaatgacgtgaatgtaatgttgactttggacgtacgactacataaataataatcataataattcttaatttaatccctcagagatattatttaagtgtttcccaatttcattgacgcaatatcaaaagcaaaaaatactatttatagttaatcttttatttttgactagttaatcttagttagtggttaactgagtttatatataattttgcttaccaataattaatagtgttttaattattcattatttgattcttctacttctcctcataaattaaattttcactctttctttctctccattttttttaataaaatagtgaaaatattaattaacctaaaaataacaaaatgaccattaaaacgacaccgtacgtggaattgtagtaacggattttcccactagtccgagattctcgggaaatgttttactttctttttattctctcattatccacaatttaaaaacttaatataattaa

SEQ ID NO: 206115 - DNA, 749 bp, Cannabis indica
ggcaaaaccttatttaccaaagtacctgaagaacgccaacctacataaccacaccttgactgcatcaagacatcgcctactataacaacattcaaaaaatagatgtttaatatattcaatatacaacccacaaacaagcatgtcaatttttggcaaattttgtatctaaaaagtctttctctggtatgttatcaatctaggacagtcaaccacaaaatatatttggttttggaatattgaatcaaccccaaacctgaccataccacttcactttctctgctaaagaggagaaaacaaagtagccaaaactgattgaatatttgcaatgaatcagttgttgttcagtcaagttgttgcttcatttttttcttcttcactttcactacttgtctccaacacaaactgtcttgaatggatgattcatattcttaccatttctgtcctttcaaataaatactatgtacctatcttacccataaattatcatatttagaggccacatcccaaacatatttatccaaagctgcttgatttcattggacaacattctgaaaacctaatccacctcattctttggtttacaaagaagagaccatgatacattccccagactagcatgatcaacgaatcttttccataagaatgctctacaatagcattaattctttcaagatactttttggaaccaacatgatatgagctcaataagtatgaatcgaaaattgaaatagaaattaattaatgtaact

SEQ ID NO: 206116 - DNA, 830 bp, Cannabis indica
ggttaatattattttagattctatttttgagaaatttacccttcatattcttcatttaaatgaaaaattacaccctctatttttaaaaaatagtacaaaaaataccttgaactcattttttgttaattttttttaatgtaatcaatctaaagtcaatttttaactcgaatagatacaaaaattgtaactattctaatcatagtatctctaagccaaattattattaaattttaatttaatgaaaatagaactcagaatattcttttgaaaagtatagagtccaaattattttttttttaataaattgtatccattaaaacaagaaatcaaagtttaggatacaaaactaaagaggaaatctagttcctttccacaaagcttcatgatctaagtctaaagcatacttatagctagacgatgagcgacttcattagcccctcaaggaatataggtgacagtagctttagagagaaaagatagtaagctttgaatctttgttgcaaacaatttcaaatggagattatgagaagcattgttacaaatatagtgaacaaggattttatagtccgattcaatagaatctggctgaatggaatggtttctacaccaagtaagagcatgctggagtgtgtgggcttccattatcaaaggtgagtggagaccccaccatggtgttgccatagtcaaaagtacttcgctgtggttgttttgaagccatactgaaacttattttgtaattttgttcatcttgagcagtgtccatagtaagctttagttgatagggacggtgtcgctatctcatggtatgatggctcccgtggtgaagtatg

SEQ ID NO: 206117 - DNA, 537 bp, Cannabis indica
agagaattagtagtttaggatatagttaggtaaaacaaataaaataaaacctaacctctaaaatagaaaaagacataatacttgctttgtccccaatgctttgtttggtaaaatagataaaaaaaaaaaagccaaaaatgaagttgaacactatatagtgagaaaaaaaaaaggagagaataatcctattatttcaaataataacaaatatttaaaaaaacttattaaaaataaaataaatctcaacaatatccacgatctgcctatgtagattgttttttttttggataatttgcaatctataactataatttcttattattttggccccttctttatcttattaattatcaagcaacaataagctaaaaatagattaatttcaaaataataataataataataataagctaaaaatgatggtctcaaatccatggtacgaaacaaggtgtaaaaaaatacatggacggatactacaaaaattattactttcagtaacaatttttagttcacaatataatttttttgttgactaaa

SEQ ID NO: 206118 - DNA, 666 bp, Cannabis indica
atatatatatatatttcttatttcaataatttttctcaaactatttcacttaatttttcattcactcaattgtaacatcttaatcctttactttagaacaggatgttaattaaaataaaaatgtggaaaaataatggtgcatgtatggagaaaatgagctttaagggtgatggtggcggcattttttcattgagaaaaagaaggagaagaaagaagaaatgggagtttcaaatataatattagaattttatatagacctatattttaggtattatgaaataaccaaagacacacgtatgcctccacatctatctaatagggtaggatagtgaagacttatgtctttagttatttcaatttgtatcgtaaaatattgaagatatacattatatttttagtagtcccaatgttaaataaagaacattctttattttctatcaaacaaataccttatctcaatcgagtcattttttaacatttgcattttaactaaagtgacaatgaagatatcatgacatatgacgtgattgatctacatatgtgtatgtatgtgacattaggggttcatcaaactgtcactataaaacatatgatttagagccccttgttgatcagtgaatggtttttcccaaaccgtacgatatggtgtagtttgtggcttggaat

SEQ ID NO: 206119 - DNA, 738 bp, Cannabis indica
ataaaattgtttccaagtgtttgacggaaagattaaagttaagcttgcacgatactatctcggggactcaaagtgcttttgtgagtgagaggttaattcatgacaacactatcattgggtttgaaggaatacattgtatgcataaggattgatttggaaatgggaagaaggtggcttcaaagttggatatgtcaaaggcgtatgaacaggtagagtggaaatttgttggagtgatgatgaaaaggttgggatatgatgaacggtgagttgctaagataataaattgtgttactgctgtatcattttccttccttatcaatggggaagttaagggtagtgttattccgagtcgaggtctacggtaaggagatcttttatccccttttcttattctgttttgtggagaggccttatcttgtttgattcaacctgcggaggctcgtggtgatatggatggagaaaaaaaatattctagtaatattttttaaatattaggaaaattttaatatcttaaatattttttcataataaaataaatatatgttgcgatcataatataagattcaaaactggtctgttttagtaaattatatatcatctctcaaaattatattaaaatattgcaaagatataacatatttattatgagaaattttcattttctatagtttttaaggccttaagattatgaaaatgtcgcacttttttttatttaaagtaagttattatatttagggg

SEQ ID NO: 206120 - DNA, 1145 bp, Cannabis indica
tttattttatatgtatatgaaataaaaggttttaatattaatttttatattgtaaattattctgaattttttaaaatcttgcataatattttaaataactattatgtatatgattataaaaaaatttaaattaaaaaattcttataaatgtcaaaatagttaggagttactatttaattggtgctaaaaacaacccataatataaatttatttatatatatgtacatatgcttaattaattaccttttacacacctgagttttgtaaatatcttgaaatcatgttaattaaagttgtggtcaatttatattatgattttcttaatgattgcgggtttttaagcatgctaagctaatctcccaaacttttttttttaaaaaaagttagaaattaagtccctaatttttcaaactagtagaagaagaagttaattagtggttaggtacagtatctcatgagttgagaatatattgtaatacataaatttgttcatcctatagaatctaatatctcactctatttatgagtattaaggctggcttaaaagattgcggtatgaattcttgaacgaagttcttggattggatggtcgtatttatactaaaagatagcgaggatcccctgataggctacaagatgtattgtctctctatccatggtctagatttaatctatatattatgttgagatcttttggcttataattcatattggataaaactattttttatcaaattcgcttccacttttctaactctgacatggaccataaaaatcaacaattggtatcaagagctattttcataattatatagattaaatactgtgttgggtatgtatatatttatacatatatgttgatatattgtgaatggtatctccaaattttagagtgtaacgtctctgcttcaagccttcattgggtccttacacccacagaatgatatctcttatacacgagtacatggctgcttcatggactgacaactgacgctacaaaccaacacgagtatttccagcatactttgtcctcactcgcacacttcctgagaaaacttcttaggaggtcacccatcctgaaattatttcaagtcaagcacgcttaaccgtggaatttattcatgatgggctgccgaaaaacaaga

SEQ ID NO: 206121 - DNA, 1677 bp, Cannabis indica
aggaataaaataagaggatgcaataaataatggttgtcgtgcagaaggctatggaaacggctggaatccacgtgcatcccaaggtcgtgcctccgcgacaaaaagaaacacaggaagagtcctcaccaagtacccaaaagcctaaaaataagaaatcgagccccatacggtatccatttgaaggaaaccctaagagaaatcctacatcattccccgaaataataaaaaagctcaagatctgcgaaaagtctgctctaatttcccgaaagggaaaggtccgtagaggggcaggctccctcgagagagcactggccttcaggaccgagaggaacgaaaaaatgtatcagtgcatcaggaacccggggaaagaggtagaaaaagtcgcaagcatccccctaccgacttaagacagaagcttaatgataagcatggtgaccttaggaagcacttggagaaaaagaagcaagcgatcctggtgtcggagggtgccctaaatgaaggaatcttggtcgaattggcaatccttaggaaagacatcgctagggtctcgcaaaggcaaaagggagatgactcgaagtccgactgtgaggattgggagccctgcgccaggaatattcttgaggcggaactccccgaaaatttcaaaatgcccgaaatggaaatatacataggagatacagaccccagtgatcatctatctcgattcaacagagtaatgactgtcacgagagtcggtattgacgcaaagtatttatgtttcttgttaacattaggtggattcgccaaggaatggttcaagaagttagaacccagatccgtagactgttggaacaagctacaagtcaacttttgacgacattttttggcggcaagaaagattaacctcgaggtaagcaccctaacaaacataaaataactaccaacggagaccctgaagaagttcataaagaggttcaaagaggaagcttcaaaaaccaaaaaggtcgatgatggacaacaattggctttactccaagccagaatccagaccgggactcctttctggaatgagctacagtaggaaggagctgctagtctccaagactttcagaagagggtccaaaggtacattaatttagaagaagcgcaaatagtggcttacggagggtattacccaacgggagtgtcgggatatgcgataggaacacaactttctggagctgcgatccctgctgctccacaaacaagcggaatacaattttctgccacttcgagatatactcataatcttgctctcactctagcactatcacacttgggggccctagtaagcaatccctccggggtgaacacacaacttccagctgagtccgcgccagccacaagcatggcaggatcaccccaaagtttttggagtaagaggtcttgtaaaggtagtacgcggtccgaggacaaaaggcaaaggagagggtatgcgccccagtatacacagtacatcaagctcacggacacccaagaacgggtatacttcacgacttggaaaaatacgcattaccagaaacctcctcctttgtatcgagatagttcccgaagagatcccaacaaaaggtgtgactatcacaacgacatcggtcacaccactaacgaatgcaaaaatttgaagcatgaaattgagagtttaattcgattgggccactt

SEQ ID NO: 206122 - DNA, 1202 bp, Cannabis indica
ttttatgacatttaataatagaagaattataattataacatcctattataattttttaattaattttaatgttcaaaattacatgtcgaaatatttttttttttcatagcggtatttgttatagttacaatattattcttgtaaatttttgaaaaattctaaatagtttacagtaccaaaaatagagttcctgatattccagtttatcactcgcgttcaaaaatcttcaaacgtatttttaccactataaattattcgaaatttttcaaacatttatagggatgctgttgtaactataaactataacgagcactcctgtgaaaaaaaatattccaacatgtattttcgagcgtacaagttgactaaaaaattataacaaaagattgacagtaacactcttcttaataataaattgctaattgctcatatcattataattttaaacaccttggtcatttttaattcattcatgagataagattatgatgttggatagtatagttatcttcggaaacattttaaaagttttgaacgattggatataattatccaaagctcttattttatcccaccaaaaaagtgtttaaatagtcacaaatggattttttttttttaattcagtatattttaataattaaaattaaaaaaaaataaaatatttattttaaaaatgataaattagcttaagttgaaaatttaatgaaataattttttttgttattttttcttttaatttagagttattacattttcttgaaattatttatttttatctttttgattttttaaatatttatttaacattattctttattaatacaaaacttttaaaaaaatattaaaaaaattatactatatttagtcctgtcttacactataccaaatatgatacagtaggaatataatttcattccaatcctattaaatagtccgatccatttaattcataataccaaacgaactctttaagtaaatattaatgttaaattataccgtgttgattatcaactctaacactcttaactagtccatcaactaaacgattaataaagaataaaatacaataacagaaagtctcaactaaatctaacacagccaaaaaaacataccaaatagtctaatctggagggcatttgtttcttgaaaaatctttaatcacctctgataaaaagggtcacatttagccattgattctattttgg

SEQ ID NO: 206123 - DNA, 507 bp, Cannabis indica
gtgaccttggattttgatgggtggcgatctcagatctgatgttcgtttgactgttgggcactggaaacaagttggttggaccagttgatgcacacgaagagagaagccaatgtttctaagtgcggctgatctcagacaaaaaaatagtagaatgagttttttcttttgctgaataaaagtagagagagtattcatatatgggtttagggaaaaaaaaataggatggaggggtggtttctgattgctggaggcggagaggggcgagagaatgactaaatgagttgagagaagacttgagctttaggttggagagtggttggatgctctgattttatatttgaaaaaggggaaaaaactgggcccgacattgtcgtgcccatctgtaattgcgggaaaattccggcctgcatcaatgtttattttttgaaacattaggggcacgataatatcgtgcccattgagagtgtgtcgtgcccaagtgtctccaaaaattttttttttaaaaaa

SEQ ID NO: 206124 - DNA, 524 bp, Cannabis indica
ctctctctctctctctatttcatcctcttcattcttcttcttttttccctttcttccattgttcttcttcgttctttcttctcatttttttcttcttctttgtttttttgcttaatggtgttggcattgtatttggattaagatttgtggcctttcttgttagttgttgaaggtatttctcttttctttttttcctatagacttattttagggttatttttttttcatctctatgttttagttttgaaaattatgattgttgttctataatctttccaatttgtgtattgtgtgtcgtttaagtgatgagcatttcaatgtgttgagttttttgttttttgtttttttttttggggaaaggcttcatccgaagtgattagtgtgttattgttttgttcataatgttttttatgggtattttttgtttttggtttggttgtatgtttagtgttttgttatttagttttactttttaaaattttttttaagcatcagattgtttttgttgtccttttttacttttt

SEQ ID NO: 206125 - DNA, 1488 bp, Cannabis indica
ggaggcaattggcaatcagtcacgcaaaaccatggagttgataagatagtttaatcaacgaactggaaaacgactacaagaaagtattcccaccattagggatactaacagaggaaaagagacatatatcccacctgaaaatcagcacgggcctgaagttcttccaacgacttacacctaaaatcccctacaagtcggaccgtcaatcttaggccacaaaatacaaatgtggatcccacggtagatggccaagtattgtcagggcatcaccttgggcaaaatagtcaaaacttttgctctcttatggaaacacccaaccagcttaatgaaaggtttcgaaagcctatagttgtttatgatcaaaatgggcaagttcagtatttccagtatgtctcgtacgcagtccaaaatcaagatcaaactacaactgctcgcagtcaatcattctcaagtgacaatgaatatggggcaaatagtgcaactcatgctcaacgtacccaaagggaaattccaccgaccaatactgatgctacaagaagaccctagctcagtcagtctttgagagaattggaacacaaccaggtgatctcaaaaacactttgaaccaacaaagagggcaaagagatagagtaataactcctcacgtgcagccaattaatttggataattatgtgccagttgaaattcaaaggggacaacaggtgacacagaccaggccacaggcaggtcaagttaatctaggggtacaagcccaaatagatcatcttaagagcatagtacaaagcctaaccagtccaaaactcaccaacctagaacttgactgagcacgaggctcaccattcactactcgaataaatgcacttcccctaccgcccaagttcaaaatgccaacctagaaggtgcatactagtaaagaagacccttatcccacttaaagaactttgaaatgcaaatagacctataggcggtgcacggagacgtgtgttgtagaatttttcagctactttggcagaagccgcccaacaatggtatttcaagcgatcaacaggaaagttcgattcatgggataccttcatattagaattccatgcataatttttgtcttccagccaactccctgtgatcacttggaagacttggtcggatttaaataactatcggataaaaccctcaagattattggtttaggactgaggcaacaagggtaaaggggttgatcgacgaaggaaggctagcaggcatacttggggtaactttaccattgggggatttatgaaaagatatcaagaggctgataatggggtccatagcagagtttttagactgggtgcacaaattcataaagctataagaggcagatcaaacatatgctcgaagtgtagacgtcgtcggccaaaaacaaattggccaaacctaatatggccactggtacgtccatgtggccaaaaaagatctttataggtgaaggcttccatgactaatgactca

SEQ ID NO: 206126 - DNA, 916 bp, Cannabis indica
ggagccattcgatatggcgcttttgaaataggctcttccccaagcactaacttaatgttaaaatctatttcccgttgtggtggtaaccctggtaattcttcggggaaaacatccaagaactctctaaccaccctgacttcctaattaatagtgaaaaatatacatttaataagcttaaaggataaaataaattaatatttttatgaaattaataagatatatttttatgttgaaaatatttaatttagatttaatttattaatttttttaggaattaaaattattgagagttttgaagagaattgaagaattgaagaaaaaggattatttttacaaagaaaaaaataagatcatattttcggagctggagaggcccactcgcacgcaagcccaaagcctcatctaggtcgtctgtgcgcgaatccaaagggccaggagggcgcgtgtaggtcacagccatacagaggcgcgtgagcaccttcttccctctgaccaaccgccagcatcagacgcgtggggtcccatctggacccgcctgtcccccagccagctctccagcagcccgacacgtgtccgcccgctgcagccttctctctcccagcagcctctacatgctcgccacctgtcactctctccttcaatccgccatttttcaaattattttgaaatgaaatttcaaaatacataataagttttatattcccttgcattttatttggttcactttcctatttctctcagccaataaattgcaccttgtatatcttaccattttaccctcacctaccttatttatgccagcaatttttagaaaaatattaaaaataattaatttatttaattattttaattcaactcattttggctataaaaagagtaagagatggaccccttggagtacaatcttagacactct

SEQ ID NO: 206127 - DNA, 1437 bp, Cannabis indica
tacataattatgactatattacacatatttattcttatttaaaagtaattgtaaaaattagtaatttttaatatatagtgcattgtggattaaattattaaatttaaaaatgtaaattataccctgtaaataattttaaattgtatcttttatgcagtgtaatacggtgcgtgcaatttatgcagtatgaatagtttgataaatacctctccttagtactactatcacatggtcctctataaattattggtaattttttttttaatttttattaaaataaaatataataggatatattaaattatttcaataataatactacacattgaaatttgggtaaaatgatagagagatcaagaaatgaagaatattgatatcacaaaatcaattttgtcggtgactatgataatttaatattgtggggtgagagttgttgttgttgtaaagctatttatagattatatttataaaatttgtcgtgaaattttttaatgttttatttttatacacataatctttttattattttcttaaataaattttttttaagttttttttaaaatttgagatgtcaattaaatattatcgttaaatattaaataaatgactattgtacacttgtgtatatgtaatactaaaacttcaaacataatacaatagtaatttcattggtatttaacggttatatctaactaagacttccaatttataaagaaaagtaaatataagagagttttgaaaaaagataaaaataaataaataaattaaaacataataatatttttccacaaaatactttattgctccttgtttaataaatagattaatagaccaacttagttcataaaaaaaaaataaaccaattcagtcacgttacatatatataatattatatataaaaatagaccaagctcaagtattataaaatcctctccactccatacattcattacaagcaatacttttctctctttctctatctctctctaaaaaatattgaaatgggtagctttgacttggtaaactcaaatggcaatcttttcaatccagaagaatttcgtaaacaagcttaccaagtagtggatttcatagccaactactatacccaaattgagtcttacccagttcttagccaagtcaaaccgggtgatatcagaaaccaattacctaatacagctccatctcaatcagaacctctccaaactattttgaaagacattaccaatgtcataatcccaggcatgacacattggcagagtcccaactttttcgcattcttcccgaataacgtcagcactgctgcccttctcggggaaatgctatgcaccggtttcaattgtcccgggtttagttggcaggtatctccggccattactgagctcgagatggtcgtcatggattggctagcgaacatgatcaatcttccaaaatcttttc

SEQ ID NO: 206128 - DNA, 809 bp, Cannabis indica
taacagttttttgtagtgttagtgttgtccatgtcagactttttaggtctttctgttatagctgttttagttttttgttaatacttacaaatagttgctactattttcggcaataactaaatttttgatcggagattctttaggttgagcttcattgttttgtcttctatctttctttgttttggaggttaaagctcataacttcgtgaatggagattcaaagttgttgatcatgacttgaagatgatgagttaagactcaagagatttcaattgtatcctcatcagatttgaagcaagaagatattgcttgagttgccaagggttttggttgtttggagcaattacttctgtaaggatcttacaagattgtaagactgaaaattattgtaaattcgcatatcattttagtttagttatttaccttagtttacggaactcaagtattacccgatcgaaatgtgttttttatacatgagaagcttgcaaatcttctctttatgtttaaaatttatcaattaattcttgaattgattaaataaattgataatttgattaaattgaaacatgataatcaagcgtagtatttaagtaatttggaactttcaaattagatgataatcctgtcaataaatatggataatttattttacttgtcatgatcaacttagattggtgatgcaaaaatatatgtattttaattgatattgaataattttatattaaaaagtaattaatattcaaaatatataatcgatattcaattttatactattgcagattagatttgaatgcaaattagatgtgtgt

SEQ ID NO: 206129 - DNA, 2088 bp, Cannabis indica
taaagactagcttgtaagtggtactagttgtatgatgagaattcttaccctaattaccttaagataagttgaggtataagatttctttaactaacatgtgatttttgggataaccaatatgaccgaagggatgaaaaagaaatttataccacgtgatctattcatatttgatttaaaaaaaattaagttgttaaaaatttttcttaaattattgagaatattaaatttaaagacacttatcaattttactttacgaaagtctaacattgatggaagttcaagggtataatttgctttggtacatgttaatatttaaggaacataatttgataaatgaacaatagataagttagaaaaaatgaatgaaattaaagaaaaaaaaactttaaatctagcttaaaaaaaaaacttaatgacttaaaaattttaaaggcattatttaaaatatgtcaaaatttgagagtgaaaattataattaattttttttttaaaaatatgtatgtaatataaaatttatgttaaagcattactaatttattattaggcattaaaagaacatcaccgtaaggttttacgttaaattatgaaagatttgataattaaattataaataattttttaagtggggtatgaagcataatttatagtatacaaatcaataaaataataagtgataggtacataaataaaacagataaaagcttgtaaatcttaatttcatcatcttaaattattcaaaaatttatcgaaaatataccaaatgtttagtataattttaatttacactgtcatttactaaaaaagaaattataatttataatattttcaaaataaaaaaataatttataatttttcagaaaatatagagacaacaacagtattgtctacatctacaaaatttctataattatacgtatctatttaaatttgttttttttgcaaaaaccagaaaaagagcctaatctttttttttttttttgtactgtattgctgtctctactcggtttggttttattttattttattttatttaaaagggtcgtggaaggtgtgctttaattttatttattctttattcttgtgattttttttattatttatttttagttcttcatgtggtcggttgacctggtcggggcctacatattttgctatatttttagaaagatttattggcggcaaatttctctttttatcttttaattttttttagtattattattaggtatcagtgctatttagtacttttagatttattgatcgtcttataattgtctagcgatactatttataagttattgcattaaattttataggacccaatacttagttggaccaatagtaatattaacacgtaaaaaaatattagacacttagtatcttttaatatttctcttaatttttatacacttaatccttaattttttttaaatttatttttttttttcacaaatttgaggacatcaccgttaatacaaacggattaccactgtatatgaaagtaaaatttcaaagtcaatacatcaataattcagtcggtatttaacggtgatatgcaactgatatcttaaatttacgaataaaagtaaacataataaaattttacccaacaaaataaaaaattaaatgtataaaatcaaaacataaaaattttttactggaaataattttttttgaaaaattataacatatatattttgtaaaaataaaaaagaaaaattaaataaaaaaattgaagataaatttaagaattgtcagttgttctaaatttcttcttcaaatttgtaacgtagtgacttttaatattcattggtatgatgggacacacgatgatatacttttctgctgagatttttcttaatattttatctctttgtaatttgtatagttggcttttgatttccataatcagaatatataattattaatttaaataaatattttgggtcatttaaaaaaacaaataggaatattttactaatttttaagaatcatgtttttatttgtttttgtcaaaaacaagtcacacatttcacaacacaattacataaaccaaatttaatcacattcacactgttacaaataata

SEQ ID NO: 206130 - DNA, 811 bp, Cannabis indica
ttttttcatgaaaaaaggtttcaaaaagttagaccaaatcatggttaggtactatttttgctcttattgccattagccattatacaattacaaatcaaagtatatagtattatatatataattatcatcttcaatcattttaatctcaatggggtttggtataagttggacctactctgtttttatttattaaagtagaaaccacatacaaataattccatgttctactgcctcttggcataagttgaattgagtggaaaagtcattcttgctgagagactcaaacaaaataccaaaggaatcagctttctcttcttgttggcccactgccgcccacatacaatcaacaacttcttttcttatttgtctatttatttatttttattattattttttttttaaaataaagatcaaatttttagaactcaaatagcaatatatagttctagggtagtgtagagtggggaattaaaatttgaccatatcacattacttaatggggacatgataatagccctcaaattttcatataattcataaattatttaaaaaataatcccactgttaaatatgcatgaaataggataagttttaatccaacctacagtctagcattactaataggtttttttaaataatactaaatatactttggatgagtctaagtataccctcaaacaatatgctttagtacagttattttctttttaggatattttagtttaatgttttaagaaattttactaaataattacttattacacctataaaagaaaatagtcaagtgtataattttttagcacgataaatt

SEQ ID NO: 206131 - DNA, 958 bp, Cannabis indica
tgtttttttagcatcatgaatcaggatgttcaatcaatatccatacatacaaattcttgtgtatggaaactataatagttacaccgcaatacttgctatatgtagaaaagaaaaaaggcttgattcaagataatttattatttgagcagtcaatgcattacattgacaaagtcagagtcagagataggcaatacaatttgagtaggcgtgatcatcaacatgtattaatcaataagtatctccattctgtaattggtctcgaatacatacattgaaataatgaaactagaacctattgtaggaaatggcaaagtgttcatagatccatgaggagaaaaatattggagtcgtcaaagttaaaaaaagcaaaaccaacaaaaacaaaggacaaatcaaaatccacttttcaaagtcctaaaatgtgaaagtgcactcttgttccatgatcaactccacaacgaggacaaaatcagctcgaatataaagtcatgcaaccaaccagtcaataattttttggtttgttttttaaaaaagtaaaataaaataaaagtttgaaaaatagcatcaatgaataaaactatactcatggagaactttaaaactatacttagcatttgtttggaagtaattatgtaattactaggtagtgtaattactaaattagtaattatacattatagtaattacacttgattttaaaatacaatatgtgtttggatattgggtagtaattatatatgaattcttattttcatgtttggcaaatgagttagttattgcataggttaatattactccgaattacacagctttccaaactcgctctaaaatggtctcaaccaaataacagaccaccatataaacatttaattcaactcacattgaccctagtttgaacagataaatcaagtgcgttcttacattgtcattaaaacattggtactaacatacctaaact

SEQ ID NO: 206132 - DNA, 590 bp, Cannabis indica
atgcatttctggctttattattaagtttatataatttattttgaataataatactaccatttgtaatatttaaaaaaagaaccctgaaaaaatgcattaaaataatgcatatgtgggatataattgaagagtttagaacatttacataaacatatgtatacataaaaattgatattattgcattaagtgacaaaacaaagagtagtgagtgtgtgtgtgtgtagagtttggaatatattctaattaattgtttttattaattagtggtataattaattagaaagcaaaacacttgctttgggcggtttatagatggattgaattaatttcatgaatttaagcatgcatgaggccattattattaattaatgaagaaaattaaagaataatctcacacaaatggaagggttggctctgcctgcctgccaccaccacatgactgtaataggaatattaagcttaattcattttattaggggataatgagttgcattgcatgcatgtgaatcaatggtgtgtaatcaatctaatgtaacatattcattatttaatggaaaatacagcaaagcatgtgtgtatggtatggaata

SEQ ID NO: 206133 - DNA, 882 bp, Cannabis indica
ctgtgtcaatttcttgatcatctactgttataataagtttcattaattattattagagggtattatttgactctaattttatatatttataatataatgtacgtacgtatagttaccgcaatctcagacgttgtcaaccattaattactactcagaaacacaaacactacagtgatcagtgtgtaactagaaaaatctacatatatccatccaggcatgtccacatcagattaactggtatggatgaatatagatagatatttatacgagtattattatattttcagttttatacatttataatatactgtatgttttttttctttggattaattaattctatataaatgttacgttttcattagaccttttaatctcaatttcattaaatcttattgtatctgtctagattaacacgtatcaattgattaattatctactgtcaataaaaaatttattaaataatttcacaacttaaaaaagaactaaataattattattaaattataaaaacataatttctatttataattttctatatttcaacttctgttattatttattttaaaattatttaattttaaacatatatttagacaactaatatattgacaatatgtgacattttataacttaatcaaatcaacacttaactaaatttgtagttgcaattaaaacgtagtacataatatttattttatcgaaaaaaaatgatgtataaatgtatgaaactaaaaaagacgataaaatacttatatggttattatccttatattttataactattaaattaaagtcatgtatgatctgacatttgattttactaataattacataatatatgctttttagaatttctcacatatatctgtacttaaaata

SEQ ID NO: 206134 - DNA, 1647 bp, Cannabis indica
taacgattatatgtgatgacgaagtaggcctctcctacaactagtaaatatcgattctttacataagggtggtctatgtgactaatgtgttcaataactcgttagggactcgcacgttccacgttgccaacacatgagatgtccatctttgcgatcaaagatgaatgtagacatccaaacagtaggcccataggccaccttgcgaataccatacacatctaatatctgcgagcttatgtgagaatataaacaggcaactcgtgctcaacaagtcacatacgttgcttcacttaatacaagaacaaatttaacggttcttcatttattcttcaaacatttattgtagtttaatactgtcatttattgtaaagtggttctaaaactaatcagttatgtaatcctacagtatacttgctttctgtataaaggagtgatccaaatcaaataaattaagctaaaatctttgcaatagtagaataagaagatcgagctctgactgaaccactataattctctcatcgtagcagcaacaactagaaggggggttatgtttcgattgcccaaagttctttatcgttcttgatgaatgactatagagaaaaccttattaagaggagggcagggatcaataagaagaatttgatcacaaactgcatgaaaagattcattgagtcctttgaggaattggaggacttgatcatggttaaggtgatcatgattttgggtggcagctgcacatgtacagaggatgcgaggtcgaagttggttgattttgtcctgcatagctgttagttttgtgaaataggcacaaacagaatcatcaacttggtgaagataggtaagagtttcattcaattcgaatattcttggaccattaccttggttgaatctatgatttaggacagtccacatctcaaatgcagtacaaagatacaaaataatactgctttttatttcaggtgacacagagtggagaatccaagacatcaccgtttggttgacggagtgtaccttcaagaaatggtgtcttgcttctagcgctaatggataacttaaggtcacgtttccatggctagaagtttcaattcgtgagaataagggtcgtgagaaccaagcttggatgatcgacattgctgagataatatggagatttgacatcttcataggcaggtcgatcaactggaagaacgcgaggaacctaaagggggggattagatcatgggggaagatcagcggaagcctgagatggtgatggatcagtatgtgtttgagtattagcggaagtgtgggatggtggctgagctataatggcatcgaccacgggaacagtggtggtatagctgaagcagtggctcttgttctcaccattgttgaattcttgaagcttcaattgttcttggagcttcaccttgtttcatctgataccttattagaactagtgaatgaaaaaaatagagtaattattattgattgaataatcgtttgatacaatggcattagatatacacgaagtagtacagtgtacaagtaataaccaacctaactgtctaattaaaataactaattgctttaactgattttatactctctctctctctaccttgctcatgcatcattctctctggagggtgattgtgttttttccaa

SEQ ID NO: 206135 - DNA, 925 bp, Cannabis indica
tatagttaaaattaaaatagtaaacaaaaaaaaaaaaaaaccattacaaaacgaaaatgagtaatacgtattacctaattaaaaaaaaagtagtaggtgtatgtatgtaataagcaaattataatattttaattatttaggccctcaattagtctgaaactacccaaaatttcagcttatatatgccaatattctaatggccagtactgcatgcgaatataactcattaacacaaagcatcttaatgactgggtttcacgatatcatgtttataaatattttgtacttgcaatatatttggtttactagaaaataattctttaattgatgagctcataatattgttggtttttactacgtatgatatcagtctaatataactttattagctcacgggtactgtcctataaattaaacaatatgataaataatatcatgctgacaaaaaataggtcattaaggtacatattatgagtagcttaaactgattgacaaagagaagagaccagccagcctaatttattataacaaaaagaaggtcatgactcatgagatatatgcctcatgaaattacaatataataatatataatacaaatatatatatatgtatatgtatataaaaatacatacaaactattacacaattatcttctatcaaccactaaatttaactttaaattgggctaataaaattagttacatatataataaatatagaaaataaaactaaaactatattataaatttacctttatatttgtgcctgtacgtactagccctatatatcaaacaattttattgccatttcaaagaaaaaatgttctttgagggtaacaaaaaagactgagagttctatttggagatttaaaacttaaaaattgaactatttattaataacaatttgtcaaaaataaataaataaa

SEQ ID NO: 206136 - DNA, 512 bp, Cannabis indica
cttaggatattctatttctaaggccagtagagaataaacttcagaaccagattgggacttttctacgaaaaagagcaatcccaattactagaagaaatttattaaactagaaacttataagtatgataaacctaaattttttactctgtctaagccctaaaaattgcccaaaaaattaaaccaaaattactaaaactaaatggaatgacaaagatgcaattaacagaataaggatcataacccaggaaaatagaaaagatcaaagaaaaggggatggttcacttaccgttcaaaattgagtttttgtacgacgaaaaactctgaaactgaggacgagatgaatggcgtgacaacttttttgaattcctgagatcgaacagtatatctgaatagatgcgcaagaagtatgtcaatgacaaggagggcatgcagagctttacgaaaccaaaatgagttttttcgcagaaaagctcaagtttttattttgaatgtaaaactggtggaaaattggt

SEQ ID NO: 206137 - DNA, 657 bp, Cannabis indica
atgctccttactagtcttttttaccctatattaattttttattttctaaaaagcaccgacttatttagtataaacaaccataaaagtacacgttagaataatcttaactttcaccaactctaaatctagtaagaactttggagcaaaccatagattaaatgataattaaacaaagaaatagaatatattattatattctgcccgcatctgaatatctgtgttatgtatatttttgcttatatattaagttttgtaaaattgttaaccgtgaatttatattatagaaaaggattattatattatgggttgattttaaaatgtgaatgagggtatcaaaatattctatattttgtttaaagccctgcatgcacgaaagttaatgtcattgtaattactcaagatttatgtcattttgttgataatataaattaggaaatttctgtaagggatgttttgatagaatcggcaccaatttttcgccacgagagaatcagcacgacttgttgtgcctatgttgaaattattatagtagactaatatttttttggaaaaatatagtagactaatatgattatagacatataattttataaggaaaaattgagattatatgttaaaaattaatttatctactaaaaataatgctagtatattttg

SEQ ID NO: 206138 - DNA, 523 bp, Cannabis indica
aaatccttttctcttagggtttccaagcgcggcgaaaaattagagtacgatccaaaataagcgagagtaatccattttccatgcctaggtcaagggtttttatagtcataaagctctgcgcattcttctcttacatttaacgagatctgttatatttgaattttgatttaagttcgaatacaaaatatattgtacttttatatttgaataataataaatataaagtatgaaatttgtatatctgtatatctattgatttgtagatttggttatgcttaaaaggcttctggaagcttctgtcttcaaggaatgtgctgaatgaagtccaagcttagggacaatgtcatatgtgaccagtggcattaaattttccattagctgtgtattagactaacatttttcatttgatgttgctttgacaatgtcttggagtttggtccaagcttgaatggtttttaggcttccaaaatatctaaggaatcttgccctaaaagacatatacgagtactgacctatcttttgg

SEQ ID NO: 206139 - DNA, 514 bp, Cannabis indica
ttgatgagtgagcttgggtttaaatagtaaatccagcctcatccagatgacaagtttttcaaccttgaattaccagtcacgaaccctgcagggttgcgactacaagccaggagcctcaaaagggtcaaacatgtaatttttaacgtgtgcatgggatccatgcatttccatgcacgtgaatgggagataaggaacctgattggggttcgggttgggtaacatgccacataagggactgattggtcatgtggcttcacggtagaggtcgacaagacccatgagggtccacaggtggtcaacagtagaaataggaggtggactgactggtatcaagcttccttgctttggtcgggtctcatcacccgtgaagctccaaggcagagctttgctctgtaccaccaccctccagcaccggcaggacgccgatgagggtcttatccactacctctcatggtcagctctatcgaccccacgccaccacgaccacccatggcctagggccagccccacgtgt

SEQ ID NO: 206140 - DNA, 531 bp, Cannabis indica
aaataatgaattgatacatttagtgtatcattgatgcatgcaaaataatataatcatacttattataagttttatagaaccgagtgattctcatgctaagtattcatatgatattgtatagaatggttgattctgttttagctattgatttttattttaattaatttttttcttaaataaattattttaaatttttgaattaatctaaattatttatattttaaaattaatttttaaagaaatgttaggtgttttaaaatcaataatttccaatagaatgctaaaaaaatattttattactatgttttagcatgcttaaaaacaccatttcaataattcgattctccttttagattataaagtattagttgatggtatttctcctaataaagctccatgctacaagagaagtatttatctatttatggatcagctggattctttgattgatgcccgtgtggtatggattcgtaggactcttaacttttctgctcatgctcttgcggcgtggactgctgctcattctttttt

SEQ ID NO: 206141 - DNA, 689 bp, Cannabis indica
aaaaattaataaaaaaaaataagtatggatttattttatcttatgaaatatctaaatgttatacattactttattttattattttaaatttatcatatttttaaataaaataaaataaaattcattcagtatctaaaaaaaatactcaatatatataaaatatttatatttatctatgtcaataattaaaatttattttcatacattttttgtcatagtttcacaagtgtaatattcttttaccaactaattttttttaagagataccaactaaatttttataagttacaaaatatcttgaaaatataataggttaatattatatttatcgtgactaaacaaatagttctaaatataaatcatcaataattacaactacaatctttttggcgactaattgtttagtggttaaaaaattattaacttttgtctgactatttattagtcacaaaatatagaattttagtaactaaataattttaatcgctgaaaattagtactcttgtcacaagtattaatttggcgccaaagtttttgtgacttagtacaattttagtcactaaaaataacaagcaatgattaacaattagtcgttataattaaacattgtcttatgacaaaaaatatctgcgactaaatattagtcgtaaaaactaagtttcagtgactaaattattttagtcgttaaa

SEQ ID NO: 206142 - DNA, 640 bp, Cannabis indica
aaaataaaagaaaaaaataataaccaaatcaataacaataacaataaccatatattatactcattaaaataatgccaacaacaacaataacaataggctgagttggagagaaaatagaaaaaaaaattaaaaaaataagtgagaaccatcgtcgattggccagcgggctttgcatctattgagctagagagagggagttagatagatttaaggagagatcgattgtcaagaggctgagatggagagaaaccaaaaaaaaaaaattaagagagagagatgggtatatagaaaaaaaggagagaggagaggagagggatgcaccagagggagttgaggtcggtggtcatccctatatgtgtgacttggctgccgagacagaaagaaatcagggagggggctgggaatgcttagaggcgggggcctaaaagtgaaatggatgtgttttagtttaggttttcttgtggggtttgagtaagaaaagtaaaaaaaaaaacatatatataaatatatatatttattatgggttattaatgggttttaggcaagtacggcagttctaaaaatctattattttccaaacctgaatccagcctgaatagtgcccaggtttcacctgaacttgcccattattttttaaaac

SEQ ID NO: 206143 - DNA, 946 bp, Cannabis indica
ttatattatattatttcacagtttaagatacatttatgttactattttttaagtaatttttgttaagaatataatgtgtcatagtaaatataaaaaattacaaaatagtttattaataaaattagtataatttttttttaatgtaagataccatattgtttcttaagttctctttttgtttttaaaaagataaaaaatatcaaaaatggtcctataaaaatagcttatttagaatactatgtgataacatttaaaaatgaactgaaattctgccacgtgtgaaacactcttcgatatattacaatatcaaagtgatggaatcctaggtgtaccaaaactctcaccaccttcaaaacacgtagaggcaaattttgatgtcactagcccacatataatataaatatagtactcaatcaatgttcacattttaattacaaaacttaattaattaattagtctaaagtcacgttacgtttgaatatgtaatatgatagagaaaagtcaagtccacgtggcaccattagagagattcgattattaaaaccagttccttaccaaacggcaacggctccgttagactggtcttccaaaccctcatattcaataaataatcacaatcacatgtcgttttattaggccaacggtaaaagaatcggaaattttattcacactactacaaattttttaaaaataattctgtaattattaaaataatattacacaaaaaaatagttaatatttgaaataataattttttattattacataatataattacaatcaatttttatgaaattatgagaattagagtgttgatagaatcacacaattacttttaattacataattacacacaaaatcaatagttccaaatgcactccaagaaaattttaaattaataaaaaataaatttaaaataatttttaaaattttttaatttacataa

SEQ ID NO: 206144 - DNA, 533 bp, Cannabis indica
ttagattttatttaaagagaagtctatcaatgttaccaaacacctcatcaacaccaagatatagaattatccgaaacttaaacgctgcaaagtactgaaacaaaatatatgtaggaacaaatacatacaaaggggattcacatgaaagaaacagaatttttttattgaaccaaaatcaggaaattatgaaagcttctttggccctggcccttaagtttcatatccccgtagaactttatactatacagaacacatagaataaaactcaaacaagcagccaaagtttcaacctcattggcagcctcaaaactcaaaaccgtgagtacagtacctgttgttggtgaagtaaatgcttatccggccaatgaaggaaacggaattcctcctctcgatctccgatcagttaccgctgatgagatagtgacaataccgaagaaaaccacaatagggagagaaaaacgaggaagttgtgctctgatcagagtcataataataaataattaaatctccagcaaaaataaatagataaataa

SEQ ID NO: 206145 - DNA, 848 bp, Cannabis indica
tctgttgcatgcgaggtaatttttcaaaagcttagttaaattcacaaccaagacactactgcaaaattgggctttagaggtagtttttaaggcctttttagcgttggtttttgcaaaattcactaccgacattgttttaggcgacgctgtaggtgttaaaaaataatagacggcatagggaccctatggagtcgattattcagttattatgaaataaccaactccatagggtccatgtggcgtcggtttatgaaataacgatattgtacggacactatgaagtcggttattatgatataaccgacgccatagggacttcctatgatttttttgtcaactttaaaattttgtgttataacataatttttttattaaaaatctaatttatttttcattatgtatatatattatttttttattaatataattaaattaagtataaattatatataataagaataaataagaattaaatttaaaaattaaataagtacacatttatattactctaactgtttgtatattagttattttttattaatattttatattttataatatgtatttattttttattttagtatcatttttataattttttaagttatattttgtataataattagtatattaaataataaataatacgtaatatgttaatttttttatgcaatttaatatttttatatatttaaatttaaatttataatatgggttttattttctagtatattagtattatttgtataattctttaagttaagttctgtataataattagtatttgaataattaataatatgtaatattttatttatttcttagttaaaataaattaatagaatttt

SEQ ID NO: 206146 - DNA, 1241 bp, Cannabis indica
gatagtattgtactataaaatcaaatctttgtaattaatgtgaatcaatcgggtacgtatagtgtggttagtaatccatagaaaacaagttttggaactaactttctattcttggaaagttgattaggaagttagttaaggttgttaagattggttagatttgtcttaagggttagtggctcgggttgggagcttaaaaactgacctatataaacactacttgtaatctcttttgaatgatgtaagaaagagtttaagagagtgagagagaaatcaaagagagaatgagtgaatgagagtcaaaggaggaaacttttgaagatgaagaaccatggcattcatggtgtcttgagcagcttaatcatggtggtttgagagtcattttctctctgtgtgattctcaatttgtactactctcaattggtatttgtaaacaatcttggatagtggagaaactccttgggggagagctagagcaggactcacattgagattcgaaccaggataagaggataaatatttgtcttatccttttacatttcctctgttttatgctttaattgtgttcattacttgtttggtttattttctggtttgatatttggattgtatgcattgctatgtgtgtgttgagtttgtgttgtaggatttacaacagtggtatcagagctcagttcttggaggatccaagactcaatactgaagcagtcaagaatcaagaaaggttgatcaatggcttcttcatcaaccaggtttgatctggagagatttgatggatcaggggatttcaccctttggaaagaaaagatgatggcaatcttgatccaccagaagttagattctgcactagaggaaaggcttgaaaaatcaaaggaaggagatgcaacaaagaaaagtgaagctaaaatcataatgaaataagctcgatcaacaatcataataaatcttcctgataatgttttgagacaagttatggaggagaaaatagccttagaaatctagaaaagattggagcaactgtacatggcaaagtcaacagctaccaagattttcttgaaaggaaaattgtatggttttaagatgaatgctaatgtttctttggaataaaacttggatgatcttaacaaaattattttgtctttaactaacatgggagaaacaatcaaagaggaagatcaagctgtgatcatattgaatgatttgccacatcagttcaaggaaatgagaactgttataatgta

SEQ ID NO: 206147 - DNA, 1134 bp, Cannabis indica
ttttttttaatttaaagttaataaataatttcttttaacttataaaattttaaaaatacatttaaacaaaataaaaattaaaaatatagttgtgtgtatgtgcaatgcacatagtaatatatacttatatatataattgtaaccaactatattagttgagtagccttgtacaagtcataattaacagtgtcgtttttatatagacaataatgaacatttattatacaattaatacagttttatagtgttaatgtattttgcatatattttagcatattttattttttgcttaggattttttagcgtatgctgtgttgttaagtgttaacttgttaccaatcccatgctttgaattttataaagaaaataaaataaaaacaaatcatgtaattaattttgaaaataaaataaattaaaaataaaaaaattaattatttataaaaaaaaattcccacttttgaaatatatagattttaagttgaaatgacattattttagtgtgattaagacatactaatatttgttgtcaaaataatttacatgataatttatatgtacattataaagtatgttattatatcattgttgtgaaaatattgtacaacaacatcattcatatttgaaaaaaaaaacatcatcataacatttatccaatatagttaaaagtattttagcaccacatttaccaacattataaaaaatgttcttaaaggactttaacaacataattttaatcccatgaaaaatctaagtttttgtagtaactgaaaccatgcatagaagcaccggagaccaaaaaaaaaacaaaaagagtattatcatacattcttgcatcaatacatgatttctttaaccttaaaaataaataaataaataaataaaaatacaaagataaaaaacataccagaaagacttaccacttttgaaggatatgttagcgaatgaggccaaaattttggtgtcttggtattccttaatgctcttcttcaaagactttctatcgactttttcttgtgacatacaacaggagaagcagctcattttctttttccttcaattttccgtttcttttggatttgtaccagggcttcaaaacgaccacaatctcattcaaattggaattgaaataatatt

SEQ ID NO: 206148 - DNA, 1589 bp, Cannabis indica
aattttactaattcagtgattgtacatgtactaaactatgttctccgaattttcatatctagcaaattatgcctttcgaactttgacatgtggcaaattatgctcttgaactttcatccatattagacttttcttactaaaattagacaaaagtctttaaatctaataatttcaataattcaggaaatttttttaatagtcttcaaagtttaagggacatgatttgatacatgtcaaaattccatagacaaaaatcttaattagcctaataataataatgagataagaatgttatctattccataaatatatttattttttcttaaaaaaaagaatgtaatccatgcaagcgtgcctctcttttaacgtgcaaagtgatagattattaaaagtcataaaattagggtatatatggggtaacaatctttagggggtgaaaaaagaaaaaagatagttattgggagttggatcaatatcaagataaatagagttgttatttgaccatctatgcctcaaaatattttgaaatttgagtttttattaataaattatataagctactagcttaaaagtattctcattaagtgctaaactaaattaaaaaaagaaaattataaattttatgagttttatagtttttgtgtaaatatatatatttttttttcaaaaagattatattttgtaggaaaattaaatcaaaagttaaaaaataaagaaaaattaggtaacgataaccggttactcttatggtaactaaataggtaatcaattaccataagaagctaaccaagtaccttatgcttgtttttttttttttctcttcatattttttaatttttttctaaaaagttttgataaataatgaaaaaaaatcatatttttacaaatttatattttaaaccataaaaataaaaaattttcaatacaatgtgtaaatatgttagctagtgtgagaatttgacatatatacatacatagtgaattgatgtatttgtataaagatgatcctaaatgttatttatgagtatgtcggattataaaagtataatatatattgattttctaaatcgatagtataatttaatgaaaataaaattaattcagccataaaaaaaaacaaattataagagaaaacaaatatgatcgggagagttctatcttatataatagtcaaataataataaaattgtataatcatcaagattctttttcttttcatatggaaattacgtacataacttaaaacacaaatatgtaattctattttatattttacctttaagggtaaaatagtgaaggattatcatataccaatatgacacttttatattagtaaaaaataatagtatttgtttcctaaacaaaatttagaattagaagacatatgaaaaactttaaacgacaatccagtgcagcttgccctatttttgagtcggccctagattaaacgggcacacaacctccttaaatccaagctaatgtataataaatcatgatatcatcatttaaaatatatttttagggataagttgagaaatatctcttttttaatatccattaatcaaaaataatcttatattttatttact

SEQ ID NO: 206149 - DNA, 593 bp, Cannabis indica
tagctatcatataagattatattaaaaaaagactaaaataacttccactacaacaatttagggtattagcggtggatttattagtggggtggatttattagcggcggacacaatccaccgctaataatgggggtattagcggcagaccttaatgtctgccgttaatttggccggaactgacaaagagcattagcgacgaggtcctgccgctaatggtatattaccccaattcggccgctaatgttattaatagcggccactcattagtggcgtaccaatagcggccgaaatctgccgctaataccctatagcagccgatttaggagtattagcggcggagtggtctgccgctaatgaagtcaaatgttgtggtgttctaaattgaagaaacattttttgaaaaggtgaatttttcaatatatatgaaaatgtaaataaatataattaggaaaatatattatttttaaattatagtttgagttgttctggtagtttctatttgaattgttatgtaaattttagttgtgatttaagttgttctgttaattactatgtgggttattatacaaacttttgtaaaaattaaaaaaaaa

SEQ ID NO: 206150 - DNA, 1086 bp, Cannabis indica
ttttttttttagagaaaaatattttagagtttagtatatgtacttttttctaaaaccatttaatatatatttttataaattggattattcagaaattttttttcttttaattattcgttgaccagaattttgtttaaattaaaaaaagaaaaatatattttttcaatgatatttaaaaatgaatttttaatactttaacttttataaatattaaaattaaataatataaatgtcttttttatgattttattttttaaaaataaattttaaatattttaaatttaataaataattattttatttatttaattatacgcatgatgccaaaactgctaccctaagctccaaaatcgccacatagagccacttgtgattaaagaggcaaaactctataatgagaatagttcaaggggatttttacccaaaagaaaaattatggccaaaaatttgaatgtggtaatagttaagagggaaaaaatcctacttattctaaaataaatgatagattttatttttttacttttttgaataagaaatgatagatttagttctatttgaaaaaacaaaatagataatactaaataaagagagtctttaataaaattttaactaaataagtaaaaaaaaaaaaaaattagggacctagataattttttccttttactaattaatgttatatttttttcaataattttaagcatcataaattattatcctctccatccatccatactttcttcttcttccattataaattctccaaattgatttttatataatttcattttcctcttattacaaaacataatcatgattataattaatgacaatcattcataatcaaagaagaatccatattatcccaaaggggcctatagtatttctatttttttttaaaaaaaattaaatataaataaatggtatattattaaattttcctaaattctctttctaatatttatatttagtatccctcaaataattttactacatttttggtaccattttatgtataagctagcttagctaaaaatggatagaaaggggaccgaaactataacatttattgatcacatttttccaaag

SEQ ID NO: 206151 - DNA, 1302 bp, Cannabis indica
ggaggcttttcgtctttgtgatctattttttttcttttatgaagaaatgaaatgaagtgtagagtgttacttaagtaacttgttcaatcttcaaatataaatctttttaatatttattaagctttaaaagaaaataagtaatttaaactaatttgaattttataaaaattatattgaaatttctatttttattcagcattgttatagggcattattggtatcaagcatcttttataagtgtctccttacgattggttataatatttcctaaaaattattttattaagttatatggaattcgatatttaatttcaccaatagcagtatgacatcgaaaagtgtatcagtggtgccttttagtatttttcgtttttattaaatgataaaatagattttatattttttaaaataatacaaataggatcttaagcttaattttcgacattttttttaataaccaacttgaagacaatttttagtacgaataattgcagaaaaagtcattagttttgtcataacactctgacttatttactaagatttattttgataaaaattcaaattaggatcctatttagtactattttgaaaaatacagagtgtaatctatcatgtaacaaaataaatagtccaattagttaattttacaaaatatgtgatttaaaatagattttatcgcgaaaaaattagtagaatatttttattagaatgacataattctaacaagataataatattatgcttaattattaactccgtataaattaatctctaaaattgacacttgtgattatattatagagaatataaaagagtataaaaaagacttttcttagcactcatcttctgtaaatatataaaagtacatattttttctgaataatttcacaaacgtacaaaaaacaacaaaaataacaaaaatacggttttacggaattttaaacatttttacgatttttttgattttatttacagaaaatacgattttttatgttatataatcttgttaatttgttgttcattttttgttatctgtatgttattttttgttgttattttaatgttacttttatgttgttttcttgttgattttatgttgttttcgtgtcattttttagaaaccgtaaaatgtaaaaaaacattctttgaatgtaaaatgtaattattttacaaaaaataataatttatgtaattattcctattttttcgtgttaaattatgcttatatttttaagacttcgtgctatttgtgtccattttaaaaaacctcaattccatatttactactctaattcttattta

SEQ ID NO: 206152 - DNA, 601 bp, Cannabis indica
aatttatatatatttacaaaaaaaaaattacagtggtatgtataattttttagtatatagttataattaattataaccttagtaattaatatatagatgtgtgtttcaaacattattctataatgaaaattacacattttatatagttctttcttcaaaaaagttatttaatttatagaaaaaaaattaaaaaataaagaaaaacattataaagtaactattagtaacactaaaaattaaggtaacaggttactcctttagttacactatttatttaattttcccaataaaataatgttttcaaaaaaaaaatataaactatatttttgtaaaaacttcacaaaaaaaaacataaaaaaaaagaaaattccttctttatatagttgtaactaaaaaattacatagaactgaaatatatatatttatatatatattatattacattatcctttcacatataccataataatcatgtatatatatagtaaacaaattcggtaaaatcaccagtacataataatacacaaattttccccccaattcccctttctcaaacttgtaataatttctttaattatgagtaaaaaaaataataaaaaaa

SEQ ID NO: 206153 - DNA, 336 bp, Cannabis indica
ctcaattattttggggacttgggaaaaaacaggaaaacaaagagaaggaagagattttcaagttcaattaatggcttcagatgtaagataggattttcttagctgctgaatcacatactttcttatagattagatagtttagcggggactaaaattatgttgttggatatggatcacatgaatgtagcatgaaaatgctatttttagatttgcgagaagaatcccagatcagaagtcgttataaagctttttccaagtgtttttatgtaagttcagtgaaactttgagaatgaaagtgatagttcattgataaatagccaaaaaaaaaaaaaaaaa

SEQ ID NO: 206154 - DNA, 523 bp, Cannabis indica
gagagaaaatagcaactggctaaggcgtttggtcgttcagcctaggcaagttgctatttggtttcagaacagaagagccgaggtggaagacaaacaacttgagagagattatgatgttttgaagaaacagtttgatcttcttaaggctgataatgattctctccaagatcagaataacaaacttcaccaacaggtaataattataacaataatcattttattaattttaatttaatataattcatcatcatcaaatctggtaattaaattggaattccacccacttgagttgttcatcatctttattttattgagtactgataattttattgatgataaattcatcatcaaatttgctaaatacatttttgagttacacaaacaaactgggattcgatccactcaagtaaaaataattaatcttggaattttgatgcatagtttagtatttaattaggccattatatatatataaaacaccaactaactacatggcacatgtatatgtatgattaaatataca

SEQ ID NO: 206155 - DNA, 966 bp, Cannabis indica
tatatattcacatttatattcatgtataatataaagtataaagatgagataaaaagtgcatatatatgcatgaaaataactctttttctttaattatatctttataaattatatatattatccttttttaaaatctttatatattatgctgctgccgtccaatttgttagataatatatccaactaactatagtttataactaagatacttatataaaatatgcttattattgtagtggatattttcaataaatccatatgtgtaaatatatatatatatatatatatgtttgattatgtataggtggtgatatagggtattgtttgggcagttgtagtagtatatatagatattataataaaaataaaaagtggacaggtcagagagacatgtatccacgtatgaattaaatatattgttaagattttgggaaatgacattacttccatccatgacttgacacgtcattcctgcatgtcaccacgtaatataacataataatatatatataactatatatataaatagtgaataattagttatgactacgtacaccttccaatccatctctacgtacccaacctcaccagtactattaatccccaaattcattcttattattaactcaaaatcaaaccatatttaattttcatgttttttttttataaaaccaaaataagaatataggatcttatatattttaatttaataaatacaataaaaataacgccacttcttatgatcatattggatatttgaaagtgtctaattaacatattaaatgggtagttggagttgggcatatatatatatagaaaaaaagaaaaaagtaataagtggcatgcaagaaagtgtgagagtctcaattatctaaaaagaaaatatatattatattggaaataagattttgggaaatcttgacttgactggttctcacttaatattattaagtttttcttttcttt

SEQ ID NO: 206156 - DNA, 547 bp, Cannabis indica
agagagagagagtgatgctaacacttgaattgtaaaaggtaaagcaagtacttcgagaagtgattaatgtgtaatgataattatcaaagtaattaattatataattaaatataaggccatatataactatggtggttgttgaagaagcccttttaggcatgttcactcaccaaccaaaccgagtgatgaatatgagagagaagagagttgatcactccttttaggtttaatttcaagctcattatctatgattgtaaataagtcaacatttcctcaaaccattaataaccatatcagcattgctattcactaacgatactccctaaaagttattatattaaactatatgggacccgatacttcatcagaccactagcaatattcacatagaaaggtgataggcaccactagtatcttttagcatttctctaaccatatacactataatctctatccaagaatatactggggagttgagatattataactaaatagagttacacttagaaaaaaaaaataaaatgccaaaaatatcaatgtaacaata

SEQ ID NO: 206157 - DNA, 910 bp, Cannabis indica
agaagttttttaacggtcttaaaagtccagggggcatgatttggtacatgtacaaagtttagaagggtaaaaatcataattagactttttactaaaaaaataaatatgaattttttatcgaacaatttatattatttgatcgagtcccttgaattttttacgttatttttaagttctccttaaattattacaactattaaatcgtgcatctttgtctaaattaagaattaacatagcgaaaaatgactttgtaataatttcacagccctatgaactattattactagtatcaaatcttgccttttggaaatttcgaaagaaaaacatgattcggtatatttatagattttgtaatagttcgaacaaatttaaaacaatataaaaaattaaacaacaaaataaataaattatatttattttattaatgaagttaatttcatcaagatttacttaactatttatattttacatcttaatgaatgagccacaagataactcttctagtaagttaattataatattataattttgaactaaaataagatacaagtatttatttttctaaatgttatgtgtttttatttaattatattttgtaaatcctctatttaaatgagattctagtagtgtttaacacgattcatttgttttatttatttttatttatatttgtatttttctctcatccatatcttgactttttgtgtaaaatatatattgaatatgcattagtggtgcttttgtcaatatattgctaaatttataattatcattaaatattgaattgattatttattataagaatataattaggaattattgctttatataatatgttatcttgctggttgcatttaaattaataggctttttttcttcataaataattaatatgtgaattttgagattc

SEQ ID NO: 206158 - DNA, 701 bp, Cannabis indica
atttgatgtgctatgtagttaaatttgttttaattatcgtcattgagacagtgacggacctaaaatttaaagtgaggtggggtacgttaatttttttttttaatctacattaaccattacctaagttaggccacctccatgagaatcttccatatgttgctcgtttcctattttatagaggaagtatgttatttttttcattgtaattgttgtttttttttaaaatttttacagcgaaattgttggtttgtttagtaaataattttttttaaatttttagagcgaaattgttggtttgtttagtaaatatattgactaaatttagaaaaataaaataaaaataagtgtatatgatcaattcaaaactcatgtttttttttttttattggagaatgagatgttggtctttttttcgattgtcttgctcttttaaagaaaattgttaaagaacactagcggtaaactaatgatattttatatgaggtaaatttcttatattttaatataaaatcaaatgtgtactcaaagttttaaatgcatcaatcaagatatgactatgctggacatgagtaacaataagctttaaaaaaaaaattatcaaatttttgagtgatactatattactataccaagctataagaataaggatgaatgtagtcgtggaaatggggctataatggtatagtatatttttttataaa

SEQ ID NO: 206159 - DNA, 547 bp, Cannabis indica
ttttaccaatctacgacatgtagtgcagcgttgaccagcagttccaacagctgcaaacaaaatagaacgcacagccagtccaatgtcggcatcatccataacaactatggcattgtttccactcagttcaagcaagcatttaccgaacctttcactaacagtttgttgcaccatcaaacccacctatacaaagaaacatggtgagaaattctttaaagaattgttcataaaagccacaaatccacaaaagttggccttgttcccacatacacgtacatgtggccagttggaacttgtaaatgaccatggctattggctgatacaccagttttatcaataattcttattaatttcaaatttaaagaaacccatgacaaaaagtacttttatgtgaaagagttacctttgagcttccagtgaaagaaactagaggtattctagtatcttttgatattgcttgaccgatttctgcacctccacaaaaggaggtgaatattgcacctggcaagttgttcttctcaagaacctcagccacaagctttgtgac

SEQ ID NO: 206160 - DNA, 1298 bp, Cannabis indica
ttgtcgaagacccttggcacccttaaaccctttttgtaacctgccattcatcattagcacataggaagtctcccttaaacacaccataatccagtgaatgaatctagtaggaaacctgaaacttttcaacaaatcttccaagaaatcccaatcaaccgtgtcataagctttactcaaatcaattttcatcgcacatcttggagaagcatttttcctactataattctttattagatcctgaaaaataagaatgttatgagccagagatctacctttaacaaacgctccctggttttggccaatcaactgaggcaatacctcagataatctactgcagatcattttagatatacacttgtacagagtagtgcagtagcccaataatttttcatatacgtgtatattttaaagaaatttaccattaattttctatataaaaaaaaaccattaattaatattttaattacactcctaacgtgtgtgattttatttccaaaagtaaatattttttttatgaaatttttaattgataaaaacattttataatttaattatttatttttggttgagttgtttatttcatttccataatattgtatttatagtgaataaattttatatatttatcacttgatcatgctaagatacaaggacttctaaagctatcaacaaaggatgagtatttttttaataaaattgggtgctgtttgaggatgtaataattttattgtctaaattttcaggaacagttttatcctatgtagctcgcgataagaattatgttgctcatgatttggtaaaacatgtcctttgattagacgatggactatcctgatttgaggaagtgttgctgccagttgtagattgctgcatcgtttatcatctgtgattttaatcactacgtgaaaaatatatataacattatttattataacatttaaaaagcaaaatatataatctaatataaaattaaacattcgtgtattaatctagtatatatatgaatagaaatagagcttttgaaggattatttatttctttctttatttatttttttgaagagcttaaatagctaggaattgtaacaataacaaaaaaacatactagtcttatgttatgcaggttacaaatttctagctcaggaacaaagcgcccactttatttagtcaaatcttttttaacaccatttgtgagatttaaattttcgttcacagaaactacataagacggttcgaacagcaataacacattgactttcgttagccttcaacaattttactagcagatctgcataacag

SEQ ID NO: 206161 - DNA, 621 bp, Cannabis indica
gagaaataaggtattctgaaaatgtcagaatatcatccaacaaaacataagaaacctagataaacaataacataaatgactgcaaatgataaaaggggactcaccatttccaaacagctgcaactgatttgaagtatttgtttgatattggaaacgattctcgtcaaggaacacaggaagaacaggattaccgttgtttcctcccaacataatttttactaaaggcaagaagataatctaccttaacttgtattgcttttaaagtatgtggttaaaataaacagaaagtttccacctacaagagagaaaaaaggatcaaatctcaatccaacaaaagtatgatggaagaagtaaaacacctaacacctataaacaatgcccttatgactaatgaaccagaaacattcataatgtcatttaaatcaaacaagaggcatgcttattgcacgtcttgcattatttagacgcaaataaaacaaaaattttataaggaataaaaacgtttatttcaggagtgagaagcccacaaaaaaatggagaaaatcaggaaatattgattgcatgtgtttaatctaagcatagaagacaattcattttttattttattttatttatttttct

SEQ ID NO: 206162 - DNA, 919 bp, Cannabis indica
  modified_base (906)..(906): a, c, t, g, unknown or other
acattaatttaattaatcaccgtatatatatatatattggctttattatgaatagcatgcaaaaaaaatatagatgtatatatatatttaattatttaattttccttgaagtataaataattaatatgtgttagatatgtactagctagctcgatcgcctaaaacatatattagtttttttttttttaatttttcttaatgtattaattattaattattgatcgaatctcagtactgagtactgcatgctgatcatcattgtctaaataacatctaaatctttttgaattatatatatataatcatataattatataatatttcttaaggagagttatccggagcttcgattaaaagaataaataataattaatttaatttgactaattaattaaatcaaaaattaatgagagagactgtgctagctaaattggctcttacgaacatggtcaagttttcctacttgagttgactgtttgattttggcttctattctttttaataaatcacatatatatttatatatatattcctaattaatatttttttaaaaaaaactgtcatttgttaaggttaacctatatccaaaactggatatatatttattataaaaattacctatatataataaacagctatatatatacaaagcatgcaagcgcattataacttattaattttaattagtgcgctagctataatttaaaccattattaaacaaatagtaaatactattaatcatgaatcttgatgatgtgatgatgatcaatgatcaattgattaaataactatttaattgtttgttttttaattcttcatgatcagtctatctaaacatataatattaaattactactgcaaaatgtgagtacgtggaggaaaaaatattttgtccatttttatatntaaaaaaaatggt

SEQ ID NO: 206163 - DNA, 742 bp, Cannabis indica
gatgtttcatcaaatatgacatcccttgagatgtatactcggccaaaggagtttaagcatgtatatcccttatggtttaagctgtaccctatgaaagtgcatggagatgacctaaactcaagcttgtgtttgttatatggtctgatattagggaaacacttgcaaccaaatgtttttagggtagtgtaatcaggagaaatatggaatagcttctctattggagattggttttgaagaacaggtgtgggaagtctattggagagatagacagaagttctaaaggcctcatcccaatatttgagaggcatagaagcttgagcaagtaaggttagaccattttcaaccacatgtctacgctttctttcaactaaaccattttgttcatgtgtagtaggacatagatgcctatgagtgatgccaaattgttttaaatgatcagtaaaagatctgaattcccctccccaatctgtttgaatgcatttgatctttttgccaagttgtaactcagcctcagttttaaattgcaaaaaggttttcaatgcttcaaacttgtttttgagcatgtaaatccatgtaaatctagaataggcatctatgaaatgaatgtaatatttgtagccattaatcgaggtggttttggcaggtccccatagatcagcaactatcagttgcaaaggttcattgtaaacagtttatgatgcttttgggaatggaatttgtgtatttttccaaggcaacatgc

SEQ ID NO: 206164 - DNA, 939 bp, Cannabis indica
tgttcatgttgaattaatgtgttcttgaattacaacaatttacaatatatattccacttttaatctctcggaaactgcatcaacggtctcaatatttgagaaagggaaaacacacgcacatacaacagcacactacagcaagaaaggaaaaggcaacacaaagtaagtatgaattaccagtgaatcacagctctcgtcttcttctttaattagtatacgggacctgcatatatcacccaaagaaaaataatttcagctcttgagaatctcgagtaaaatgagcaaaatttgaactttgcaattgaaagctcacatcaatagctttccggttccactttcaacggcgctaggttcagtattacaattcggagacttatttgcgagtagcaaggaccggcgatgtatcagtggcacatggtcaagctcatcagatgggagaacaccattaatattgccgtccgacttgaccgataatagttcgccgaaagaacataattgggtagccattttagggagttgaaagccttgccaatgagcagcctaacctctgaaccaacaggatcaaacggggaagataaccaaattggtgattggcttcatgattgagcatgtaaggattgtcaattgaagaccgaggagaaggagaaagtgactagggcttcgaacgagagagaaatgtgcactcactctacaatctatggcgccaagaggaaggattcaagtaagccctccttagtaactttgcttactaaattttgacaactatcaaatcgtaccaccttgaaataaaaataagaaagatttaatattttttagtaaatcttaaaaattaatttagatcttaataaaagtcattttgaatgattaagaaaattaaaaaataaattaaaattttaaaactaattatgcgatataaaaattatttatttttatgagaaa

SEQ ID NO: 206165 - DNA, 1808 bp, Cannabis indica
catttagagatggaaattttaagataatatagtagggattcccaacttaaataaaaaatgaagtagagaagaaataatttctatctccgaatattaaacggagtgggaatgaagataacacttcccgcctcgtacagacctcatttaaattaatgttttatttatttatttttagttattatacatatatatttatgtgttttttgagtttattagtagcttattaaataattgtattttcttttatataatattgtatgttttgaattattaatattattataatttttgtgtaatttattttattaattataatttcatttgtgttgaaataaatgtgttccccataaaaattacccactccacaatgggattgagataggagaagcactctacacctatttcttctgttgacaaaactaaaaatgtcaatgtttttatttttttgaattaaatgtccacagatttaattagttttaaatatacaaatgtggaaaaaactcaaaagtagcagctgactgacactcttaaccgttactattgctttatacctagaatctagctaattttcatataaacatgcactaaacaaattaggaaaattattaacaaaaaaaaaaagtggtttgtaatctcaattactttagattttttggtaaataaaatcaccataatttcttaacaaagcaaattcaagtctctcactaatgtattaatttctgttacaaaaacttcttgaaataatacagttgtaatacttccttattctttaaactttgaaatactacttaaactgttccatacaccatattaatttcgtgtctaaattataagaatataaaaatataagtgcgtttttatttatatttattttaggacattaacagaacacaatctgctgtagatatatagtcatatatatttttctgcaattttttaatcttaaaaaaacgtttgaccgttgtattgtctgagtggatatgaggaaaggataagtagtgccacaatagaaaaatggtcaaaaagtcagacatatattctatctggagatcacaaaaccacttaaatatttttttagaataagaaaaagagagaaagagaaaaggagaattattgggtaataattaaaatttggaacaaaattgagtaaaggcttgaattaccagtccgacaataccaacacgttcttggcaactcacttactgagttttccacccatatcaagccattaaatttttttccttcaaataaccaaaaacccttttcaggcatctctgtttctctcccaattccctctcttttcatcatttttaagatctgcccaccttcacatatcgtctcatctcatctgggttcttatttattttgaatttttgtggttgaaagtaacagaggaagagaacacacaagaccatggatgctatttctcagtggcaaaaacaatggtttgattacatccactacctccgtcaagaggtattttgttaaatattaagttgtgtattttgtttataaagaggtatttttttttctatgtcgattgttgttttagcgaagatactagtattatatattattatgagtagtattggtataagccaccaacaatattgttgaatgtttcaaatgacttacaaaattgtgggttgttttgagaagggattcttggacgatcagtttgtgcagctaaagaaactacaggatgagaactcccctgattttgttgttgaggttgtttctctcttctttgaggactctcagaaactcctcacaaacatggcaaacgctttgttagtctctctctctct

SEQ ID NO: 206166 - DNA, 792 bp, Cannabis indica
gtgcagtgagtctttcttaatttatcagcaacaacaacataagcaataatacaacgtaccttggaggaaatcatcagtctcaggattatcatcatcagaagagatgttggaacccaaatcagagtcatcttcatcatctccatcagactcttcaaaaccctttatttcttcttcgttttcctcttcatcagaggagacatcagaatggtcttctttctgggacttcttagcagtgaaaagatcatcactttgcttcttttttagagaagctttttgggcattggccttggccttaccaccttttttcttattaagaagagcaactccagccattgaacaaagctggtcgaaaccgtacctgtgagtctgagagtgaggtaattgtggtaatgaagccgagttcgacaacccaatggcctatactcaaacggaattcctcctcttccgatcagttggtgaaggagtttgataatctatctagggcaccgctgatagagatggagtaacggagagagagagacaaggagttgtcttacgacttcgaatgaatttgaaaccctaataaaccctactaaaacctaatccacatttttcttccatttttttatgaaaccatttcatataataattgaaaattagccactcttagataataaaaaattagatgtatatattttataaaataaatagaatatttatccataattatttttttagtaaaaaaattatctcaaattatcaaagtaactacaaattttcctatttcgtcacattttgttactagtaaataac

SEQ ID NO: 206167 - DNA, 873 bp, Cannabis indica
tctctcgttgaggccaattgggccaaagcatttcgcccagtgtcctcccctggccagatattcactattgacttggcaaataaaaaccacaatttgggaatcgttgaatgcttcgaggtattcgactttcatcttaagatgcgagctttaaacctgtgattaaagcttcgtactcaaccttaatgttcaagacggggaattcaaaccttaaagcagcgtgtactttaaattttttaggacttatcaatatgattccaccgcccgaatctttgctattagatgcccccatcaacatataaatttcatccttctcttgatggcacctcaggcgactcgctcttctgtaatgatagccagctcgtcatttgaaaattccagaatgaaattagcaagggcttggcctttgatagccgaccgtggttcgtatcttatgtcgaattggcttaattcaattgaccatttaagcagttgccatgacacttcaggtttggtcaatacttgtcgtaagtgatagtttgtcagtacttcaatactctgtgcttgaaaatatggtcgcagctttcgagaagcaaccactagtgtaaatacctatcgttccatttgtggatagcaagtttcagcatctagtaagcatttacttacatagtaaaccagatgttgtctaccttggtctttgcagatgaacatcaagctaatcgtgtattcagacactgccaggtagattgaaagcacttctccaggcctctacttggatagtatcggggtttgccccaagtgcgttttcaatgcctgaaaagcctcttcacatttatcagtccattgaaacttttagttaccttttgttatctgaaaaaattcaatccccgttggttt

SEQ ID NO: 206168 - DNA, 669 bp, Cannabis indica
caatgagtgaggggactgagttagctaagtgggattagtaactcggttgaagaagataaatgggagaacatgcttgattttagcatcagtagaacttcagtcttagccaaaaagcaaatgcttgctgtactaaaggttgctattggttgtgtttgtgtatcgccagaagctaggccaaagattaagagtgttctacgcatgattctcaatgcaagataggtgtgagagattccattttaatcgagtcaaaagtaagtacgtatacggttttgcatgtaaaatagtaatgtgatgagtttgtttagttctctactagattagaagtggtcaaaatttgttgttgcctttttggagtattattacatcattatatttattaatatatatatatatatttatatattctagcaaatgaaaagaggaaaaatgtaaagtaaaggaatgtgaacgagttttatttatgttattaattagtaaaacaacaacaatgataggaacaatttaaacttgaacggcggagactgtcatgtttaacttttgtgtctactttaatattttaacatgaaaccaccacccttgtttgtatgactttttttttcaggagtcatctatgtaacgaactaaaaatccataataaaaaaaaaaactcattttagcgtaaatttcttt

SEQ ID NO: 206169 - DNA, 874 bp, Cannabis indica
aggagtttttctttcgaacgagttgaagattcaaatgtagaacctttcgatagagcctgattcaaaagcttccttgtcaacttttcccatcacaatttggtatttcaaatcaatccatttttcgaaacggactgctttgttcggaggaacaaagagagtgattgtgttgttttcgccatagataatgaatctattttggtcatccatgaagaatatgaaatcatcatggcaataagggttaataatatcggggttaagatttttatcgagaatagttgacattatttggtaccctgtgttttcgagagctttcactatatttgcaacttctactattacaatgtttgtgtttttggtggttttgtaccaatccaaataacaagatcgacataaattattagaatggcgatattcgtaataattacataaagattcataagaaaaagattgagaaatttgaagaagaagaatgaataatatagaataagaatatttaggagccatagattgaataaaggagctattagttattgattttcttttatttaggaaagaatttgattgtgtgttacgtattatattaattttgttggactttacaatgaggcggtttgacttatttgagagctttatttattttgtgtttaatgtttttgacaaaattactagatttaatatttaattaaattaaataaataatgtttgaggtcactggtgtattgtttaattattgataaaatatctataactatttaaatatatatataaataaatattgatctttatataatataagattttaaaataatattatgcatgatttaagggttagttggttagaaaagaaatcgtttaaaaaaaaattatatttttt

SEQ ID NO: 206170 - DNA, 516 bp, Cannabis indica
ttttttagtaagtttaaattatctcattaaatttaattacataattatatttatttaatatattctgtaataattacataaacaaactaatcacatataacaaagattatagaatcttattcactttccaagttgaaacaatatgtatatgtctagctatatgatcttaaatcatggtcctacacagcttaccgtaatgaacccattccgaagagtgaagtagtcggcttttgagattgctgagccaatgaattgtcgcactaagcaaacctaaccaaagaaaattacattgtgagatcaaatataaatgttacagataacgagggtttgggggggggggggggggggtgagttttctaaccaaaaaaaaaaaaaaactttaaaggttacaaacatttaagaaatttacaaatttgttagaaagttgtgtattttccattaatttttttttctttcatttatatgaataacatgtgcctttctttgtttgtatatttatgttacataatagacttt

SEQ ID NO: 206171 - DNA, 1017 bp, Cannabis indica
aaaaaaaacaaaaaaataaaacagaacaaaaaattaaatctagaaagttatttgttagatgatgactatcatcaatttttttacttttatttttaaaatacacattactaaaattttactttctatattttatttcaaactgtatactatatcaaattttttaatatacatcactaaaatttaattttctaaaattttaatatattttcttcatttcacatataatattaatacttatatatatttcgaaataaaaagcaaaaaaaaaaaaaatacattaaacaattaataaaatatatttagagcaatgaataatattctataataatataaaacatgaatagtaaattttatagaaactttaaaatagagaaggagttaagagcatctgatttagcgtgttttaatttaattctttaaatatttttaaaatttttttattttaaagcatttgatgtgaatacttgaagtatattcccacaaaaaaaattattcagtgtcttagcaaaaaatgaaaaattgagcatatatatatatatttaaattttactacagagtatttattttttctcttatcccatatatactgtatttacgtatattaataatttcatgaacaaataatagtaatttatgtattgctactgctagactaactaaactaaaccattatgatagtacgtagtcaatttattctcctttacttcaaatttttatgtttccctacactctctccttttattctctctcatcaaatgtaataataagatttaagagattttatggggtcgaaatcaaactccacataattaataagggcaataaacaaaggagtacaatgttttcaattccggaatcaacgtgagcttgtgtttttgttttgaatttttctccctataagattacattgaagggtttagagggtctaatcaactttttaaaggtacaattttcctatttgttgggaccatcaataatatagaatttcgggttcatatcccatgtgatttttttttt

SEQ ID NO: 206172 - DNA, 1364 bp, Cannabis indica
  modified_base (808)..(808): a, c, t, g, unknown or other
cctaaagtttattagagccatgaggtatggaataggttgaatatacctagacatagcttttgcttatggatagctataccgaatagacttagaacaagagaaaggttacataaattttaagattatttgatgaagattttctgttttgcttttgctaagaagcaaactgaaacttcagaacatcttttcttctcctgccccttctcttttctttgcctttcctatgtgaagtcatgcctgggatggaatgttgaaactttagctcttattagattgataaggtggctagaaagaacaaagaccagcaagtttaaaaaagttgtgtatactgctacagttgctgcactcgtgtaccacctgttgaagaatcgcaatgatatattgtggaattcaggacatctatcaaacaccagaacaagtagcaaacttgatcaaagctgttgtgaagaaccgaatttcctgcacttggccaaagaaagtgcagccggcggatgaagaatggtttttgagattgtagttatactatgtgtatctaccaaagaaaattgaattgcttttataggaaaatgtatagattgttcatcaggtcgtcattgaagatgctaaataggttgtaaattgatatttggagtaatgaaattcattgattgacaaaaaaaaataaaaaaattagagcgtctagaattaataatttttctattatatatctagtgagaataaagaaaactcaaagtagacatagctctattactgtacgcgatacagggagtgaactactacaaattgttgtctctttattttacactcnataatctctcattttttgtcaattagcaagccggtttggcttaggggtctgtgtcgagatttctcagtcaacaatactaaatatagtattgtattaaataatattaatacaatacaatataatataatacatataaggctataatatatgatataatacaatacaacacggtgtactaacaggtcctaaaaggtacatcttgcgccattttaatatatgctcaaatagttcatttggtatatcacattagatcgtattgtatattgtacgtatagtattatatattaggttatgctatatattatatttttatataatagtatatgttaaatttttaattatatatatccacatatattatatatatacatatataatttaatattaaacataatattatatttaagtatgatatgtaatacaatttaatatataatattatgtaatataatagcatattataaatagtaaattaggtatatatgcagtcgttaagagtgtaatttagtatagtaaaatttactcttctggtgtagggtttatataattatattat

SEQ ID NO: 206173 - DNA, 906 bp, Cannabis indica
taaagttatatatgaattcaattgtaaaagaattataatttttccattatcatggtcagcatataatcttataatattgggtaaatactattttatatttttgcattgcattatctattttgttaaacaacaactcacttatactttttaaattagagcaaaatagatcttaaatttaatttttgtcaaattaagacatataataacctgacttaaaaggtattatgagacatcttactatagttttttgataaaactcactgcatattggttatttaataaaaaaattgacaaaaattaaattcatgatatattttgcataatttaaaaaaaaaatagaaagttcgaattgacatctaacaaaataaaaactcccatcaataatttttaggtagaaaaaaaaaaaaaaaatatttacctataatatttgttaagatatatatacatgaaaatctaaattcagttataataatatataaattttatatttttccttcgtgtataatattcctttgtacgaacgaccatgaaaatgatttaacttaaagaatctgaagacaaaaaaaatatatacgagttgtaatgtttttagtacttggagaatagaagagataagaagcgagaggtttactaggtcagtgtcatttcattaaagagagagtaacttaaataaacttaaagtatagcatataagaatttaccctacatatcttactttttaatcttttcaaaataaaataataattttaattcaaaaattcaaaattcatgcccacaccaactccattctcctaccaattttgcgccacaaatatatatttgctctcctataatacataataatatataatttataagaatcaatgtctatatgtaaaactccaatttatctcaaaaaaaaaaaaa

SEQ ID NO: 206174 - DNA, 735 bp, Cannabis indica
tatatatatatatatatattgtgtgagtgagtgtgtattgatatgaattgttacgtttttaattagatgaaatatcaacacttaacgaatccccactggattctatctctcttttaaatcttttctttctttcttttttcagatatcaaaactactctctcactcactctttactcactttttccttttcttctctctcttttgaacatctccatctacaagactacaactacacccatacacatatatatacacctatatatacatatataattaattaatgagagaattatatcaagtactgcaatacactctttcttattcaacaaagtaatattagaaaaaatgtatggtactatatacacccatacttaaaaggctatttagatattcagaaaaacttttaagtgatcacatatgcttaatttgtagtttttagaaccatgcaaacaataataaatagtttatagtataccggaaaataaaatttaaaaagctataaattatcatgcaaataataaataatagtcacttatgtaatataatatttaaactttattttttgtattttaaattatttaaattttttgaaaaatttaaaaatattctaaataattacaacatacacgattacgaaagaaataataaatcaaaatacttcttagataccaaaacaaataaaaaatatacttaagagggtcattgatatgaaaaaaaaaataaatacaagtagac

SEQ ID NO: 206175 - DNA, 1266 bp, Cannabis indica
attctcaatggtcaagattatataaattttctcagtttatattggtcaatttctttcattatatattcattatatatagtatgtatatatatatataggatcttttagcagcctattggatgatttaagaaattgatatctgaattatagaatgtaatgattaaatttcttatctaataaaactataaaaattcaatctgattttctttttgttactatgtcaatggaataaattgaggggaagaacaaaaatattaaatgtactgtcttaatcaattaacatctcaatctttatatttttttaatctctattcacgcggcttgagttgaaatgaatcttaaaaactaaaaaaattggacacttaatataaaaataaatagtattttaaaaagttattattttttaagagatattttttttattttgagatcttaaaatgggtgagtcttaagcgcaacctagcccatcatagtctaggatcgactctgtctctattttatctctattatagaggggaaatagtaatttctcaaaaaaaaaaaaacacatatgaacatagttgttggttactagcactatgatctcatgaacaaaatgaagaacccaagatctatatcatcactttgtcaatgtcatacattaatcttttccattgattatttgaatattacccctttgatgtcttgtagttgtagagtagtggtatagatgtttttgctcgcgatatgcttaactcaaatatttttttttatgattaactgtgaatatattgttatgttcatagttgcaaaatatagattctaaattattatttgatatggttgaaaatcaattagtaatttttataaacaacaaagttagtctaaatctaaaatagtatttttattcatcttgatatttaagagttaaactatttctcatggtgaccttatcaaaatcattgattcattttgtctcatccaattttgttgtagctgttgtttttattatgtaaaaaaaacatgcaaatttacttggcaatatattatagatgaatgatgaattaaatgaaacaaagggaacattattattattattattattctatgaaatgagtaactataaaaggggaattccaatttctaccttatgaaaaggtgagggaatattctaaaatctttactttatatattcataataataatggtcacacactttagtgttcaatagaataatagtgctaggtaatcatgattttgaatgatgataaatgattttttaactac

SEQ ID NO: 206176 - DNA, 614 bp, Cannabis indica
aacatgctcaacttctctaacccattcattggagaagtagcgacccatttgttagccccagaatcaacgatcgtttggaagcattcgtttgtgattattgagagtgattctgagacggtgatcaacacgctgaaggagacttgttccatcggggtattggtaatatgtgcttcaatgtaaaatctttaccaataatgtgactaagtgaatttttaccaataatgtaacgggtatagtcgattcgtcctccataccaaataaattattacccaatgaccataaaatctaacattttctagttttaaatatatctaaccattttattttaaaaaaaaacgttttattgtttgtgagttaggcctatatgagaagcccaaagccaaatataaataagggctatttacaaaaatatgggaaaataaagatgtgttttgatatatatggcataaaaacttaaatcaccctaaatatggcattttttaaaaaaaaacttactaaatatgggaaaaactcataaggaatgccataaaaaacttaaaatttagtgtttcttttattttttttttcttttttttaaaaaaattaaaactaactaaataaataaaaactagatc

SEQ ID NO: 206177 - DNA, 1596 bp, Cannabis indica
tacatattctcaattacacgcattaataggtatgcattctaatttagtacacatacatacgcctacattaattataaagtaaatcagtcaaactataatgactcatcttagaactctataattaatcattctatatatctctatgtgagaaaattataactaaactcgagaattaagttaaactaaaatttaatcaataaataataatgaagataaaaaaaacaggaatgaatagagtattaaaaaccaaacgattaaagcaacaagacaatatataaaaacaacatcaagacatatactagtacaagtcatatagatcgatgtgacctataactctacttcagttctgaaacacctccaaaatcatttttatttttatttattttaaattatttttattgattgaacaagaatatggtacaactacagtcgagattaattctctattagattctctcaaagttttatctctcacactcttacacaataatctttttcatctacagaagattcttcatacaaaattcaaactcaatatgtccctctctctctttctctcaatctttctctctaatcaggatcacctctcgaaactcatctgatctcgtcctcttaaaatgataagtgttggtatttatagatataggatacatatcctaaattcggtggctacaagtgctaagttgttaagttagttacgacataacaaacttaacaaactcctcgtaatagtatcttcacgtcagcataagataaagtgatcccaaatgagacgtacgcttcttggaagaaagaccaaagcatacgttgaagggacttcccgaataggaaaagcaacagttggagtcgattatctgaaactcccttccagaaggaacagctagccatctgaaactcatttccaaagaaagactagatttcttgaagactgcttctgggtggacacgatagacatttaagaatgcttttctggaagaaatctaacttttcataacctgaataacttttaaagatctttttatttggagcaactatacctcaaattctacctagtttcttgaaattaaaatattaacgggaatgaagaaagaatgtaaccatcatggttggtattccagatatctcagtatactaacacttaagattgatcaagttcaagcaatgcttgaacttgtttactgttaagaccttaatcgcaacatcagcagaattatcttctaatctgaccttctctaattcaaccaatccctcctctgtcttctcctaatccaacatagtcacatgtccatatgtttactcttttcatgttaaactagattcttgcaaagattaatggatgaatgactatccgagtcaatgtcactccactttttatttatttcaatttaaacaaaatttcttgaagccataatacttcgttgaatgtttctgtagcagtcataaattctactttcatggtagaaagggcaaatacagactgtaactgggccttccagcatattataatatcttaaatttagaaatggattagcaatcttaattagcttaattaagcgtattttcgtaattttgtcatgaaaggggtaaaatgataat

SEQ ID NO: 206178 - DNA, 646 bp, Cannabis indica
cttctggcccgtattgtggttcagtagggatatagacgtctatccctttgttccgatcccatataactagaatatccatcacttattgttgtccggttaattgaaggctcgcccaatcaacacagtaaaaattcactgaaaaatgatggaagtttgggaggaaaaaataaccctaactcaatccttgcaaaatcaaattctttctaagaacacaatcaaaaacatattaatacaagtgactcgtgaactcattaatattctaatcacataaaaaatcttcttctaaaattattcattagctgataactaattaaagttaagtcattttcaaaaatatcggtcaacaatatataatattatataaaaatataatatatatataatctaatatattataatacaatacgtaagcgtaccaaaagagttttaaaaggttttagtgaaggttactacattcattcacattagtaactcatagtgaatatagtcactaaaaatttagagagtctcttaaaatgaatcactaaagctatttttgtagtactttgcatctcattttaatgttgattgcagcttaattagtgaatttgcttctcctattgctttagttgaaaaggatattcgttattaattacaattactttta

SEQ ID NO: 206179 - DNA, 1194 bp, Cannabis indica
aaaaggttcgatttacatcgattatatgtaagtgtatatatattatgtcaatttcgaattaaatgtattaattcaaaaatgatgatgcatttaaaaaaaaaacagattagttgtgtcaaccacaaaataatttcaaattcataaaatgagaatttatttatctcgtgcagactttaaatcctgttattgtatatgaactattttgctctccctcataaatccattagatctatattggaaatatatgagttctaaaaataataaggtatagtaattcgtgaataaacgaaaagggaagaaattagttaagtaaataatacgacaactacacaaaaaaattgtttttcttggtagtgtatattttctaatcttatgattataagaaaagtgtcttaatcttggtgtgtcgtcggccccccactctagggcgcatttaatttaatatccacacactcaaaacaaaaggaaaatttaaaaagctgcaattaaccaacacaagagaaaatttaatgtctacaattgctaaatgacaatgcacataaaaataaataaataaataaacttgttaggttggtgagttagttttaatgttgttttcagaagcacttcttcctaaaatttatatatatgtacggaaaaagtaatacatcacttcattcaacatgtctattatatataaatggtgggtgcaagtttataccacaaaaattaaatgtaagataaatgttcctctcactttctctctaaaggttaaagtttttggaaatttttcctccaaattatgcggtgatgatcatttatgtttccactttgagtggcagacactaattttacatgtagtagtggttgggtaacttgagtcaataataatacaaacattttctacaattttgtcacatgaaatttttataatatattttatatatgtttcatatatatatatatatgttatcttcaaatgtcacattttgtaaatcttgaattttataaagttgattgatcgattattttattaaataataaattagaccttatatttttaaaatggtacaaaataattctaagcttaatttttattaatataaaataataaaacttaatattaaactaatctggtagtatctatgaccaaactgattacatgatttgtatttttccgtgctaaaaacgttcttcaaattttatgttaaaaaa

SEQ ID NO: 206180 - DNA, 1053 bp, Cannabis indica
tccgaagaaaataaccaaacacagctaaagtttcaaggcagtaaaactgccaaaaaaaaaaaaaaacagtacaaatgttgtttccaacgtggcacagtataaatgaataaaatggaaaaaaatcagtagtgggtagtaaatttcccaaacaaaaggaaaggttctcccattttcataagaaatgtctttccctttccttaacttactttatattaattatatttttattatttaaaaataaaaaaagaaaaatatgcccttcaaaaatatataaataaaaaataactacatgttctaataatgaaaatttagtcaaattaagtcattccgattacctatcctgattatgtaaacaaaataaaatgattctgatttcctttccggtcagtttagtaaacaacaaaataaaatattgtttccgattattattacagtttagtaaacgtgccaaacgccacctaagtttacaatattagaatcgtaactatgctgtattaaaacattttagctgctatctgtttttcttcattcatatcacatgttagtttgctatgaccaatcatatttattttagatgtaatcaacttttgtaaccaataactgagttgagattttagtgcataagttgtgtgtttagtatgtgtttatttatgtgtatgttattacttcttattaatataaattaagtgtcgtattctcttaattaatatatatatatatatatataattataataatatgtaagtattaaattttaatttttatcatatgtatagtgtatttggtattgattgaagcgtgcaaagttagtttgcttcgtattgtaaaaggtaattattaaaattttaataatatttacttagaagagtttgaatatcttagatatttatccgtagtgaagtaggttctgcaaataaatatactgtaattcgataagttgcaaatatttttatgcttaaatgtttttgtgattattttgcattcgtgttggttgtttgtaattattatcttagatattaaacttgatttaatatacactacaaaaaatcttac

SEQ ID NO: 206181 - DNA, 946 bp, Cannabis indica
aatagtactcgttagatgcctccgtaaagcttcctttgaatattatattccttttgttaatggctgcaaccattactctagccatgctcacaaaggggcttcccttgggcttcacatgtcgatagaatttttttccaatcaaaaacacggtcaacgcaatcaacgtggagactagacaaatcccaaaccctaaaccccacccgacattatcctcgatgtacacgaggaccatgaagctgaaagcgttgccaatgaacaagacaacgaagtaccagttgaagaagctggcctggtcatctcctttttcgaactggtcagctcccatggtggcaatcgtgaagcgagaccctcccactccaactgttgtcagccccatcgccgcgtacaggatcaaatattgaaaatttgtggggctctcgcatggcgatgtattagttgaacatggtgacggccttagtgagttcagactccctattagcgttagcattatcatgccctgaaaatatttagttttgtaatgaaaaacccatccaatcaaatcaacatataattagaataagtaagtattaatttgtaccaacaaagcgatgaaagatgaaatgctgacgacgacaaagttaccggtgaaggagtcggcgatgactgcaccggcaattggaaaaagattgacaaatccaaacccaacattattgatctttgtagcagctatgcttccaatattaaactttgttatcaagaatacaatccaatttgatccccaaccacccgcagcaaccgacacacccgctagattacctgtaagaaaaaattattaacaaaaaacccaaatgaaactaactaatattaacacacttcgaaataaaatatagaataaatagacgagagagagaccaagtataaagggtaaagtaatccagcctcctcgtttagtatgatcatgatcaac

SEQ ID NO: 206182 - DNA, 854 bp, Cannabis indica
gcatatgctaaatgaccaccaattcctctactgcagggtcttaagcgctaagtatctctaaaggcaatttatgaagtgctcatataaaagtttttactctttgtttaggaagaatgttgtaaaagccaaagaggttctgaagaaaggggtttctaatggtttatgatggaaaagacacaaatatatatgaaaagactcgcggaaaatccatggcaaagagtacgcaatattttgacccgctgattgatgttagacaacggagaatgggatctcgtcaagctctattcctttttttactcaaaaagtttgcaatattctaaaagggggtaagcctagtagttttctctagtaaatcttcttacttggtacaagcttttgatcatgctcctctctgtgttatggctccatccctttggaacaatttatggaatagtaaaattttggagcaacataaagttcgtcggtggtgcattctctctaacgtctttccaatttgagctctcctagctaagagaatgcagatcgaagacacatcttgccctctttgtgaagggactatggaacatcttttcctcaattgcaacttagctttccatttgtggagatcttccctgtgctgggagaggggggtcatgccagttcttaattcaggtgctagtgtctagaatttgataaaatttctatggagcctgaagtcaaagggagtcaatgttgatgatctttccctttatgcttcaattgtggtgatatgatatggcaagcccataatgataaagtacacaataacaatatgaataacattaaatattatatggactctgttacttattattatgcaaattatgactcttgtt

SEQ ID NO: 206183 - DNA, 1135 bp, Cannabis indica
acttgagggtttttctgtcttttgaagaaattataacttgagagtttaattagaatttgagtaattagaagcaatttttttttatgtattaatttttatggaatttttttggtaaaacttgtttaagtttttttgttttgtttttttttttttgtaaatttaaggtatacatatttaattgacactttaaatttataaaaataaacatgaaagaataaaaaatgatttttgtgattaaaccttcttaattgtcgttttacttgcattttactcttcaagcttaaattttgacggtaaaaccctccaaattactgaactagtagcaaatttaaagtattatctattttttataattaactttctaatatagactgcttatgtggacacttttgtacatgtgtcaaatttatattggtaccgtcaaaatttgacgagcttagagggtcaagtgcaagatgagtaatagttgagagggattagccgcaaaaaactccaaaaaaaaaaagagttaagtgtataaaattaaaaggaataataattggaaaactacataaattctatgattatataaaaacttaaccacataaaccgatttttagttagtaaaaccctttaaatctcacttttgttaactatatacctatattatttaaaatgttctgttaagtgttacggtagacatatcacagtatatacaaatatacacgcgataaatttttagtgagagatattaacagcaaaattatctgaatttttagttagtaaaaccctttaaatcccacttttgttaactatatacaaataattattattttattttagtttatttcactatttcaaaatagtatataagatttatgtgctcaatcaaacactataatttaattaacagtattctaattaatattaccgtgaataaccaaatacaataataagtttacagataatcatattttccttcataatattctccttaattagaatattttgaattccttataccaaacgccccctagtaacatttaactacataattaaaccaatttgttggtggtaaagtgacacttaaccaccaatttgttggtggtaaaatgacacttaaccggccaccaaaaaaattagtttatgtggttaa

SEQ ID NO: 206184 - DNA, 2301 bp, Cannabis indica
tattcaggatcggctctgtgcgtaagtggattaggtccgcacttaaggcctactcattttaagggcctaaatagaaaaatatttttttaaaagatacacataattttttaataattttttaaaataccatttatttttataggaaaggctaaaaaaaatttttacttatggcccatttcatctcagagccccgaccctgatgatattgtatatgtgtgatcatattccattgttgcgagcttttatatttttattatgtcactatttcaaaatatatttttgcaatattcctatttagggtggtgccttggtggcatagtggttgatacaaacgtttagagaagtgttaaaatatgttagtagtagtatccaaagtgtcatatattgaatcaaataatagatctattataagatttaataatttaatagttaattactattagagcatctcgattgaatggagtgttaaaaaatagtatattactatatcttagtacatttaaaaaaaaaaaaaaaaaactattcaaatggtgttctaaaatatgtgtcatttggcccaaatataaattttatattttttatttattataataccactaattattatgatttattaaattttacataactttatattctttatttactacattactattatttaagcaaaaaaaaaattaatgatatttgtatatttcaaatataatattataaatgatgattaataataattatatttttttgagcattgctattgggaacgaacgatttccaacaccttttataagtggtgtcccacgattggttgacaatatttcttaaaagttattttcttaagttatatgagtcttgatacttaattatactaatagtggtatgacaccgaggaaggtgctagacactaatgatgttttttagtaattttttaatttttttacatcttcacattagagcacaactgtaaatagtgagctaaatataacataaatttaatttttatgccaaacttccaaattttacatcaaaatgttcttaaatatttttataactatttgtaagatgcttggaatggtgctaggtataattaaatgcatattggtggaaattaaagtagtatatccatgagaataattaaagtttaaaaaaaccctattataattattaggtaaatattaattattttctttggttatatgtatgtagacggatgagtaatgatatgtacacatataaattattacatatatttacgtgataatttctctaatgctattatgagatgcgtattcagttccgcctctaataatcaaattgttattgtagtgtaatttcaattaattatttttatttaaattaagtctcactaacaagtaaataatttactacatattaagtacttgtgtgtaatttatatgtacacataatcattactcataaacaaatatatataatttcatacatccttaaatataattaaatgtaaaaagtaataagtaacaataaaaaattagaaaatccataatatatagaataaataactcattattattaatcatttgttaacataagattcaaaacatataatatattattttgatactttgtatacatacatatatatataaaatgcatgttacataaagaaaatacatacatactttttagatatttaaaactctaaaaattacatacataatcaaattatatatgtaaaactcattgccaaaggattgaaaaattgccctgaataaagagagaaaatagttatcatcataagtaaccataatccataaaacctggaggattagggcactgcatggtgatagtgttccatccaaaagctctgatattaagtaaaaaatttgagttcatcactctagaagaaaagaaatattgattatatataatatgattttagtggatgagtatatagaattaagtgatcaaacaatatatatacatgtataagtatatatatgaggagagtagagaaggttttaatggtgtttatatagagatctgaagagagtgtggtgaagatgggttccttctccaatggaacagcatcttccatggcatatgcggcgaccaacttcaattcattcatatataaataaataatatattataaccatccactattaattaattataagcctttaattatatatttatagtttgctatttacaatttttgttctcaccttattattatatctcctcaatttttagccttttaaaaataatttttaaactattagttttgtcatacatagtaattaaaataataacataattgtt

SEQ ID NO: 206185 - DNA, 568 bp, Cannabis indica
atatttagtataagttgaacccttatacccgaacatgtgaaaacccaagcaaaaataaacctattgccaaacaatgaattctaagaaattggtcttttttatttgttcgttttgtttaaagaaaatttcattcattgatgaaattcttgatgagatgaaaaggaagattgaaatagggctgtagtgaaggattacaaagggaaagttgttggtagtttgtcttctcttttttatggcaaactttttcttatttatgttgaaactgagacattagattaaactttaaattagtgtattatggtagtttttcttttgattttggtgaaaactcattataaaagagaaattttactttttacccttaataaaacatcgaatattaaaatttaaaccctccactaatttgtacaaattaattctattgattacatgaacttcctattttaccatttttttaaaaaataaaataaaatttaaaaactaaaaaaacctccttctctcttcctctctctctcttccttctcatgcacctctctctctctctaagaaaaactagaaaaaaaacctt

SEQ ID NO: 206186 - DNA, 1380 bp, Cannabis indica
gttcatctctattactatcagtttttctttctttctttctttctataatttatacacataaaacaactaagtaccaaaaggacgtttaataataataataaaaatggaagtaataaacagatatgttacaattaagagtgagattaatgggaatccaaaagagacagattttgagattaagtgttcaggtataagtgttgaggttggttcaaacgatgtcgttttgaagaatctgtatgtgtcaattgacccatatcagattaatcgcttcaaaactcacagtccaagctctcaaaacagcacaactaatgcaatggccatatctcccggtcaggtaataattatttattatatttaaaggaaaaaaaaattgtatatatataacataatataatgatgagaaaccctaaaatcagatttaagtacaaaaaagaaaacttggaatgaaagagagagacttggattaataatgtagaaaaaaaatgagtttaaggtggatctaaaagttaaaactttaataatcaaactatttttatttttatttgtttgatgaaaaacatttatcaaaaaccatttaaaactttaataatcaaactattcttatttttttgatgaaaaacatttatccaaaaccatttaaaacgtttatctctataagttttttaataagcattactatatggtactaatagtgtctggcatcatatgatgtcttgcgattagttaatgatattttttaaaatttattaaattaaattatataagatctaattcttagttgcactaataacgatatgatacatgagaattagcatgtctcttctaagattagtgtgcaccttatatcgtagaattgtattctttaatcagcttttggctcaatctccgagtacacctatggctctgtctccactaaaacgttaaaaaagtattaacagaaaataaaaaaatcagacttaaataaaaaagagaaatgttaattataacttcctatatataataatcttttagttaacttcaatcctcgaaatcatgtgtttgattatttttttaaaaaaaaaaataaaaatcattgcggtatttgttatagttacaatatcgattattcctgtaaattttgaaaaaaattcgaaaaatttgccattgtgaaaatagagttatatatttcagtttactacacatgttaaaaaaaattcaaacctactttaggcactataaattattccagattttttaaaaatttacagaaaatatatgttgtaagtattataacgaatacctccatacaaaaaaatgaaaaaaagaccaaaaaaaaaatcaaaatgtatttttagataaaaaattaacagtattacttaaaaaatcaattaataatgatac

SEQ ID NO: 206187 - DNA, 1007 bp, Cannabis indica
tcagtagtgggtgtaaatttcccgttattttttgttgttatgatgttattttcgtgttagttttatgtaattttcttgttgttttcgtgttatttatataaacaatcgtaaaaatatatatatttaaaaaaataatcataaaaatataatttttttttttaaaaaaaataatactttatgtaattttctcataaaaaatgtaacattaagtaacaatgggagatcttttcttgctaataacagttttagtcataacaacaaatctttattatattaaaaagtagtatttagataatagttgactttattttgactaaaaatacatctagttctagttgtaatttgtagcttgtatacttttaactaagattttgttagaataacatattcttaataatgatatttctttagtcacaattggctataaattttgttgagtttaaatgtaagttttaatttttttttccttttttgtagtacgatatgttgtcacaatacagcaagatgtaataaatatttatacaaatgtaagtctcatatatattttcaatttaatatgagtttcatatatttaaatatatatgagattaaattatcatcattttaattatacaaaaaaaaaaattgtgttaattaattgctgttaatttttttttcaatgatttattgaaaaactctcttgttggtagtagttagattgtatgaaaaatttgtatatgtttgcaagtaagtgtttgacccttattgtattgtataccttagctaaagaaagtattaaaattgttctttgttaattagaagaaagtatctaaggcaactctcagctttgtaaaaaatttgtagagctggtgtgtgttggaagaggtatgcccccgtttatatgttgtaaattgttagtatcaattaggagttttttcactcaaaaaaaataattaatgaagtttccttcttgataaaaagatttgtacgaaaaaagttttgtaattgaataattgaatggtaatgtt

SEQ ID NO: 206188 - DNA, 1058 bp, Cannabis indica
atataatttatatataaaaataagaatatatttctcaatttacaatttttttataaataagtttttttcacatataataatgtaataaaatttgataatatatattattgtaaattttcctaaaaaaaaaaaattaatagttattatttgtacaggttctattatagtggaaaaataaatgtggtattataaataataactataaatgtggtattaaatagcattattagtattcgggaaaaaattaaaaaaattaagtaatatcatacgaagttggaccacacacccctagctgccattacgccacgtttcctaattgcacatgtaatgtttgtgtcaccatctacgtacttccacgtattcaaatcattactcaattcttcttttctttttttctaaaaaaaaagccttctttttaaaacatttttcaataataatatttaataaaataaaaaatttaagtactagagagatattatactaattaaaaataaaaaaaatgtaatttttgaaatttgtagtgatatcacgcaatagcattcatggttttttttaaataaaaattaaaagtataatataaaatttaattaaaaaaatatttttatatataataatgtgtgagatcatatttataatatacttaaaaagtgttatatcattagagtgtttttagaattagagtgtcaaaaataatgtgaaaaaatagataaaataaaatattatatttttagattatatgaagatttttaacacctttaaaatatactaccattagagatgttcttaaaaaagaattcttgaattttaaggattagcaaagtgatcattaatattattaagtattttaagatgtccaacacaatataaaaaagaattattacatgaaaaatataaattgacagtttattcacaaaaatatctctataaggtgtgagtaacaattttatctttaatgagcttttatttactaaaataccacttacacatatccatttatttcagcccaaactaccttccaaccattacctttttgaaactcacgttcaaaatccacgaaa

SEQ ID NO: 206189 - DNA, 806 bp, Cannabis indica
cttagggaaatgttcctcaattagtgaccaatcacaatggtcattaagtgaggactttgctatagagacgggactaaagtggacttgattcttcaactagcacttgaggatgtttagcaagtttaaactcacacatttggtcatcatgtctgttggattctcctttgttccaatcttcttcacaaacactttcttttctgttatatttctgataaagtgtagctttatatctatgtgtttagacctatcatgaaaaattggatttctcattaagtacaatgcactttggttgtcacaatgcactgttaggtcatctaatttaaacctcaattccttggtgaaacccttgagctagatatttttttatggcttctgtagtagtcatatatcctacctaaattgatgacagtgcaaccaccttctaaaggttagatatccagctaacacgtccacctaagacagtaaatgcataccatgttattgatctcattgtgtctatcttttctacatagtcagaattaacaaattcatttactttaatttctatttccagcttgttgttgtagacaagaccaacatctactataccctttaggtacctcactcatttaactgcaaaccaatgctctttccctgggttaaatatgaatctgctaactatgctcaaggcataagccaaatctggcctagttcacgccgtacagtacattaggctacctacacatgatgcataaggtactgaatccatgtatctcttttcttcttctgttttaggtgcttgggcatgtgtcaatttgaagtgttgt

SEQ ID NO: 206190 - DNA, 758 bp, Cannabis indica
attgtgatgtatttaaaataaagaagttaaaaaaaataaataatgtattttgaaaaataaagtataacatctattgaatctttataatgaaaatcagagttcgcacagacaatgcgtgtgacagacaaaagtgatgtgtatagtttcggagttgttgcattagaagtaatgatgggaaggcaccctggagagatgttggggtcattatcatcaacaagagcattgccaaatgataatgaattgcttcttaaggatgtcttggaccaaaggttgccacctcctaatggagaattggctgaggcaatggtgttcatggtgaccgtagccttgtcatgcgctagaaccaacccggacatgcggccaaacatgcggttcgtggcacaagagctatcggctcgcacccaacctttacatgtttgagccttttggatccataaccatgaacaagttaaacggatttcaagagaaaaaatattgtagggtttttgttttttgagaagaaaaaaataatggttcaaatttcaattaattttgtttttgttttgggaagtattaactatcatttataattaagtgtcaatataaatctaaatgcttagagagttcgtgacaaatgatatcctatagaaatgtttatgtttagtttatgatgaaatacattaattatttttattatgtttatataaatgttatataataaacatatattttaaataaataaataatatcttgtaaaaaaataaagaaataaacaaaaa

SEQ ID NO: 206191 - DNA, 553 bp, Cannabis indica
gatgattatttaaggttgaaagaaagtctcacgcgaagattagaaggatggaagaaaaatttctctcttactcgggtagattggttttgattaagtccattgctgcttcaatccctgtttactcgatgtcgacaaccagggtacctgtgacaacgtgcagagaaatggattcgatggtcagaaagttttggtggtgtgggaataaggagaaggatcgttttttggctcttaagtcttgggatcgaatttgtcaaccaaaggagagtggggggcttggcctacagcgatttgaagacatcaacaatgcccatctgtccaagctatcgtggggtattgcaaaccaggaaaataaactttgggtggaatgtctcacaaagaaatattgttcttctcaaagcttctggacagttcaatcaaaggattatgattcgggcatttggaaaagtatagtcaaaggaagaaatacaattttgaaaggagtctccacaattttgggtactgggcgctctgtggatttttggcacctaccctggattccctggttaaattataa

SEQ ID NO: 206192 - DNA, 860 bp, Cannabis indica
caagttgtgactaaaagttagactttttatagtaaaaattcaattataagatatcttttttcaaaccacatgtatatttattaattttctctattgaaaaattgaatttagaaaatattaattgaacatctcttatatttcttgaaaactatctaaaaatacaaatttcaaaaagaatatatatatgtaccctagctagtttgtttatttattccaatatcctatttttggtacaatattttcctgttgatatatattgatgtacgtaatcatagtgagaacgcatgacctaatcatctcacttattctctttaaccacttcaattattatatcttcatgatccatataatattttaatgtaataatatattaattggtacttatatatgtggtttataaaatataaataaacttgtggccactattaatttaagtatttttaaggaaatacataagtttagacatatacaaattatgatttcaagtcttttcgaaactataacattataagatgagatgtgatcaggatatacttttatgtctagctatatatatatatatagttagtgcaaactacgttcgaaaacatatggataaatatatttatatatatatcaatagtgatctcaactcaaacccttaatatatgtttggtatactgatcattttaatataaaagcaaaacatagtctttcaaatcataattatcattgatattgataccaaagaataatacataatgatgcaacacattttttatccttaataattcaatataatgtgatactcgtttaaaaatatataattgatatattacaattaatagtatacaatatatatgcaatttgagtgtatatct

SEQ ID NO: 206193 - DNA, 582 bp, Cannabis indica
cattaggatccccttgtatttttctcgcctagattattagtagctagttaactaaacaaactgtgatacattaccttagctaaatacaacaacttttatgtgtagttctattaaaggaagcgcagcagtctaggaggctggatatgaattggcgggtttggaatagagtcgtttggtccgagctcatccaccggcggcctctgcttatggtgattggtttctgattggtaagccactgctaaggcaagagcctgctcattaaaaactcagaaaggtcaaatgatgcataattgtaatcattaactaattaatgaatgctactctatactatagctagctagctgggtactaagaggcatgtagaagcttaattacaatgtggtcatggtatggaggagcaaatatcccggtggttgtggtttttcgccggcgacaacctgaggtaggtggatttgatatgtgtgtaaatcctgtttgaacaacaatcacaggcataccaactagatttcccatacaaactctctcccattcagttgggctgccaatcattgcatcaactttgaagctttctcttacttcttg

SEQ ID NO: 206194 - DNA, 884 bp, Cannabis indica
cttagtgtttatatgcaagagagatagtgagaagttagttatgataaccaactgacagctcaccaagattacaacagaattaccaccaacttaataagctaacacctaagccaaataacaaacctaacagtcacatatgccttggatattattgtcgaataattgctcaatagaaaccaactgaaattagacaagtcacaattcttttatatcaatcttctcgaggttcttccatctttcttagctataggattgatcagagcaccgagaattttcttacagaagactctccgatgcttaagccaagtaaagctagtgagtaggaaaacagaaagagagagttagagagagaatcgacattttttcttattcaattccatctatttgtaactcttaaagtaggacaactagagtgagttcaacctaactgactcagtgactatttgaattcttgccccaaattcttgcttagccctaaaggattgtttacaggattgatgacatcaaccaagctcaattctcgtttatgtagatcaatgaaatcaacaaagctacgttccatcagtcaattgaccttgagttcttattgtgacttggatgcatatgtttttggtaactaatgggcttttataggccttgccttccttattaagtaaatttgatgggctaaaatatttgagctccatgaatgtaacagtaaaatttcctaaccttagctaatatagttagaattaaataaaaaaatataatttaattgacattattattattgagaaacaattgactttattaattggttgctgtatatataaaacactatattcatgtattaacaggcactataaaaaatcttactaaaatagttttgactaattataaattat

SEQ ID NO: 206195 - DNA, 574 bp, Cannabis indica
cttcctatgatcgcttctgaccatggtcctcttatcttcgataccaatccttatactactaaaggaccttgtccctttcggtttaatgaagcttggttcaatgatgagtctagttttcgtgtgataggaaatgcttggaatggtgtgattctgggtgataaaaggcctgatctgttttctaaattgcagaacacccgtaaagccttacaaatttggaaaaaggaagtctttggcgactgtgacacgaagctgaaattgttggagacccaacttcaagctattcaatcaagtgatgttgaaagcaatactcctggggaaaaaagaagttagaaatggaaattttcgaattatggaaacgtaaggagagtatgttgaaacagagatctagagagctttggctgtttaagggagattgtaattcttccttttccacgctgctttggtggttaggcgtcggagaaattatatccatgtcgttattgacgaaaacaataagcttgagagtctcagagaaagtaaaaaggcctgtcttaaataatttttctctaagcttttcacggctggtaatgtctct

SEQ ID NO: 206196 - DNA, 992 bp, Cannabis indica
agattccaaactaagcatacatcatcttctcttcttcccttgactgagattcataagggggtggcaacaaactcggcacattagcgaaaagttcttcacggcctggtggaggcagctcggctaacggtttatccaaaacaaagtccggaattggtactagggcttcctcgaaaaatgacttgacggtctacaaataggtacaaaaagctgtataagacatttggaatccttaaagaattcggaatgaatcaaatttccccaagtaggattcaaatgattgtaacacttcgaatttcatagacaaaccacataaatcatgtttgaaaaataggattggattggataattgttatcatgcaaatttgttacaaattaaagagaggtattatgatttagtcttgacaaaaatctactcaagtactagtttgactattttgaaaaatacaagatcgaatttatcatttaacaaaacaaaagatctaatcggtaatttttgtaaaaacacaaggtctaaatcagtatttacacaaaaaagtgtaattattgattgcataccgtgcaagtatggaaagcagcatccgctttgcgtttccacaaagtattcccgggttcgccatggaaaaaattaagtaaaggctgcaaaaaaatttcagaaaaagaatataactacacaataacagcttgaaaaataatctttcatagagaaaaatgtaagatatttcgtcccaaaccttcactacatctcgaacacttggtctacgtccatctctccacaaaatagagtcaccatatacttgatacttctcaataatcttgaaaaacaatagagaagtttaaataaaattgttagtacttaacaaagaaaagttcaatgaagtttaacaaccgagtttgttcgtgaacctgacgacgtgtaatattggagctcggtacaccataaatagcggtatcaacgtgtcctagaacattccacgggctgtttaagaagaaca

SEQ ID NO: 206197 - DNA, 786 bp, Cannabis indica
ttgccgaaattaatgactattttctagctgttgtagtgttgctgtggtggttctgtctgtgagtgtagaagatagtggcctcattttttaatttcggcatttacagtataaaagaaaataaaatatggccaaggcagcaaaatgtaaattttactgtgtggcggtataaatgtaaacatttattcaaaatctaataattttgtaaaattctcataaataatcgccattcttttctctctcaattttagcccaaaaccctatttactattactattggcctatattcaaattctaagaataaaatggcttccgatcattgtcattcctcaaccttaaatccaaacccatattgttattggccggcattctcttggtcttcttgttatttcatggcttccccaatgagggttgtgtcctctctgtcgatttgagtatgtgtgattccccattttttattttttgttattttggtatgattctactttagtattgcattttaaattatttattgtgtttctagtgtaaattgggtatgaagttgtaaaatatagttttattactttattgagtttattcaattcgatttgtttgatttgaattcaaactaatcaatttgacttttgtgtttagtgttattgagtttttaagatatgcttttttgcttggaattctcattcataagcatacaaatgactatagtgttccatactatgatttgtttcaaaagggtcacaactctcatgtcaccattaagctctttagtcttgattccaactgatgtcacga

SEQ ID NO: 206198 - DNA, 855 bp, Cannabis indica
aagttcgatctaaaaaaaaatacatttttaccataacaactattacatccggccttaagatatatgaggcttaagacaaaattaaactttgaagcaatatatattaattattattaaaataaaaaattgtccaagttcaacgtacctatttgaatagattgactgtctgcttaaacatattctgactttcctgtttgggaagatttttcatttattgacctgattagttcttgattctttgatcatgaccgagagggtttccaaagtgaataaatacactctaaggaccttggtttctattatctctcttagtgtatcatttctaaaattactttcaaatttagatggagtttctttgttatgtgaagaatttgagtccaacaagttcttagtattttattattgtattattctatattgtttcttgttgaaattgtgtaggttgaacaccttgtatatcgctcaccaagcttcaagagaagtcttattcgtgagacacactttttaggaaaaaaagtgcaagttcgacactcttcgggagaaagattgaaaatgagtcactcttcgggagaaagtgtgcaagtgttatgatttgaagggagcttaaggtctcggaactttagatatttgattagaaggatagattacaacagttgcggtaaattcaaagaaggagtcttcatttgtataagtcaatttgattttgtgaacacttgagattcatataataaatttcattctcggggtgtggccccatggactaggagcaattcgaaagggttgttgatactaccactactacaaaaaatagtttttcttgatgttataaaaaagtcgtttaaagtattcccgtcg

SEQ ID NO: 206199 - DNA, 642 bp, Cannabis indica
atttttaaaaatataatttaagaattgttattgtaaaaaattaaatttaaatatttatttgtaattaagagtttaatttgtagcaaaaattattgaaacaaatattataattttttctacacttgcagggatatttttcatttggctgcttctacactcacgacaagtgagcatcaattttttttatgtttgctctggaagatttggtattgcaggaatgaatttcttcatcacaagcgggcattgataccagccagtattgtccaagcaactacagattttctggaccaatatcagcaaaacattagctaccacaacacctcggggaccatccattcttgtgcaacctctgacagttgggctactccttcagcatttcaactaaagctttctgtggatgctgcccagaatgtaacaactaacaagacaggttttggtatggtgctctacaacaacaactaggatgacttttgactatagcaacaccgtggcaagaaacccggccttattaatggaagctcatgctctccactatgctctttcatggtgccaaaaaacacaacataaaaatcagattaaattgtttctgattgtaaaaaccccttgtgaattatatttgttatgatgctagtcatcatatac

SEQ ID NO: 206200 - DNA, 1359 bp, Cannabis indica
tccatcgtagctctgatgagcacacaatccaggccttcaaatcctcaggcatcgacctcaatcccctagcaccatagcctctttcgatgtcgttaccccaagatcgcgagttaaagtttagaaattcaaactttaaacgcaatttttgatcacctgtggtgtccattttaagagtctccttcaacactacactcgacacgtagaggagtacaatgcaaactaaactattttgccaaatttgttacttttttcagtgacatttttgtagatttgctcatttttggtaactttccggtgatatcgtgtatcattttgagtaatgattggcatggttgtgatctactcatctagatggtagttttgatatatatacttctatttcagtgatgttttcagtacactgatttttatcgccacgatagttaatgtgcattgcttagatgaggttttgaaactctaaattttaaatatagtcatgttatatgttgttggactcagttttgaatgtagaatacaatgatgataaagatttagtcattcgatagttataggtgaaagtgatattaagattagactaaacaattggatttcgagaattgagagcttagggtcgtcattttaaataaagtttaacgacttagaagaggtagagacccaacttgatttttactgtgacaaataacatttgacatattacaattttattgatttataaaatatttaaaaaattaaaaacttaatttagatatttttctggactgccgtggaggcacagagtgttaaatatacttttgtacttatttatgcaagttatgatttttaggttttatcaaattacaactgttatgctgtcgattttttttagaataaagaaaatatgcttgtctttggttttagtgatgagagtcatatttatcatgccttgcgtatattaaagtttttgttaggtttatttttatgcattttcagagtccattttagtgtgtgttttagtatttttatcactttattattcaaatttatgcttagtttttatttttgtttgtttctcacgagaaatgtcaatatatttcaatttttggtaattttagtatttttcaagccttttttaagacaaaaataggtaattataaggaagaaaagaaacttctacaagctttgttggatttctgattgccttaaatgggtcaaaattacattttcagctcaaaaatttgtggtcaaaagtcaagaatgggcactttctaaaaaataaagtaaaaaattcaagaaaagaggaaactgaccatcaagtttttgggtacagtggaaactgatgggatgacttggacagatttggagagagttttcagcgagcag

SEQ ID NO: 206201 - DNA, 1730 bp, Cannabis indica
cttcaagagcatccattaactatctcctaatgacattatttctaaaagcactactggtgctattgtttagtactcttctcagtatcatactgctattggtgtaatgctattagtataattaagtattagatttcatataatttaaaaatttgatatgcaacttaattcttcaatattgtttaatatagagtagaacatataaaagtaagatacccattatcaaagtgataagccaaatctttattgaatttggtttctctttaaaaagggctcgtatattttcggcagtacctccagtgaatactccatcagtataaaaataggcatgtcaaaaagatccatttaattggagcggatcggaactctgatctaacagatcacttgtgatccaaaatatttggatacttattagatctcgaattagatccgctccgtcccacctatttttcatatgtttcaatatatttcaaaaaaaacttaattcaaaaatctgaccccgaacccggactcagatcccttgagacttgagatcgaacccggaccctgacccgagaccctagacccaagacccggacctggacctagaccctgacccaagcttgagactagacccaaacctgaacccgagaccggactcggacccaaacttgggactggatgcagacccaaacttgggacctggttcgaggccttgagttgggaccggacccagatccagatccgaatccaaacccgaaaccagacccgtaccgaacctgggactcgagacttggaccagacccgagacccaaacttggacaacctggacccgaacttgggacccggacttggacaacctggacccgaactccgattcgggacccgaataggacccaaactaagacccgaacccagacttagacccaggaccgagaccaagacccaggacccagacctagaaccgagacctagactcgagacttaaacttgaaccgggacccgaaacggggacctagacccagacttgagactcgagacttgtacccaggcccaaacccgaactcgaaacagggacccaaacccgaactcgggaccctaatccagaacggggaccaagacccagacccgaacccgaacccgaatacaagacctaggacctagaatcggacttgggacctgacctgaactcaagcccgggacccggacccaagactcgagacccaagcccgagacttaagatctggacccaggaccaagacatgagacctgagacctaaactagggcccaagacccgaactcgagactcgaaacccaaactcaaaacctgacttgtagttggtgttggaatcgagtttatttaaaatatattatctttatataatctattaatacaagtcaccaaatatagtattgtattaaataatactaaaatagatataaaattatggtttagatataaaattaaatttgttttaaaaaaaaagaagaagtcgggtcagattaagtcagatttgatctaatctgatccgagtatgatgtagcgtgacggggcaggatggatctgtacataatctggattaggtcggattataactggatcaaatttgacccgacccatttacacttatattaaagtccttaatgttagttgagtgtcttgtgttctcaatttgatgagttttgtcttaacataatcgatagagttagagacgtactcttacaattacaagtaatgagaatttagatagag

SEQ ID NO: 206202 - DNA, 1246 bp, Cannabis indica
gcttgtttcgggttcttcgactgactctcgctgtcgtttctttccttttgaagattcagagcttgaattctccataattgggtcttcaaattttcaaatgattttgaataaaacgaaaaaatttcagatttttacttcgaccctttgaattaaagcttatgaatttcgtttaaagattgtatttttgagcagagattgaactaatggcggaaaagaactctaaaacatttacgacaatacctcaacacaaaaacgacaatttatgagataaaccacatgaattgagtacgacactgaaaaaacgacaatttatgagacgaacgacaggaatccagaacacaacgttgacaaaaacgacatcatttttaaaacgacaatttatgagatgaacgacatgaattgaaaatacgacattgagaaaacgacatcatatttaaaacgacaatatttactgaaaacgacaatatatgagaccagcgacctgaattgagaatacgacattgataaaaacgacaatatttaccgaaacgacaatatttaccgaaacgacaatttatgggagaaacgacataaatccagaacacaacattgaaaaacgacagcatttagaaaacgataatttatgagaaaaacgacattatatgaaaacgacaatatttactaaaaacgacaatttatgatacaaacgacataaatcaagaatacaacattgataaaaacgacatcatttgtaaaactcaatatttaccgaaaacgacaatttatgagacgaacgacaatacaacattgataaaaacgacattatttgtgaaacgagaatatctactgaaaacaacaaatagatgataagaaattgacaaaaacgacactatttgtaaaacgacaattttactgaaaaacaacaattgaggtgttttttttttttgtaaggaaacaattgaggtgttaattgtcacgtttcttaagtaagtgattatattatcaaagctagtcactttgtaataaatttggcttgaaatttactcattctttctaatttcattattacaaatgactatttctttataattctcataaacctagttaacattattttagaattctatattttacaaaaattactattacattctcttattttactaaataacaaatcaaacaatgtaattttaaaatagcataaaatattactctttatacatattaaactaaaactaaaacaccaagttattattattattattga

SEQ ID NO: 206203 - DNA, 1669 bp, Cannabis indica
gtatgggatgaaactcaatccaagaagtgtgcttttggtgtcaaataaggaaagtttctagggttcatagtaagccagtgcggaatagaggcaaacccagaaaaatctattagatatgccttccccaaaaatacataaagacgtgcaaagcttgattgggaaggtagctactcggtgtcgcttcatctctcattccaccgataagtgcatcccaatcttcaacatcttagaaaaaaagccaaaagtttgagtggacgaaagactgttaagaagtgcttaagaagttaaaagaacacatggccaagccaccggtattgtccaaacctgttcactgggaagacctgtacctatacctcgttgtctctgataatgcagttggtgcagaattggtcagggaagaggaaaaggttcaacatctggtatactacatgaacaaacgtgtaataggggcagaaattcagtatcctatgattgaaaagtaagctttctgtctccttattgcatcgagaaaactgaggccatactttcaagcccacttcatcaaagtattcacaaaccatcctctctaacaggtcttacaaaaactcgaagcttttgggagactcctcaagtgggcaatggaactaagccaattccgcatacagtacatatcccatatctcgatctaaggttaggcgctcacagtatttattgttgagtgcaatgaaaccgaggctaacgctagtatgccatatctatatatgcctacatggaaagtgtatgtcaatggggcatgaaatgagaatggattaggggttagggtaggaatgatatctcctgatggactgagactccaagtcgccctgaggtttacatttttggcttccaataatgaggttgaatatgaagccctgctagcaggactaagtctggcaaacgcagtaggagccaacagggtggaggtgtacagcgaatctcaactagttgttaaccaggtgtgaggagaataccaaaaactggagaaaagatggtcgcttacgtctcaagtgtcagagaattactggaagaatttaaacattacaagatcgaacagattccccaagaaaggaatgttcatgtagattgcctagctaagttaacatcggatagtgaggtagaaaatttgggggtagtgccagttaagtatctcacggatccaagcattaggccaaaagcagaagtagcgacaaatgaacgaatgccaaggtggattgaccaaattgtcaagtacataacaaaaggagaaatgcctcagaagaggacaatgtcttgaagggtacagtatcaagctcaccgatacttgataatcgatggtattcttaatccaaggggcctcaatatcccatatctaaggtgtgtatcggatcctaaagctagacagattatacaagggttccattaaggattttgcgaagatcacacggaggcccaaatctctccaagaaaatcctaaggcaaggatacttttggcctagtatgaagaaagattgtgtagactacgtccttaagtgcgatccatgctaaagatttccaaacatcccaagagcctcgccaaatgaaatcaccttaatattaagcccgtggccctttgcggtatggggaatagaccttatagggtctctacccaaaggaaagggtgggataaaatatg

SEQ ID NO: 206204 - DNA, 1384 bp, Cannabis indica
aaaaagaccagctacatgtagagatcattgatctctgcacagacctttttctcctcatcattagaagatcccctttcctgaagtagagatctctttcccagcctcaggaaactcctccataccagaaagagactggcgcaaaagtcctctggtgcaggccttgaattggctggattctttgatagaaaccacgccaacttctctcctgggaaaatctaaaaccatgccaaccttcttccaggattcctcgtcaatcatagtaggaccactaagatcactcataagatctctgtctatccctgtggagacgaagaaaaaaaaaggttcaatggagcaacaaaaaacatacaaagttaatgatatgtataaactgactcaaatctccattcatagagaatgatactcgccttcaaagatcgtttgtgaggatctcccatagtaggatacggggttcccctggtttggattggtcggaagctcctcaactttggaatccatcgtttccggttccaattgagacttaaaattcttgggaacgaatggaaaatggttggtgcatcatggtattatgagtttgggagagtgaacttctgaactcagaagggaaattatttcaagaaagagatgatccattctgaaaacaaatctcactaaaagccagaggtatgtgaaaaatgacaagcttaagccgctcttttatacacaaaatctagtgacaagaaagctaaagattggggaatctaacggttgggagtcgggcagaatatgaagagacaattcataatgaccctcgaaactatacaactaccagaatcaaaggacatgttttttccaagaagggatcttggcgaagataccctctgtaattattaaaaatctctttttattaaaaaaaaaactttttaaggagaaattgttatacccgaaattgggctgccatctcaatggaggacatgtgtcaggataaagggaatgtgaatcgatgcaatcactttttatggaataacttattaattacgtaagtatcagaatacatttgtaacccactgactgtaaggtcttaggcgaggaatcagtctacaaactggcacttagtatattagtgagaaatcctatgtcgttgaatgtgaatagcgagacatcaaggacaatacgcataggaagacgaaagcaacacatatcaattgcgaaagcccttagtgtacaaactaagtgcaacagtcgtttcggctcaagaccatgcaagcgaggtgcccgtctcgctacgggaagacttcctatagcttcatccagttgacattagtgagacttacaacactggcgagtcagaagatagcattcaaatgagccccaaagaaatatttaagaaccacggtcgtcacaa

SEQ ID NO: 206205 - DNA, 542 bp, Cannabis indica
gacattagtatattttttattttttctttttcgtttttttttaatgtatagttgttttgattttctttaaaattcattttttagtatggttcgttttgtaatatcatccggccggtgtataaaaatatcacgttatattatatatgaaattcgtaataaattaatcataatactacatgcatgggacgtgcattatatacatatacctattataagttaaatttatcagatagttctttaaataaagctagatattactattttagattcattaattaagaataaaatatacataaaaatacataagagatatagagagacgacatattaatgaggaatttttaattatatacgcaatatttaaactaattataagaaagggttcaacaatttaaatggtacacacccacataagaaatgacgttatatactgaaaaaggaaaacaattatctttataatgtgatcagtttttttgggttgaaatctactacactttttcattcttttttatcttttcttctctcttctctattattttaaa

SEQ ID NO: 206206 - DNA, 589 bp, Cannabis indica
caggttttgttattgttttctctgtttcttttaacttttttttcttttttaaatgaaaaagcttttaaatgaaattaggtccgagatccgcgtgctactcacaattgttgggtttcgccctcaatttttctacatttaggacaatatactgattattttgttgaaaaactataggttggagatcagtatagatcaaatgatgatggtgaaccatctggtacagctggaaagccaatacactctgccattgcttcttctggtattgacagagttatggttgttgtcatcaggtaagacattgatgataagactacccacattagttgagtacacaatgtttatcatgttacgtgaacgaatttgagtaataatattttcttggtacaattttgtatattttaaggtattttggaggtatcaaattaggcacagggggactagtcagagcttatggaggagttacctcagaatgcttgagaaatgccccaacttgtttagtaaaatctaaggtattgggttttgattggctttttgtgcatttgaatattcatttcaattcttgtttcatgggctagtttcatattgttgt

SEQ ID NO: 206207 - DNA, 707 bp, Cannabis indica
agtaaacttttagtattgggaagtacatattggatcaagccagagaagagagaaatcaatttcgcgaaatgaaacagactcaaataactctgttttagctcagcacaaaatttatctaagaaaatagagtacacaggcataccacttgagaaaatctaattttgctttcttcataatgttgctcttcacattggaaacgttatagctaggtccactacctataaaagaaatatcatatgttaatgttaataacatacaaaatttattcaatcctcatgtaaatgttaggccaacagcttgaaaaaggttctggtaaaccaaggcttatgaaaacaactagtagaactatgagaaacaactgtaagaaaacatatttacctccaaaaaaacttcttttgcttgaaggaggaacctttgtacagagttgaacttgccgactttgttttcctacaaaattaaaagaatagaagtgtaaaccagagaaattttgaacaatattctcaatcagagtacatatgagtggctgttggaagaaaaataacacattccacattaatcccatagcacctatgtaggtaatataagaaatcaatcacatcacaaaccattcaatccatatatctctggctcttaccaggataactagcacagacagactccatcaatagagcatatcaaattttaatagctatagtacaaaaatatga

SEQ ID NO: 206208 - DNA, 3375 bp, Cannabis indica
ggcctctacaaaatctcacatcccttgtcaagacaccacaatctaccctactgtcaaggacaatatcaagctcagcagtcaagatttcacaccagcaccactactactatgtctcaaaatgctgattgtaatctttctgctgttaataaacctttgtgtaataattcttgtactcctaatctttggcacaatagattaggacacccctcttctgtaattctcgcaaaggttttacattcaatcaatgcaacatttactaataaagatttgtccttttgtgatgcttgccaatttggtaaaaatcatctcatgcattttagtagttctactatcaaaaccaatacacctcttcaaataatccattcagatgtttggggtccctccccttatcccacccatgaagtatacaaatataacatcctctttgttgatgattttactaagtatagttggatataccccatgagaaccaaattagatgcctatcctatcttcacaacattcaaaacattggtggaaaaccaatttgacctcaaaatcaaaagtctccaaacagattggggtggggaatttagaaaattacagccctttctccaacaattaggcatcctctttagacacccttgtccccacactcatcaactaaatggtagagtggaaagaaaacataggcatgtcactgaaatgggactaaatctccttgcacaagctaaaatgccactgcatttttggtgggatacctttgtctcagcagtctatttgatcaatagactccctaccatagttaatgattacaaatccccatttgagtgtctgtttcactataaacctgattactcctttcttaaaacctttgggtgtgcttgcttcccttttcttaggccatacaaccaacacaagtttcaatttaaaacctcaaagtgtgtgtttcttggctacagtccattccacaaagggtataggtgtctacatacatcgggtcgaatttacatagcaagaagtgtaaatttcaatgaaactgagtacccttacagcaccttatttccacaacaaattaccaaagattgtcaccaaaaccttcttgctccagcctttatcataccagacataccctctcccagtcacaccactccaatacaatttggtattgttaacatcgagccaaatgagtcagccaatgcaccaaactccccacaccagacagctcaaaccagtactgtgttccctgctccccacaccagcaacacagccatagatagagacactacaatgcctgaagatatcaccataccaaaacctattatacccacccaacctcctccattacccactggccatcctatgcagaccaggtcgaaatcgggtatatataaacctaaagtttttcttgttacaacatctcagcaacaagtgtatgaagagcctcggactgtcaaacaaggaatgagcataccacattggaagaaggccatggaccatgaaaaacatgcattggttaaaaagaaaacctgggtgatggttccaagaacttcagacatgaatgttctctccaacaaatggcttttcaggactaaatataacaaagatggcagtctcaaaaaatttaaagctcgattagtggtaagggggttcgaacaagctcctggtttagacttcaaaaacaccttcagtcctttataaaggcttccacaatcagaatcattttcgggttagcagtgacctttggctgggatatccaacaaatagacattaataatgctttcttaaatggggaattacaagaaaaggtgttcatggaacaacctaagggatatgaagatcctactaaacctaactttgtgtgtcaattaaccaagtccctttatggcctgaaacaagccccacgggcctggtttgacacactaaagagcaccttacttacatggggattcacatcatctatatctgactcttctctcttttacagcaatcatcaaggttcactcttactcatcttggtgtatgttgatgacttgctcatcactggggaaaacaatgttgctatttctgctcttattgctacactcaattagaaattttgcctcaaatccttaggatccgtcaactattttctggggtttgaggcctacaggaacaattctggtttgtacctcacacaatccaagtatgctgcagatttactagctcgaactcaatttgaagattcaaaagaatgtgacaccccgatgataatggccaacaaattgtctcttgatgacagttccccatttgacaaacctgaattatatcgaagcacagtaggagctcttcaatatcttaccatgacacggccagatcttgcttattcgataaacaagttgagtcaatatcttaaaaatccaactctacaccactggaatgcttgcaagagagtgcttcggtatatcaagggaaccacacaccttggtcttcatttcaaaccctcaacactactcaacttggaagcttattcggatgtcggctggacatctagccttgatgatcaaaagtccacaagcgggttctgtctatttcttggtggcaatttaatcaattggagctccaggaaacagaaggcagtcgctctatccagcactgagtcagaatatcaagcactagcttctgctgcaacagagatcatttggattagttcactgcttggtgaacttggtgttaaacttcagaagactccaccagtgctatggtgtgacaaccaaagtgcacaagctcttgccttaaatccggtgtttcagaccagaaccaaacatatcgagctagatgtgcactatatcagagaacaaattgcagagaaaaggcttgaaatttgttacatccctgcgcaagaacagactgcagacctattcacaaaaccattgtctttacctagatttcaatttctctgtaacaagctcaattcggtcaataccaagcatagcttgaggggggggggggggtagttaaacctgacagttagagttagttaaagtctgtttttgcactgttactttcagttagttattacagttgggattgttagttgtacagctgtagtttgttacagctttcggttattacctctgtactcattcattataaatatgcaataagatccttgagcctctgtattgattcaagctcacttttcatctcatcatcttctcaagttgtgtataattagaaaagattttaaaaactatttaaaaagaaaaagagggagagagataatatttgataggtatcacatcattttaaaaagaattaaattgtcattataaaaagaaaaaaaaattgtgacttcaacatatatatatatatgcctttgataaaaaaaataaatatagaagagatagatgaatg

SEQ ID NO: 206209 - DNA, 1085 bp, Cannabis indica
cccacacagcccattgctttcttcttgtgttttctttgaacttgtttgtatttgggtcattttgcgattggtgatttgtgattctgtgagggaaaccccacagtagtctagtcaaagtcttcttaaattaatgcttgtgttgctaagggatttgtgtagcaacttattatatagtgaagaataatatgctccatttttttggagtaaagtattaatttcattaatcttgttatttatattaaaattattacataactatagtgttgccactaatatttatacattaattgactttcttttttaattttaattttaacctaaaatgcataaatagtgtcaatgtcacaatggataaaacaattagggtgtgtttggaagtaactgtgtaattactaggcagggtaattacataatcttttaaaatacaaggtgtgtttggatatgaggtggtaattacatatgaattcctaatatcttgtttggcaaaatagttagtaattacatgggaaaataatattttttagtagctaatgtttaatatggaaagtttttagtaattacactgtaattacattcaattctcatgggggaccatgagaattagagagtgtaattggaactcctcaattacttccaattacacagttatagtgtaattacatggtcagacaaacatgtcaaactgtgtaattacctccaattacaaacaaatccaattacaatgtggctttccaaacgcaccctttaaattaaaaaaaaaaacaaataaaggtcaaattgtaactgtaaatcttacctttgaatttgacatgttggttggtaccttacctcaaatgtttatttattatttttttttccaatagattattcatttatttaggcaattaatattaataggtggcatatcatttcaatactttattgacaaacaaaaggtgtcaaattagcatatcttgtgaaagttaattggataaaagagcactttataaattactcaaaaaagacactttattatggctaattgggttaaattaatttagttactaaaaaggaccacacatttacttttgacatttttttttttt

SEQ ID NO: 206210 - DNA, 545 bp, Cannabis indica
tgagctattctttatagtttttcgtaatagattttgatcttttgacacatgtttttatcattgtttcttgctcaccaggcttggaatttacatgaacaagggcgtgaactcgaactggtggattcagaactatcagaattcgacgaggaagaagtgaagagaatcattggagtggctttcttatgcactcaaacctcaccaacaatgcgtccatctatgtcaagagtggtggcaatgatatcaggagatagtgatgtgagtagtgaaatttcaaggcctggttacttagctgattggaaattcaatgatgtcagtactctaatgagccagattacacaagggactgattctagcttttatgactcgtctgcaagcacgagcatggtggccgatgcaatgccaccgcggccagcaagtggcgtggctcaaccaaataacgttcaccgtcctataagtgaaggaaggtgattgaatatttggcttgagtttggtttgtgaatattgttagtgagaacatttgtacgatatttgagttcatttgagat

SEQ ID NO: 206211 - DNA, 1162 bp, Cannabis indica
atatagtgtaataagtgctcatgattattctgaaaatattagtgataaaattaggactattcatcattgttatagtgtgaaattttcgtctagatatatgagttccaacctcgtaagaaattgatacgtggactcagttcctaatgaaaaatgataatgtgttaatgatatagctatctagagctaatctcgcatgattcaaacttgcgagaggatgcaaccgggacatagtctagtcgcatactatgcctggcatagtcaaaagataagcggaatcaagagaagttaatactgtccgcgtatatctcctatatatgatgagcaagtatatctctcatttgacaagtaaagatcgcttctttacataggtttgatccgaatgactagtgttcgacgattctaataaactcgcatgttctaagttgtcaacgtatgatttctaaatatgcgatcaaggatgattataaacattccttaaaacaagtagtctcaaaggcctgctatgtgagtctaacaccacagagccttcgagctcacatgtttggaatatgaatagacgatatgtgacttcctaagtcgtacacgttgccataattaagacaagaattaatagatgaaactattcttatatttattcctttaagtgtttatcttaattaagttgtgaagttattataataacagtctaatttaatcaattatgtaatattaatcgacatctactttctatataaatgggggatccaaatcaaataagctaagttgaaactattgcacaaagtggactaagcatgccgaactctgattgaaccattataattctcttgtctactttatatttttgttcttgttcctgtccatttcttagcttaaattttaagtacttgttgttctaggtgagtactcatataactgttggtgagtgttcttgttttgctcaaatactcacactttttagtgttgtctaaatttcttcaataatattttgcgatgtctgtgggaatgatttttatagcatttctgagattttggacgagaatcgatgtggatacagaatagaaaaacacaaacaacaacaatgaaagtatcaacattgacactatcaatgttccgcttattggtggaagaaccactccaattgacgctgttgttggaggagtag

SEQ ID NO: 206212 - DNA, 1081 bp, Cannabis indica
gttttaattgatgaatggattttcgagtagtggctgaagtgtattgcttgtcaaaacatcagagtttacagacgagatgcctccattactcatcctctccccatactcaggtgtcaaatagtgtgactgtactcgcgtgtgatgtctttttgattactttccttacaactcactaagcattggccatcttgttgagaggtgtgatgactcattgcaatgttcaaatgttgtatataatgtcgagacgcattcaagcaagcttgttcaggcatacacacatgaatgtcgagtgagtgcatgtcgagtacatattgtgtggtgcatgttatgtggtgcatgtcgggtgcatgtcgagttgtgcatgtcaggtgcatgccgagtacacgttgagtagtgcaagcacagtggtgcatgtcgggtgcatgcccagtggtgcatgttgagtggctgcagcatgtcgagtggctgcaaactacaacatgccgggtgactacaagttgtagcatgtcaagtggctgcatgctgagtgcatatcgaatagattactcgtgactactttcgaaagttagtcctgctactctcttgaattaacgttgattaatctcaaagactagccttattaatttattggattaacaatatctctttagtcaaaattattattcacattagattaattatatttatttaattattatgtacaattatacaaatttctgtaaaattacattatgtagaaaatttatatcaaaatatataaagctacttactattttttttttcctttttaaaagttacatctatggcttgccaataggtatgtctcttgcacctcttttaagtaaatttctacctcccttcctcttgatattttggaaggactacatccaaagtctcaataataaaacattgtgaaataaataataaaacatagtcttttttttttttttagttaaaaattaggtcattagatgcccaactactttggaagaattgccatagaaggacaaaaagtcaaagagtagtaagacgccctccaacccaactgataggaacctctcgaggtgttattatgctaatg

SEQ ID NO: 206213 - DNA, 850 bp, Cannabis indica
tgtggaaaagtgaggaagaagtgattattgattcctattcgttgaaccatgttgattgttttgttcattttgaaggccaatctaaatttcgttttactgccttttattgggagcccaaccgaagccttaggaaaacttattgggagtttttgcgtactcttcatgcaaggtttcaagaagcatggtgtattatgggtgactttaataatattctgcataataaagaaaaaagagggggtaacccttatccgagttggcttttggatgggtttcaagaggtggtccgtcattgtggtttgtatgatttagacttgcttggtcatagtttcacttgggaaaagagtagagacacctctgcttggatggaggttaggcttgataggacaatggctaatcttgcttggttgtctcgctatcctgaagctaagttatttaattttgcagtttctccttcagatcatactcctttgtttttggatattttacatcatattaaacctgctggggggaatcattttcgtttcgaaaattattggactcggtttcaagagtgtgaggaagtcattagagacagttggagccgttcgggtgggagtcaaatgcatcagaaacttcaccaatgtggtcaggatttgcaagcttgggggactagcgttgcttgtaatttttcagcaagaattaaacaatgcaacaatgagcttaaagtgcttaaatgaaggcgtgacagagaggggaaataaatgtatgcggataccaggcttcagctctttgaaactttaaaccagaggaaaatattttggcgtcaacgttcgaaacaattgtcgctcaaaaacggtgatcaaaacagtaa

SEQ ID NO: 206214 - DNA, 991 bp, Cannabis indica
tggattgcagatggctgtgtaggtgattttcggctgtaatagtttttccttttgcagtttttttttagttatttcttagtagttagtgttccctggtccttgttctttgggactttgtctatagtttctttcggttgtcttattgtctctgttgtttcgtttgttttgcctgttgtttggctgttgccagtaataaaaaaaaaaaaatttgaatgatgttacatttatttattcttttcttttaaaataggaaactcgctattagtgttcaacaaattgttcacactgtataaaccgcttacaccatatcacactgtataaaaatatagtttaaaattttttatagtgcgatacaatttatatttttattgaattgcactgtgcgctacaatgcagtttgcgatttcaaatttaatagttcaaatcgctttatattatatattataagaatattaacttttacactatcgaatcttgtttttttaactcacattataaaatttaagccatataattaaatttaagaaacatctatataaattattttttattaacttcttattgttgtacatattattattgatataatatatatattattatataatttatatgttgtgacgttaaaaattgataagatatatatatttttttataattgttgtaattttattagactaatctcttaatttttattttaatgtttgatagtgatgatagtataacccgcctaaatcacaccgtatcacactttattttatatagtgtggtttttgcagttttaaggtcttgcactgcggttacagattgagaaattacaaaaacaccatatgcaatttggtttaaaaaaatagtctaaactcacactacccgcatcgtgaacatccctgacttcatattattcttccatccatttaacgctctctctataattttttttagggttttttttttttttgtatttttttttgaatttttgccttctatacta

SEQ ID NO: 206215 - DNA, 1330 bp, Cannabis indica
aagtgtagtgatgatattaggatttatattagaaagttcaaatctttattactaaacttgcatatgaggaactgtagatgtagctgagctattgctccagtccagggacatttccttctttctttttctttataaaatttcatttgattaacatggctattggctacatgggctgttttcaattactatgctacgcaatttaggcattttatgtgctttgatttatacaggtttgaaaatacttcacttgtggactgtggtatcttctggctatggctttgtcttgtcatatttcggttagtgtttcttttttcttccttaattctgtgtgtggagtttatacattggttacatccatgctctgtttgctgaatatgaaatttggaagtaatattgttgaaatctgttgtttttttaatcataatatattagaaatgttcaagggcatgtgaagaagggagtgtatggtgtctcaatactcttggtactttccaagttaattttgaatcaacttgaagctttatttcatgtttataggactttttgagttctaatggaagcgacaacttttctgcaggcgagtactacagcttcaaaagagttcctcaaaatgtaaaacatggtaagcaatatgagtccagtgttttctttatgtactagcattcatcctcacttattgctctcacacacggatcattccatatatttccatttcagcttgaaatcgacgctcttatgttaatgtttgtactaatctagatttttaattttgttgattgcatatcaattatcaagaacaaaaccgctccaaaagattgtgacggcatctccttcccatttatatgaatgatttacattttattattgatagttctgtattgcttttcccttaattaattgttactagtaattcttttctgatttataataaggaatgggactggaataagggttatgatatgagaaatattaatgaataaagttttagtgttttttttcctgtctaaaggtaaactcgtttttggtttcttttgattgatacttaaaggtttcggaggaggaaatggtgtttgtttttgtggaaagattcagcaagatctgattatttcattttttatggtcaatgttgtttaaaatgttggaacttgtgaaagttctttgattctccttttcttttgtcttacaattttttttacagaattgcttttttttaattttttaatttttaattttctggttaagggatagattagaggagagggaaggatgaaaagagataaatggtcggagaaaccgacggcagaaagcagtggccgccggaatagacggc

SEQ ID NO: 206216 - DNA, 1085 bp, Cannabis indica
ttttaggcagtgaaatgactatttttttgtctttgttcttgtgaatcaggaatgtctgggatatgttgatattagtctttcagatgttgtttcaaacaaaagaattaatgagagatatcatctcatagattcaaagaatggtcgaatccagattgagctgcaatggagaacatcgtcatgaagtcaattaatttgttttcagtgttgtaatggtccatccatagtgttgtgtctgaagatggtgaatgacaaggctcagtcttattttcatgtttgatcttttttcaatacatacacgttagtttatttgggatattcgtgttcatatgtacatgataatgatgatgttgaggagtttggtagctaattgcaacagtaaacatttaaaactgttgttgatgatgatgaattgattatgatgatgaattgattatgatgctattgactattgagatggaaaagaaaacgggttattcatatgaaaccgaacttcctgaatgtgaatggattccattagttctattttgagcaggtggtgtctggttagaagtaatgaaatggaatgggatggaaaagaaataaatttcattccattcttttatttagttgcattttaaagtattgaaattgattgtagtcttttatttgtatttaataggaataatcctattttattatgatagtggtattatctcaaatatatatttagtaatatataatcttctgactttattgtatttaattttattataaatatgagtattaacaatattttttacgtttttcttttacatttttatgtagtacgaatatttttttaaatagatttttataatggtaatttattttttgatactttattattatatattatcttttggctgtttctcttaaatatttattttttggtgcaattattttggctaatttaattatgtgattaagttactattttaggtttttcctcgtagatttatatcttattttggtgttatactattttcttataaatttattacttggctattaagctattaagttaatattttagtatttaattgatattatcagctattaatatattt

SEQ ID NO: 206217 - DNA, 1411 bp, Cannabis indica
aggggcatgatttaatacatatcggagaatattatcctatatggattaaatgtaaaagtattgagccatatataagaacatgaactactctactcattgccaattgattttgagatgaaatctcataattctcaacatggtattagagccatatttctatctagcggcctatgataaagtttcagaaagaaaaaatcttaattagcctatataataatacttgtagtgtttcgagtgctatgctactactcaatatactcaatatgctttggcctttgagccaaaataagaaaaaacccacctactttatcattatcaagatggaaaagaagaggtaataaacataaaataagtactaaataaatcacaaccttctttaatgttggatgacttgttaatattattattagttattatacttaaattaaagactgagagtagttggaaaattattaataggtctatcgactaaagaccaagcaattaacatagagattgtattatatatataatatgttatcctataataatatatattaaatgattgttaattaatgtgatacttaatttcttcttgattcatttctttttgtatgtgagaaagttgcatccaaacttcactagtagtcctacttgatatgttgttttttcttacacgttagtagatagctagacaaatgataaatggtatcaatgctactcaaagcattattattagaaattaataatatgcaacactatttataagtgttttttaaaattagttaatgatattttttaaaattatatatatgaaactattaattatacgtactttataacaattctaatgctactcaataccatctaaatgtattgtaatgtgatattaggtcttaaatattttaagtgttaaagagtttcagataccatgttgagaaaataaaataactcatgttcttatatataatttaatattttactatttattttatgtgggataatacaataacatagtcttatatataagatgcatgagttactacttttattgtcaattaattaaaaagtgttagagaatcttatattaataatatataaatacataataccacatataatataattaattagctttgagatgtatcctatgtatttctttttgaagaacaaaaatgaaaaattttattccgactaacgaagcaccaaaaactcaaaaagagtttatcattgtaattacaataagagcattgctattaggcatcagtagtgcttatcacattctaaacgtgtcgccttttaattggttaacgatattccttaaaaattattatattaaattatataagacttgatacttaattggatcaatagcaatactgacatgtaagaatgtactaaacaccatcggtaccctttagcatttctctta

SEQ ID NO: 206218 - DNA, 844 bp, Cannabis indica
atagctttcaaggagaacaatatatttaattttgtcttttattgagaaaatctacataataattaatcaaacaaatgaattaagcacaaaatcacatccatcaccaattaattccgggaattattttaatatgaagaacacaaatctgtaaacgtacatcttactaataacaagtgaatcgtaataagatcatgattcaaattaataccattttataataatgtgaacactattttttccaacagttttttctcaattaatctgagatttgaattctttctgaatgcctctacatatatatatatatatatatatatgagtaattattgtagttttagttttattttatgtatctcaattatatattataagcttaggtgaggatcatagttaatatatagcagtgggaatgggatgactaaagtataataaaaaaatcaattgaaaaaaatattggagtccctcaagtactctcttctaccactcaacctcgatatactccacttagtttttttttttgttactcgagccactgattttcacattcaatagttgttgaaagaaaaataaaagttgggaaatgctgagtgggaactaaaaacaattccatgagattctttgttgatttttcatagggattctttgtatctgtcaacattctagatctttggtcttagaagtggatgagtttaaaaagtcaacacattgttaggggacaagccaaaattacatttttctttaatccaacaaaaaaatctggcaaaaattcacggatctattctttaaactatatgatatatcgagttcaaaaaaaaaaaaaaaaaactatatgatatatccatgg

SEQ ID NO: 206219 - DNA, 849 bp, Cannabis indica
caattcaatttgggattattttagaagtcttgtcacaatcaatgggggtttgctcattagagtaatcttgttacatatgcaatgtggtctaattttttagattaattttatatgaagtgttgctcaatatagacagtgatattttttttattaaaaaagttattttttcttaaaaagtcattaattccatgatgagcaactcataaagttgttaactatatttgagtttttttttaagagaacttatatgaaagaaagagaaaataaaaaaaaatatatattttagaataatgtgttatcttggtaactataggtttgcttacactaaattttggcttgatgatgtggactaaaatattgacatgtggcatatgagtcagcaccaaactaataatgtgggttggtatatgaacaaaccacgtatagtcgtagaaggtgtttagtttgagcactttcatttacttaattgtatggtttttattgacaaaattacatcaaccaaatatgcaattcacaatcagggatgaggaagttgggcttaaagtattaatgtattccatttttcaaaatatagagtctaaatttttatttataaatcaaaatgattaatatctattacacatcacaatattcaaaataatatttataaattattttataataaacagacctcaatttttttagaaaatcctataatcctatccctcttacaaattagttatcctttcggcctccttaaccttaaggcttaaggcaacatgcatctgcatttgtcctgtttgagactttattattaatgctgcatgtggagttgtggaccaagagaggaccatgccaacagcctcgagg

SEQ ID NO: 206220 - DNA, 988 bp, Cannabis indica
cagttataacctttagtaggatcaatgtatttcttatcttatgagattagtttagtttttaaagtcttaggatgaaagagtaaacagagctagaagctatagtaattacttctattaatattattattattgctattaattctcttattgaatttgtttctaaattatagacaagaagtcaaataagctgtggtgtttttttttgtaaatgtgttatgctttctgttcttttgatttactatttcaaatgaaattgataaaaacaagaatcataaaatcttaatatttgcataaataattacttattaaattgtgggcattcttcaagtgggcatatgaaactttactggttttaaaataaaaattttcttttcctttcataatcattattggactcggtgataaagatacttgacacctatacaataacagaaaatgtgctaggttcttcgttctagaaactattgccagagttccctacttcgatcagagttttttgtttgttgtttgcttttctagcaatattatacttagaatagttatgaggtactaatctaaaaaacttatcttaaggtttgggaaacatgtaattggataggatttggatcacaagaagggaattactatattgtttgccaccacttattgtacttaaaatgcttatgaggtacttttacttaatcaaaaaaaaaaaattagctctttgtcagtttagatcattagccactaggttgattattcattgtttatttttctgatgttgacctactttgtcatagtggataattaaatacctttttctactatgattaatgactttctaatttattctttacagggtgcccccgaaactatttaagattagagcagattcaaccaatatattgtcaaaagtgaaaggctaatcacatgaattggtaagtatcttttcttatgcactcacacagataggctaaaatatattctattatatctataacatttgtgg

SEQ ID NO: 206221 - DNA, 639 bp, Cannabis indica
tcaacatccttcattaaaaccatacatattaatcatccaaaactaagaattttacacagtactcagttatacacttatactggatattattccacatcctttagtcataatcatttaccaaggtgaaaaaatacattcaaatagtatttgagaatggtgaaataacttaggtggctacctgagaaaatataaaatggacctattttcatattttgtagtaattaagctgatatacgtaatactatatatgattaaatatttttccaaccctttaaaatactctattttaacaaaaataataatattacggaactgaagagagttcagaatagagatttgtgtgaaaagacatactctgctttcaatatgatacaacgttaaataaacttggtatgaaaatatgaatgaaaatgagagtaacaatagaaatggaatcaaattaaaatacaaaataaaaataaaattaatattattttggattatattttacaaaattactaattgaatcttttgttttataaaataataaattggactgtgtattttttaaaaaatttgaaaaaatcttttcttctatttcaaaatggtataatcaattattattttactaaatgatgaaaaaattattctattgaaatg

SEQ ID NO: 206222 - DNA, 1263 bp, Cannabis indica
ggatgtataaattaataaattatgggtattcgagcaagaggaatccgtataccatggtgttgttaagccgtgctatgtacgtatactaccttttatcttagcaagttatctatcaactaatatatttttttcttcattaaacattaattattccccatttatttaaatcattctaaattttggattatgttatatcaccgcttcaatgtaaaattttaatgttatttaacatatctattgcaattaattattaagtacaaatgtgttatctttgataaaagaaagtattaagttaattatatataatattggatggtaattaattaatcaatatttgatttggctgaatatgcttgagaattaatgtaaatagtaatatatacaatatatatgatttattttttaaaaaaaataatttcattttgaaaagcatgattattacatattttattttactatttatcatatgatatgaatatataaaaatatattttatggagtcgagtcttcaacacaaagagatattaattatattatgtttttttttgaaaaagaaaattatattgtctttatgaccacttgtttattatgtgatctatcaatcaaataatcaatattttatatataaagatatttatttaaagataatagtagtattatatatatatttgtaaattaaaataatttatttgagaaaatttaaaaatatcacaataaaattgaaacaaacgggcttgtgcaaatattgtttttacctagctagctagctctacttagcacacatgattgcgctattgttcaaggtaaaaaaaacgattagctaattatttttatttaaagaaaaaaattatataaatcgatctaagttaagaatatatacagtaatctttatagatttcacagttggaaacaaaatgacaattctgtcaaaaaaaaaatcctcatgaatagaaaaaggatatatttagttggaatacataacttttatgaaattttgttaacatattaaaaaattagggttgcacgtacactcaactattaaattatgtagattacagatcattacttaattcaaatcaaatttgatcggttcgaagattttattaaaatttcatatatataataaacaaatgatacgtatacataatgtcaattattcacactctatacacacgtacaatacttaaaaaatatatatcttttagcactttaatgtataaaaattctcaaataatcttacctatacattatttatttatttat

SEQ ID NO: 206223 - DNA, 792 bp, Cannabis indica
tttccttattatcccttaataaaagtgttcttatatttgtgtttaggacaatccgtacccaaaaaaactagaagaagctagtcacgtgagccagccatgtcgacgtcacgtgacacatgaacttttttgttgccatgtcataattttgaagtttggccctccaatgaaaataataaataacgtgtatacatcacttgtaggtagagtaggtgatgactcgttttgactcatgagctaagctagcttgagtccttgaagttgccctgccacgtacgctcattcctctaactctgatctctgatcttcatctcactgccttacccaggtttctgtttttgggtttcctctcttaactcttatctcttaattcaatggcttcttcgttttgcacgtgtttccgacatagtataaattgctcatacatagctccccaattttgattttgaccctaaaaaaaatgttattttaataatgttcaagatagcatataatagaccctatgctagtatttagctggacaaggttttttgagttaagtttcaacaaaatttctcatttctcatttcttttggaaaaagtaaaactttttgtaaactagtgtgtgagaatgttgctgttacattaatttctctcaagattaattaatacgcagtaagtattatatataatgtagtagataagaatattattattaccaaaaggacagaagagaaaggttataagaaatccataatattgaagataataagcactaatgtaatgatgaagtatggcctctctctttaactaata

SEQ ID NO: 206224 - DNA, 628 bp, Cannabis indica
tatatatttatatatatacatgtacactaacgttacgtatattactgtgtaacgaggtaatatatatatattttcatgtttttttcatttcaataataagctatagagctctaagctagctaagtgtgatgatgatattataatatattatgtttcagttaataaataagcaagtttattatgtagattattattaataaattaatattaaaatcaatttattaaaaaaaatataattataatagcaatatatcactacttattatgttaaaattaattagaaaattaattaacaatacgaattgagtaattcattcatcttatattattttatttccacatattaataactctaatataggttaaagctacggcaacacacccatccgagaatcaaaatccctattaaatagtgttcatactgtattaaacacatttaagacttataagtcaattaagcgcaataggaattcagtcaacaaaaataattaacacatttaatataaattaaattaattaacatatcaatctgaatagccattaattcatcagctgaaagtggcatacagacatgtataatagtgaatttaaaatttaccatttattattagaacagagtgtttgtaag

SEQ ID NO: 206225 - DNA, 1509 bp, Cannabis indica
taaattaaaataaaacatcaagtcaaccatttatttttcaaagaaaaaagtaaacaatacgatgtgttatatcgagccttgtataatttaatgtaaaaaactttaaacaaatacttctaaatacgtgatcgtaaaaatattatttataaacactgctaatactcaataataatactctaaccaaaaaaaatctctaacttattccatggacgaaggttaggtgataggtagttaaaatgtaaaagccattgactaataaacttgtgattatctatataatacatatatttatttatgtatgattgtgaggtcacatgattcatatttttatcccaacttacatgctttttcttgtaaagttaagattccgtcttctctctaattaggagagaatattatatatcttgcttataaatacagagggtcagctttaagtatagacaagtttgcgcttagaatttacttattttatgggtccaaaataaaaaaaaaaatatcttttaatatatatatttttaataaattttaagaatatcatttatctttatagtaagagttaaaaaataaaatttgcctatgacctattttaactcaaaataaatcgaccctgtatacacgtacatgtcatgcagtgtagtagtagggaaatatttactatcatcttttattttttgggtcaaaagtttgaatcccattataatatctcattgtgaggaattatgctttgtcttttggaaagctaacttattgggggtagtgtcatctttaatagaatggaaattcatcatgaggtccataatgataatctaattaagacaggatgaggtataaaatctctataattagaaagtgatcttcgaaattatcaaagccactgaaagggtggagaagagatctataccacctgatctctttttttaaagaaaaaaaaaaagaataattagcagcaaaactcttttatattttaatttctataaacttaatctttttttgtagttaaattctcttaaatttaattttttacaaatttgagatgttagttaaaccttgtaccactacaccaaataaattttattataattttttcttatttaaaattttatctatatattaattttttatttcacaatttcgggagcctgagcgttcggggacccgaggcgcacgcctagcctgtctaccctcagagtcggccctgaagtcaatatagtaataatctaattaatattagtaatattcaactaacacctcaaatttaataaaaaaaaaaataaaagtaaattttcgtaaaaataaaataacataaaagaattaaatgtaaataatcaaaatataataaaatttcggccacaaataatccaaaaaaaaaaaaaaacccatcaaaaggccatgcttgctgaaaggtcaaaaccccacttggtagttgttctaacactcttccaacagccaatcccaagagttgatttggatgacttttctatcataatattataaattaatttatatatt

SEQ ID NO: 206226 - DNA, 902 bp, Cannabis indica
tctaaatcaaaaattaaaaacaacaaaaaaatataaaagcctaaaaaaaaatttaatagaaaaaacaaaacctagaacaaatataatattttcaagtttagggcaaaacgaaaatgaaactaaataaaacctaaggaattttatcttattgtttcttcaacttcttagtctcagggaaagaactatttttagcatcgttactttttgatttcttctgaagagggcaacgatcacgtttcgttacaagtggagaaaaatcagaatcaccttcttcattaaggggtattttcctttagctttattggccagaaatttaagatccatttttttttagattttttcaataatggagaagggaaagatgaagaccgagtcacaaccatctatattaagtggatagaaaaaaaaaaaggaaaaaaaacatgggcaattgctaaaatggaagttagagatgatggagggaagcagttcttttggaacgaaagtgaagttttgatcttaaggatgaacattttgagcaaacgaaaaataaaaaaatgaaattgaaatcgaaaataaaaaagaaaatgataacaaaagagagggaaaatttattgagtgttaatctaaacacatgacgtcatcaatggatgcaaaacgtgtgtaaagatgtttagataataaaataataataaaataaaatattattcaatctatatttttagaattaaaatgtcattttatatttttgatgtaaattttgctataatcttttgtagtccaactaattaaagagaaaaaaattaaatgatggtggtacgtgcgactctcacacgtgggactggaacatgtcgaaacgacaagattttcaacgtagttgataattgataccaacgagttacttctcgtatcttcttcattta

SEQ ID NO: 206227 - DNA, 768 bp, Cannabis indica
ctccgagaattagtgaccaacttcaccataacacaaaaactggcttagtgatgtcaaaatattgcttaggcatcaaaaaatacatcctgtcacattttcctactcaaaccgtgtaatgaccactaagtgatttttgagaattagtagataattaaggtctaatttcactagtggactttaaattatttatttttatgattttggagatatatttgaattctaggtgtgctatttatattatatatgaattttatactttctcgtatttttatgcccagtaacattggaacgcgacgtatggcctatagagtcactttagtatgatttagtatttttagaatagcgaggtgaactagttagacatttagaaagtcagattagtcagggatatagttttggaccattttacccctatgtcattttatctattagttatgtgtgtgggggcattttagtcaattttgtctttgagattaggtggcctcttcttgtgttagcaactggccaatattggattaattggattaagttatattattgttttagctagaataatcaaattaggaaaatgacaaattaagacaatccatctcttctctttctctttctacttttggccgtaggagaaccatcaagtaccagagatttttcttcaccaatttcagtagcttttaactggaattcaagggatttcgagagctaagatccaaggtaaaacctagaactctttttcctttgtttttagtggtggaatttaggttcaacatg

SEQ ID NO: 206228 - DNA, 904 bp, Cannabis indica
cagcgcccgcttggcgcttattcttcttcagcacacggacacgtggcagagatccattggttgtaagtgtaattgaattttaattattttaattttattttttaatattaaatatataattataattttctcctttaaaaatatatcttacaaaataactgtattatataatatagggcccgtttaactcaaaatagcaatttagccaatttaatcattccgattacgtttcctaataaagtaaacaagataaatcacaactattccatttctaaaaaaaatttaacatattacaaatattgattctgattaatttttatttattccgttatatttctccattaatttatttcaattttgaatactgtaaaataaacatgccataagttcatttgtcaaaaataaaaccaatatttatttattattgtcaaatatataaataaataaaatttattttattcttattaatattgaaaaaaaagtacatatataatattcaaaagaaaaataaattagtaaaaaagaaaaaaaagaaaatcgaattacaaacaaaacaccatagcagaagaagaagagagagagagagattgctttgcaggctgtaaatacgcatcaaaatccctatttttcttcttcttcgtcttcctagtttctctctccctttctctgccccccctgaaccatcggaggaggagtaccagagaaattcaaggtctcaatcccacgtttcctccgattttctagagagagaaagacaaagacaccgatctcagcggtgaacgccttaaaaaggttagtgagtgccttagaaaatgggaacgcttcagacttggcggaaagcttatggtgctcttaaggataccactaaagtcggactcgctcatgtcaatagcgattatgcggt

SEQ ID NO: 206229 - DNA, 972 bp, Cannabis indica
atattgttttagatcatgatatctatacagtggtgactgaagatttaaatgtggggttaatttttttttggcagacgcaataataaatataaaaaagaaaaaaaaaattattcttaatgtgatttgaacttttaaattctattttaaatgtaatctagcttaatcattatattaaagttaaaattatatttataaatatatttttttattataaatatatatcttaactaattaaaatgtatatatatttttttccaattttgtttaagatggattactccgcctggtttctatgtaccgatagaatcatagatgctctatatattgtcaagcaattaccgattaatgttgcctagctagcttagaagagaaccgtacgtagtactatgaatatacaatttaataaaagtaccaagtacaatgtacactaatatttaaagaataaccaattaaaagccaatttttttggagtaataacatcttaattaatattgtgcattttatatatatatatatctacctaataatattattaataattaataacgtaatgagcccaaaaatagtttgtggtgtaattataaacattgcattatatataaaataaggtaaagtaatgcattatagattaactaattcaatatgattaaatttgtttgcttcattattacatatatttgtccttgtattgtgtcatataatattatatactagcaatttttggttatatataaatttctcaattaattaagtcaagtcaaaatttaaatagtacgttcatgtgtcgtcgttaaattgtatatgcatctttcaaagcattaaaaagaccagttagttgaaacttgaaacaacaaataatgcattaattgtatatatcaacatcaaagaatgtcgcatatacacctatatatatggatctgactttaatgtatatatcgttaatttaatatttatatatatcatcaaacccag

SEQ ID NO: 206230 - DNA, 2394 bp, Cannabis indica
agtttaaaaaataatttttaaaaaatatcattaattataaaaaatattaagttacactgatatccaataaaaatactcttaaaattaggtacatgccattattatttctccatatgtttgtgtgattcttctacctacttattatttattgcttattattatttatatgcaatattcttctcattaaagagtccaaagggatattaatttttttttatacatatacataaatttgattacaccaaacctttataattccaatttcaaaaaaaaataaagaattaaaaagagatatataatatataatatataatataattatgatgaacctatatagatatgtgcgtgtattgcacaaacatatcaattatggaatttttattcatactatttctatttatctaaaaattaatgatattgatcactttatatacactttgttacgtacttacatttaattattattttatatttactatatatacgtatgtactttttccacattttattacacgcacgactaatttttttatacacataataagtaactgtttaaactttaatattgtaaatctaaaaaatttacaaataatcttaaagatttataacatacattatcatatttctgaatatcaaaatagataaacagctaccaaaataatccttcaaaagtctatacaaaaatttcttataatataaatagcttattagaagccaaatatataccaactcataattaattaataataattgtatcagaattattaaaatccagccatatccgaggtatatacactacctaaaaagttataatattaaaaataattaagaccctaccaaaaaactcaaaattactattaatacaagtattcagaattgatgagccgttggatttgcatatagaaccaattgaaacccaatcaacggtcatgatcatctatcaatttatatatatggtggcccctaataccagcttttttcattgaagaaaactagtgtacttcttattaattaatattgtaacaaataaaaaataaataaaaattaagaacaacttaataaattagctaattatatatatgtatgtatagagagaaataaaagggtggagaagctaagctaatacagattattaactatttatgtatttagatgagcattaatgaagaaggttgggatcaactactcaaagatcaacctataaatatttatatatattatgatcaatattatcaagattaattgatcatatatatatgagcatatactcagttatgtaagttaatatatactattaatttttttttgagttatctatagtatatgggtcaatgcatatcatcatcatcatcatcatcaagatcaagatcaccatcaagagaagaaattatcataatggaaaagaagatgaaaaaatcatcatcatcatcatcattatcatcatcatataatattagtaataatatttcaagtagtgataataataataatggaagcttaattaggtgtttgtctaatggtgaacgagcaaagatcaaggttgtatattgctagaaagtgtgtggtcatgctactttgttggcacaaatatagcaataactattaattatagggtaattaagtgttataaattcaatgatttttttgtagcggtataagtgtcaaatatttgtaaaattgtaattttttcctatttttgttattacagactttttttgaatttattaaaagaatatttagaagctgatactatataattctatcttgacccaataatttagaatatgagtcttatatatgcactgtttaagacaataacagaatttatactaataaaattgaaaaaaaattacagttttataaatattgggtaattatgctactaaaaatcaatgaaaataatatacatttatttatatatataatatatatatatatatatgcttattttacctccctactttaaatttctcttcaataataattgttggtctttttctcattttccggcgagtttaaaataattttatagtttgttcaaaaaaataataattttatagttcgggaaaaatattaacattaattataaatctatatagttggatttcttaattaataaataataaaaaaaatataagatagtggcctcatcaacctttccttctccatatatataaggactatttacaaaaaacaatatatataactgtaaaaatatataagtaattaatgttattgtcatagcacatgagacatttaatataatgtctgcaaaaaaaatggtcctttatttatggatgtgtgcccatataattcatacttgaatatacttaattctaaaaatatgtggtaaattttgttatgcattttgtttattttacaaaaattaaaatt

SEQ ID NO: 206231 - DNA, 1192 bp, Cannabis indica
tttcaagcttttagaaacttttttaattctcatgttttaaagtagtctttcacattataatcccattgatagctttaggatgcataatgtttgactttttaatgatcaagatcaagtcttagactggtatcttgttaaagaccttgtccgactcttagatcttgttttggggactctatctatgacttagaacctgcatgaaaactttgtctatgacttagaaccttcataggaactctttctatgacttagaacctttataggaactctatctatgactttgaaccttcatacccctacctggtacttagtcccttttaggagctctgtcaagtacgttttgggcttgaatcttttttgccgatcaatggtctttcatgattcttgattttatactttaccgatcataactttgaatttcaagactgtctggttgatacccttatgttttggccaattaacctatcttttctctaagtctttttatgttcctggttgttcacttccctctacctttttgagggatgaactcccatagattttggggaagtgacaaccagattgatgaaaacttatcagtctggacaactagtccttctgatacaactttggactcgttgactccagttattattctgaagacatccgaggactttgttgtttgtttttatgtttttattttgcatatttaatcttttgctcttgtatggcctttaggctctttacttttgaacaagtgatattttttgtttgtgtatggcctcagggccctttacttttgaaaaagtgagtggccttggggtctttaatcttggctttaactcttttgttagacatgcatctgtccgggcagcttatgtctaatctaaagtattccattcacacttacttagctttcaattctttgcttaacaaagccttaaatttagcttaagtttagccgtgcttgtttgatgctgcacggtgtgggtgcccccaagtgatcgagcagatttacggtctcttagtcacttataaatcaccaagtgctatagatcttgcttgtgtattttcttggagggacctatttgtaagcatgtggaactaaaaaataaagattaactttaagcagttatcttgttagagaattgttttatacaatattgaactgaaacattattttcattcatcaattggtcttaaatatgtgttg

SEQ ID NO: 206232 - DNA, 1322 bp, Cannabis indica
aatttcaacctgagatatttggaaacatgatagcctcacaccattgtagagcttttagcaaagctataacttcaaccatagttgagttgtaggtatacctagatagcttgtagcaaactctacaacaatggatccattattatcttaaatcacagctcctacacttaagatcattctatccttattcatcgttgtatcaacatttaacttgtatgttcctagagatggaggatcccattgtttatccactaaatgatctttaactgaccttttattagaactattagcctgcattgctttatattctctaatttaataaacaacccaaggaataaaaacgtcttcttcttgtagatataatttgatccaaacattttagagttcatgtctttcaaactcatccataaaagtcctaaaaagattataattcaaacttcaaaagcatttaacatatattctttaatattcaagtgcttattataattaaaaagatctttaaagggtgaatatttaagggaaattacatcatatactaatttttaactttttttaaaaaaaaatttacagattggatttctctggtagtttccatgtgcgttgttatacggattttagttgcaatttagattgttccattagttgttatagagatttccttgtgggattctgtaaaaatacaaaaaaaaatatatattttgaagtgtaaaaaatgaaaaaactccttcaaatttttctacttttggaacaaccaagtaaggaatgggtcacagtcttagcttgattggcacaagaagaaaaaattagggaagatataatttttttattgtacaaatttaaagttgtctgcaacaaatgcttatatactctccatataaaatatttaattttaggaggtaattgagcatgtcaaaggtctgattgctgaaatattatttttaatgagttagagtatcctcacttgacctccgggaaagggattgtgcctccatgtgatgcaagaaaaatagaaaacaaagacactgcaagtgtggaaatggagtatggaacgaagctcttggaagaaggttcacatacggaagttaagtgtggaactggaagacaatgcgcaaacaaaagctgttgcagaaccgaaagataacgaagaccgaatagaggtgttgaaaggctcgtgatagaacccggagagagattcacccttcaacaaggtttgcggaagcagacttgattgtattttcactggcggcagttcaacagactaaagttgaagagcccagaagctatgaagaggtaagtagaaagaagtctaaatggcttcaggtcat

SEQ ID NO: 206233 - DNA, 794 bp, Cannabis indica
tattagcaaatcatgcatcaatgccatgaaagatattatatatgtataggtatattaatttatgataaatattaagttcaaaaaaaaaaattatgataaatataagatgaattctattaattgtcaacatttaattaaagtctcttaattaatttttgtgctttaaaatattatgtcgaaacattttttttaattatttttgttcattatacttataatattatttttgtaaatttttaaaaattttgaaataatttatattgccaaaaataagtttgaagttctttgaatatgcataattgactagaatatcatgacctctttttttgtactgtaaactatttagaatttttcgaaaaattaccgggatggtatcatgattatatagcaaatatcattgaaaaaaatattacgacatataattttgagcgtaaaaattgactaaatataatagaaaattgaataaaagattttagtaggaggctataattaacaatcccctaaatataatgaaacttattatatatgcatgtatgtatatatataattaaacttattatgcatgtaatgaaaaaatgagcttggagaaacactaattgccatgtaagtctatttgcattgggtgatcttacaaacacttcaactacaccaaaaaaacattattagaaatttaaatttgatttattaatggaggattcttacattaatttattactatcatgaaccatgatgtaatcaactattctttaatagatatattaattatggaaactagattttatcccattaaaata

SEQ ID NO: 206234 - DNA, 868 bp, Cannabis indica
tatagtactactaataagttgaaatttccgatgaggcatcgttttggtgaacatctaaacccaatttagggacttgacatcttccttggtcagagagagatgtgcatctcgccgggtagcaacagggatctgatatgaaattgcatctaccaccagttttgatgcatctttctataggcacacattttcgattctcaccccatatccaatcaccttcacatgccagtccttcacagcaaatcttctcttgtgcccaatgacagtattcatcaagtatcctacaccgcgttgcgcccaaattcggatcaatatccggttgtagtcgaccaaagcatcccataaccatcacacccaccactactaatgtcgtcgtcacaataaacttcttcattcttactctacaattcgatttttttttctcttgtgatataatggccattggccaatggtgactacgtcctatttataggagaaaggaaactcataataagtcataatttaatagttcagttagattaggtgagacacgttatattgattgaacacgagtttcttgttatatgcatataattgtgtggtgcacctatgaatgtccttacaaattataagcttgtggggatcaatagcagagtttgtcgttttttagatggcttatttctgtttcacacaactgtagtatattccactttccacctcatcaccaagaacacagcaaacatcaagaaaagaaagattcattgtttgctacccaccatttgttccatagctcaattagggtagtagctaaatcgaaatacctctaaccgttaatctttttgagcttcaatttcacacgcgtttgtgatctagctaaaaaaaaaaaaaaaaa

SEQ ID NO: 206235 - DNA, 505 bp, Cannabis indica
tcttagaaagttataaaacaaaaaagaaaaacttatataagaacttgtagcaccaaccttaactccctaataaatattaaactttaaccccctataaatactaagcttgagttaaatagctagtgtaaccaaagaaatcccaaatcaataatttctacaaatttttattctaccattctctattattatatacacatccaatactatcatcaattcatcaccatactaccatcatcatccaactacactaatcactaaacacactacaaaactatcacctaaaacaaatcaggactatgtactatattccaattcaataaacaatcataaataatcatctactatacttatgcttctggctattaatagattaactggatcaatcgatttagctcttcctttcacagtaaattttttattacaaacctagcaaactaattaatttatggcaaatagtaatacttcacaattaatggtttaatttaaggagcatgaggcctcttta

SEQ ID NO: 206236 - DNA, 762 bp, Cannabis indica
catatatattgttaatatttttgaatatatacaatatttgaaagtggggataaaatctaagattaagattgagatttgaaaaagacaatagtggcaactacaagtaaaatacgataatgataacgggtgagatacggtgataacaatagaaactacaataatagtagcaactttaaatgatgcgaaaataaacataatacattataggaaagagtgtttacttaaataataataataataataataataataataataatttttatataaactgtatttgtttactttacttttggaaaaaaaaaagttttttataattttattatacattagtagtataaattttaaactttttaataaataaataataaaacacactaaataaacttttaatgaataaaattatcaataattagtatttactcatttcaaaaaataattagtatttaatggatatacttaaatccttttatcttattttatgaaattttatgttttaataaataaaattattaataataatatgtaattatataatgtaagtttactattattatatattataattattttttaagatactattgatatattacctagtaatcatatacaagtaatattcaattttatcaataattttttttttttgaaaggatttgattaatttgcttattataacatgcctttattattgcgccatattcatgaggtaacatttgaaataactaaaagagttagcaacaaattttttcgcatcttgat

SEQ ID NO: 206237 - DNA, 790 bp, Cannabis indica
ttgaaataatactcccaaaataaaatatcatagaaggagagcttcgtaatgattgtacgactaagactgtcggtttcaaccacgacctccttccaagatttctttttaatcctgctcaagatttccattacacccatagcttttgctattttgggagacatttcacctgaatggcagtaagaaaaagccatttcgggagacattaagcgttttttaatcgtgataaaacaaacatatatattgtagcatacacattaagttttgaaaagtatttatttagcattttatttcctaatgtataaagtatttctaagacagagagagataataattatgagggctccaaaaatataaacaaaatttgaggagtattaaataaaattttaaaaaaaattacataacataacataacaaaacaaaaattttaaaaatatttggagtggctcatggcatccataaatattcttttctaagtatagtaatgacggcattttcaaaaaaaaagtatagtaatgacggtttttaatcattttattgttttaatttttcagtacaaatgaataagttgtaactatttttttttaattacacaacgtaattatacgggactttttacaaatttttaaggaaatttacaataatataaaatgttaaaattatgattcaaataatttattactgtataaatatataaaaaaataatgtgcatataattagtggtttgaatgttaatttagacatccaatcccaatgtactcaaaatttgtaaaatatcccttataattatatt

SEQ ID NO: 206238 - DNA, 683 bp, Cannabis indica
attttttctataataagcaactagtggcactattttacatttataccctagaaagaaaaataaacaaaaatacaaaacaaaagtttccattttcaaaaatacgggcctaacaacaataattgaggaaagctcctccttcttcgtgacccagctgaaccacatccatcctaaatctccacaattttctttcaaaaaccaagaaatttagcgccaacaaaatgtagatctcaaccaaaaaacaatcaaatcccgaaaaatccaaatgcaaaagttaaaatagaaaggaaaaaataagtacacagagatttcgacctccattgattagaaaaaacacaaaaacaacctacaatcaaaaattcaaatcatactatctagagaatttgaagacaaggagatcggataaacttcgaagcttacccataaacgaaacagagaagaaagtcaaggtacaaaaatttctaatgattctttaatgatattcttcctaattaagttttcttcatggttaaaaatactgtttagatcgtggaaatcatataaagaattaatgatatagaaatttggttgatctgaataaataaatgagaatagattacaactaaaaaaaataactaatgcatacagatgtaatctactattttttttaaaaaaaaaacttaaaattagtatatatgttgtcttcg

SEQ ID NO: 206239 - DNA, 664 bp, Cannabis indica
cgttttacgttttttttttttgggctaagaataaaaaggaacagaaaaaatggttttgcaagtacgttaatgaaactataaggaaaaaaggtaacaaaaaggagcaaaacttattaatcatggggaaggatagagacctcacatggtgcttttcgtgtgaattgaactaaacatgaatatagtatgaagtagagaaattatactagaaggtcaatgttaattttcataggaaagtgacaattttgtgattatttgaatttggaacaaggtaacaaagttaggaaagtaaataaataaagttgttgcttatgcaagataggttcttctagtttagttcccaactcttgaagcaaaagaacaccttttcattactatagttcatttgtttaattacgactaatataggagctgcccagctggtttgcttatgaaattatgagccaagacaagacaattaatttattatttcaaaattccatttgtttcaatttatatatcaaaacatgtgtatattttttaatgggtgcagtccagcctgtgaaaaattaacaaattattaaaagaaataactgacgaattaatgtagaagattatgccttattttgtacgtaatatatgattggaattaagatataaagtctcctacaattggctatttgcaacc

SEQ ID NO: 206240 - DNA, 817 bp, Cannabis indica
aatttatgtattccttattctattgtttttattactttaaatttaatttttttatagaaatagaattataataaaagaaacaaaaagaaaaaaagtctacaaaacaacaattaaacaaactagccagttttggtttttttattttgtttttactttatgagataagctattatgataaggtaaaagtttagggttaattaacaagactttaaatgtaaagtagacccaaattaatctacctattaaacatataatataaatataatttcacaaaatgataaatacacatcaaaatttataaaaagttaagcataaaataattttaaaaatcactcttaatactttataattttttctcacatattttgtgttagtttcaatatttattttaattaaattttcatatgttaatacattaatggtatttttatgaattgttatttttatgtactcatatttaatttttttgtatataaaaaaaatctacatatatagaactttaatttatggtatttttgtaacttaaaacaatctacaatattttgattccaaagtaatgataatacattaatggtgtggaagttaatcctccaaaataataacaaacatgactaactattggttatgttacttgaaactaagttgtttagctcctttaattttcagccataacaatttgttatcttgtaatgagctataattattaatagctcttgtcccatttcattttatatgcaacttgtattgtaaatgttagagagagataaagagagtgccaaggagtcatgagacagagagagctaaagagagtttgagt

SEQ ID NO: 206241 - DNA, 830 bp, Cannabis indica
ggcatggcaagcttcaaggtgaacataaaatgcataagtctaggattaaaggctacccagttagctatatgttcaaaactaaaataagataatgccaggattaaagaccgccttgagggtcactagttcaaatgtaacaggccttagggccatacaagaacaaaaaacaaaagtgaaaaataaaagcatgaaaaagtaataaaaatgaaggcctcaaatggcttcaagggtaatgagtagagttggtagggtcaaggttgtgtcagacgggatgacatgagtctctagagcagaatcaataaaactagctgataggagcctcgataataacttggctggccttattaatctagctagctagctaggaagaagtaccctccttggttgctttagctataaacaactccttgccccatgcaatcatactctcgcgaagaggagcctctatataagtaaagtcgtccttaggattgtggatgtagcattcataaaacatctccacatccagatcacgatactcgactatgaggtcatcctcactttgggctgaacttcattgcccttggctagactcttcgttagagctcttggcaggcatatttcttttttagctttagacaaagccaagttgtagcagtgtcgggcaaatctgttgtccccttaggcaccctaccccataccttgatggaaaatttaggcataggtggtaaattaatgtcacaacttttaggtcgtatagggctggccaaccaatcataacattgaacattgatggcacatcaatgactatgaacttagccatcactattcttgttgtgggactttctcca

SEQ ID NO: 206242 - DNA, 1189 bp, Cannabis indica
gcgtgccctgcaccaacaatgctcccctatgtacggacgattctccacacgaggaagaaccatctcgggcccaatagtcagatatttgcatgcattttaccacgataatgggcttaattttttgcataaatcctaaactggtcataggtatgcacatgcccatattttagcctataaatattgttttattttcacagaaggagtcggatcggaaaaatgataaccgaagctctcttaaaatttctctaagttatcttcttcttcaagagaaacaaagaatgcagggttagagttttcttgtaaataccactgtaaaagattatacaagcctctcaaggccaatacattgactcgtggactagggctcattaacgtatgaaccacgtaaaactttatctcttttactcattgcacttattatttcttaagctctattttatttagttttcaaaaacctcggtaaacaattataattattattattattattattattattattattattattattattatcaaattataagaatttttaatattttgtgcttttcaactagtctatttgtgcttgcatactgtgtcttcgggcttgtcatcgtgccgtatcgtgcctaagttcatactttctcatgcctggtcgtgcttgtgcctcctaaattcgtgccagttttgtgtcgtgtcaaaaagttcagctcgtatttacaactctagtataagtatttaatatattctagtttatatatacaccgaatctaagggtaggcagagtaggcctatgtgtggtccctgaaaaaaaatatattttatttataaattgaatgtaataaataaatatttatttattctattataatacacaaagttgttaagcataatagaatgtgtgtccttcgttgggaaatattattaattacaacttagcaaaaattaagttgtcatttttttttatatcagaacattattttcttaaatgttcgactatgcagattttttttaaaggttccattttttcttgtttttcttaaaaaaaaaaaaagccctataattttacgctgcctaaagctgccatttttccaaacacgacccttcacttatatatccaatttttcaacaaaaatatctaatattataattttgttccatctattatttagataccacacgaaataatattattagttcacct

SEQ ID NO: 206243 - DNA, 1068 bp, Cannabis indica
atatatatatatatataacaggacagggtgattctaacatttaaatattattatacacttacaggggatgtagaaaagggaggaataaacaggagcccaagtgcttatctgctaaacccagaggaggaaagaggtcgatacaaaagcaacgttgatagcttaatgacacttttgaaatttgtggacagcgcaagcggtaagagccttggaagcttcaactggtttcccacgcatggaacctcaatgaccaaaaacaacaggcttatcagtggtgacaataagggcgctgcagcaaggttctttgaggactggtttgctgattcaactactaataaatcattatcaacaaccccaagtaattcttcccccccttttttttattaaaatatatcttcccttcttgtttaacttaactttcataggtttttttttttttaatttaaaaaactccttcgagggatgtttaaattgaaaatgaagtcattttttaatttaaaaattctttttgaagaaattagaatttgttgctttttttcaaaaagacttttcacatgttatttttaagattaaaataatttacataatttttaatttatttacaattcattttttaataatatggaaacactttcaaaatattttttattaaatttttttttattataatagttattcaaaaagtaaaaataaagtcaaagctcatatttattttatacttctaactacaagagcatctccattggtaaaaaattaagagatgcttgcttaggtagatagatgaagtgacaaaatattgagatgttatactattagaagaaaaaaaataactattataaaaataatgtgtgaatgctctacagtagcattgatgctatcaatatttttttaattaaaaaattaaaactaaaaaattaattgttgctataaaattaaataataatgtgtgagatgataattataatatttttaaaagttagatatactattagagtgattttagaagtaagagtgtcaaaaataataaaaaataaataatttatagtttgtctataagtaacacatcattct

SEQ ID NO: 206244 - DNA, 760 bp, Cannabis indica
agtggtatgttgcattagattttatgttttgtactcgcattgttattatttttggacagaattttcattagggtatggtttggtactgtctgtatttcaattctgttattctgtgtgaatttcggcatttggaggccttgcctgtgtcctgaccttttgttcttgtcacacttgcttaatcttcaggggattcaccaagtttagccgcagtgactacgtcaagttgaaggcagagaaccgtattcaacccgatggtgtcaatgctaaggttagtttctatccaataaacttgattctttatttggagttggcagtacaatagaaatgcaatgaataatatattgttggttgaatcgaaatgttcttttatttctaaaactgattaagttttattgtatttctcctgcagcttctcggatgccatggacctttggccaaccgtcaacctgggagagcattcattgatgctgctgttcaagcttgatttcttctaatctttagtctggacgagcttttttccttttatctagtctgaactttgcataccagttgtcgtttatgtacttcttttgggattatttattctgcttttcatctaatggaaatttttgtatttcatacaattttgttatcatttggattttgggcaaaaatttttatatttggttgagtttagtaaaaaatatcattagtcctttttgcactctttgttgatatgttttgatgtcttggaattgtttataaccgttgttaatctttc

SEQ ID NO: 206245 - DNA, 518 bp, Cannabis indica
catgttttgttgattgaggtttggaatctttcgaaattagatttgatcaattttctaaaagagtaggtataaggtgaaatctcatgatcaaaggtttttgcgtttgttttgagttttcaaacttaggaattttgtagaaagagaagcatggagcttgttggaagaagaaatttttgtaatatttttaatttttaattatttttataatatttaaataattaatattatgtagactaattgtcataattttttgaataaagtaatgaatatttatataaaaataaataaacaaattaaacaagatgaaacatagtacgtgtaaaaggtgttgatgtatataactctactattttattttatataatgttataatttatatatatttttgtctatatttatacatcatatcaaagtagatgccattctgcaccgtccaccaacaaaagcatgatttatatttgttaaattattatatgactcatgatcatatacaagaatattaatttttatttttattt

SEQ ID NO: 206246 - DNA, 1057 bp, Cannabis indica
agattcaagtcttagaaaattaccataacagtggtggttgcatcgaaaagaacaatgagggatagcacggaaacttggtcgacgtatgttgccatggcttcaaacactagcaccccataaacatatggatgctgcaaaaaatttctggtgacatgatgagcaagattgtgattttgatattagaacttgaaagatgtgtggaaagtgcactagttaaataaaattttagctttattagcaaacttacttcataacatgagttccaagccttgaccaactctcatgtgagaatcgtaggaggaagcaaaaaagataacccaacaacagttgagtagaacaacatttccatctacaaatatataaataagtaaaaaattaaagaaacaataaaaagagacaaatcaatgagaagaatgacacagaatagagctaacctgggtggtatttggatagagtgcccgaaaccattatagcacccaagactcgaaaattgggagatgtctgagcatcagctaaggtgaaaagtatcaaaccaataactagtagtattgcatatacatattcacgaagagtgtatctccatctcagtcctggaatgaaggctcccatgatcatgagaggtaatacatgaattttcatagccaaaagaataagagaaaagtatcgatcgatgcaagatttggcaactataatgatatactagagttttaaattcaagattttatcaaaataaattgaattttctaataaagagaaagaagaaaagagggaaggacttgtttggatttttatttttaagattgggaactaaacatagactccatgtccatgttccttcaacctttttttcattttctcttgaaaaaatattgttttttccccttttaaaatggtacagcagtggtgagacagtccaaacaagtaccactaatttttgcaatcacataaacctttatatctaatacataaatgttaaactaaaaaaaattggccaattcagagagtcaatattaaaagaaagtttagcaggcaattaagcatttgaatacatatatat

SEQ ID NO: 206247 - DNA, 1356 bp, Cannabis indica
tatgttttttttttttaaataattaggaaatagctcgcggttcgggtgcggtatgagaagatttttatttaactttttgcaagagtgacaaaacttgtcattgtattatgtttatgttatatttatttgacatacatctatattttgtattaggatttcaagattcaatttatcacaaaaagtagtaaaattctaaagttatataaatgatataaaattctaaatgagttcaccaaaattaatcatgagatattaaagggagtcaatcacctcacaaaatttcaaaaaggtcattaatttcatgaaaatctcaaaatgatatttttacctaaaaaatttaaaagtgcaagtcataataaattaaaatccaaaaagagatcattcatctcttaatcaccaaagcatcacaacatatgatctaagttcgatttgttcccatttgagatacgtaagcaactaaattactaaaattaggtacaatcacaaattctcaaaatctcaaacgaagtcattcacctcatcaaatcccaaatgaggtcattcacttcaaaaatctcaagtgaagtcatctacttcaaaatattaaagtgagttaattctccacaaaatttttgaacgtttggaactacgtttaacttgattccaataaaagaatacatatgcaccttagttgctaagactaagtgcagtcaccgataccgcaaaaaaatataaaatacaagtctcaaaattccataaaatttcatacacctagaaatttttctaaacttttaaataacaaaaaattcttgaaagtggtcatatacaggaatctttatattcaaattttaaaatgccttatcccgaactacaagtggcttgatccttcataaagagagtatgtaggtagctcggttaattaaatttattgagttcagtcgcaatttcaaattcaccttaaatttcctcacattctttcaaattatatatatcatcgtaatttgaatcaaaatgtatatcttttaaacaaaaggattgtagttaagagattattctttaatcgttaaacttaaattaataaactcttatgctacaaattcggcataggtgaatttatattttgtatttattttaatattctaaatgtgaaatttttacttaagagtatattgctattcattaaataattatgaagagcaaaaaaatggttgtcaatatgtattagagttagtcttacattattaatgtgtggaaataaatactatatatatgatgaaagtgctaattaaatttgagataaaactcattcatcataccccaattctaacaactatgaaaggtgccattttttttactaagggtaagacggaggtgccg

SEQ ID NO: 206248 - DNA, 1001 bp, Cannabis indica
ttttttttttttgaaaagactcagcataattacctaaaatatttggattgtgtaattctacatcatcaagtcaacttctgggtttacgtttggctttgttttcaaatgatggccatgcccaatccatgccatcacaaaaagccaattccaagttggatttgaagtggaaataaaaattaattaataattattgttagtttttttttttattattattattattatttccgaagaaatctagctagttggaaagttcaatttccataccgggcttgtggttttcaataattccagccttataaagcaacataggtaagtaggccagcaaccttttcaaaaaagaaaatataccaaatttaagttttatttgatcattgctaatattaattaaaagctatcatatccattacagtttccggttgagaaagaattagttaattgataatttatttttaattttattcggttggttatatatgaatatttccaaagtcattaattcacttaaaagttatcgttataaaaaaaattaaaaattatcattaaatatcaattataaaactaaagaaaatcacaatttctcctagaaattgttatgtatacatgtgtacacaaaaatcactctaacaaacaaacaaaaaaaaaataggaggaggatgaaatgaaattatatgcttggtatttgggggtgttaattcaatctaattggtgctgattttaaattttagataatttaatatgtattataattcaaattcaatcgttaaaagtataaattatattggaataaagtttggtaaagagggactcaaattatcacacctatttttcgccgatgacagctttgttttcttagatgcaacggttgaggaaggcaaaagtatgaaggcagttttagaggaatattcatggctttcaggacaacaaatcaactttgccaaatcttctctatgtgtaggcagcaagatcaagcaagaacaaggcgccattctcgcagctga

SEQ ID NO: 206249 - DNA, 563 bp, Cannabis indica
ttaaaataaaagtgcaagtttttaatattcatgtatagtttaggattgaaaaatagtatacaattatgttgaatatctaaattatttgttagaatttgggataaggtgaatgggattctatctcgaaatcaattggaaatgggaggagtagcccattcctcttatatattctattatctttccacacattgacaatgtgggactctctaacaatattccttatatacactcaattcctttgagtggtccattctctttctctcaaacctcattttctcccattctctctaacaaattcaaactgaaatgttatgtttaagtaaacaattaacctctcctagctattacaaaatgctagaaattagagagtttgttgtgatactttatttttgagatacccaataattttcggcaacaatcaatgggtaagtaattttttttgttattggtccttatatttatttagaaaattattttcatgattgattaataggttgttgctatgtttttgttgttttgtgttgaaatggttgatgtctggtttgttatggtttttttttttg

SEQ ID NO: 206250 - DNA, 944 bp, Cannabis indica
gtccattcggcctggtctcaacagggcagggtcaagtttgcccttgtaattagttgtaaacactattattctctcatctctacagcttgaccataacccatctattgaagaaaactcaaccaagaacatagaaaacaaacacaaaacagagataggaataagcacagaaatgaggagtaaatgctatagcaattaaagtgaattaaacaaacataaaagcagaaaattggagatagattttacatggttcgaacaggaataacaacctgttatgctgcctactccacgaccagaaacaagagctgtcaagtacagttcataaacactcgaatgaagctatgcttcaattacaggagaaatacatctctctcactctcaattctggttttcacttttctttctctgaatctccattagtagcacataccgaatttttggattttgagctcgatgggaaaggatcccttttatagaacttggacaaatgtggttgatgtcataactgtcataacagaaaaaccgttatgacagttttgacatgttcgagttggtgtgagggagattcagcaagtgtaggtaattcaaatgtgaggccaaaaaataacaattcatccacctttggctttacatttgaattgcataaaccctgacattgaaggagctgttctggtcttgcgaaaactcagcagtcaagtatatttagcaagttcagacaaagtctgaactttgctagaggaacatacttggttaacatgtctgctgggttttctttggttccaatcttcatcacttgaacttcaccttttgcaattacatctttgataaagtgaagcttaatgtctatgtgattagacctttcatggaacatggggttcttcattaaatgtagtgcactttggttgtcacaatgcactacaatgtttttgtattgaaacccaattctg

SEQ ID NO: 206251 - DNA, 1122 bp, Cannabis indica
ccatggtcataataaactcgtaactcattaacataataagccattggtttcaaaaaaccaagtggcgagtcatgagtgtgagccaactcagtcaagactcgagggctgtacaaaaagactcaaaactcatcatcagaaaagtcaagacaattcaatcacacgtgtcacactcacaacgcatatgaaactgctaacctttttattaattaattaatttatttattttctataaataataaataaaaaagaagaaaagaaatagtaaaggaagattaaaaaaaaagagaaataaaacacaaataatagcactagtttcggcctcaaaccagcattcatttctgtgcttcaaccaacaatctctgacccatcttcttcctcatctttatcgaatttacaggtaaagctctaaaacaatggaatatcatacaaaatatttttaatatttatatatggatgggaacctttttaatttttgaggtaattacaaaaaaaaaaaaacaaccaaacaacttggctaagctttgaggttgtgtaataataaattgaattataacaaagacaagaacttttttttatttgagtttatttttgtgtttttttttgataaaaaagacatggaaggaatggaagccaaagctttgagaccgagtttgagaggcgagttgactcagcttgaggattttgaagaggtttataataataataataataataataacaacggtaccggaatttcatgtgatgatttctccattgatgagcttcttaaccttcaaaatggagaattcgaagaagggtctgttgaagaagaggaagaagaagaagaaaaagactctctttgtgttgatgaagaaagtttaactctttccggtggttcttccggcgccggtgactctgagtccgctcttaccagcgaactcgccgttccggtaagagaaaacaaaaacatgtttttttttaatttaattttgggtaaattgaaataaaaattaaactttttgtttggtttgtgtaaacaggacgatgatttagctgaacttgaatgggtttctcatttcgtggacgattctttctcagatttttctcttttacaccctaattgaaaaacagagcactgaattt

SEQ ID NO: 206252 - DNA, 1481 bp, Cannabis indica
agatgtaatttctcttagctagtattaaaagatgtattaaggataaaaaaaatacaggttatgaatgaaatttttgcttttttgtttcttacaaactctctaatttatagctgatattgtacatttatgcctgcaattgaatcataatatataagaaaacttattattttactttaaaaaaaaggaaaatagaaaaagatattcaatttttatctgcctaaatatatcaaaagtaccaaaatatatcaaaagtatcaataaccattgatcaaaaaattagttgttaactaaacctgctatccatagtaccaaaatatatcaaaagtatcattgctccttacaataaccaaaaagacattaaaaattacgctactcatagtaccaaaatacatccaaaatatgatagcgtcttataataagaaaaatacattaaagaagatgatatccataggtagcaaaatacatctaaaaagttctctccatgcatgagtaattcaatcttcttgttgttgagatacagaggcttgttcccttgcaatttgtttctttctccttgcattccgtttcactgtctcaggctctggattagtctttggtggtctgcctctcttctttggagcattatcctaaattagatgaaaaatagtgtaaattattgacaattttattaaattagactacacaatcataataaattaaaaaaaaaatgaaatatctaccttagtaacaacattggcttcacaagttcttttagaatgtcctgtctgcttacaattgctgcaatgattttgttgactcttccttggttgattcataacagcagcaggaggttcatcattacttctgtttcttttttcttaggtcttccaggtaggctatactctggaggtggaagtattgggttttgaccgatttcaggccacatatctggactaggcattggttcaattacccctgcatatgcagcaacatgagcatctttcttataccagtcatcaacataatccatgacttccaaacccgatgacctaatagaagccaatgcatgcggacaaggtatgcctgacaattggaaacctctgcaagtgcatgttttgcttttcaaatcaaccacaaatctctttgatccaagataagacacttcaaactttgcatttcctgacaggacagagttacagtgtgttgccaccttcttatttttctcaataatgtcacggattcgtttatcaactggaaccacccatttcttaacactttcccttttccttcgaaatctacacataagccaaaatcgaaccttttccaacaatgttattattgattggtctcttgcaggcatgattgctgagttgaagctttcacataagtcagacaatgctttttctaaccccttttgcctatcgctcatcattgtgaagatgtttggcctttgaatgttaagatcctcaacaattagctttagaaaccatgtccaagaatct

SEQ ID NO: 206253 - DNA, 1316 bp, Cannabis indica
gtggcctttggacttcaatggctagttgtgttggttgttaagtaaatatcctagtataatcattcttgtaattgctgtcacagtttatatgatttggaagaatagaaaccattgtgtctataatgatagttgttatattttgttgaaaactgtaaaaggaaattaaagaaatagttcattacaggttgtatagcatgaaggataggaaagttctgcttgcaaaaaaaggcttgtttttgcgccttcttaagtagcaggttgttttcttgctgctttttgctagctataggggtgttttttctgggttgtttggggctggttgttgaagccttgatgtatttggtttgtttggattaataaaattttctctttagtaaaaaacaaatattaataatttaatattcaagcaaatataaaaaaattcaacctttatctataaatagaaatatctttacacgttttttaggataagaacaataataatgtcccacttgccctaaaagtaaattgggcatctcccttagttccatgttagttatatgacccacaaaagattttgctggtagcatctttgtgaatggatctggcaggctatgttctgacacaatcttcaggactgtcacatttatttctattatatctcttagtagatggtacatccactcaatgtgcttgcctctcttgtggcttcttggttccttggagtcggccaccactccacgattgtcatagtagagtactagttgttttactactcttggaacttcttttagattagtgtaagagtttttcaaccaaactgcttcgccaagatgcattatatttggctcaatacttttttgcttaatgcttctccagtactagtcgcttaatgttaatttttgacaatatttgtctgaatgaaaattaaatttagtatatctagtaggatttaactctcctccaaaatatacaagcatgatatctctcattctccaaagatacttgagaatgtgcttcaaagctatcaattgttccaaacctgtaatcaatttgtaatgactaacaatccttactgcatagcatatgccaagcattgtacacaacattgtatacattaggctcccaactgctgatgcataagggtactttctcatgtcctccatctcttgaagagtctttggacattgatccttgcatagagaaattgcatgtcttggtggtaacgtcatttcttagaattatatatataaatttcttgagaaagtactaatgttctctactttctgtctctatagattttaatgcgaataacagagcttgtgtctcccaaatcc

SEQ ID NO: 206254 - DNA, 1248 bp, Cannabis indica
agtatgtggttgaatgaaatttttgtgattaattcaatcttgcctaattagttatatatttttattttattgttttattaaaattttaatttttgtaaaaagtgtaaaatattataaattaaataaaaaaaaatattatgacaaatcatagaataatatttttcaattttttttttcaaaattttaaaatttaaaaaaaaaaaaaaaagaagagaatttattatatatttttaacaaataaaaaatatgttattagctatttcttatttatagctatttgtttttataagtgttataattaggataaaaattcaatatctatatatacatataaatgaaggcacaaagcatgtgatgtgacatgctaaaaaagtttcaataaaaattatattttttctttagttttttttttttacatttttaataattttttaaagttgtagtgatttcactctttagtgtgttatttaaaaaaaaaaatagaattatttaaaaatcaatgtgatgttgtacttaaagactatatatatttatataaaagaaaacacaaaatattaagtgacattctatatgttttttcttttacttatataaatttttgaggcattcacatttggagaataaataatgtatacaagtttgatataatataaggtgtttgttttgaaaagaatttcacatggtttatgaattattttggatgttatatttgtttgtataagtaaaatatttttttatttatatttatttgtcacaaaattagtatgtggttgagtgaaggttttgtgattaatttaatcttgcctaacatgagaagagacaaaaatttattaattaaaataatatattaatattaatttaacttattagattattaaaaaaaataattatccacatactattaatattataaataataatagcaatggaaagataactaataattactcaatgattttaaattaatacataatatttttatacaacaataaaaaaaataaacagatcatgcttcattgattttcaattaataaataatattattaaaataatttgtctctcattcaataaaaaggtttaataatttacactatttaaaggtattgtttacactttaacacaatttttcttttttgcattattataaaaaaagaggcataagtacctaaagttttgactttgtaagtgtcataaatctaatgattttttttagtggcataagtactcaatgtttataaaactgtattt

SEQ ID NO: 206255 - DNA, 881 bp, Cannabis indica
tttggttttagggttttaaaaaacaagttggtcatttttattgacatatgtacgatacttatacgtatatgtatattacttttaggtatgtgagtgacagcaagtatatatacaccttaccgacattgcacattattgatatatgaactttagatgaaatcatatgatcttttaacaatgaaacaatgcttcttatttttgttttaagtacagctaccactatttcagtccactaccatgacaaaacaagtggacccaaatgtgctttaaatgtgtgtatatatgtatacataaaattattactatcaattatatatatgcatattcctttttttctaaaggtgcataagaccctaaacaacatgatttggacatttggttagaaaaaaatagtgatgagacgaacgatatatcgaaaccacgtagaaaagcatgaagctgactttattagattgacaccccatatatatttcgaccacacaaatagttacacttatttcatttttccactacaacgaaggttctcgatcggagcttaatataagtccataacattttcgttatttattttagattaattatcaaaacattttcttaatttattaataagttattttttagtttgtcatataaaagaacattattattattatgaggcatcaatattgctctccttgaaaataattagcgatatctataaaaattattataattaattatgtgaggacccaatatatttaattgtagcaatggggataaatcatattcgatggtgttatacacgtatgttaccttttaatatatttctcaattctttttatatacacaaacacatctttattctctccctccaccttttaactatatatatgtatatgttt

SEQ ID NO: 206256 - DNA, 1738 bp, Cannabis indica
ccatctactttaagtattcaagagcatctaggaaaatataacctactttaaaaaaaaaaatcctctatgttttattattttcaataatatttaatgaataacaatttatgagccttagaatttttttttgtttatgctgtatctaaagtacggaaatggccttgggtaattcctgggtttggaaactattgggcttatttaacaaaactacaatttttttattagattaactgaaattttcaattttcttatttttacactgtgaggcagaatattttttaaaaaattgtgcaagttataaaagtagtgaggctctgttttgttagttgctctaactaactacttgtcagttgcatctactgtatattgtaactaactcttccctttcttgatcaatatataagtggctaagctcatctcttttgagtgagcctttttcatcattttcactgcctttttcatcattttcacttcttcatctctgtattcgttggtgaaatgtaaaagtttaatgtaaaataaaaaaaaaaaataatagtttggtgatatattttgaaggataaaaaagttgatagagaatgatctaagcgtgcaacctgaagtgtgcactacggtatgtattgagcagtatttatagattaatacataccttgagagcatcacaaactgcattatgctctttaacaaagagggcttgcaaagttgagagtccactccaaatgtttgttacatctcctgagataggaataccatcttggtcatggagaagaagcccgtcttctccaatcttaagtttcccatctttgaaactccttacttgttgcaatttttcattgttacttccgtatacaacacttccatcccttttgtttacatacatatataaaatattatgtatcttcctactctaaatcaaaaattcaatctaaataacaaaataataatatatgtacttaattagtacttaccaccaaggtgtacgagtgttgattgaaccactcttaatatcattagaaccactagtgatggaaatttcctttgtcttgaggaacttgaaagacttcagcgggcactcactcgccacttctgctggtgcaaacagctccacctaattattgcaatcataattaataatattcgatcctttaaataaaattaagtagactagtggttttacacctctcctcataaaaattagagatcccacatgcaaatttgaatcttcccaccccaataaatatttatatctataaagtcctcaatcaatttctcttttaatttggtccttaattaaattttttatttatttctttacaattttttattttttatttattcacagaaatataatatacaatttataattgaaaatggttgtttaagtaattttattaattttttagactattgagacgagaaggatattaaatatgaaaaattttatttatactctataaaattataagttcacccgaatcttagaaaaataattaagttaattctaataacccattcttaacaaaaattttattttgtgttaatttcaataattcttttaatatttgtatataatttttattttatttatatgtattttttcaaaaaacaattagtataaatttaatataaaaatgaattattaaaataaagtatctttataaaattttggtatgcaaataaaacttcccattaaatatttgcactctatttattaaaatttaattaagttatatttttt

SEQ ID NO: 206257 - DNA, 891 bp, Cannabis indica
aaaaaattatcgaaaattaaactaatcgataatttttataaaataggattgaatatttaatatatgtgattagattaaacataaaagaataaatatagtaaagtaaattatgagaatacaagttggatgtatacaaagttgtaatatatattatatatatatatatttatataacatatttctccaaattaattaataactttttaatgggagtaaattaattcatattaaggaaaaactatatatataaaaatatatattgttggccaattttgataacgaaattacataatcctacttttacctaattttacacaattaatatatttctttttcaaggctttcccatatccattcccatctaaatttatgctacaattattaaaaacttatatttgactgaataaagttaaattttgtcatgcactaataatatttatgtatatattttaattttaatatagaatttatatgtatcatctcacatgtgatgataatatatgtttcacaaatgtggaaaataatatcctaaccaatagagatggaatcaccaatattatcaatttgatcaaattatgacttttcttcatagtaatcacaaatgtcataaatatctcatcttattaattacatgagagcatttaataagttaatagtattttgttttctttttcattttaattatttaattaatatgttgttaagttaaatttttagctgtcgtattattattagtataattaagtattaaattttataagaaccaacatgagtgttaattataaaagatcgtataattattcaccaaatcacatctcataatgatattagacagtgacgaacctaatatatagatctagagtgatatatttcgtatatattttttatatt

SEQ ID NO: 206258 - DNA, 568 bp, Cannabis indica
gtatatatcaatatatagaggattttttttaggtgaaagcactctgggttacccataagactaatttcttttatttttgattggtttaataatgagtgtatattcttcaactgagttgttgaacatatacaattaattattttacattttttctaaataaaagttgattttataaaaagttgagacatgcaattttactatttaactatttttttaaaattcaatgtatcttttctcactattatttcgtaaaacgtacaatcattccaccgatacatgaaacactttatcgttatcggtgttcgctgttattctacaaccagtagttactcgttaattagttgaaaaaatattgaatttcatggcgcacatatttgactagaagtgaatacatatgttttaataattttgcttaaaaatatggtaccgatcagaagagtacagtaatttcttagtcgcttcagtatttataactatactgatctatatatttcattttacaaaaaatttattgatctatataacacatacaatttaaggtcatgttaattattaaattttttttttt

SEQ ID NO: 206259 - DNA, 1048 bp, Cannabis indica
ttatttttactgaagagtatttttgtaaataataaagttcaaaatgtaaaaatgatattttttttctatattaatgtattgtaatttttttcttcaatttttttttaataaattatttctatttaaaattttatggaacactcttatctatactttggcatttcagtgaattttttagtcatatacgttgtagttattaaagacattttgcaaaaattttaaaaaattcgaaaaattttaacacacaaaaaataaagttcaaacagtctgttgcacatgcgactctttaattttatacgtgtgtaaaataaactatttaaaaattattttctatattgtaaattatttcaaatttttcaaaattttacattatatattaaataactataaagtacacacaactatacaataaaaaattgcttaaaacgtttctcttaatgtcaaaatagtaaaatatatgtttttttttggaggtaatagtaaaatagtaaaatatatgttagtggacttttttagggtgcattgtagaagagcattgctataaactactgtctaacactatttataagtagcattttttgattggttaacactatttataagtagcattttttgattggttaacgatatttcatagaaattactttgttaaagtatatgaaacaagtgttttaggcattagtgtattataacatttttcattgcagaagcactttttattatttgtataaaaatattattattagacactatcagtagtacttaacactttttagaagtgatgtttaacgattagttagtgatattctaaaattattctattaaattatatgagatctgatacttaattgtaccaacactactagtcccctttaatatttcactttgtatattaaaaaatactattggtttaaataaaaatcagatctcgtattatttaatataataatatttagaaagtatccaatgacataaacacatttttagaagtgttaagcactaataatagccataacaatactcacgtatattttattacaatttaatc

SEQ ID NO: 206260 - DNA, 2351 bp, Cannabis indica
cttgctcaatcaataaagaaagtttcggtactgttccaaaattgtagtagagccctagatcacatcgatctagaggacttgaaccagtatattttttagtgttgattttattgttttattgcttgaatcgtttctagtttgattgtgttcatttatgctttatctttgattattttttgtgaattattaattttgttattgctaattatttgttgattaaatttaaattgatttgattttacccattaattgtaaatttcccaatgaaattagataacatgtccatttcaaacaaaaaaaaaataagatagatatattgtgataagtgcttttatattaaacaatattaaggtataatgtaaactttttttatttagtcaatacattgtagtatggaatcaagagaaaggttttcttggtataataaagtatattgcatttatagaatcaaccaaaaccataatattgctataaatatattatattattattagtgaattatgtgatgattcttctgttcttgttttaactcatgttaattaatctcgtgattatcagtgtctgaatcacgtgtgtgagaattttttttcggtctttaaaaaataaatatatttagtaatttaatggagtctattttacaattttattggatgaaactttcattttttttttttctttttgtaaaaatatataaataaaatagtgttgggcgtgacacttaaaaaatttaaaagttaaaaaagtattattggtacttattattattttcgctattatatatatattattattgttataattaaatatcatattttatataatttaagtaaataattttttaaaaaaatatcactaactaatcataaagtaccacttataaaaaatgttgaacaccactaatatcaaataataatactctttttaaaaagataaattaagtaaaatttcattaatattttgaactattcaacagatcaaatgatgattagatctataaaaaagctaagggtaatggtatataacttgcaatcggttgaaatttcttttttatttttttttaaatgttgaaatttctttcaattacactatatatatattattttttttttttgctaaattttattgtactatatttacattaaattgatcttgttttaagcaaagatatttctctttcctatatacctcatctttctttctttttttctccttttaactttcatttgccttggggaggaatttttttttggctaaatgtacttttgattctccactaatttaatttcaatttttttctttaagaaaattattttcttttttgttagaaccatcaatttccatcaaaagcaaggaaactatataaatactataattttctttttaatttctttttatttaactaaaccataaaaattaatcaaaattattaaataaaaaataacaatgttaatttagtacatattttattttttacagctaaaatattcaaacacatacttttgtttgtattaattagtattaggattaataagtgttgaaaaaaaaaatcacactaaaaatatctaatattaattttaagtttatgttgatatgtaaaaaaagtatttagtactatttttttcctaatttataacataattacaagtcacaatatcactatcttcctatgtattttaaaaataataaattatatttttaattttaatactattattttatttataatacacatattaaaatattatattttaaattatatcacttaatatatttttttgacgtagtgattagaatcattcatgaatttacgatgtaaacatccgtaaacagcacatgaactaccttgaacctggatagctcatcgtctaaccgaagggcatgctttattaaactataaactgctaaagtcaacaaacaacatgagacaaaactgctcccaaaaatttagacaataaagctataactgaaacaacccactcaaagagttagagctttagcttatatcacttcatactacacgccaacttattaacatatcaagaatgatcccaaaacatctacaaaacaaagtaagaaaaaaaatgaattagtcccctaacaataatattaaaaactaataaaagaaattctcaatagttaagaaaaaaaaaaaaaaacaaactactcaaacaaattgaatttaaaataaacttaatcggcaaaatctctgtagcagttggtcctccttaaaattgacctacagattaacaataaataaaactctattatcatacaatttaatgaaaaaaaaatataagttaatgagaatatggtaaaacaattcatattataatgtcaagatttaaaacact

SEQ ID NO: 206261 - DNA, 554 bp, Cannabis indica
taataaccaaagttatagccctagacagagtacataaacaaaaattaagtacccaaattaaaatatataacactattataaatttataatcttgatcaattaacaagttcaattaaatattgtccttttattcagttcccaacttaatagaaatggtataaattactactccatttaactataataataaccttaactaaattaaaattctgttccatacaaatattattaatttatattttcttttagtacttatatatatacatatattgcataaatataccctaataatttgtggccacatggtacgtatagctagctagctaggttgtccacactaatctatagaataaattttctaaaaagagacaaacagttaaattaaaacacataacatgatttgatatttttttttttgctgttgttgatgatgatgatatctacaaaaaacagaatagtagtcattataatttaagttagtcaatgataatttgataattggcaaagtcaaaaattgatgaaacaacaagttgtaatacacttctagaatttat

SEQ ID NO: 206262 - DNA, 1080 bp, Cannabis indica
aagtatcatccatggtccatacatcaaaccgtctattgaaatattagttatcatatacttggtcctcttatagacgttcctcctcatggggccatgagcccacacttataatacacgctatttttttatacttgaaataacaccatatatcgacaccttcctccattagaagaaataggccaactagtaatggtttcttcaattgaacttccacttgagaccaaatatattctctcctcgggaacccattcctctacattctattaatattgatgacattaccaattatcttgtcaaagtttgcaacatttttctaggtccagaatctttgaggtacatcatacacacgaacccacatcggagtagagttcaaatcaatcgccttccaaaggccattctctggcataggtttgaaaataagaaaaccatctcctatcctccaaggaccattttttacagcaaagtcagcttcgcatgcattttttaataaacatgagaacaaaggtattcttatgaacttcctcgagtttccatcctagtttcagcttccacttcttgtaaagaaccgattgcaggaaaccaagaaagaagactttctgagtgagcaaaaatccaaccaccaaatgatctatcgcctcatttcctagtagaatccaccaacacaatagaatagtcatatcttgcttttaactagtagcaaccatagagaaaaatcaacagcaccactaagagaaaaaagtaaaagcacaaggaaaacagataagaaacaaggggataaaaccctagatcactacaagaggatcaataatattggtaatttttcagcacgaaaactaggagtgttcgtagtgcgggttgtaacctttttttcaaaccaaacaacacatgcggttttttataatttctcaaactgctactgcatcgcgagatcttaaaactgcaaaaaccacaccgcaaaaatacagtgtggtgcgatgcgatttgtgtggtttacaccatcatcattatcgaacattatagtaaaaaaattaaaaatcaatctttaatgttttgacaattaaaaaaaaaattattaaagtt

SEQ ID NO: 206263 - DNA, 633 bp, Cannabis indica
aggacaaaaattgggataacactctgatagcaagaaagaacatgattacactactacaaaaaggtccttttgcttcagtttttaagtgacatataaagaattttcttcagttggtgtaactgatattatacttgtagatgcaaatagtgatactttttgcctcggttcataatcgaagtaaatagtactatactgacgctagttgttttctgctaatagtactgaaaaaaattaaaaaaatatgcaccaccgcaccatcactgccatcaccaccatatatatattagatatggattcctcagccaacataataccatcaatcacaaagaaaacaccaaatcaccacactcctttcctgaatcaccaccatagttccgtcgctgaaccattgcgcacattctttgcaataagaaaaaaagttagatctgaactatgtagagccgagaccactagagggaaagagaaagtgcgagagagagggagtgtatgagattaaaaaagagaaagatatgtgagtgacaaacgtacctgggcactgttgatcggggtgtggctgctgctaggctcggttcgccgtagttggggtgtggccggttgctgggcttggtcagagagagagagagagagagagag

SEQ ID NO: 206264 - DNA, 726 bp, Cannabis indica
tttttttttttctatatatgataaataaaatttaaaaatcactaacttaaaaaaaaatacttgtttttgagtaatgttttacttttaaaaaattataagggtagaaacttactataactatgtataatattttagtgcatataacttaaaaataataataactattttagtgatcatttactctatatatttatattaatggtttagtttcttcctttaacaatatcttagatataattaataaaaaaataataattactcactttttatgctataatttaattaatatgtagaagaaaaaaaaacaagatacaaattagttttggtatacaatacaaattgtaaccattaatattctatggctatattttccttataaaaaataaacattttttttaaataaattaattaaactttcaattgaatttaattgtcacatgctcttgcctaaattatgatctgaatttgtggtaatatcattgattgattagtatattttgctatcactttattgctccacaaaaaggcacccaaaaaatcactaaaaattaattattttgatatcttttagtaaatgttggttagtgatgttaaaaaaaaatattgaatcaaaataaagtagataaatacaatattaataatgggtaatataagaaagactagagtgatccactttttaatggttggaagttgaaagaggagagagcttaaacaccccataaggat

SEQ ID NO: 206265 - DNA, 926 bp, Cannabis indica
acaatagacaatttcgaacctttattttctgcgttaattaatttttttttttgaaattttttcaaaatttttatagaatgtcttaaaataattaaaataatgaacacaaccataaaaaattggaaccaaaaaaaatctctcagatgccaaaataaataagaatgtatcgatatatatatatcaattttaagagttgtattgtagaattttccgtcagattaattattatgctaaaatgaaaaaaagaaatggataatgtcaatttataaaatacgtttcttttgtggatgtattttatacgtgggttcattgatcacaatatatcactattcctattcacctcctacgtatatgaaaaaccttccttatcatataactaataattaatccatattatatatatatatatatatattcatacgtataaataatctacaacacttctcatttctcctctctcgatctctatattatataataatgaaaggtttcactctctctaattgtactgctacctataatactttcgttattgtcatgcttatcacaatgttattcttgttactactcaaatatttgtttactatcaagaacaagttaactactactactaatcttcctcctggccctactccatggccagtacttggaagctttgttagcatgatgttaaacaaaccagcatttaagtggctccaccgtgttatggaggagttgaacacagacattgcatgtatccgtctaggagcaaacactcatctgatcactgttacctctccggagatagctagagagttcttgaagaaacatgacgcggtgtttgcttcaagacctgatactgtggtgacttgtatgatttctcgtggttacaaaaccactgtaatgtctccctccaacgaccattggaagaagatgaagagagttct

SEQ ID NO: 206266 - DNA, 576 bp, Cannabis indica
tttatgtaactcagtttcgaataagatctatcaaagtatatatgcaaatttatactagtgtagagttagtaaagggcagcttttattgtttagatttaatattgtgacatagttaaaatattaactaatgagttaatgtacccgactgaagaagaaaaggaagaggagtaggggtgcacaacatggaccaaacaattcaacacagccaacccaacctatactacaaggttatgttaagagtaggtcatgaggtcatggttcattaggttgaaaagtaataggtgggttggatatattttaactttatataataactcaaactgacctatttcttgacagatgttctaaattggagacaattacacataaaaatatataactcaaactaacttattttatatttttatacataagtaaattatagtgtgataattttagaatgtgaattaattaaaatacatcattaacatatagtctataattactctactatctctaccgataagtttaataggagaatcaattattattattaactttactatctaatatcactattattttagttttttttta

SEQ ID NO: 206267 - DNA, 543 bp, Cannabis indica
gtacctatttcttgacagatgttactaaattggagacaattacacaataaaatatataactacaaactaacttatttatattttatacataagtaaattatagtgtgattaagtttagaatgtgaattaattaaaatacatcattaacatatagtctataattactctactatctctaccgataagtttaataggagaatcaattattattattaactttactatctaatatcactattattttagttttttttaagcactatattatacatgtatcggtttttttttttgtatgtactagctaagttgaataattttatcctattgttaaagtttaaaatgtctcaatccaataaactcaatcaaaaccaccctctatattatcctactaagtaggattgggttgtacaataaaaaaaattgaataatcattgagttgacttattaaaatacttctaatccagcccccacgcactctaaagaggggataatacattcttaattatagtacaccattttttataaatgacttactaaaaattt

SEQ ID NO: 206268 - DNA, 847 bp, Cannabis indica
tatagctcactctctaagtgtattcaacatattcatggtaaatctagggttagaacattagaatgcattgaagtggttaatgagatacttgaaaggaccaataaagtatgacctaatcaacaaaagagactcatcaaatttgagattagatggctatgttgatgtagattatgcatcaaatagggacaatatatgatctactatagcttatgagttcattgttaacaagagttgcatctgctgaaaatctcaacagcaataagtagtgacacttttaacaagagaatcagagttcatggccatcactgaagcttttaaagaaggaatttcgctgcagggaattctacaagaactacaactacttaagaataaaagaactgtatattcagatagtctttcatcaattcacttgtgtaagtatcctgtttaccgtgagaagagtaaacatattgacattaaattatattggattcgagaaaagatagagaacaaagttttagatccggaaaaggtacatacaagcaataatcttgcaaacatgggaacaaaggttctcactttcaataagctgatgcattgtctcagcttgctgaacattggtacttgttaaaacttttgagagtataacatcatcaagacttgagtgaaatggggttgataatctacttttgaggatcaaggtggtatatgtagaagttaatcctctaaaactagcttacaactaacttaacctatttaactaactataacagttagttaagagtgttacagtcgtaattgattgcactatgtttagttgtaaagctatgatattaaatagctcctttttcagagagagagagagaga

SEQ ID NO: 206269 - DNA, 1062 bp, Cannabis indica
gaggatttattgttgagcaggctattacttaaaaataaaagagtaacgatattaccgaatgaaatttttggattaagtcgtggattaggttgttcattttaagacatatacgacactgccaaggaatgtgcaagcagttcgaaattgtcagtggtccttaagataaaatagtctagtcgaaataccactgtatcagagctttactgtatgatagagaactgtcaaaaaatcataccaaaaaactactattcgaaatacttatataatataatcttaaatataaattctaaaggttttttttgtgtgtgtgagaaaagataatttttttttcctgttggttctgatggcattatataaggaatgcactgaaggtagtaatgggaagaaagatgttgattatgggaacgttaagtgagattgtgggaacgatattgaaaataaagagaacatgtctctttttaccaattaatttcaacacgtttaaacattattttaattaattgaataaaaataataatttaataaataaattttttataaaaaataaagtaacacctcattgccggttggcacggtcggacggcggcgtgcacatgtgtggtggttcgatgtgtgagtccttacccatgtgcacaaaactcggtaccccttggggccgcaacccatgtgccaaagttgcacattatatacacttctaatgaagtgttcctatcccatgttggactcaatgcacttacatacttcacttctcatacgataattttggaaaatttcaactatagtcccaacaattcttcacttgaaatgttttaaaaatattttctcgagcagtaatctaaacaataagattgagcatagacaaatttatctttcgatttgaacatttgccttgtgaatacaacttagaatatactagagtgactcatagtcttgaaccttatctctaatgatgtaccatgcacaacctttcttggatgtagtccaaaagcctgtgttttaaatgtcatgcacgtctatcccagtataatgaatgttctagaaatttacccaaaattttatagg

SEQ ID NO: 206270 - DNA, 985 bp, Cannabis indica
tttgttagtagattttgattgagatttaagttgttctgttggttgctatgaaagtttctatgtgaatttctgtaaaaatgacataaagaaaaaaaaaactgttttaaaatataaaaataaaaaaatctttaataatcaagtatctaatgacactaatctacaagtgatcccctttggttagaaaatgtcaagaaagagaagtaatcacttaaaataaaatattttgatatctaatctaaaactatacctagatataccaaaaattatattttacaccacattgttctatttcttttttggttactcaaacgcatacattttgtccacttaatcataactcgttccctatatttgggcctcatcaatatttttcaaagcccatccttttctagttaagtttggataaagaacccaatggttccataaatgctaccaagtaagtccactccatgaaagagagaaaacttacaaaaatactagaatttcgattagtttttataaaaatactgccacacgattttttttctttcaaaaatattgtatttttataaaataacagtggaattcaaaacagaacaactaaaaaaattagtcgaacaactaaaaaataaccgtagaacaacagtgaaaacttaatattgtacacaatataaaacttaaacagtatttttaaaaaaaaaattctaccccacaattaaaaaaaattaaaaactttatgtggtgtaaataatccatgaaagaaagaaaattatacaaagcccacaatcattttcgactaaaggggcttacttcacaaaatatcatttagaattaaagatttataccacatatatgaagtgattaattggtaaacccacaaaccatttactagtaaatcatataaaactgatataaatcaattacaaaaatacatagccaatattaaaaggctacatctaatcaactccaagtaaactacctttttcaatttattttttttaagcct

SEQ ID NO: 206271 - DNA, 596 bp, Cannabis indica
aaatatcattttctattaaattaaacaactagttatcaactagtgcaatttgattaaagaataagattaaacaatagcattttgcaaccttgtattaatatatcaaatatgatattttaatcgcattaaacaatattacatttaaaaactgttattgtaattttgtatcttgagatttttattgctttgctttggaatattattgtattgttcaccaaaatgtccattgaccaaattgtcttcattatttgatcaaattgttcgttgaactttattagaaatggaattggttccgtttcttgaaattttgaaattttgattatagacagtctattattagaaatttataaagaaattgaaatgcaataggagataataaccaatattttatataatacacttattgtaaggcaactattatacaactaaaaaaaagaatgtccttgttattataaacgaacttaccacaatatagtttcttgtatatgactcttgcattgccaattataattcctgatttttttattataagatattagtaagacaactatttgacaaccctaaacaacatagtggcaattatgtatgaaatatgt

SEQ ID NO: 206272 - DNA, 935 bp, Cannabis indica
cataattaaaccctaaatatctgctaatttttaattaaagttaagcggtctttacacattaggcgcttattatcagccatccgaaatacacaaagtaataacatctataccaggctggatttgctcatttgtcggattggctgtttgaaaatatctgtaaaataccacgccacttcaccaataatcttctcctaaacacataattacgtttggccagtttccatcataatctccgtaataatattttcttctttctcaccgatgctttgttatgaaatattttgtgtttctatcacctaccatcatccattctgatcttgatctctgcttccataaagttcatctttattaattaggtcatccaattcaagttctatagcttttcacctcatccactcgtaacatctcgcgcattagcacttcaagaatttatcttatctccttttgagtttccacaatttttttagatagcgtacccaaacctttgcttattccaagataaaaggcgatttccacagtgatcaagcgaatcccgaattgatcgacaattttgattttgtcatattaaaaaattaattcactaaaattaaaacgcatagtataaattcaaaattcgcgacggtcccaaaaataatttttttcggggaccgttgctaacaatattaagtgactatttataaccgtcagaaaaaatagggtattcccgatggtttagaacactcaaaagggaaaattcgcgatggttttatgggttttgtcgtgattttaaatagtcgattatacctgacgattttaaaccatggggtagtaactgacaattaataaaagtaaaaccctaagctacatctctctcattcagcgttcttcctctcattaagtctcttctctctctctctctctctcacacactagcagcgtcaataccccacaaaacc

SEQ ID NO: 206273 - DNA, 1125 bp, Cannabis indica
tcaaattaacaaaactagcacaatccaaaactgtaattataaaaagaaaaaaagggtattaaattatgaggagttttaagagcatctccaatgaaaaaatataaatatatttttaacatctattaaattggagtgacaaagaactccaagagaaaacgcctaacaataacatcttttatatcttctttgtttttatgttctttattattattttattataatataagaaaatttaattatttaatatatataattaataaaaataatgtaatattattttaataatttttaaaagtgcttacttttagaacattttaaaataaaaagtgctaaaaataatgtgaaaaagagaaaataaaatataatatttttaagggatttggaggtttttgatacttttcaaatgctaaaaggcactagtggtattttacaccctccccgctattaagccaattaagtatcgttaaccaatcgcaaaacgacatatctaaatgtgctaggcactgttggtacccaataagaatgttttttcaaaaatatcattttttttctctataatagtatattatctttatattttactacttaagctatccacatcatcaaacattctccaaaatgttagatgctcttttttacactctctctaatttgataacaagtgttatttttgagtaagatttattttaacttaataattagatatgtatgatattaatattttattacaattatgccattcatatgtattgtgctttttttttcttctctaatatatatttagcatagtaaatttttaagctaatttattttgtttattgctttaggtagtgggacaaaaacaatatcacacatttttcacaataaatagttaacgttatttattttctttcaaattcatttattattttattaggaatttttttattttttgtattaattttatttaatatatactcatcaaataatttatatatgcaatactaattttattaggtaagataccattttataaatagttggttaacagaaataaaatattttttaaagaaaaaatgtaatggaacgttaatgaagaagaaataaagagtaattaatattaatcataataataaaaaaaaaaaa

SEQ ID NO: 206274 - DNA, 552 bp, Cannabis indica
tggcggcatatcgggcatttattcgtctgaagtcttaactctttggcacagtcactgcacatgcactgcaaaaatagagaacatgttttacttgataaataaatgcataaatgttcttaaagcaagaggcaacatacaaattaaataggcggaactcatctactctttgcatctttgtacttaagacacaagcaaaaagtattgtatacctaccaaaaaaatgttaagtgattgttgtgttgacaaaagtctctgtgctatagagaaggcaacactcaaatgataatcccaaggagccaatataaaacttacgaaacaatagaagcataaagagatgaagtcatatggtataattgattcaaccatttactcttatttttttcttcatagcagtcgaagcaaaaaaacatgatcagatgactcaagctcaagcacaggattcaaatttaaaacagtccagtattaaaaaattgattgagcataaagagcttgagactttctgatctctagctgctacaattgcaaaactactaatttgtagtaactcttttc

SEQ ID NO: 206275 - DNA, 1984 bp, Cannabis indica
tttcatacaaccgtatttttataattttattatttttgtattttttaaataattccaaaaaaaaaaaagagtgctacaagcactcctattctatcttttaaaacacctcaccaaaatttcattttttctattttatctcacatatttacatatatattatatcatataggttttttatattttttccattatttaaaattattttttgtacatatattttattaatttaattaaaaaaaaaacaaaaagagtaatgaagtaataaaaaataattaaaagaattagagtgaaagagaaaataatatataatattcttagtccactactatttattaagctacatgtagctaaagtaataattatgatctattttagcttactatttacctcacttgttggattggagatgtaattgttatatctaaaattcggctatactccaacaattgacacgtgtctaacagagagaatatgaattactctaatgatataataatgttatatcattaaatgcagattgaacaactcgttatcattaaataaatgtttgatatataatatttgttatagtgtaaaattttcacctagaaactcgagaccaggctcctataaagatgatacgtggacttattctcctcaagaattgttaaactgtcaaaaggagaccactcgaggataaacctcgcctgaaccaaagtcagcgaaatgatgtgatcttgacagagtcaaggtcattattacgcctcacatgacgttggactaagaaggaattgttcaagtctcgcatatgtcaagatatacgcgatgattatgaagacttctcctgggagttagtaaagatcgtttgtttacatagcgagttagtccaaaatacttaatatgcttgatgattcgataagggactcgcacgtcccaaatcctcaacactggcaaggtatccgcacgcatgactcgggtaggatacagatacctaactacgaaacttgttagtctcgccttaacaagaatgcaccctaagcctgcgagcttgtgcgagcagatgaacagagaacttgcagtatgaaagtcgcatacgttgttgtatttagtaaaacagatttaaattgttcttcatttattcgatttacgtttttgttaacttgatgctaatattcaatgtaaaacgattttataatcaattaagttctatgtaatccaaaggacacttgctttgtatataaaggagtgatccaacatgtataagacaagacagaaaatccttgcaacagtggattaagcagaccgtgatctgactgaaccactatacttctcttgtgttcattgtgtttatgagttttcaagtttgtctatgtggccccctttgaatacttgtcgttctaggttgagtactcgcgctttttattgaataaatatatttttattgtttatttggtgttgtcaaaatgcctccaacaacatttggtgccatctgtggtaataattattattgttgatttcagagaaaaatcaaaatggctgaaaattagatgaatggaaacaacaacacaagttctttcaacgttggaacaatgaatatttcactcccaaacaatagagcgaatccagtggacacaatcaatgggggttcagtttgaggttttgaattgttaatatgcggttcaaaccgcaccgcaaattataaaaaatattaatttttatatttatttaggtcccatatatgtgaatgtccaacccaaaccccactaattattatatcgttgaaacttatctttatcatatttattttcaagtcgtatggtatttttgacaagtgttagctcaagctttgtcgcatttgtaatagtttaattatttagtgatagtccaaaccgtagaaactagcaaaaactgcacggcaccgcactaatttttgtcagtgcagtttttacagttttttagttttcgtcggtgcgggtgttggtttggtaaattaaaaaaactagtc

SEQ ID NO: 206276 - DNA, 1294 bp, Cannabis indica
tacgatttaaagttactcaatttaattaaggaaatggggtcttattcaaaaagaaaaaaaataatgtaaatggggtatatttattaaaaataattgatttaatttatatattccttaaaaaataatttaatttaatttaaagtatttatttttgtcattttacacaaggttaaaaatgtatataaaatgtaggaataaagataaaataaaaaaacctctagttttctctctctctctggagttttctagtaggcatgcgaagccgtttctcttctgcaatcttggtcctgagtatggtggttctcgtccaccctaatcagttaagtggtggtttatcctcattttcttactgcttttgtcgttttagttcttctttcctcattattaagggcattaattgctctgagctctattctcttttcaaacaatcccatctcatttattgcaaacccactatctctttctattctctttctttttctttgcatttgttctctcctgaggttttattttgggatcttttgcatttaactccgtctgtacatatctccaaccatcatttctctcttggagattggaaaatggggggcggaggcctggttctatgaagatattaactcctttaccatcattgtgcctcttcctgtggaggctagggatgtcactagggactcttcgagaaagcatctacgagggttctggttttttctttatatagtgaaattgaggtatgattcctgtcacctttctttttgctttgtttgttttctggttcaagtgttctttctcagtgtgtctccgtgctttccttttcttgatcatggatcagtttattaataatgtttccactgcgttagtttttccctctgatgaaaataccattttcacttatgatgctagctcttcctcttccactcctgctaccattagccttcttcttaaacttcataccattagaccatataataggtcatccttgatgaaaaccctctctggtatttggtcatcatagtgcagatttcttgtttccgttactgagcatgccgatggcttatttcttgtttcatttggttgtgagggtgataaggggagaattttagagggacaaccgtgtcattttgctcaaagtatcaccatctttgctgcccctgaaagttcttttcctattacccttgataatctctattatgttccattctggattcaagtctatggtataccctttatgtgtaaatcttatgatttagctcgtttcattgctgctgaaatttgtgatcttattgaggtggataag

SEQ ID NO: 206277 - DNA, 384 bp, Cannabis indica
ttttccaataaggttcgtgtgtggatgtttgtatttcactattcggtggtgtttcatcatttttatatgatatggcggaagttctataattttgtcctcatatatataataatttgttttacagtaactcattgttatcacttctggtgtaatgtgtgtgggaggtggtgtcacttgtcagactactttgtttgaagacatttttcatcttgttacatgggacactaacgtgtcaatgatgtcttataattagttaacagttctttgtaatctttcttaaattaatatcactgagattcgatattaaattacattatacttcaaaaaagtactaaacactattaatacattttagcatttctcttttccgtcatttccattagt

SEQ ID NO: 206278 - DNA, 873 bp, Cannabis indica
ataataatactactgatcagtttggtgtgtatatttatatacagagggagagagagaaagagtggattatgatcattttccatatatgttatagttaccaaaatagctttcatacattgtgggatatagaatatgttttatcttaattaattggattaattctttgatggtttggcatgctggattgaattatggtgaatataattatgtatttaattttagaatgggtatacagaaataaattaacaccaattaaatttgaaatttagtttaataataaacaattaataaagaaaaaaaatttaaatctaaatattaaaataatattattttttttttagtaaaaaaatatatattaatacatcatatatgaatatatatcataattgaattaaataatgtatatggtatagttcttccaaaaaaaaaaatcttcaatagttgttcttgttatggaaagttagatgtcatccggaagagtgttcttggaagtctatcttgttcacttgagaaggagtcttaaggaaaactagtatttaggaaagctagtcttattcggaaaggaattctggatggctagttgttccctcctagaagggaactcctgattgttgacttcagttgtttctattcctatccagaaagtagtcctttcagcgtacgtctcatctagaaatactttcacttaagctaacatagagatattgttacgatgagttatttgttaattcattgaggcgtaactaacttaatatcttggcatttgcaaccaccaactttggggatctataaataccaccactcttatcatttgaaaaggagggaatagacgagttttgagaggtgtcttcgtggttgaaggttgagatcaaa

SEQ ID NO: 206279 - DNA, 993 bp, Cannabis indica
gattggtttgttgtagtctttgtttgtattgtaggcccttaagtttattatgtgcgaacaaatgttttatgatgtaggattgcaacgtgagaggttgggagtagaattcaaactgtataaatattgtgatattggtttatacaatttctaataaaaaaaaacgaagatcatcctatttgtagttatctgatcatttattcttttttgtgtttgataaatggtatatgactgctctttcttcttggtcttgtatttacgcatttgcagtctttgcaataccaatgcaactagtaagcagacgttgcttctccatgcagaaggaaagaagcacaaagcaagagcccgggctttccatgctgcacagcagaaactgaacaagacagaagaatctgctccagaaacaaagccaccgttggaaaaccctcaaaacggtgagttgcttgacaagaaagatgtggaagagccccaagtgcaggatatcaatgttgaagcaactaatggaagtttaccatcaaataagaagagaaaatctaataaaactgatgatgataatttgaagaaaaaaaccaaggacgatgtggttgctctaggcaatggagaagtgattcaatgtggaaatacagaagcagggaaaacagggagtgatgttaagcaaaaatctttccctgctagtgaagaaaccttgaacaagatcaagtggaagaaaataatatcatcagctttaaaatctgtatgtactctaattcctgcatctcttctctgtttcactttatttttatttggagtatgatcttttttccaatgcatatatttgaaaacaatgacaaataactatgaaagaaaaatgaaaggggaataaaagaagaaaggaaaagaagcgcaaattcacacataattatataatataaatatatcaaggcttatgaagaagactttcactttgcatactagtcttagactgagtcactgagcaaagtataatttttcatattt

SEQ ID NO: 206280 - DNA, 1364 bp, Cannabis indica
cgtgaaaccgaaaattcggttacagtgtggtcggtttcgatttttcgatttttatgaacacccctagtatttttataggtatttactgagatttttgaaaaataaatttttgaaaacttaagaaattaaataatgatttaaggaaatgagatggaaaattcttacgtggttcaggctttaattatcccttgtccacagtcagtatattggcttttttagctttagaaagtatattagccttttcgactttagaaagtatattggtctttttggctttagaaatgcgttacaagatcagttttatagtgagaactctaactctggctttaaactctctaggtttctcctgagtaagaaggaagcttagaaagtatattatgcccaactttttctacatttttttgtctcccttataggagggggtaaagagatttatacaggctagagtttgggtccgggcttacccgtgacccgttcaggctttatataaaagtaggcccactatcgtgacaaaatacacaatatacttgaccatatggcccattaaaaggtttttcctcgtgggatgacggtttcataagactaggaccacttttggcgtagggcatgtgttgggcaaaaatcacgcttggcaaacaaggtcgttaaaggagtcgttaaacaaaataggtgtatgtagaggatgtgcgcgaactacaatgtcctgacataaggaacaagatctaatcctttgtgaaaggagcagaaatatctgggatgatatctgactcctattcttcagtaggtttccgcgtaccctctggtatgtctggagggcttcatcccttactcatttcaggaggctgggcagacttccggatcttaggagaccattgcaaatcaaagtaaagtctcaattctccattgggcctgagcccatttcgaatctagcttagccttctatgaataggaaagcttgagccaacattaatacaatgattgccttcagttttgtgccacgtgtcttccttttagaaacgtagataacaataggtattctatttggtgttatggactagattttgttttttttaagagttaaattctttgttgttaggttagggtttattttatgtcattttgttagattatgaatatatagtttattttggtagtaatgtattaatttatgaatgtatctttaattttggtagtttttttgttagtctatcaaggtagtttgtttgttagtttgtttgtgataatgatgtcagtagtttatttgtgataatgagttgtttacatcattaagctcatgtttactatgagttgttttttgttttcttaattctatgtttttttagtttcttgcatacgatgtgtag

SEQ ID NO: 206281 - DNA, 792 bp, Cannabis indica
aaaaatgattaaataccaatttgataaaagattaaaaaatcttatgaactgatacgggtggaaaatatgaatatacacttcaaaatttatttaattgaatttgaaattgcatacactataccccaagtaaacgtcaatatattgcatacttatgtaaggttaataattaaaatcaggtcatttcaagataaataccattaacacctaaataaatccatttttattgtagcaaaataataataataataataataataataataatgaacatgcatcaacttatcgtgaatggaaagttggggaaatatataaataattattacaaatcctatgtgtgtcttatatattgtttttcatgacttgtttattaaatatatatcttgtcatgaagtaaaccatcatgatctcttatataattttaaagactatatactaggcataactaatttacagtacttttcctttcctatttataggtgccatttgttgcatgttataagataaatcaaacaaaactatatataacaattataagtattaattaatttccagaatgggtatccatagtagtcatagagttagaataataagtgtggtttcatttcttttattgggtttggtaattggtacatgcgcctctagagcattctttgatagtactataagtactagtggtgcaagaaaagatggaagcagtgctggtgatcatggcacacgccaaactgaagtcggtgaaggaggtagtactggaggacaagctgatggtggtactggaggaggatatggtggtga

SEQ ID NO: 206282 - DNA, 535 bp, Cannabis indica
aataaaaaaaatagttattcatattattaaacaatatttaaaaaaaataaaatttaatatctcactaaacaaaatataaccgtacgcgaaacgcgatttgtttcttagttatatatttttaaaaatagagtaaaaaacgaataaagtaaaaaactgataagagaactagctaaaacatattagtggagtgtcattatttactttcaaaaaataaacaaatttcgaacattataatttgaaaaaattaataaatgggatggagatgtacgttgaaataatttatttttgagaaatgctaaagcatccgtggtggtgcctagcaccttcctatgtgttaatatcgttattggtccaactaactatcgagtctcatataatagtttttaaggagtattgctagtcaatcgcaacgcgacatgttgagaaagtgctaggcaccactaatgcttaaaagtaatgttctttattcttgcaccaatgaagagattattgtgtagtgtgtactttttattacacaatttagcaaagaaagaaa

SEQ ID NO: 206283 - DNA, 1038 bp, Cannabis indica
taatatgacttatcattgatatggatgtgtttgcgtataactttataatatttgtagtagtgactttacagcattcgaagtctttgaccgttatgcaatgccaaattcatagtgctatatatatgtggttgtttgataacttgatatggtattagtgtttgtttttttctaatctaaaaagaaagggtaatcccagaacaatctctaaacttttaaatcttgtcgactaaatgtctatcctaagttcacacctaatattcttacaaaaaaaaatacctaataataatatatactagcaaaattgtatagccgctctagtttagtttaaaatataaatatttgtttggtctaaaggaaagatatcttttcaaaagcaaataattagtggagacatagggctccacctcccctcgctagaaccaaactagttaatttagtaattttcgatgctcaagtttatgtttgataaattttttttttttaaaaaaataaaaacactaatcagagatcaaagatggtgtcctgtgcaaatcgaaaccaaaaccccaattgttagcaaaaaaaaaaaatgtgaaacccttatctcaaggtgaaagaacgatttgtggacagatagaatcaaagatggaatcaaataacaaaagacagtttgtcaaaacccaaatcaaagaaaaagaacttgcacaagcaaatgtaactcgaacagggttagaaagaaagaattgatactgcaaatcaaaagcgatgaaactggaacctccggtctccatcgtcccctccttcctctcagtcatcatcggatgtccctctaattccctccatcattctatctgtgtgaattttttagctcacatttacttgcttagctgtattcgtgtgtttgttcacaatattatctggataaatatttaagtcttatgttttagggtaaaaataccttctgttattagtgtggaacttcagtagacatttgttcgttaagtgtcgtcagaatccacgtgtcactcattaatttgtccatgtcattatttttttatt

SEQ ID NO: 206284 - DNA, 1049 bp, Cannabis indica
tataaatttaattatgaaaaatatatcggttgttcagaaaatatttaattacgaattatttattttatttatggctaattaagaactataaactgtttgaaaatatttagatttagtttttggtcactcttgtatttttcatgaatttatttagttaatatttaaattaattataaaaaatacttaggtgatgctaaaattgtaaaccatacttttgtaatatcattttattgtttatgctatgatatggaataagctttataatttattaatcactgtagatatttattgtgtttatttgtaattaattaactaattaattaagttttaattagaataaatagtaaaaatagtgttcactgtgtttatgaactgttaatatgatgctagaatataattatattatttgaaattaattagagactatgctaatatgttttgctatttttggttaattattttatattttatataatttaacgtataaattaatagataattatgggtaatattttgtacatatctttaagcatattgagtgtattttatggtctgtataaatagttaagaaacatgttagcttctcattttggtaaataattacataattgtatattttgttaataaatagtattttagtaaagtttcacgtaaaaagtatttgtatgagttcatattttatgttaaaaatattcatttgagtacatcatatgtattggtgtgaatcaaagtgatacatgattatattttgtatttcatgcaagcaaaattggcttatgcattgcatattttatgtaagtttctgtatgagtctacaaattcatattttgagtgtattgttgtatcattggattcctaggatcttgttctcaataaggaaattaattgaggtacttgaagtagcaagaatgtgttcttaacaactgcagtaagaagagtggacatctatgcacagggtgtatgttgaagcatataactttattgtggatttgatgttcatgttcttatgagattttgtattatgagttgttgtttatgttagtatgtga

SEQ ID NO: 206285 - DNA, 638 bp, Cannabis indica
  modified_base (592)..(593): a, c, t, g, unknown or other
  modified_base (595)..(595): a, c, t, g, unknown or other
  modified_base (597)..(597): a, c, t, g, unknown or other
  modified_base (601)..(601): a, c, t, g, unknown or other
  modified_base (603)..(603): a, c, t, g, unknown or other
aagcctccatcactcaccgcacgtcttccctttctccgttacgaaactccgcttcaaacccttccttctatttataagctttaaaggtgtcgtcttcacaaattttacactcttcttcaaccatcttcagcagttttgtttacttattttctttaaaattgataatttttaatgtattaggagcttctgataatacccattttatttaattggttttgttgctttatgatttttaatttcttatactgtgaatgaattcgttgatgtaaaaatttcaactttctgtgaaaaaaacgaactttatatatgttaaggaattgggtgatatgagatttgtaaagaaaaacaaaaattaattatcaatgttatgtttagttttatgttcaaaagagtacagttgaatgcatttgtgtattctatctatttatatttgtgtaatgctaggtactcagcctacgatttctcgccggagttggtcgacgtcacacaagggggtcgggggtggtcgccggggttggtcgacgtcgcacaagggggtcggagagggcttggagttcggctggaagttctgtaaaaaaaagagaagaaagannananagananagatatatatatatatatatatatatatatatata

SEQ ID NO: 206286 - DNA, 1374 bp, Cannabis indica
atgatgccatatttgagcttcagtgaagggtccagtaggtgtgttcttgacacaattgaatgcagcaaagggaagagagagtcctctagtggactgtgttgagttgaggctggctttggacaaatcaagatgatacaagccgtgcttaagatggccccgaagaagaacttggcccgtaatcttgtccttgacaacacatgtatcagaatcaaacaataagatgatattattatcggtagtgattttagaaaggctcaataaattcttggttatttttggagcatataagacatcatttagtaaaaatttcttgctggaattacttgttgcaaaggtagaatgacctattttagaaattgagatttgagagtcattacctacggtgattttggctttgcctttgtaatcatttattgtggtgagggtttgagcatcattgctcatgtggtgtgtggccccactgtccatataccaaccattgtcctctgcaggtgtgtttgaatcagatagaagagcctgtgagttgtggcctgtgtgctgagagtttgaggatgatggctgattgtctgtatcgtatctgtggtagcatttgtaggcaagatgaccaatcttgccacagatttgacagcctggacgagaaccacgtccacggccactggagggacctcgtcctcctgtttaagacccacgaccttgagtattgccacgaccattagatgaacctctgccagtgttggtgcgattagatccagtgggatttttattgaactgagcgtagttggcttgagcagagtccaagagttggggagtggtttgttcaattcgcatctcttgattttgaagcatatactgcacttcttgaagggttagagcatcagctcgtgcagtgaggagaacaacgactgtctcgtattcatggccgacacctccaaggatgtacatggcgatttcttgatcagataatttgtgacctgcagcggcaagagaatcagcaagattcttcatcttcaagatgtattcatcgatgctcatggaacctttcttggtattttgaatggcaagacgaagttgaagttggcgagccttggattgagtggcaaagagactagcaaagactgtccaaacttcagcagccgactcacagtgaagaacatgtccaagcatagcctcggaaagagaattcatgagccaactcattaacagggcatcacatcgaatccaatggtcaaaggcagggtttatcgaatttgtacctgtaagaagcggttcaggccgtggagtgtgccaagaaggatgccatcgagtccctgacgcacgaacaaaaggaagaattagagaatcgccaataggagtaatgtgtcgatcgaggcaata

SEQ ID NO: 206287 - DNA, 1020 bp, Cannabis indica
attcttacaagtggttacatattgtgatgttaaatatcttttatttataaaatgaaaatttaaggagtcttaatattagaaagttaataagacaagctttagaaagaaaacgatatacaggtttctaattataaatctcagctcaaagaagagtgcgatgatgcatttcattatacatagaggttagatacaagagattgccactaggcataatcattggcaaaaaatattatgaaactgttaggaatattctagatacgaattagataagctaattaagctggagattgattaattctagttttacactctaatgttgccgcatataattactactaacaccctctcaaacacaggggtgatgatgttacaccacgtttggataggagcagctggaacccagagggtggtaaggcccttgtaagacaatcccctatttgatttgaggaaggaatattatcgcccttgaagttctttcttcaatgttttaccatgaacaaaatatttgtctatctcaatgcgttttgtgcgtgcataatacattagattggatgctaaagtactaccactcacattattacaccaagtaatggaggtagttggtaaaggaaagtttagctctttaagtagagattcaattcaactcaggtcatttttgcagcaacatgggcaagagtcctgtatttctgtgttgatctcgataggatctcgatacaactgcttgtttcttcaagactaggatatcaccaaggtaaacatagcctccaacagaccttctgtcatctatgcttataccacaatcttcatcatagtaccttgtaatggcaagcttgtcactatagcaggtatgaagaccgttactcattgttcctttaaggtatcaagattcgttaagctgctctccaaagaactggtgtaggagctttgaggaattgacttaacttgttaactacaaagctaatatctgatcatgtgtgagttacaaggttcgaacacaagctgtaacacttggatttactc

SEQ ID NO: 206288 - DNA, 987 bp, Cannabis indica
aaaatattaactcttgagcttgtatttttactatgattttttactaagtgtttacaatataattctctttttgtattattatattatgtttgttataattttatacttttcaacttttttttttcttcttatagggttaatatggctggaataataatatatttttttataaataaaataaattgctacattaatgattgaaatgataatatcttgtaatttcaaagtgagatactataatatcatgagttatagataattaacacagcgaaaaaatcaactagattacaatataatttaatgtatcaatatgtactagtgcacattatgttaattaaaaaaaacgaaaaaacttatcattgcatttaaaaaatgtggcaaaaattttattaaatatatttatctacgtctagaaagcaacaaacatacaacaacaaaaaattgtcaataataatctaaacattcatcataaaaaatgcgcataaataaaaaaaaatacatgtagaggagatagaaaattagggtcatagaaatttgtttctttttatcttgtttagaaggagaaaataaaataaaaaataaaaatgcacaattataatttaatgattttatataaattatttttaatagaaagaattttaattaatttgtaagggttagaataaaattaattaagattattttttaaaaaaaatgtaattaattaaagaaaaatagtatggaatagtttgagtgcaattagtaagaaaacataagtaagagaaaaagaggggaaaaagtgcttctaattttttttttttttcaaaaaataaaaaataaaacaaaatcttgtaagagtaagaaagatagataaaaatgtttttctaaaaaaaatgtgagagatacagtgtatgagagacttatcgaaaaaaaataaaaaaaaatacaatgtatgagagagagagagagagagagagagagagagagagagagagagagagagagtag

SEQ ID NO: 206289 - DNA, 865 bp, Cannabis indica
tatatttttttaatattcgggaaaaaatcctaatagtcctaattagatcaatgggtatgggtacgctttattgaaaatgatttagtcatcaaatgaatttcaagactatataataataatagaaaactatagagaggttttaaccatgaattataataggattacagattctcagtaatattaaactagaaaataaaagttcaggtttgaaaaaagagaaaagtaaattccctgcataaatcttgcctctctaatcataatttatagatttatagctgttttgaaattttttttctttccaaaagaggttggccccatcttatcttatttgagtaatgttcttgtccaggtaatgaccttttgattagttaattttatcaaaaatacccaaaaatgaagaaacataatacagttataaaatgttgaaaataaaaatagaaataaactgaatttcttcattatcaaagtaaaaagggaaagataagaaaactgaaccaaatttacatctatgatggaagccattaaaacttcatcactctttcttagctaacttctctctttaaattctcgaaaggaacagaatttacaaaactaaagttaaaacgagatttcaccccaacaaagaggaaaaaaaaactttagtggcgattagttattacaaaaattgttagattttctctctctctattttttaatatgcttccccaggtggagcaaggttaagatcgagatcgagaactttccttggttgcccttcgaccacggacgacgaatccgactcgctctgaacctgggccccacctccagacccgaactcgacagtacccgggtcaaaacgaacagggtagactggggtcacaaactc

SEQ ID NO: 206290 - DNA, 577 bp, Cannabis indica
taatatttttgaggctttgatagagaagatctcgaattgcacagagaagaacgccgagaaaaaaaaaaggaataatatagttttgcctaggacgatcatttggactatcgtgaggtggatgagtccattgaaggagatgacctggccctagggttgaaatatattttgaggggatcaataaaagatgaaaatttggcctggacttcaagtatcatgagacgtgtcagactcaagataaatcacttatcccatttaatacttattgcatttaaaatattacaaattttttttatgaggttttaatattacattagttgatgatttgtgtacctgcccacactggattgtaccatttcacatttttgaggtaaatctatgctgtttcgaaatctgtgtggtcccatcaatttttttgctatgagatatcacttatttttgtggcgcactaaagcatatttctattagtatttagctcattgttttcactaggtaaagtacataaaaactagaaaagccaagaaaagtctatgcttcgtagctttttcttactcacttgtttctttcctttttcttcctc

SEQ ID NO: 206291 - DNA, 1071 bp, Cannabis indica
aaataaacatgcttatgcttgtcaatgaaacgttagctagtaattataatttgtatatattagtgataatttgtgattaaacattattttttttattgtcactaaatgttacttttcatcaaaaatttattttttttattgaaaaaacatttagtaaaaaatatgattttatggctaaaaaagaatattgttattaattcataattttattttagtgattattaagagtgtggaagtgtggtggagaaagtaagatacggtaaaaatatataataatttgaaacttaagtgataagtggttgaataactcattaattgttattgaatgccaataacacttagcatcttttatcgatgacaccctagtacgattggcgagcgatatttcgaaaatttattttttaaagtgatatgacacccgatacttaattacaccaataacagtatgacatcaatgtgctaggcaacaatgtattttagcaattctcttaatcttatatatagtattaactttttttcacatgtaaaattaagagtgcatttggtaacactttttgaatcagttttttattttaaagttaaaaagtaaaatattttctaaaatcatgctataaaactatatttacttttgaattttttttaattaagaattcttctttttttttttttttaaacaattactttcaaaaaaaataaataatttttttaataaatattttgaactcttaccataatttagaccttagaaattgaactcggacttaatcccgaccctggatttggacccaccccaatcctgatctcaaactcggccccagacctgactaaaaaaaaatacaacaaataaaaagaaaaataaaatttatagagtatatttttattttttgtttttaaaattgaaaataaaaataattataaaatacatttttattttttttaaaaaaaaaattaaaattaaaaatctaaaacaaaattactaccaaaggtgacctaacctaacacaataaactagatgatccaattaattacgttatatcctccaagtgcgacaaaaggatcgaccaaatgagt

SEQ ID NO: 206292 - DNA, 871 bp, Cannabis indica
gcatttgatatagaatagcataacaaaaactaactcgaaaagcaccctcattctatttttctttacttttaacctcgccaatgtttacatcaactcccgaaaagtcctataggctatagacatacctctcaaaagccacacaacaccaatttataacaaatagtaagttatattaaaaaagaaatgcaatatatttcagcaagagaactagagccattatattttctagtaattcatcttaaaccaccaaaaagatggtatcaggtttcagaactatatttctgtaagtaataacataaaacataaaaaaaataaaattgtttgaaactgactacaaggcaaactaacatagtgacatgaaaccttacaaaaaaaaaagtaaaaaaaaaacaacagtggcatgaaaatacacaactaaaagttttacagggttgaaatccacctttttattttcttctactaatttcttattagtttctaaacttatagaataatgaggagattatctaaagcaccatctcgagaatatttcaaccattcatttcaatatggatttttaaaaaaaaataaaaaccctcttaattaaacacaaatcatgtagcaagcaaggtacactatgagtatttcataatttaatacgacacctcaatgtttaacattcaaaattattaaacttaggaacaattggcactaagaatgagagagaaagtaatcaatatacctcaggaagctcctcaagacgaacaaggactctatcagcttgtggaacaacctgcaacccacgaattacaatcacattataaacaaaacccacttcaattttcacccaaaaaagatcgacaaaccaaaatttcatcccaattaccattta

SEQ ID NO: 206293 - DNA, 1992 bp, Cannabis indica
tgggcaacataccacaagacttcatatgtttgaatagttcaattgccatgccaatctgaatgtcaagaaagaaagcttgtaaacagccatagaacaatattagttgacttcactttcgacattggtagaaacattatctccacaaaaaaattcatctttattaataacactgaatttatagcttctaatctttattaatcttttgaaattgaagggagtgcgaaaatttatagtttaaataatatcacattatataatattgtatatatataaataatatcagttcaaatatcaaatatcagtttaaatgagatttgttttatttttattttattattttattatatataaataatattttattattttattaaatataaataaaaagtcacccatgaatttctcataaaccaagaatttagttatatagacacactttatatagaatagatatataaaacgttaagatctcaatatgttagttcagttttctatcaatcatgacagaaagtataaaagaaagatcataacttagtatcaagaatatttacaattttttttttaatcagttaaaaaaaatactaaccaatttatttttataataattttaatcatatcacagctataaaattaattatgaatttaaatcctaaaatatatttattataaattataaagttaatttaatatatataattctcaattgttataaaaatggtaaaatgcgttaccgttccctagttaactatatgaataaaatggccaaagcattaaatatggtcaaactcatcacccaactaccaagtgcatttgaagatccttgtagtcttccttgccaaattgtagaattcgaggtatgaattatcatgttttaagttaacaaagaacaaaaatatatatataatccaagtttggaatggaaaatatcagccctcttgtttatctgagctcagcttctcttggtcggtcatttgtgagttgataatttctcttttatttagagatattgtgacatgatcatcgtttgttgttttctttgctggtctattcagttaaaggctgaaaagctcctatttcaaagataatatattatacaaatactatactatattgggctgatgacccttttgagaatctcaattagtttgtcaattggactaataataataaaaagaaaaaggcccaaaatcaaactacattgctgtgctgtcttatgtagctttgtcaatttccaaagtacaaacttaaacaggattaaattatgtttgactcagaatgaacatgctttattctccaatttaaatttaaataacaagtggggatttgtagcaacaccttattttgaaatatacactaaatgatgataataataatataagagtgataatatatacagcagagtaatgatttctatatagtttcatcaaacatcattagatggcaaaactgagaaaaccactcaatatgtctccaccatgctgaacaagatttttcacaaaatcaaatttcagagttgtacttcagctttcttagtaaggtttccaatgttgccctagaacttgaaaatgaacttgtagctctccttaggtgataaagtatcaaatctctttgagaaatgagcaatgggagaaaaaaggcaaaagcaattgaaatgcaaaagttaatgacaataatgaacaaattaataagaaagtgtaattttcttttaaaaaaaaaagaaggcagaagaaggtgacaaagtcatcaaggtcaaagatttttcaataagtgagtcgacacaatgaaaagtcaaataaagtaaacagtgaaaaaaaaaactgaatgatttttaggacttagcatgagtttcaacagtttagtgctaaatgtaggttagatacttttcgatttagatgttaaaatcaagtattttgtttcatgaaataacaaccacttctctcctacctcaatgtactatttctttccttaactttgtattatttccttaatgta

SEQ ID NO: 206294 - DNA, 818 bp, Cannabis indica
agtcctgtacccgaccctagacccggacttgaaccctggcctggtcccaaaccctaacccggatctgaactagaacctcgaccctagacccaaaattaaaacctggagctaaatcccaaactcgacctttaacccagacctggacccaaaccctgacccggacccagaccttgaccctcccaggatcttaacccaaaccctaacactggaccctagactcaaacttggactttggccccagacctgacgctagactctgacccaaactcagacccgaacttaataaataaaaaaaaaataaaaataaaaataaaatttacataacacttttatttttttaattgaaaaatcaaagtagttaccaaatatatttttgctttttaaaaaataagaattttatttttatttttgtaatttgaaaaattaaggaaaaaaaaagagtattactaaaagctattatatttttttttaaaaggaaaatgctatcatatataattaagtgtgagaacgttaatatttataaatttgagagaaattctaaagagtaaccatggtgtctagtattcttgctgtgatgtgtaaaattgctattaatacaatttaatatcaagttccacttattttactttaataaagattataaaaaattactaatcaattacaaaacatcaccttatatagtagtgttagacacatgatgttcaaaataatagctctaaatttaaataatacatttacattaaaaaacccaaaaaattgaaagagaatgcggtccttgcagacatttgaaataatcaacgataaaaaaaagacaaatt

SEQ ID NO: 206295 - DNA, 916 bp, Cannabis indica
ttattgtttacatatccaaaagcaacgtacatttttttcaattattttttctttttttgaaaaaataaacattttaggcaaatgattttttcctaattgataatatgtgccttattattcttaattttatcaacattacaaacattttagccaaatttcttgttatcattagtacatatataaataaatgataatgatttgataaaaagaaaagttaagagcataaagaacattattaaaagtttccacaaactaacgataattatatagtaaattactaggccggtgacgactcatcaccacactcatctctcaatgatataatacaaatatatatattgataaatataaattaacgcatacaaataataatacgctaagttccaccaaaataataaataaataaataaaacgctaaagcatctgattccatttagcattcgaataatatattgcacaatttttgtatctatacatatatactataatacgatatgtataatgtaaagaaaaaacacttacttattcctattattttatttttcaaactaaaacttacttattatcataatcatacacaaataattatataagcaatcatacaaaatatatattattatattgtgtaattgaattaattatagcacttacaatatatacatgtatattaattaaagatttaaaaagttatttgagtagtaattaaaagtttggagtgtgtaaacatcataaagttaatttatgagcattgttattaagcagtagttgtgtctaccaccttcttaatattcgtgttgcgataaactagtgataccctaaaagttattatattaaattatatgaaacccgatactaattagttagaccaatagcgatactaattaacacatatgagggtgctaagcaccactgatgc

SEQ ID NO: 206296 - DNA, 1216 bp, Cannabis indica
acaaagaaaatatacactacaacttcttgaggatactgggttcacgggcagcaaaccaacaaaaactcccatggatcctaaaactagactcgatgacactcaaggagaacctctcaccaacccttctgaatatagacaattaattggcaaacttctttatctcaccttatcaagaccggatataacatacgctgtcaacaacttaagtcaattcatggctgccccccgaaccacacatatgcaagctctacaccacctaattcgttatctcaaaggaagtccgggtcaaggtcttctctacgcgactaactcttctctacatcttagaggtttttcagattctgactgggcttcttgccccatcacgagaagatcaactaccggtttttgtatattcttaggggactgcctcatctcatggaaaactaaaaagcaacctactatctccaaaagctcagccgaagctgagtatagggcccttgctgccaccactagtgagatcacttggttacaatatcttctctcggatttgcaagttccacaacatgcaccagcctttatatattgtgataatcagtccgccatccatatcgccaacaaccctactttccacgaacggactaaacatattgaacttgactgccatttcatccgagacaagatcaacacctctaaagttcgactcatccctgtctcaagtactctccaattagctgacgctttcaccaaacccctctcggctccttccctcaacacacacattggcaagatggctgtacataatatatacagtccaccttgaagggggggtaacacgaactctgctattcactctgtctgctattcactctgctcactgttagactagttggtcagttagccgtttattcggttattgatctttaattagagttaactgagtttgttattattttggttaatttagttgttgagtctgttatgattagtcaaaagtctttccttctctcttgtatatatgatccctgcctttcctttctctgtaacaattacattcttttcatcaaataaagttcttttcctctttcgcattaaattataatccttgtagagtttttatcgttaaaaatttttttaaactataaaaatcgcaaatatctctgcaattgtattcttgtcatttattgataaatacataaaaatgattttgcatatttaaagtataaatttttgtacc

SEQ ID NO: 206297 - DNA, 1511 bp, Cannabis indica
tccaattgggagaagtagaaatatcccgacatgctttgcttagtagttgacttcaggtcgaagagcaagttggtgttgtgcggagatggctcaccgcatcgttaggaagcatagaggataaacaaggcggataagtatttgatgccctttggtgtgaactgggtcaggcagagatgatagtaatttgcacttgtcttgaagtacagaagtaagggcagtattacaccctacttagtatgggcacccgaccaggcacaatatccctatcttagactagttgctctgtgatttggagaagggaaaaaacatttaacacctcccaagtatccgtccttctctaaacttgtcatgttagcttgggttactatagatggaggagacacccaccgagctcttaagacaccttgccttctttgaggaacagcctcggcgtactcctcagtgacgtaatcatcaccatctaccaagacgtcactagcctcggacactggttccctagcctcgttgtagccaccgaagcgcaatctccaagcaactccctcctcctcagcttcagagggactgtcaggatagttctcaccctggtcctccatctcttggacttcaacgtccctttcattatcctcctcctcagtagcaagccgggcctattcagcgctcagcatcgtggcaagccgagccatgtgaggatcagttgaagcaatcttttgcattatttgtttagtgcgggccatcatcctatccctggacgacgtttggttagtttgcctaacgacatttacggtaaaggtggcaataggaatgccaaaagtagcggtacttggttggcccacggggataatataaactatatcttgccggatgacgtatgtccagctggacggcaagtattgtctccaccactttctgagttctcagatgaagcgtccgtaaccttcacccgcgatctggttgggatagagtattgtacctcgggtattagggaaggtgtaccttcactactcacttcccaatcctcgaaactcgaattggacagactttcacttgatgaggacagactagcgtagagacaaggttggtcctcatacagaagttggagaatatcctagcccatacgatgttctcctccccaaaactcactagggttcatctacaaaagataggacacaagatgagtatttggctgggatatcgaataaaaacaaacaaagcatactgactaggtccaatcaaaagaataaaagggaaatttcgcatgatttaggttcataacccagaattttaaaacttcaaattaagggttaatcttcactaaaccctgaatgggaaaagtgagaaccaaatatcgtgaaataaagtcagaatgcaattacagtcagatcatatggtcaattactattcaagtttcatatttctaaacctagattctctatggtcagaatcacatcggatcaccaataggcgcatcaaacatgtgccacccattcaaaacatgaattcaaactaagtga

SEQ ID NO: 206298 - DNA, 551 bp, Cannabis indica
tttatgtggagaagcggttgcctcatgattggctttagaagtagctaaaggcaacagttacaaagtttattattgtgaagaacgattctaaggtggttacatgcacttattgggaaggagtctcattgggcgcttgagaactacgccttttttgtaatagggtctctcccttatttgttagttgtattttctctaatattagtagatcttgtaattttatggcaaagtgagtattttacccacaagcattatggttgtccaccgattttttccatccctataaacttattttataataattgtgaggtctaatctttatttatttatacacatataagaaagcgtttcataattgactagcagtcttttatattatttattaaaataaaatatgtgaagttactaaggcaacatggttttagaatctctttagtttaagtaagtgcacatttaatttaagtttgaccaagattttttcccattattttctccttagaatatataccacctaataagtaataagaccatttcaaaaattggaaattagaagg

SEQ ID NO: 206299 - DNA, 1233 bp, Cannabis indica
aaatttaaaaccttagaagcagtattctataagaggagaataaaacatttatcaattaacatatcagtatgcaagatcttgaataaaaccattggctcccaaggccactcagttgcaaaatctatgacaaaccccaccttcctcaagatctctatgttattgatctcaaactggaaaatgctcaacggatgaggtgtttatttgcagatttttcaacaaagaggatgctgatataattcttcgaatcccttgtggagacagacgataaatgacaagataatgtggaactattctacttatggtgaagtaatgtgcggagtggttacaaagttgccatgaaaaacaacactgatactgaggcttcgaacatgggtaaaactgaggcatggtggttcaccatcttgccattcttggcccccactaatatgttttgtgttgcagggatactaaacttgataggagttgctcaggtgcaaaagtggtttacacgaggacatcttacatgctatttggaggttccctgctgttactaaatactggaaaatagctggtttgtggagcagcataaagagctgttctgtttcaaatccagtggagtttatgtctaatttcaagcaggtggatgaaagaaacttcgagttttttactgtgttatcttggcaacttccgtacttgaggaactcaatcaagcatgaagtctccacgccctcaccctcggctcttatagactagtgccatgggtttcttaagtattatcaggatagaagaaacttcaaacggctgcctcctccacgacaagacaccattaaaatcaataccgacgcatgtactaaagtggatgaagagggttgttctactgcagctactcaactatttaaagcagtgaagactacaagctcttggcgcagagcttctggccatcaagcacaggttgcagttggcctcaaatatggacctcagaagctatactattgattcagattgcaaacaggtggtggacttggtcactgacaattggagaggatgctttgactatgatcctatcatctgtgatatcaagcttttgctgtctaatcctagatgtaaaactattatttttttctgttagagggacaaacaatgttgcttatgtgatgcttatgaagaaaaacagtgtctaatccttgtgttgcaagaacggttctattggcagacttgccatattcaatgtaagattccctcgcttaattaatt

SEQ ID NO: 206300 - DNA, 1034 bp, Cannabis indica
aaatttttagggctctttagttcgcgactgcagtacttctccaacaatcttcaacaaatggtgattatgccattttcgatttattgcaaaggaaaatttttcattacaaaaaacagttacattttagtgataagtttttaatcacaatataaattttttgttggctaaatgtgactcttagtcataacaaaagttactttgactaaaaacatagtatttagatacaagttgtcactaatttactaaaaactacatttattcacaacaaattttgtgactaatatctttagtcacggatcttttaatcactacataggaatgataattaataattagtcacaaattttgttgtgactaaaagtaagatcttctatagtgtttgtatttatagtgtgttcacaccaattctgagtccatttggaagggatatctgaagaagaaatcattggtgaaatgcgtggaagaaatcttaaaaatttcatctacaaaatagagaattattatcattatttttttaaaaaaaaaaacaaaaactataataatctcctgccaataatatttacttaatgacttcatcacaatatgattagctactaaacaacgtatgtgcaatgcagaggatcattttttattgtcatttttttaataaagtcaactgcatcattataagttcatagatctgaattattaaaaaaaaaacttattttttaatctatagaatcttttttctacactcctataaaagaattgtcctatatatatataggatttttataaactttctaattaaagagactaattaattgagagaagaatggttaattaccaattaagcttaagaaatatatagttcatatccaaatatgatatatgaacgtacgtttcaaaaatttcacattggatgtggtttaaacaaaaataatacaatattaaagatcctctacaaattcaagtttttattattatatatatagttcgatattattaattgtaggtttattttgtgtgaattaataattacaattcatatgcaa

SEQ ID NO: 206301 - DNA, 575 bp, Cannabis indica
tattattattattaattggaaggtcttgttgcgtaacaattttgtggttgaaaaatatgttttatgagtaataataatttttagtttttcttgagaaaaaaaaaaaaaataacaaccgttcaaatatgtgatcaatacaaattgatggctggatcaagtggtagtgtacgaggtacaaaaggtggcgactagtgtagtattgaaaagttttatatatttgatgtttacttttaattttagttgtattattatttgtttttttgatggaaaaaagaaggtacccctaagaataagaaaagtcttacactttgaataatggttatgttctggcattgcttaaatgaatcctataaataagtttaaaaaaatcacgtcatgcatgcttatgaacatttgacaagcttggctggctttcacactaataataataataggccgattatatagaacatcagttgggatttgaggtttttaacacctcaaaacattgtcatcattgaatgaaaaaaatgtaaatgttaggaaggaaataagcactgtgaaaagtaagtgtgaaaatgcaatttcatgccatt

SEQ ID NO: 206302 - DNA, 1536 bp, Cannabis indica
aaaatatgtgctaacaatccaaactacataatattaaagatgaaagacatatttgaagaagaaaatttcataaactttaaaacatataatgagaaatcaacacaccataagtattacttagttacatattgcttcatcttccatcttaacaaccttaagaggtttagaagctcataactttcttagaataaatattacaaagaaaatacattctaagaaagagtgaaaatgaaagaagagtaatggaagatgatgtaggatgtggatggtttagtgttggttgttgagttgtttgttcttcaaaaggtctccaaaattctctatttaaagccaaagtgagtgaattaaaataattaataaattaattattttaatattttctagaaatttttggcataaatgaggtaggtgggatatgagaagtaaataggtaaaatatataatgagcaatttattggttgagaaaatagtgtaagatggaaaaatgagccaaataaatgaaagagaacagaaaatgatagtgtacttttgaaattgacattttagtctcattttctatgcatttggaacacttggcagcatcaaatagcttggaagaggcggcttggaatgaggagctgacaaatggtgcacatggagagcatctgaaatggcagctgaaaggagaggcagacacttggcacactgaggagctggcggggggggacaggcggtcaggggggggggggggcacgtgctggagctggcaggagaagatgaggtgccacgggccttggtctggaggtggtcgtcacgcgcgctcctagacaataggatctgcttgcagacagtccagatggaggagagtgttgatctggggctgggctttgtcagggccgaatctgagtttgcttttgaaatttgaaattttggctccatttcttcacattttttccaatttagctccaaacattggctaataaatacacctaaaaatatagaaaattaattaaaaaattaatataaaatttaaactaaacaaaataaaattactctaacacacacaaaatgctacaaaaaaaattattaagactaaaaaattcaaaaatacttaacaacttaataaaataattaaaaagtcatgaactaaaccaatttttgcctataaaatatgctaaaataactctattttgtagagttaaccaaggattttaaaagtactctcaagcataagactaaggaatttttcttaaaaagtttgatcaaccgccttcgtatagaggaggaagcgagaaaacaagaccaaaaagatgaaatgcttattgtttaaaacaacaacactaagaagtccacacaagcggttctgaagcctaatggtaaaaatttcaagaatcaaaatcgcaactcgaattctaattctaaccacaacaatcctcctcgtaacaataatcagggttggaaccataataggaaccaacatggaaggcagccacctgcacataaacagaatgaccctgcgcaatttttgtgttagaactgtaacaagccgggtcatat

SEQ ID NO: 206303 - DNA, 817 bp, Cannabis indica
aaaaacccagactaggacctggagctcagaaccgaacccagtcttaggtctgacaccagtcccaggttcgattctaagatccaaacccagatttggccccgaccccaaaatcaaatatgtttgaaaaaaatgtaaaaaaaaatatatatatatatattagataaaagaataaaaaattatttgtttgaaaatataaaacagcatattggtggtttatgatttttaggttttttaacttagatttcagattattattttaaaaattttggtcaaacacactcctattaatttttaatatagctaacttaaattaaacataaatgcatgtgtttttaaaatttgtatttaaaagttatatccattaacaacctttttctttctttacaaaatacttgtagaaaagttatatccattaacaacctttttctttctttatgtgtacctatgcattatccatcatatcaaaagagaacattattcttttttttttttttttttttttctaaaggtgttacgagagaagtagaacagaatattattcgaatcaaaagttataaggagaatcaattaagcatagctcatcaaataaatatggaaaacaataaataaaaaataggcataattaaagttaagttagcatagtaatgcaacgacaacaaacgaaaaatcaaattacagtttttcttttttctttttgaaactacagtttagttacgtaaccattatatatatatatcatccatcatttaataataatgacctcataattcaattacattactatattccagtaagccgtggaatcacgcgcctgctc

SEQ ID NO: 206304 - DNA, 599 bp, Cannabis indica
tatattaatatgaaaaaattatgcatatagcatagctgtgatcttaagccatataatcttgatctaaccaaagttatcatttactagtttttctaaatcttgttcttgcatgcaaattaaacaatgtctcacaaagaagagaatatatatatatatatatatatcataactatatctatataatatatttatacactttttgttcatagaattagtctaatgaatataaaaatgagaagctaattagcaagagagagagaaaaaaaatcaattttatgagtgtgttttcatatcaaataatatatacatgcatgtaatgtaatgtaattaagaagttaataaattaaacaagtaaattagtaataatcataataattttacaattaatggagctataaatttaattaatactattctaacaaagcttatatattaaaaagacaaattattcccagaaataaaataataaaaaagaaagcaaatttaagtgcagttttatcataacaaataattaagcttaatgaatatagaaattatatatttatatataaaaaaaactcacctgagaaaaactcattattccaatgatcaatataagc

SEQ ID NO: 206305 - DNA, 1076 bp, Cannabis indica
acgatatgtgaaaaaacaagaactacgtgggcagctttatttgcatatctttcaacaaattgaattgtagaattttaattataaatcataaattctctacaaatggaaaacatagatagatgctacaattttcatactttaactatttctatccataaataaattattattattattataatactattatttcaatttcattactgtgacaatgaaaaaagtaaaaatattgttcatcataagtcactttcatctgtaatatattggtagttgaagtaggtgcacaggataaaaagatgaatcaccacccacgttagcagaaaatgtaataattcacaagatattttctttttatcaaataaaaactcaataatttaccaatttcatttatgtgggatgagttttcctcttttatttatttatttatttattttttaaaaaaagtcaagtcaagagatacctttttctgggtaagggaagagatacttcttattagtctaagaggtgtttggttaaaaaaaaaaacggattacttaaaaaaaaaaaaccgtaaataataataaaaaaataacaaaatacaaaatacaataaaatttaaatattttgtaatttttaagatttcatttacataaaatgcggtctttttatgtatttttatattgtactcttgttaatttttccttatttgtatattatattcttattatatttttatattatttgaatgctattttcttgttaattttatgcaatttttttcgttatttttgtactatttttatgaacaacgtaaaatataaaaaaaatctttaaatgtaaaagtataaaatttaccaaaattataatttacattcaaaaaaaaaaggaaaaactacttagagaaaatagcaagttttttagttacttttaatttttgtcaattgatttattttcattttttgtatatgatgtacattaatctcttcagttaagttgtgtgatgtctaaaagaaaatttgtggggagtgaacttgactttggtagagtctagattcataatgctaactagacagattaggattttatctgcacatttt

SEQ ID NO: 206306 - DNA, 1516 bp, Cannabis indica
gtttgcttgttcgtgaacacaccgctactgtattgtttctaatggaaactaaattagctagaaactctatttctcgtattagaaatcttttacatttcaataatggacttgaagtccctagagtaggtttaagtggtggactcatgttactttggaaagatgatgtagatgtaactttgcaatattataattctaatgtatttgatggttacatggctgtctctaatggtcctaagtggcacttttcagctttttatggggcccctgctgtccataacagacatattacttggactctactaaaaagacttaaagaagttgcacctttactcccatggatggtaattggcgattttaatgaaattctttctaatcaaaacaagcttgggggagggttgcggaatgaaaaacaaatggaagattttcgagaggtgttggatacatgtcctttacttcagcttccatttgaaggggatcaattcacatggatcaaaggtagacataataacaatgctaccaaagagcgtttggattggcgtttcactaatgatacctggaacacctttctcgcgcccttgaaaacttcacatttggactattattcctcagatcatcgggccatatcagtcaatattcaatacatcaattccctgcaagataaaccagcaagaagaactcgcttcagatttgaaaaaatctggttaactgaaccagatgctggtgctataattagtcagcactggaacactaactcaggcggggggattgatctctttttgcacaatttgcaatcatgcaccgatgctttacagaagtggcatgttgccaagtttggtaatcttaaaaatcatatttcttccatgcaaaagaatgttactaggcttaataatgctgctccgaggaatccttcgggtttggtggaattgaaaaaatctgaagcaatattggatgaattgcttgagcaagaagagaaatattggcatcaaagatcaagggttgattagcttcaatgcggtgatcaaaacaccaaattttttcatgcccatgctacatccaggcagtccaaaaactccatcaaattcttagtgaatgctcatggaatatctgtcaattccactgctgatctgaccaacactatatgttcttattatgataatctttttgcatcaaatggtgttgatcaatcctctctacaggcagttctctctgctgtgcccaccacaatcactaatgacatgaacaagtcattaactgaacctttcacaagtaaagaagtgtatgatgctctccaaacaatgaatcctgataaaagtccgtgttgtgacgggatgtccgcaatgttctaccaaaattattgggatattgttggaacttcggttactaatttggttcttggaattctcaatgaaggtcttgacatgaggacactcaacaaatcaattatcacattgatccccaaagtgcctaacgcgagttctatgatggattaccgccctataagtttgtgtaatgttat

SEQ ID NO: 206307 - DNA, 746 bp, Cannabis indica
gcaatagtgtcgtccttggtcttttgaacctcttcggtccgctccctaagagccttttatgctagaacatcattgcgaagagtcttcatcatgtcctctgacttcctgagcttcctcatgacgccgtccattccacccagctccgagacggcaaacccctagtcaatcaatattttagaaagacgaccgacctctgcagcaatctgacaaccagtagaatgaggttagatcttcgaaaagtaatatcaaaaaaaatatataataaagaagaagcctaaaaagaatactcacggcggtaagggcaacactcatgtcttggatttgttaaacgagattcgaggaggcacatgctacatatctttttattaggagttgagttaagtcagcagaaaaatggcttaccagctcagaggaaaacggtgccaggtttgagcccgggaagcgcttaacccagtcggtcatggggtcaagattcaagtcccatatctccccagtgtactcgcctcggaagggcccatttcgggcctcccttaaccacttctttagagcctcagcctcagcatcacatttggacaaatcttccacctcataattgtgtttagcgatgcgaagctggatcctctcttcatcaggatgggcgggggtcaagagaattattgggggagcgaggaagtcttcgatctcagctgggatcccggagtcagtgctaggatcggggatggatgatcgcttgggcttcttagaag

SEQ ID NO: 206308 - DNA, 798 bp, Cannabis indica
actaacaatgttcaatctcaggttgcaaaagcttccactgctcattctatctctgaaatagttgactacaacaggctatcccctcagttttgagcttttgtgcttgcaatatctagtcactatgagcctcaattttaccatcaagataatggcattcctttctgggacaatgctatgaaccatgagattacatccattgaatctaatggaacttggattattgtaagcctttctgctggtcatcatgcaataggatgtaagtgggtttataagataaaatacaatgctgatggatctattgaaaggttcaaaacaaggcttgggtttagtcattaagaagggatctattacaatgagacattttccccagttgccaagtttatttctgttaaattgattcttactctggctgccattaatggctggtttttacaacaattagatgttaataatgcatttctccatggagatttgcatgaggaagtttatatgaatctacctcaagggtatagtcctaagggggagctgccaccaaatattgtatgcaagtgacaaaaatcaatttatggcctaaaacaagcttctaggtaatggtttgaaacgttttctacaacattacttgctgaagggtttcaacattcagcaaccgatcactcattattcatacaacaacaaggatcaagtattataatccttcttatttgtgttgatgatgtgatcatagcatgtaataacatggctgttgtacagagcttaaaaaccaggttgaatgataaattcaagttgaaagaccttggt

SEQ ID NO: 206309 - DNA, 710 bp, Cannabis indica
ttgaatattccgataaacatggatatcacatcttctttcacaactcatatgtaactataggaaaaagacaagttttgccatttcactgttatctgtttttatgatattttgtgtgcattaatgttcacttgttgacaagaaggactgccttcaactgtttcacttgtgacacattttggattttgtttgctgttaaaaaaagaaagtactgtgggattgtctttctttattaactgatgaacttggtgcatttttcttatagcattgaatctctttgaacaaagtgagtaatatctgtactttcaggctagggctattattacaaagttgaccgaggagaaaaattctgtacttcagcaaaacagcaagcttcaacaggaactggtaagggtctttgttcagctatgcattatatttttacatgcatcaaatcatatcctcatccttacgatcactgttcctttcaatcctcaccatactgattctactggtaaaaaaagaaagaaaacaaactgctgctttgagcttgattaccttaagtttttatcaaaatcataagtgttttgagggtttaactcataaaaaaaatagtttgaggattcatagcgacctctttctggacttacgttgagatactatcgttttgcaggagcttttgaagcagaacacgagcagaagtcggggtggcctttcccttgtgtatgttatca

SEQ ID NO: 206310 - DNA, 542 bp, Cannabis indica
aaaaataaaattcaaataattttgcaatcaatatttctaaatatactttaataattaattaaatgataatatagaaaattaattatatactaattataaaaatatgtatacattgtttatgttctaaataaaatttaatattaatatatatatatataatattaggaagtgcccgagtggggtttgctctgtagcaggttttttaaccgtgttttcccctgtttcttcgtcgccttcgcctgcttcagccatgatctccgataaccaccaccctctaccaccaaatattctccacgtttcccagttccttaagcccaactgctgttccttaacatctatttattcctctgatcaaagtattttgttggaatttattttaccaggatcttagatctactcacaagtatgttgattaacaccctaaatatgaactttctaaaacgatgaaataaacacatataaagtttagtaaaccttacattgggtgcagcggaataatatgactccttccattcagatatctagcccttgattcctttctg

SEQ ID NO: 206311 - DNA, 734 bp, Cannabis indica
aatagcactcaaaatccttgagatatgatggtggtttagtgactctattagatcgtctggatggatttggtggaggatctggatgagattctgatggtgttgctgaagagatttcaggggcaggttgtgtgctatcgttggtgatgttttctggtgtaaaagtattgccagaattgctatctggtgtggaatgatcagtgtgaacctgttggggcaaagagacactattgttgttgtctgtgggataatcacagactggtgtattatgaatggtaatacttgggagaaccacttgagaaaaagggtcaacattagaaaaatcagtgttaagtttgtgaaagggaaagatattctcatgaaagacaacattacgagaaataaaaaactgattagtattgatatcatataatttgtaccctttaattccttgagggtaacccatgaatatacaagtgcgagcacgtggagaaaacttagtcctatgagcagataatgtcgaggcaaatgcaagacaaccgaaggatctaaggtgattgtaatctggtttttcttgaaaaagacattcgtatggagttttatttttgagtaatggtgttggaattctgtttatcaagaaaacagcagcaagtatactttcattccagaattttataggaagtttagcttgaaaatacaaggcacgggccacattgagcagatgctgatgctttctttcagcaactgcattctgttct

SEQ ID NO: 206312 - DNA, 694 bp, Cannabis indica
aaggtgggcttgagattgggagggatttggtttaggagccacccagtttttgtcaaaccgataatgaaaaacgggagcagtatggccaaactttaggcagacttgacacaggggcgattatggttttgagatcgaggagggtttttggaaggttctttagatgagtggtcaatggtggaatttttggtgtagtaagggggtgggcgatagggaccattgcgtgacccaaaagtgagattagcagacattttggtggacaaatcaagcgcggagtgatgcctttcaagtcgtgtttcatgagccagaagcaatgcttgcacatcttcaagagagagatcatcacttcgagaagtgatattagttacaacagaatcatattcttgaccaagaccatttaggagatgcaagatcatatcaagatctgctatgtgaggaccaacaatggcaagagaatcacatatcgatttgattttgtcaatataatccgagatgcttaaggagcctttctgcagattggtgagctgactttttagttggagaagtcgagccttcgactgactggagaatcgttgttccaaagctttccacagagtatacgatgtgttgtaattagcaacagttccaagaatgctttcagacatagaagatcgtagccaagataacaagagttgatcttttcgtctccattgaagaa

SEQ ID NO: 206313 - DNA, 675 bp, Cannabis indica
gaaataaaaactcgaagtacacatagctttattactatcgcgacatagggagtgaactactatatattatgtgtctctctatttactttgcacatctcttattttatttctctaatctaacgaactagtgttggccactttttaatggcaatacttggtgagtttataaagcttattgtgaattgtgttcggacaccaaaattttccctaatgttcaatggagagttgcacggttatttcaaggctaaaagaaggttgtatcaaggtgatcccgtgtcacccatcttgtttgtcttaggaatggagtacttgtctcacataatggggagaactgaaaaaaaaaaattgactttcagtttcatgaaatatgcatagatcttatgttgaaccaccttagtttttttcaataatgtgttatttttctgtaatggtgacttcaaatcaatctattatttgttacaagggtcgaaactattctccaaatcctcagggttattcccaagtgaaagcaaaattagccatgtactatggtggaatggttgaaagtgaggttaaaaggttgttagatgcttcaggttttcagcgaagcactttgccatttcagtatttggagtttcaatttatgcaaaaaaaaaaaaaaacaattacagatacgaagatggttgcgcagatacg

SEQ ID NO: 206314 - DNA, 816 bp, Cannabis indica
cttattgtgtcaacacgattatgacacgatacgattattaaatgtgttatccacacactttatttttgtctatttttgagttgtctcatcgtaaccatattattagcctaattagtttatcttatttaatatatatcttagtttgttgtacgttaaaaagggtttttctttttttttttttttttttgcgaggaaaaggggttttttattatttattttagtatttttgtaaattgtcacggaaagaagttatgtggatgtgatgatagcatatgagtagtttttcactgagtttacattatgaatagctgtgttacatgtaatgtaaggaaaaaaaacacaaaatatatcattactaaaatgtcaatattattgttacgtacataaggcttctacgattaaagttaaagataaacatcatcaacagaaatgaaattttcattataaacctatccaacaaataaaagaaaaaaaatataacaaagtggcaaatacatgcattaagcgagaattcatcaagatcataatatagctatataaacaacaaatagctagccaacttgaaaattataataatagtaataataatcccaaattaataataagaagacggacaacacaaaattaacaatagttatgtcatgccaatacgagtgtaaatgagtcgggtcggatctcatccagttatgatccgacctaatccagatcatgtaaggatctgtctagtcctgccccgttagatcagatactcggatcagatcagatccgacccgacttattcggatctgatctaatccgacccaactcttttttttt

SEQ ID NO: 206315 - DNA, 918 bp, Cannabis indica
tttagaagaatggtgaatcgcacaggcctaattgatttggggttcgttggtccgggttacacttggtgtaggggcaattctcactccccaggtgctgggtctctcaaacgggccagacttgaccgaggccttgcctccacggattggcgaatgctattctcggctgccattgtaaatcacctctcatcctcggttttggatcatagacctattttatttgacacaaacggtggagtgatgtgcaaaggccgattattcaagtatgaaaacatgtggaatagggatcctagatgctgctgggtagtcaaggaagcctggatgaaaagactacatccccactccatgatcaacttccaccgtaagaccaaaaacaccagctgtaggctgatgcgatggaataaaactcatttcaaggatctcaagcagcaaatccatgaggcctcttccgctctcagggaattggaaacaaaatctcctcataatatatctcatatagacactgcaagaagaacctggctgaagcgctcgttagagatgaaatccattggcgccaaaaatcccgagttcaatggctctccgagggagacatgtgctccaaattcttcatggcttctaccattgtgagaaggaggagaaactacatccaatgcattaaaaacccggacgatggtgagtggattagagaccaagccgaaattgcaaaatgcttcctcaaatactctaatgatcttttctcaaagcaagtctcgctccaaatgcctagtccgattgaaatcttcccctccaaggatctgaccgatggggataatttgctcctacatgccatcccaaatctcgaagaaatcaccgcgacaatctcaaaaaatggggaaggataaggcacgggtccggatggattccccgcaagcttttactcac

SEQ ID NO: 206316 - DNA, 998 bp, Cannabis indica
gaaaggaatacaagaaagtgtatctatatatgtgtgtatgtatattcatgacttggggggggatgtgatatggtgttgagctaaacagaaccatattgtatggggttgcttgtattgtatgcatttgtgtttttattaagaccctttttcagtttcctttcacattagtgagtagtgagttcttataatgtatggaatttgatgtgagctgagttcagttaggataattttgtgaacttatgatttatagtgtcacctagccaaggtaaagttatcagttataaaatcctcatgcaactaggcagtagtattatagatgcaacctttgtcttaaatgtagaaatattttgtgatggccatagaaattggtgtgactagatacgaactttttgaaagtctgaatcacattcgcattgctacaacaatattgcaagtattgtaggcatttgggaatcagtgaagtttaggtatttgtttttatatctttgtacaacgactgcaatgcggggctttaaactctgatcatacgggtaaaatttcagttgtgaaagtataaagtagtttatcatatgattacgaaggcttaggttggaatgagttgataattgtgagcttatgaaattgttttcgtgataagatgatttgacacaacaaaacctagaactttagctgctgaaaggactaagattgttttgaaatttgagaatatttgatatgatggttggtgaacaaagggctttgttttcttttacatgttttgtgcaatttggttgaaacacagtggcaattaaaagaatctgttattacttttcttttttttattcttcttaatgcacgtaatgtatttaccaatggttgtagcgtagagtttgttagacacaaagggcaagagtggcctttactttttcctttctataaataacaagaacaataataataatatagtttgaaggaaactggtcagctgtagaatcagtttggtgatctagttatcttgt

SEQ ID NO: 206317 - DNA, 885 bp, Cannabis indica
ctagtaactagtaactagtaacccaattttgctttgtataatgttactacaattttttttttggactttttggatgttttgacataatttttccattgaaaaagattggagaaattgggaggattaggataaatgtacttttgaagagagattttgtgatctcgatttcggtagggatgttaatatagtcgacggttatggatactaatttgctttgaaaaagaaagataatagctgttcaaagagaaaaatatttaattgtgggacaaggtcttcttatgtgcaaaagattgggatactttgccattatccttagaatttgttagtacttctagaaattagagaagtttaatatggaaatcttgaaacataatgggacactctatgtctattgtctacacatgatttgtattagtatcatagagaaatgctaagagcatctcatctttaatggtagtaactccaatcaatgcttaaaatcttcacatactatcaaaatataatattttcttttctttcatttgcattatttttaacaatctttgttttaaaaatattcatttgtaaaaattattaaataatattatattatattatattatttaatatatattaaatgattacattttattaactcatgataaaaaaaaaataaaaaagaaagaaagaaaagataataaggttactatttttaaatatttttatatgacattcgttttcactctaagggtagcatagcatctattaaaagatttttaaagctatttattagagatactctaaaaggtataagtaatgattaatgttatatccctattagtgtaattagatattagattttactataatttaataactattttaaaatattactaatcaattaca

SEQ ID NO: 206318 - DNA, 599 bp, Cannabis indica
taaattaataccaaagtaggtgattagttcaagtgagtctgccactaataataatgttacttttgcttttaacatatattatctgtttgttatctcttctaagactcttctatatattcacttagctaaatacaagatcaaatattaaaatgaagttgatttggaaaaataatgactgaaatattacaagtaataaataaaagcatatagttagatagagattaattgctgaaacaaacagaaatattactactactactctaattgcagattaattaattaattataactctcacttctggcctggtgggaacccatcattattctcaaaagtcaatagctttaatctacgaaaacaatctttatagatgtcatgaaaaacattgttcacacacttcaattcatctaataataaaaattcatcaccaaatcaagtccactcccactcccactcccactcccatatatatttgatccagttaagagagttgtaggcacaacatcctgcctgcttgaagcttcaactcggcctttcttggaattttcatcttcgatacatatttcgtatctctccagttttgaagtaaacaaaccctctg

SEQ ID NO: 206319 - DNA, 1696 bp, Cannabis indica
ccaggttgacatggcactgggccctatgctcaggttgacatgcaacctggttcgcatgttttcgctactcaaacacaaattctaattcaagaattcttcttaacatggtcaaaaatggggtaggacctcattcacaatctctaattctatagatgtatcaaaacgggcctcgagaagcacccaacgcccaggttgacacatgacttggtgcgctgggttttggtataagaatttgattcctttttgagcgttcaactattttcttatagtaaatgggagtttcaacttgcgacaggtaacattcacactttgatatttcaccctttcaacaaagtggaatatcgacaaaattggagagtttcgagtcttcccaatttcacaaaaaagtgacatctccgagaacaggtgtacaacttcaccaaaatgtataatttgactaagtagtgtcaaaacatcacttaagcataaaaaaaatataagtttgggatattttttcactcacccgacgtccaagttgacgtcatgatgccaactagtcgctgggcgtcaacctgggcgctgggtgtcaacatggtcgcagggtgctaaataacatcagtaaaatactcagaaatccttcaatattgatctgattgatgcaattcaacttacatttcgaagatatttcaaagctctatcaagtatatcacaattctaaagatttcaagtccaaaattcatcctcaacatagttacaattttttcaatagattacttgaaaatgatacgacagatgagattcaaactaaaaaaattgacaattttcactaagagtaaattttcaccgttagatgatcatcaatgtccaagataagccaaaataatttttcatttcttttgtaatgttttattattatttaattagatatccttccatataaaaagagaactcttctggttcattttatacatttttctaagtctccacaaggtcagagcatctctctactttctctctctagaaatttgagccccacacttaaccaatttcttgtaattttcgtaagaaataaaaaattgaagtaaacgtatgtaataactgcatacttaaaatatgaattagtagacaattagcattaagtaatcgtattatgtgattatatatgtattgtgtaatatgtgacctatttttaataaatgggcatttcagttataatttctcaattttagagatttaattaaaatctagatgtattataaatgataaacatgtattttaatattttgagaattatgctcggtaacagtagaattgcgatggtttagctattagaatcacatgtatatggtttagaatcttatatttagtgaggcaggtattatttatatttagaatatctggttttggtggggttgtagttttgactattttacccctaagcctttagtttacttaagggtgaagtaagggcaaaaggtaattctacctaaaggttttgttttattggaattaatagatttttcctagggctgagcatgaaatcctaaaaaatcaaaaaaagtcaaactgacctaccgaacactgctggaactaaaattggcagaaccaaaaatcgaaaaagccgctaatagttaaaacctccattgaacggccaatttttttgaataataaatcgaccacaaaatctaaaactaattgttatacatatatattaatt

SEQ ID NO: 206320 - DNA, 926 bp, Cannabis indica
ctaacccctttgcatgaagggtttttcatatattacaagtaacatattaacataagcttatttggtaaagtcccgtccatgccacatcatgttcacaattgccaaaaaccgtgtcatatcttcgtggaaaataaagacacattaaatatttgatttccaagtactatctttccatattttaagaagatattatcttcggacgagatctgtggaagttaattcctaacatcttgggatcttgtaattaatgagaatgcttctaatcgagctagacatctggatgctcgttgtttacttctccaaatgttttgtttgatgtgtctcccgaatatatatatacgctgtgctggaagagtatctcgcctagacaagccttctatttttcatttgaaaataagttcttgctaatggacctgatccattattctgattgggcccatttttgggcctgaaataactaaattgtatttgatgttagtattctacgtgttctcatccagaaatatggataacaatgccccatatagctcttgaaatgattgagaaaatgagaaaaaattgcaggataatcatcaataacttctccctactcattaatgaaactagctatacgattctcctccctccgtttcataatactagcttggaaatggggggaattttcatctttatacttgagctggcttatcttactcttttgcacaggaaagctatggtacatcttagcttggtaattaaaatttttgtaggcttccttctcaatttgttgataataaaagtctttgggatgatgttgacaattgagtttagctggttgtaactctatcttggctttttgcatattctgctccacatccccaactagtttaaaattaaatctcctcaaaatgttctttaatatgagaagttttagaaaaattcctttt

SEQ ID NO: 206321 - DNA, 810 bp, Cannabis indica
caagatgataattaatacaaaattacataaacaaaatagcatgaataaatatgagaataatctaaaatttttaattcatgctcttaattaaataactaaacaaaagaataaagaaagaagaagaaaaagaaaaagacgctaatggtgatagttgatgatgattgcttgaaatctcttctcttttactcttcaatgcgttttctaatctcaaagttatttgtttgtatctctccagtcgttctcaaattcgatttacatcattatctatataggcccaaaaaaatagaaagaatccatctagaattagaatttaaattaaaaaaaatataggtacagcgctatagcacctttcgagaattcccgaaatcctcaacatgctgatttttttagagccacgctataacgccatattcacagtgctatatcgccaaaaatcatttttttcgtgattttgcttgtttctcaactcgtttgcttcttggtttcggcactttgcgcaaatatgtacagtgcacttttaatttattataattttattattttatgctcaatattgcaccctacaaaaaatacatcaaaattatacaaaattttaaaaataaatactaattcatctaataattgattaggaatgagtgtacaaatgtacattcatcagtgaggaaagaaagtcgaagctggcatgggttatgggtttggagacattgatcgatccctatctgaccaaatttaggttcaatgaatctttgaaacgctagtcttaagagtgagatccgaagaagatgaagctttaaactcgaaaaaatggtt

SEQ ID NO: 206322 - DNA, 1671 bp, Cannabis indica
actcgacatgtggcatgcctggccacgtgacggtcagttacattaatcttctgcatcgtctgttttgtgcgggccatcatcctcctccttgatggatattggtgtgtgtgccatgcaatagtcacggcaggagcagcgattggaatgcctaaggcaccagaaattggaaggcctataggaatagtgtcagcaacacctggatggacaatataggtccagtttgatgggagataatgtctccaccccttcctaagctcccaaataaattgcatgtacccttctcctgcgatctgctcagagtaaaaatggtgttgcacctcgggttctggagtaggtgaactttcactactcacctcccaatcttcaaaactcaagttagaaagtccatcactcaaagagaacggactggtgcaaagacgaggttggccctcgtataaaagttgaagaagatcctggttgatatagtgtttgcctccccaaaattcaccagggttcatctacaaaagataatacatgagatgagtatttggctaagatattgcacaaaaacaaacaaatatactaaccaggtctaatcgacagatcaaaaaggcaaaaaatatcgtgaagggtagggtcacaacccagaatttcaaaaatcttgaattaagggttaatcttcattaaaccatgaacgggtagagtgagcccgaatattgcaaagttaaagtcaaaatgttgctacaatagagttatatgatctattacagtcaaagttataaagtttgtaccatagattttctaaatttttcctaaaataagtcaagaacaattgaattttctacaatggaaacccagaaaattgaagattcaaaaataaaggagaaaaatatgagaagcttactcactgtttgaagctttcaggttgttcagatgaaggtgatcggttcgttctactagaattccacgatagaattgaaagaaaaaatttttctctaaaattacttagcaagaaaaatggtaaaagttgtttattaggattttctaccctatttataagaaaattagtgaaagagtgtaatcgattggaatttcgaacgcttcgatttcccccaaaagtaaatcttgggaaattaaaagcgtgggagtaaaaggcgcgtctcgaggtacaatttaatcagagcattaaatagttaagaactgagggacttctggtcagtttcacatcgaatcacaaacaaatgcatccagcagtgtcacccattcagatgcaaggtcagcttgagtgaagtctacgcgtaacttcaaaagtcccatgcagacttgggggaaaatgttatcccatttttttcactatgatgtggtagcacatgctagtgacacgtgaacctaattccctacatctcgttgaagagatgttccgaacagagctcagcatacacctgcatagataatgtctttccagccgagcagtagacaatcctagcaacacatcaacacttagtaattccagaacttgcatcgtgaagcatgaaagaaatctctagaagtgtaggattgtatcacagagatatggcaagctgtccaaatcccacaatctgtgtattctaaatatgtaatatatgttcttaccaattatagagattgtaagcaaatgggaaaccttccgtcaagcatttagccctataaata

SEQ ID NO: 206323 - DNA, 2608 bp, Cannabis indica
ccataaccgaccgatttttaccctacatttaacctacttcagacctctttactccagtataagtgatccatgtttaggttcagcaacttataaccagctgctattgagtatttctcaagagcaaattgaacaggattcagtagctgccttatttttcctttgcttccactacttttctccaataccagctactacttgaaggagctttatactcccaccagtcatcttgcttgatgtacacttatggacccattatggacccatttaatccataaattatcctttttattgactattaacacgacatgcttgaacagagctgccatattccagtctgctgtgttcatgaagcctagaccccctgcagcttttgatcttcacagtttaaaccaagcaacactaccagagtcctctgagttgctttgcttccatagaaaatgtctacaaactttctcaatctttgtaataattttcttgggcaagaattaatatctgacactagtaggtatgaattgtcaacaatacagagtttatgagcacaactcgacttgcaaaagaaaggtttcttgtactctatgttttaattcttgctgccattttctgcaccagaccagtgcactcatctgctgatatcttcttggcacatattggtattccaaggtatctaaatggtgtgttatgtttgctgaaaccatacatgttcagcacccttgttacctccccttcctgcatgccactgcaatatatagtagttttggacacatttagttgtaaactagatatgttaaaaacaacttaaggccttgcaacatcaggtagatactcttaaaatcaccattgcaaaataataatacatcatcaataaagctgagatgatttagtctcagctcactacatctgtcatgaaaggcaaaagtctttttttttcccaacttttttttatgatcctacttaggtatttcattctcaatacaaagataagggggacataggatccctctgcctcaaacttctcctagttcagagagtctcatattattaatgtgtgaaaagataatataatacataagatttgtgagctactcatctcttaatcaattgattttgagatggaaaacttatgcatcctatcctaaattctaacactcatgtatttatatttaaactaatttagtttaattatgtagaattgataatgaattacaatgtcattatggtacatatatcacaatgctcagatttataaataatgacccaaataatatattattaaaaaataagctcctttaataatagttttatatggtttatttattttgaataaacaatataaatagggttggccctgagttgatttggactttaagaaaataatttttttggtcccttattataagaataagtggtgttaacgcaaatttttgttaaccaaaattaaatagctttttagtaataaatatattacagaaattaataagcaataaaagaaattataacttctgatatttttacgtgattttgtaattaaaatctacatactccacgagtccttattaggaatgtttttttgaatacagagtacaacttcagaatttgaatcataataatttacttctcagattttctgtcgtctttcccataaattctgcccctatttataagaatataagttgacagttatcttttttgggatatatgtaaatgtaactgttcacgaaatgtggaaaatcctcacgtttcatttaaatcacatgtgagataatattaagtaactacccaaccgttcattagttttatcctttagatggttattgttgacgtgaaatcatgttatttcttctttgatttgagttatcttccctgtccatcttgataagaaaatatgctaagtgttgggaaggtttctgtctcgctatattctctttgtgacttttgcaatgcgaggtgatcttctcgctatatgtaatacgaggcagcttatgctgatactctcacttcgctcggacggatgaatattcctttcttgttagtctgctctgaggcatgcatatgtctcgttaatctcagattaatagttactatccttgtcttgctattgactataaagtcaataagttttgaatattatctatttaacttttaattaataaacgagttatttaatatgcatttaatgatatcgttatatcattcaaaattattttgtattccttctgttggacacatgtcaacctttaagaagtgtagccaaatttcgggtataatagtagtatttttaaaattcttaaaaatatatatattaaattttttttatttgagtgggcctaactcgccttaacctagggtcagccctacatataaatgttgcaacataattagcataacttcaagtattaacacaattaatacaaattatatataatacaacctcacaatatatataaacttatatatgttgtgaataaggacggagccaagacttaattactaggaggcaagcggccaactattatttttttaaaatctatagtgcataaaagattatttcggcccacccctatctagtttagcattcgtgagaggtttttagtctgtttttttttttttt

SEQ ID NO: 206324 - DNA, 1335 bp, Cannabis indica
gcattgctattaggtaccgtggttcttagcaccgtggcgtcctataaatagttagcgactttctataattattattaaagtaaaataactgggagctgatattgaattgcaccagtagcgatatgatactttgtgttaagacagctaaagttagttaggcttaggcagttaggtaggatgatagtttgcttagctgtcctaattagttgttagttgttattgtagttagcttaatcgattgagcttaagctcagttcaagttagttacagagctagagttagtatataaattctaccattgaaggcttaataaaatgagttgatcttttctccattctttcctattctttctctttcttgttctttcgaaatttccaaatgtgttaacaaaggcgaaaaagattaatatatagtctaataagagaggacaggaaaaagggtacattaacattaactgttatttttttgagaaaaaacatgaagaactaaagacacttaccccaaacgagttgtgctgtgtccatctacctgggaagcttgtttgtatgggcacactctataaacatacctacccaagaattttcgaattccaaagattagtatcatcgaaattatcgaataaattatgaaaaagaatgagaataaacagtcaaaacatatattacttgttttccttgccctcaaaacattgaccgtagaatgaatagaattccttttccactcctgcaatatacaaaatgggtttagccaaggaaaacgaaactccataattataaatgcagataattcttactgaccgaaatcatgctttagcttctgtgtcaaactcgatattctcgattggattttagacaatttattactggactcatcgtattccttacgtatacgagcagcatctgaggaagccaacattatacataaatactttcggtacacttatttccaaagtcaagaaacaaaaaaactaaaaatcaaaagcttttgggttatacctgactgattcactggagtctggaataaattaacaacttgaagaacacttcgcaccttttgttgtattgtctccaaccaagaaggattacttgaggttgttacatctaatatatagtttaaaaatagataatagtagacatgaagtgacaatcagcttattaatcatggtcaaagaaattgttaaatgaaatacaaaatagaagatttatttaaaacaaacatttaaaatacctgaaaagtcagaatcaacatctgagtcatacttgtatgaagaactagaatcttcaggatcctcttctctaatatcatgatcctctttcatatcatcctctaactcat

SEQ ID NO: 206325 - DNA, 1695 bp, Cannabis indica
gagtaagctctcttgtttcatgggagaaggagaactattacatttgcactaccttcatcaaaactaaaaactatacaagtaaaagtaagtaatactatacatacggtgaaacattttctattcatcagtgttttaaaatcaatgagatgaaatagtgactgaataaacatgcagtaggagacaaatttccttttttattttcttgctattattctaaaaatttaatacaaagaaaggacataaagtaaaatgcaacttgataaagaaaggtctaatcctacatgggtaaaatcttaaagccactatagtataggactagtaaatactttatatctctaggacccccttctttttcctaccaaattattaaaatttagaacacaagttagatagtaaatgttcaaaacattattcatagatcttctgttagtaattgggtgatttttttttaactaagtatgtagctatacatatatagatatatagcaatgctagtgctgagaaaattgcagggttacagcaatgaaaatggaaaaagatgcctgacatgatgagttgtattgaaaggagcgtatatagaaaaagatctagtcaatttgtggatactaagtttgtcaactcaagttttgacaaagtgggtgtattttcattttgagatttataaatgtgttaaaagactttaattattattagttaatgtatgccaaaactgaagaaacactcaattgagagagagaggagttagatagttaatgagtaattattagctttatgatgatgatgatgactcagaataagaactcatgaaaataatgtacaaactatatatgaacatgtaaacccacttacctactttacataattttgttaaaagaaaaataaataatgaaaaagaaaagacatcaaaacaactagtattatgaaaccttaaaagtggtttttgattcatataagtctacaaaagagaaaaaaaatgaaattaataatatctatgacaaccaaaggcaaaggggtccaagaccaagaagccaaaaaaatggccaaaagagtagtcttattatggtcccccctatctctaacattagatctcatcaatttacaccaaaacagacataaaagccagtaaaatgccaatgtattgattcttgattttgggcaatctttaacataaaagtgggtagttgatcaatctatgtataatgtatagtatatgtatgtatctaattctttgagtacttcctcatagtactttctttcttttacttgtttttttttttttggtgtttttttcacacatttttctcaaggtaaaaccaaatgaattagtcataataataataaaaagaaagaaagaaagaaagcatctttaaacttaaaaaactcttctttgtgatagtatatactataatactaatctgtatattaatttcttcatggaatggcttttctgatatgggcctgttgtgtatatataatcaagtgtccaccacaacatgacaaatctcctttccaccaatgcccttctgctttccagccaaacttacaagcctacaaaatcactagccaaaacaaaataaataaatatgagagagagagagagagacagagaaagagatacaatattacagctcaataatcttccccaccatagttcaataaatatagaattataatacagagagatatgaatatctc

SEQ ID NO: 206326 - DNA, 562 bp, Cannabis indica
cctttgggtcggattttgtgaagacctttgtcttctgtatttatctaataaccgaaaaataaaggtctccacgtggagaactttgtttttggttattagataaatatatggaagacaaaagtgtaactaaataattcccacttaataatactcagcaacccttaacccacgacccttcattttccccaaaattttgtctaaacccttaattctcaaacccacgactaaaaccttcaaacccagcactcttcgatcggttacaactacgttcgatgaggacaacgatgacgaggacaaggacgcctcttcccgaactcctcaaatttggcgagttcttttaatctctaattttgctattagaggcaagctttcagcatattttggatgtacatgatgggattgaatgtagtgttggtcttcattttttttctcttttagttagctattgttcccaatattgtgagaaagagagatttgctcgtgttgatttgaatcaattagtagaggtgctcaatgtatggaacttgttcagatttgtcgaactactttcgcttgcaaagac

SEQ ID NO: 206327 - DNA, 1125 bp, Cannabis indica
tgcatgaacagtttctgcttcattttattgtgaattaagttttactatttaagagaggttttaaaaccaacgaaacattacttaaaatcaattagttaaaactggtaaaataaattagtgctaccgtaaaccttctattaataaagtctttgtcatacttataatatcatctttgtagcaaggttgtaattagaaataatctttttacaaaagcactacatattataattggggctttgagtttcacatgaatattaaaaaggaaaaaagaaaatgtgagttaaaaaaacaaaagggtcagctcagccgtatatatgattaacttgtttcttaggatctataagatttgtcggtctatgagactatatgccatgttagcctaatactagcactagagctcttttagctccatattaacaatccctgttcaaatttaaaattcaattgtaaattatagatatgaatacatgcaccctataattccattagtgaaatctttgactcattcttagtccttgccatgatgtaattccatggaagtaatcttagtttgatttttttattatgttcacatatcactattttttttcttattattttaatatctctagaaactaggctaaaagtttcaaacatatatttaatacaagaagaaaatcacattaggtgaagaacttttgaaacggcgttggcaagtgactataaagaagttgaaatagtcaatctagtatttttgaaatctaacaagttataagtaaatatatttgtatttatatataagcctcatggaagtattgtaatgtaaccctgaaattaaaataataaaacaaacaaaccccttttataatgttctcaaccacctcaataaggacggcagaccaataaataattccctttattaaattataataactcaaatatttctacataatgtgatcaaaaacaacataaggcactagaaaaccttattcaacacacatcggtgaatttgaccaagttttgtcacggacactgcttttttgaatttctcaagtcatgaattgtatattataagaagtttgagaagctattttcagagattttttgttcagaaacggcggtaggattaaaatatattgattaata

SEQ ID NO: 206328 - DNA, 623 bp, Cannabis indica
agtactaacagagtaatatagtaatcttgttaaatagtgatgataaaaattaatgaaaatattaggtaaattagacaaatagagaaaataaagaataggcaaaaacactcctataagttgccacataatctctcttattctttcctttatatatatatttatatatatatattgatattgatttgaactgcttacatatatattgttttttcaaatatcaataataatctgtgtatatagttaatgctataaggaatcccgatgtgcccaatccaagtgagccaaccatgcaagaacagttcactgaaaattaactctcagaacatattatttaaatgattaatcttaggagttcttaatattgtgtgtgtgaattttgataataataaataaggttcttgttgaaattttggattgtttcatgaataagattttcttcgaacttttgtcctgtattggtggatgaatttagggtttaaaatctctaaatattttttggaaagatttttaacaaacaatttcttttatatatttatattaaataggtacttattaaaaaataaattaatatatttattttgatcattttacaaagattaaatatttaactataattttaccac

SEQ ID NO: 206329 - DNA, 1581 bp, Cannabis indica
tttagatccaattcaatccgcattaaacttgaaatctaatccaaatcaattctcaaaaatacggattggatcgattattttgaattggtcacttttcaatattaaattatttactatttattaaaaaaaatcacatagctaacaacaaaataaaataaattattattgttttatgtcacaagctagcaacaaattaaaataaataaaaataaataaataaattcaaaagaagaaaaaaaaaattgtgtgtataaaaaaatatttaattttattttagattatattaggaaatttgactttatatgcatattaattgtatgttaaaattaataaccaaaacttaagctacccaatattagtggaataggccaatttttatgtataccccaaaatacattctcatttcaaaactttctagcatctctctatttccctcttgctcgttctctctcttttcctctcactagttctcactgaaataccaattgaaaccccactaaaagatctaagaccgcgaccaccacgaccatcgccaccatgcaatctgaacaatcgagagggctccatttcaattcgactgagatctcgccaattccttcctcaattgcgaacggagagaccaccgccactaatggggaccacaaatgaagagcacgaatggagagaacacgaatgaagacgttctctgtaattttctggtttttttgtttttttgagttggtctgataatgtccgatataagccagatataggttcgatgggaggtcaaaatttaagtttttgaggttggtggagaaggtctgatagtggcccgatattgatttggtggtctgatgcatagtaactaattggtggacgtattttgtgttcgaagggggtccaatattattcgaatggggttcaatggggtccagaccaccatcaaatctatatcggaccattatcggaccttctccatcaacctcataaacttaaattttagaacctcctattgaacttatattgggtctatatcgaacactatcatatcgactcaaaaaaatgaaaaacaaaactagaaaatttgttctctctgttcgtggtctgtatttgtggtttgcgtttgtggtctctattcgtggcggtggtctctccattcgcggttgagcaatgaaattggtgtggactcggatggattgaaatggagtcgagagggttagtccaattgatttttcagtggatcgagtggtcttggatgatggtggtggtgttggatggtggcggttcgatactgttgaagagagagaacgagaattgaggcagagagagataggagtgagttgaaaaataggagggataatcttgagtttaatgaaaaattaacctaatctaacaatattagtacactaataattaggggatatatattggcctaataaatgcatataaagttaaatttcccattatattttccttataaataggattggaatatacatttgactgacctactaaatgttaaaatatatttatatgatatatatatatatattaaattttaaatttttgaaaatatgtattagattgttaaattattttttt

SEQ ID NO: 206330 - DNA, 1311 bp, Cannabis indica
cctggccttgggcataggcgggctaggcctgtgcctagggcccacctatcccaagggcctaaaaaaatatttaccttttaaaattatactatttttttttactgattttgaaaaataccatattttttttctaaataagggctcaaaatattttttctatggtccactaaaagttaggaccggccctgtatatatataaaaaagaattatataaataatttagttaattattgtatatgttttatcttaaagcaaattattaaataaggtatttctttcttgtggtggttgtgtaaatttagatacatctcaagggcaagagtttaagtctttgtaatgccatttttttcttttgaatatatgcaatttattctaaaaacaacacgtcaatgcttttgtggttgaattaattaaactacaaatgtattattaattgttattttttttattatattaatactacataaccattaagttttacatttgaaatataaacagaaaatgtcacttaaaaaaatatacccgattccaatatttgattgtaggtataactatttttgttttctttatataattatttgaatcttacttttgataattattcaaagttttttaaataagatttaaaattcctctaaataccaaaatggatataaaaagtataatggaacaaaacccttttataggaagtgtacttagacttaccaaaaaaatatatatcattcttaaatgataggtatataagaaaattaccttggtttcttctatgaatgaaggtaagcctccattggataaacaaatcatgaagccatagacaaaaccttgacactttgctcttgcaatgatatccaaaaatgaagtgtggatgttgtagtagagaattccagtacatacagctacacccaagtagaatatcatccttagccaataatatccaacatctcttctcatgtttacaaatgaacgatctgttaatgtgtatagttgcttccaccaacttgctttactcttgtttgatagcacaatcacttctttctgcaacaattattgttatattaagaacttaccactactttgagaggcgacaccttataaatagttaatgatattctataaagttattaaattaaattgtgtggaattcaaacactttcgataatgctagacaccagtaacatttctcatatggattaactcaaatagatgaaatatatgataaattggttcgattgagaaaatcaatgtgttttcctatctgtaaccaagttcgactcttgatataggttagaactttttttttaatataaaatg

SEQ ID NO: 206331 - DNA, 984 bp, Cannabis indica
attcttgcctttgctcttgattttattggcaaactctgtcgccaaatacggcaccgttttcgtcattactccaaggacaaagcgagagtattcttctgaaggtgggaagaataataattctccttggggtgtggccatgctacttgttctacttatgcttttgatctcttataagtcttattttcattctaagtggtggcctccaatttggggatcctactagttttctcaccatattcccctcatctattacattaaataaaattgtaataataatttatagtttttttttatatatatatctgaagcaaataatcttttttctatattatcaattacttcactagttcaagttgatcaaattcttaattaattgtattcttatgtcaaatttatactttgggagaacaagaagaaaaattgatattagttaacgatattttataatagttatcaaattaaattatatggaatccgatactttaattctaccaagagcgatattataacttgaagaatgttaaacactactgatgcccgacctttaacatttttcgtgtagtcgtgggcaaatcgacacaggaagttaggtttcaacttccctttggcttatagtattgaaaaaagtgcttgaattaaatcgtgaattttgatttgaaaaaccaactttgccatgaatttctcataatagtatgggagaaaggtccaaccctatacataatagtcagtgggacttgtagtccttaaagcacccacaacagctaatgtataataactacaaaggttaaaaataactaagagttaaaaaaaatgtcaaaaaaatacatacaataaatgagctaaaatagctcaaaaatttactttatgaatagttactgaaacatgtagaggtgatcattagcattaggcagaagaacatggctacacaacaactcttactctagcaaggtatctagttccacaccaatccaccccattcccaaa

SEQ ID NO: 206332 - DNA, 1093 bp, Cannabis indica
ctttcgatatcaataatttttagcatggtttttcatgttattattgttttttctagtttgaataatttgggtgtctctatcaaatttttattggaagatctatagttgattgccactgataggtgtgatctgttacatgttcattcaggatggaaatctagcaatttttgcattcttttgatatgtcagagctgacggcttataggtcatttagttaaagatattgttaggattttttttcttgattattgtaaatgcctttgttagcttattattattgattctgctcgatgagtaatatctggatgtaataaactatgtctaatttacttattaatagaaattctatttaccttccaaatatatatattaaattttttacacaattattaaaaatcaatctcaaactcttgtaaaactaatcaatatttaagataaaatgaaaaggccactttatttctcagagtttcattttttttttcttgtttttttttttctaaagggatatttcaagaaagttgtcatgataaatatcagggtaaatagcggcataagtactaaaaattttaagtttgtaagcagaataaaccaaatatttatttttagcaccataagtacccaatgtttgtaaaactgtaattgttctctaattttgttagtacagactctgttattgtctgaaacatgacacatataaggctcgaattctagatcattgggtctagatagaaacatgtagtatcagttacttctaaatgttcttttaataaattcaaaacggagtttgtactaacaaaactggaagaaaaatacagttttacaaatatttggtacttatgctgctaaaaatagacagtaaatttatgccgcttacaaacttaaaactttgggtgcttatgccgatatttaccctaaatattaacaatttgggtggataataaaataaaaatgtcacttggaacatatttgtcactattgaaaatagttatttgaaaaatttatagtaaaccccaaaaaaattgtttgggtatattttctatttgtttttggtcatttagtgaagttttttagtttatttttttttctttatata

SEQ ID NO: 206333 - DNA, 909 bp, Cannabis indica
ggttttgataggctaaaagtattgggctcagcccatgcctacttttgggtttgggtttattgtcgaagatctgtagacagtttagtaactaaaagccagtcacctaaagcgagtttgggcccgattctggaccaactctctttttactggggcctattacttttcggccttactctgaaatttgactaaaaatggagattatggtttactatacaactgcaaatgagttctctagtttcacttaccaacaaaaacgatataataaaatgatgaagtgtaatttgtggaataaatatttaagtttaatttttagttgtaaataaatatttaagtttaatttttggcgataataataccaaagtcattatcctcttgtctttttcttattggtttatttaaactaatttttttttaagaaaataaaatttaatgaattagaccaattagggattgctatgtgaaaattactcaacactcaatagtttggtacctacaaaagtttcataattataacttatgtattattattgctaaaaattaaatttaggtatttatttataactggaagttaaacttaaatatttatgccgcaaattatcttaaaatgaaatataataagagctctattctaccatataatagaataaataaaaaagttatatttattttaagggttatttggggcgaaacatttttttatacttaatctttttttttcccttttagcaaaattttttatgtttacttttctttacaaatttgatgtgtcaattagatatcatcattaaataataattggattttttttttttttttttgaaaaagtttcaattttattaatcaaccaaatcggcaattaacaaagaaagaaggtccctaggaatagaaccttcaacaaaatgacaacct

SEQ ID NO: 206334 - DNA, 643 bp, Cannabis indica
ttcagtgaggaacttccttggaaactgaggtgttgctgaaagaaaaagaagtaggtcgtggcctcggactgcagctaggacttgaggacgccagagtaaaaaattttgattgtcaagcttcactaaaagtttgtgagagaaaataactggagtagtagttgctgtattggcaagagcagaagccgccattgatgaatcaagaaagatcacgatgtttgaagaaagagatgaaaatatcaaagagagaaaaagagctctgataccatgttaaagtaaagatttgaggaaaaatgaattgtcttattattgcacaaaggcagagaggaatatatatacaagagtaagttagaagttacagttgtacaaataacaaactaactactataacagactaactaactattctgttcactaacaggcccatctattcacttatcagatgaatttgaagaaagttgttgttagctagttataacagttgactttaataccaacttataggggatccaccaacaactatatagataggagtgtctctattctttcaagtgagagtgagtcttgatctcttatctctaagctcatactttagattttagagtcaagtttagaaagaaagtgtccaagattatagtgagtgtgt

SEQ ID NO: 206335 - DNA, 960 bp, Cannabis indica
taaagcctagtctctcgggtcatcactctgaatggcagctttgaaaagttcaattgccattactttcccgccaagtgccttgtttaagctcttagacttgggcacaatcactctagctctaatgaacagagccacatggggatcatgttcatcaggcaatctttagcttctcttcattcgaggcatagtgacttcaaaattcaattgtttactactcaagaaaagtctattttggctttggagatgaactcaaggtgatttcaaaataagaaagtcactcacaaggatagtgttttggaattttgaaggtctcaattagggaataaagaattccttgggagttctagaatccttgaagcaagctcaataaagaaaaagaataagagaatttttaaaaaaaaaaaactcagcgctgaaagaaaaaaataatttttttttcttacattgatggataaagagcacttgaagaaatgatggagataaaattccaagggcgttcaggaaggcttgggtgtggagatcataatgggaagtgaaaaaaaattgattggaagctatcttatttataggtaagcttaatcccctaaccctaaagcaattgtgagtacttttaaatttaaaccttaaaagaaaaagataaatgataagaaaaagatgagaaatcttttcttttctccttttagcttttgaaattcctatgagaataggaagaggggttctaaatttaaaatgtaacaataattcctaatgttattaagattaagctaaagttatagtttaaaataaaaaaaaataaataaataaatgataagctcttcttcttttttactctaaattttgaatggaatttcaacaaggaataggatttcaatccaattaatcctaatgccataagaaatacatgaaaattttaagtttttaaagaaaaagataaaagataagtgaaaaataattttttct

SEQ ID NO: 206336 - DNA, 625 bp, Cannabis indica
attaaattatactaaattagagaggtagagttttactttcgttgccaaagattctttggggtaacttggacaagatgtaggcatgaggttgttagcccaaaagttacggaagccatcatgcttaaagaagcattgagctggactaagcatagacgcactactttttgatagtgcaagcacttcgatattgattatctacatggaaggagggttacatatcctcttattttaatgtgtttgttgaagacggtaagatgttgtttacaaagtgtaccttgtgtgtttttactttttatattaaacagtttgctaatggagttaaaaagtggcgacaaaagtattttatcttacgattttgttgcaatcgtatatttttttggccatcaagtattaactcagaaatacgtggcgatatattattagattacgtattaaataagctaaaaaaatatatagccacatgtttctgagttaaacacttaacgaacttaattgtcacttaacagctaaaaaaatacgactataacaaaattttaaaataaaatatttttgacgctacttgatgggagtcatttgtgtaacgattacaaatgtcgagagacttttgccccaaatattccaattt

SEQ ID NO: 206337 - DNA, 1198 bp, Cannabis indica
ttttttttatttaagcccctagactaggtgggtcgtaggcacaggttcagcccgtacctcagcctaggatcaacttaataatattcattataatctctatatgttaaaacaaaaataagtacatcttttttaaagggttattacactggaaaaatcactcaaaaatatagtgatattcattaaagatataaaacattattaatatttagttattaactatcgttaagtggtgtatatttatagactctagtggcaattggtgaagtatcgaaggagataatgggagggagtgatgcattttttccaataaatccattggattatgctagatttctggtgatttcattaggaacggggtcaccaaaaattgaaaagaaatatagtgccctagaagctggtaaatggggtttattgaattggttaacgagtggcggttcgaccccaattattgatgtattttctcatgcaagtgctgacatggttgatcttcatctttctgtcgtttttcaagcattgaactcaaacaaacactaccttcgcatccaggtatgtaattcaccacaggtgcctaatagcaatgctcattaagagcattgctattaggcaccagtggtgccgaacaccctcctatgtgttaatatcgttattataggatgatactctaacaggtgacattaataatatttgacgagaattaatgcacattaatatatatttttattataggatgatactctgacgggtgacatgtcatcagtagatatagctacaaaaaataatttggaagatcttgtcaaagttggagatgaattgttgaaaaagccagtttctagggtaaatttagagactggtcgttgctttgaggtttctgatagtaaccatgagactaatcaagacgctcttatcaggtttaattatataattacatttttttatgtttattaattaaacttctaataattaatatatgtaagatatttgtagtggtggagccaggcaacttttattgaaaaagaattacaaattttatgagaataaaaataaagaatatgtggaaacaaaaacaaaatatatatatataaattttatgagaacaaatataaaaataagtaaagatatagataaaaagaattatttttatgtggtcaaaatgtaattaaatattcaaaaatttatatataataatttaaaaaaaaaa

SEQ ID NO: 206338 - DNA, 1558 bp, Cannabis indica
aagttttggaggtaactaaaatgtatctcaaacacaaattatataatatataattgattttatgaaaaaagtaacttattagttttttattagtatcataagtaaccaaaaagttacttttcaaagacagaaaaataagaaaaaaagtagaatttcgaaattatttacatttgaggcatattagtttgtaattaaggcaaattttaatgatgtggcaaggtattattgtaaatgagattcattaaggtatttttgtaattattttataatttatgtatagttttgaaaaaatcccttaatttatttattatcattttatgagaactttatgaagtcataattttattttagttaaccaaaaagttgatgaacatacattatgatttatgaactaagtacgatgggcctagtctaggagattgattggggttgtgatggtagaactttacatttcttaccataattgctacaacatttaagagatccaagccaacaatgccatcggtcaccgacaccatgtcggtgcttaactaggattcgatatatgggtaaagtgctccagcaaaaaaagatatatgggtaaagtgcttctttattattaactaatttaagtgaaatctaaaccaaatattctctttttatattcttattttttgaataactctttttatattcttattaatattatacactatgcaaaaaaaaaaaaaaaaactgctccaattttaaagttcttgaaaattggtttcacagctgaaacgcttctctatttttgtttgaatgtcctcattgataatgcattagaatttaatacatatataatgatcattgactattctaattaattttgaaataaaacttatacatcttaccatatacctcactttaaagaaaactctaacttatcgttcttccctcttaatatatttttttagtgacatattatgatatgttaaatattttctgattataaccacttcaggctagctcaagtggccataggtgagtgtgtgagtattggtggtcctgaaaaacatgttgtactatataaacgcttaaataaaaaaaaaatatatattttctgattattaataaaacaaatattatatatatatatatataaattttagaattattactgatttattttgtgctcatcaataagttgtgataaaaatttctcaaactattcacattatagaaagtataattttattgagcattgctacagaataatagtattagtgatatctaagcacctctaaatatgtcactttgcaattggctactgatatttcttaaaaattattatattaaactatataccacccgatacttaattaaattaatagagatattaatacttaagagagcaccacaaatttcttttaatatttcttaattatattggtttatgtatctaacaaaataatgatataatattttgagagtgatgtggcaatactattcaaaataattattattatttctccctttaattgtgattaatatccattggtactcttttttattgcaaaatcaaaaaaataaaaataaa

SEQ ID NO: 206339 - DNA, 673 bp, Cannabis indica
actgtctttttcatattttttcccacgaataattttttttgaaaaaaaattatatttatgtagactctgcataaagaaccgttaaaataaaattctttataggtccaattttaatttaagaaaatttacacaatacactaacaattagattttttttacatttctacatattcttttgtttttgtttttgttttttgttttttttttacaatttgtggatttttgtttttttattaagttttttttttatttttttaaagaaaagacgttattttcacgttactctcccgtagcaataacgtgaaaacaatagaaaaacactctatatttttgtgaaaacaaaattaaaatcttgaacaaatataaaaaaaaaactggaaatcagtaaaaatgtattttttttttttgtaattattttatggatatgtgaaataatctctttaatttttctcctaaaatccccaaatacttaggtcaggccctgcttgcccctagtgttgtgagtgctattgtatgggcagatacacctccttagtaagagcactcacaacaacttttttaagatagaaaagctataaaaaaattaaagaatgtattaaaaacaagttacaacaaatgctctaaactccttcattttaaagtttctttaaaatacactattcatgctttacat

SEQ ID NO: 206340 - DNA, 1564 bp, Cannabis indica
caaagaaagtagaaattagattaaaaaggaattggaggaattaggaatagagtcattgtttattttttcaactagagttttttgaacgtccaagaatgcttctttttcttttcccacaatgtatgtattttattgctatcggtactctttcaagggcacctataatataggtaatcactcccacgggtatcactctttcaagtaattttgtcatattttttatgtcaaaaataaaatgtattatgatatgttgacaactttgtttaatatactaccaaagtttaatgtcgttgttgtgaaaattatgtacgcaagtatatgtagttacacaagtaataaagtgataagtaagatcgtttttgcatggattgcaaacaaaatacgatgtaaaaccaactaattataaattaaagcaaaaagaaaaaattatgataatggttgagcaatgattcaaaattaaaataactgtaattaaacctgctaaaaattaatgctattgttgctagaaaattattttcaagaaatgtaatatggtaaaaagtggcttgaataactaatctcccttagttaggtttttctaccaattgttacagcatcggttcagcattactccagcattcttgcataaagataatagaaatttttctaagcttatgagaatttgccaaaactcacaatttaaggtctaccacttagctcaatatattcatatatcaaaccagtaagtagaacactatttaaatatcaattcttaagttatgtaaggtttatgaaataatcttattccacttacaatgaaaaattaaaatttaggatttctcttgctccatccaagtttaactactagatttagccctttcggaacaagatttagcttaacaaattgttactcatggctaagaaataacaaccaaataaaaatgacaagctcacttgaatgaacaaagacaaagatgctaaaataagcttaaaaattaatcatacccaacatagaagtttatagccattcaattctcaaaaagtctaacttatatttaaacaagaaaataaaatctaaagtaaaaagtatttctccatggttgctgccctttggttatagttcacaaagtttttaatatctaagtaaaagaaacaagaaagaaaaataataagggaaggtaaaagaaaatcaaacacaaaagcttgtgtccttctctcttggcactttggtccccctctgccgtactttgcttttgcaattaatttttctttcaaaaatggcagctgcatcatgttgaagaagaaggtgtacttggtctcctctttttggttgttgggtaaataggatacaaaataatatcctaaaaatagaagtccaatcccttttccaccttggcccactaggtttagtttttttccttcacaacagccagctggcttaatttttaatgactgacacgctcatgctaatgtggacaaacaaaattcgttcttctaactctctcctcttcactgccagaatgctgaattcgttgtagcattgcttcagcaatttagtccattttcagcttttgttcccacttca

SEQ ID NO: 206341 - DNA, 717 bp, Cannabis indica
gtgcacgagtaaaggttccaacatctgtaggattttcctagttgtttccattgacatactccactgaaggatcatcattagaatcttcttcgtctagatcttcgaattaatattgaaggtgagtcatcatacttcaatctttttggaaaacttctcctggcgggccaatttctcctaggtctcctgttgctctctagacactcaaacaacctcaaggtatttctcataatagtgcacatccttgtaatacccatctttaacatactttccatcatcatcttccccctcttcttcatcgtactagctatcgttgacatgcttatggtgttttctggaatcaccttctcgattctaagcttctgatgcatcctctcccctcgcattgcttagctgagcttgttctggagaatgagggtttacatcctccatgacaatgtcaagactgccttggggggtctttttggtaaatgccttttgagtaaacactattgttacaatagtaatggtggttcagatctttcttcagtactcaatgaaagcacaaaaatatttatcaagatttttcaaaaactaatataataaaaggttaagaaataataaataacttaataaagaagatggagatgttaggtgttaacgaggcctagtacatgagttagcctattagcctcaaaggatgttattgatgtttttatagtgtttatgcaagaaccctaa

SEQ ID NO: 206342 - DNA, 657 bp, Cannabis indica
tattccaatagtagtatggtgttttatgtcgtgggacaatccacaactacgaaggtgtagtgtttaaaggcgcaaacatttttttttctcctttgagtgtgactgggagcagaattttcccatcggcataagagcatccccattaaagccttgcagttgaaagggataaggtcacaagtcagcctttgtgagcctaatcacttggaatgtaaatttgaacaaaatgttcactgagctccaattgtctaccaggactctgaaaactctcttgttagcaattttgacttcaattattaaagggtattatggggaaaatgtacatgtttggtatcgtactccgtgaacgtaatgggcaagctcatagttcgaggacattgggatggtgattgtacaattgcacatgtttccctttctccatctaattccctcaagtaccatttctggaaatttctagtgcttcttgtaaggtgtggtcttcccaaaatcatggccacatcacatgtccatctactagtggcgaaactagacctggagggtatgggttccctggtctcggagagagtactactactgcagcctgagctagcaaagcaggtagggctggaagttgtgatccaagagcttaagggtgacttactccttgcaaagagtttatgg

SEQ ID NO: 206343 - DNA, 2023 bp, Cannabis indica
tataatagtgaggatgaagtaatattaaataatttgtaagaatttaaagtttgtacctaagtaaaaatagtactttgaacaacattaaaacctttgacattgtacaaagtgtaggacttttcagagtgtctgaacttaagtggaatttagttgggaggaatgaaaacataggaatagtaatagaaatagaaataggaatgagaataggaatatgaatgaaatggaataaaatttaaaatgtataaaaaattgataataaaattattaaattttttctcatgttacattggaattttctttccttccattttaaaatgtaatagtcattctactaaaatggtagaaaggacattttattggaatgacattccaatactttaaaatcctgccaaacaaaggaaaagaatgacaattgtttcctttctattccattctgtctcattattaccttcaaccaaacgccaccttaggaactaaaatcttgcatatattaaaaaagctaataactgctactattcatgaaaaggtcaatcaaaacgattagtctaatgagattgcacctttagttcttttcctgcacttatatatattaataaaattctacagatatttagaggggtgttcatccaatccaatccgtactattttgctcctagtgcattcgacccgcattaagtgtggatttcattttttgaatccaatccgcacaatagctaaaatccaatccaatttaatccacaaaagtacggattagatcggttattttagattggttactttttaatattaaattatttattatttatgaaaaaatatatttttttacataaatagcaacaaaataaaataaattatagttattttatgttttaaacaacacatcaaaacaaataaaatagtaaataataaaagaaaaaaaaattagtatgtataaagaaatgtttaattttattttaaattgtaaataaaaattatatataagaataatatatacatttaatttattaagttttgaaatataattatattatatgtattatgcttttaaattactattttctttacattaatgttatttgtatatataatttttttaaattttttttaaatatgtgtggattggattggatcggttacttttacatgtcaatcgacatctaatattttaaatttttctttgaagaattttgaatttttcaatctaatttaatccgcacaagtgcggatgtccgcactttgtggattggattagattgaattgaatcgtacaaattgaattatattggctattttatgaacacctctaaaaaccaataactattactattcatgaaaaggtcaaccaaaacgattcatttaatgagattgcagtttttatttttttcatgcacttatatatatttgaataaaatattaaaaaaattattcaacaataagaaatttattatcacacttcctataataccgcatctcatccatttcacattttatcaatattttctccttttctactttttatttatttataaatcttcgttgttgaagaaatcaacatattaacttatatatatatagttttttttttatggattttgcaatttaataatgagagaccataataaatttctttaaataaaaataatcttatcgatcaaagtaaatttataaataattaaaaaaaattgactaccaaacttatagtagaaacaaaattacttgttactaaaaagcaatatttaaatacaaattatcattaatttagttttactcacaatataatatcaataaattataatttttgttactaataactttagtcagagatttttcaaagataagaacatcaacaatggaagcaatctttagtgttacttaagtcgacttatagttagctcttacccaattaatttttctttctttttatagaaagcaaagaaaaaagcagagcatcgtagctatacaacgactcaactactacgttaactttacaaatctctctacctctctcctccacctccacctc

SEQ ID NO: 206344 - DNA, 2245 bp, Cannabis indica
gggacaagactactataccctttaatttggtctttggtaaggaagaccatatcttatataatgctccaccttaggtattttagataaaaaggatattaccctaataacagggacccccatttaatctttaattgatcatcactcgaataatctttttaatttcttttccccagaattagaaatattataggcattttctcctctttatagaaagagaccacctcttataccaccactatcaacagtactactactactactacttatatacatatataaatcataaaaaatcaaacaaatataaaagcatgcactacaactactactctcatcaactcgatcaactattacaaacagtgtatataattactatattataattgaaaaaaaaaaatatcatgagactcaaacttacataattgtataatgtgacatatatcttaattaatcaaactgtaaatatttattctttacaatacattttatttaaataaaagtcacggacttaatatatattatatatattggtacatataccctacatatataactatgcatgggaacaacgaatatgctatctccaacaacaaaatttaatatgatcactacacttaatatatattatatatattggtacatataccctatatactggtgctttgtcattttgattttcaagtgtgtaaaataattcgagaatgtgaatcttcaaatatttttttttctttttttaacaaaaaaaaattataattgagttaaaatggaatattctacgccaataaaaataagaaaatcagtcaagctagcataatattctaagatatttataccatctctttccaaaaaaaaaatctagaagttatatattaatttagtgcacattaatcaaaaacacaataatgaaatttatatataataataataataattgtacgtgtaaatgttttttagtttttacacatacttgacatattattatgatgtccaacattagatagaatttaaaatgtactaaaaaaaattacaatttttagtcacaataaattttgtatctaaaaattaaaaaaagtgtgactaaggaaaaaaatattgtacgtagattaattataactaaaaatcatttttaattaaaagtataaataaccaaaaaaaaaaaagttacaaaaattactaaaaattataatttgttgtaattaattaaatatatatgtgtatttgtaatggtatacacctataacaatagggtttcactaaactataccagccaaaaaaaaattaaattttatattttaaccgaaacaattttatgttgtgattatatatatacaagtgattttttattttacaattttttttttgttaattttgtttatcaggaaaataattttatgtcacgcaccaataataatttatagtatgcatgatcaaatgtcatttattgtaattttaataaatattaatgattggataccataaatatataccacgaatcaatatttttggttaaaaagttatgtgtcatactgtgttaaattaatttaagtttcacatatcaactaattttttattagcattgctattagtcatcagtagtgcctagcacctttacgacatctcgcattgcgattggctagcgatactccctaaaagctattatattaaattatatgatactcgatacttaattggaccaatagcgatattgatacataggtaaggggaactttaacaatttctctttattttattatctccaaccaaacacaattaaagttttttgtttgtttaatttatggaatgatgagttggtcatagcaggtcaagaataaattagctagcaatgagtctttttcaaagtaagtatatggcaagactaagaacttataagaagagagacggtagtaattaatggtgttttgacaatcatgcaacgacagttccagccactactttgaatccatgaattaaaatcaaagcccatatatatataaagatatatatctatatatatttttatgggatatttgtagtgaaatccttttaatatttataattgttaaaaaaaagtgataataaaagtatccttattttatgattttgttgcagtcgtatctttttttagtcatcaagcatcaactcaaaaatacttgatgatatattattagactatgtattaaatatgttaaagaaatatgtcattacgtgtttctgataacgtatttctgagctgacacttaacattttt

SEQ ID NO: 206345 - DNA, 1532 bp, Cannabis indica
aagggggctcagatccaatggaatacgatccaaagtacaccgaatacacaagtttgatagatactctgaagaatgtttataaagcaacatgtaatatggtccattatcggaagcccccgcgcacgtcaatggggagaggatcaggcgggatcaaaacaagcaatgttaatcatggagaaaagggccacaccacaattgaatgtgagtatttgaaagatgagattgaaatgttggtccgagcagggaatttgggacagtgggtctacatcctgattatttatcccgaacaaggggtagtccaagggcacatgatgcttcccgaacaacagggtaccataaatccccagcaaggggtagtgcaccctcaagctcctggaacatcattacctactcttcctgctttgctggctccagttggggtggcactgcttgctctaggaccgggaactccatatcctcctgggattgctcggccacccgtaggcagacatgttgcaacaattttgggtggaccctttctccctggaagtacccataatgtgcaaaagagatatctaaaagaagtggaggggggacaaatgtgtgcgctggtatagtctcccgcacagcatctgaggaggatgaatctcccaattaccttcacagaagaagatgctaagaatgtgcatatccctcacaatgaccctttggtaattaatgcacagatttccagtaagcgagtttctagggtcttgatcaataacggaagttctgtcaacattttattcaagttcacattccaaatgattggactaattaaagcggatttaactccatgccctgtccaattgcaaggcattaacagcgatgctttgatgcccgtgggtaaaatcaagttgtcgatcaccctcaagggggataatgaggcgagggcattcaaacattcgaccttcgtggtagttaactaccctactagcttataatgttatactgagtcggccgactctagtggacttcggtgcagtaacttctattcgacacttgtgtctgaagttcccatgtgataatggatgtatttgcaccattaaaggagatcagcggagcgcaataaactgttataatgtatctactcaaattgtgtttatggttagggaagaagcgctcaaggaactcgaactagaggacctgatggacacagatggagttctggagggatacgaggatgagttagatccaagagtcagactagaaagaaatttggagccaatggaagagatagaggaagtgagcatcagcaaggaagatctcaccagaactatcaaggtgggaaaaaacctcccttcagctgtaagagaagatgttattaatacggttagagaaaacctaagatgtattgacttggagtcatttgagacatgaccgggattgaccggtaataccatttgtcatgcttttaaatatccgggaggatgcaactctagtctgttagaaaagaagacctctagatcccattaaagccgatgcggtgaaagtcggtaagtttgacaagcttg

SEQ ID NO: 206346 - DNA, 563 bp, Cannabis indica
tctccaccctaacctatcttcctagccacaccatcaccctagaactaacctaaaatcacagaaaaaaaaccaccataaatcacaacagccaccaccaccttaacctatgccaaaagttataaataaaatctaaatcacaatcaacatcaccattatcccctcagatctcaaagagaaaactaataaaatgttgaaggggaggcatgtggtggcctttattttggccaatcgccaccgaaagtggcccatcgacgtcgagccgagagtagcatgggtgagaaagatagattgaaggagagagagaagaagggggatcgaagttagggttttctgggttgtggggttcagtttcgtggctggtcgtgcttatactctggcgccacacacaagaaagaaagagttagaattgggagagagaaagagtgtgaagaggggggatcaggttggtttttttgacttgtgtggttcagttttgtggcccgcctagcttagggtggtcggagaatccctgggttgttggtcgtgcttactctggcgccgcatagaagaagaagaagaagaag

SEQ ID NO: 206347 - DNA, 1215 bp, Cannabis indica
gtcttatttttctttttattcctttttttttttttacattatataaaaaaaaaaaagtggtgtggaaatcacaagatgcagcagcatatatactagggccaccaccaatacattgtataatttttataaaactaatatgagagacttaatagtacactagacataaagtgtaatagaagcttgttagacttggaccaaaaattggtatattttttaatttaatttttgactgacacccttttaaccttatcagcttttgagtcttactatataacaaattcaagtcttcattattcgttttgattgaagctttcttctgtaaggcttttcttttaattaattaccatgtttttttatttttcaatatcaaatgttatttggttggtatatcaaaaaataaaaataaaaataaaaataaataacatacacaaactgtcggtagattgaaatgctcaaacaggattcttccactgttttcatgttataaaaacaaataataaaatgacaaaagctttcttgttttttttatccatgaaaaaaataataataaaaaaaaagagactcattgtcagaaacaataaatatataaatatatatatttttttaacattaacattcgaagagctataaagatggtctgatctcatcttctcttgtagtccctgtcgtaaagcttggattttgttattataattttagttttatatatgataatgtatttcaatcattttaatattaatatttttagaaaaatttaattgacttaatacaatacgagttctaggtttttttttttttttatcagtttaaattttttattcttatcaccaacaaattcaagaccatccacaacaatttgaattttttttgaatttattgtttaattaaatttgagctgacgttatactgttttttttcaccaatttacgaaataaagaatattatttgtaattgtcaaatgtaaattaaatattaaagaactcaaaataacatatttaatttcaaattaaaaaatattatgattttaagagtgccacaaagacataagaatatgaattaagaattggacggagaatagaaatagaaaagtgaaattcaataataattttttaaaaaataatatttcaatgcattaaaatgcaattaaataaattatttcaaaaaaaaaatgcaatcaaattaataaattaaatgaaagttgatttttttttctat

SEQ ID NO: 206348 - DNA, 645 bp, Cannabis indica
ttggataccaatatgccactgccaagatttgtatttgatttaagaaagaagcctattaatataatttttaaaaaattaaattagagacaaatttagttgctagttgaatatgtataatatatatatatatatatatatatatatcaaacatacacagcaatataacatcttattagcaaataaattaatttttagtttcatacgtttatggagtatgaattattcatgtttactaatgagaatgaaatttgagtataattattcatgtttgcataccgaataactttagaataattatgctaaacaatatataaggtaataagtacatgaatatatatacttaaatctcattcctatagttataaaacacgaatagtcatatatactccaattaaaattaaatttgattgtaatcattctaattatgtgtaagtaaattaacacactattaaaattgtctttgagctttcatgaaagtgatagatgatgataaacccattgtcaattacatcgatcattgaatacccattgtcaattattatatattatttgatttcttaaactgaaagaagtgttttttgagagagagagagagagagagagagagagagagagagagagagagagagagagagagagagagag

SEQ ID NO: 206349 - DNA, 1241 bp, Cannabis indica
ataattaaatcccttaaatatagaactaatatcttgacagaatatccctatcttcatgggctgttggacctgtcctgtaattgtaggtcagcttgtttggatttgtcttcatgttctggctggccagccttgctaagggctatccagcctagccgactagccttgctggggctatctagcttagtcggccaagactttactggtaggtatgtggatttgtgtttgctagtgtccaatgtgtaaccatgggatcttgtaggttgaaaattgaacacactaacttggcaggttgaaggatgtaggcagtaacttggcaagttgaaaggctataagtactaacctggcaggtggaaggctatccacactaacctagctggttgaaggctgcacgcactaacttggcaggttgaagggctgcaggcactaacctggcaggttgaagggatggaggcactaacatgacaagttaaaggctatatgtgctaatttggtaggttgaagggctgtaggcactaacccggcacgttgaaaggctgtaggcaatgacctggcaggttgaacgctatacacactaacctgacaagttagtgatgagctattctccacgtctcttaccttttgagtatgtggacatgccacatcagctagaaaaaatttgagataacactttgagtaaaataaataattaaatgaagttaaatacatatatgtagaaaatgtccgatgttatggaaataacattaattgactaacagagttttatcgagttgtttagaaatcaatattatagaaaaattatagagctaaaaatataaatataaggaatttttaatgtggctcaagtgttaacaaatcttagtccatgagtcaatagtattaataattatatttttgtacactttttggtagagtttcgctctataaaatctaaatcgtaaaactcttaaatggtaaagatgaagccttatttataggctgtcatgcatcatggaccaggttgacccagactcgagaggttaatgtataataaaatcccactgatgggcaatttacaagagatgtattgaaatgagttttttccttgaggtaaaggcccaatgccaaaagtgggtggtgagacacactgttcgatcatactattgatggtgactgaccacacttgggctaccacttggcgcttggggaactgaagatgtcagagtagtgcttgttgtaatccctatattgatcccatctttttt

SEQ ID NO: 206350 - DNA, 614 bp, Cannabis indica
gcgacccacgaacccggccaacccaacctttcacaggacaggtccgggtacaatttttttaaatccaaaactcgataaattgattggatgttcagctttacttgtactattattgttaacttttttatttacttttgtattattattattattttatattttttaataaattattaaataaacattaaatgacatattaaatttgatattaaaatttataattatacaatggaacacaataataaaaattgatttaaaaatatcacaaaattacttttttttaacttagaaatagcacattggtaataaatctagattggaatgtcattattattgtataacagtaaatgaaatatatacaaagaagtgtaaatgtatatttaaatagaattttttctttccaaaatatactactttcaaaatagtgttctatgttttgtcgtagttaaatactctcaaactactctaattacggctactatctacctaaatatttagatgtatgtgtttaaagtagttgtgataagtttctaaagccaaaaaaaaaaaaaaagttgtaataattagaaggcacaaattttataataattaattcaggaataccactacaaaat

SEQ ID NO: 206351 - DNA, 855 bp, Cannabis indica
tttgacgaggtaaggtgttgttgtgtacatattatttaatcatattggttttgtttgtcctcgatttcaaatggatcctccttttctttttccttacacagaaaggtccatagttaatttgctttatactaatattcatcttgcaatttctgattatgatacaggtggatccaccaaaaccagcaagaagtggatccggagccatgaggaaggtatgtatttatcttcatgaaaggatactatagacctaattggtataactaataccacttcttatagttttatgctttggatgtctattgttagccagtgaaatataccagcgctgcacataaacaccaaataacaacaaaaacaataataataataaacaccttgctctcatggcattattgaagaaacaacacaaatccaattgttcaaaacattacgcttttttatttatttatttcttatgaaattgtttttcgcagacttatataatcatgcttcatccatttattctgtaactcaattatgcagatgttgatgactccaaaagatcttagttttgttggatatacatacaagaattttgaggccgtcaaagggttacatcattctcctggtacgagatttttatcctcatcccagtatggcttttactttctattgcttggttcttgtgcattataaccccctaaatggccgcgaaatgtagctcccttcatagaaaatttcctactcatacaaatcttaaacatcagcctctttgctctgcagagaggatggccacaatttatagcttgctttcacttaaaaagtaaatagtcatgaaaaggaaatataatgatatgcctatttatttttctttgg

SEQ ID NO: 206352 - DNA, 942 bp, Cannabis indica
attcaagatgatggaggacaagtctattggagaacatattgaggggattaacatgttgattctcaatcttgagaacattggtgtaaccattgaagaagaagatcaagctttgttattactttagttctttatcgaagtcttttacacagtttaaagatacaatattgtatggaagagagtcaatcacacttgatgatgtgcaatccaatttgaattcgaaagagctcaattaaaggagtgagtcaaagaattttgaaaatggtgatggattatttaccaggagcagaagtgagaagagataaagtaacagaggttcaaaagaaaaatcaagatctaaatcgcaacttgatagccaaaaaaatgttcgatgctggatttgcaggaaaatgggtcatgtcaaaaagatgtgtctagaaaggctgaagttagatgattcaagatctaaaggagatgcaccagtgataagtgacggttatgattcagctggttctttgctggtaacctttaagaattcatattctatatgagtctttctaagagtctctttcttgtctttttcagactttgattcagaagagacttctcacccaacatagcctgatacaacccttggtgaaccaacaaagcattaatcttcatcctccataatccatattcattcgtaccagtaaactttttgacaccgtattttacagcaaccatcattacaaaccttgctctgatactagtttgttgtacaaaacagaaacaatcaatgacttacgattcaatatactgatccaacaaatacgcaacacaattaaaaataatataccaagagatcacaagaaccaagtaatgaataaaagtagtaaaacagagaagattaacaccatgtttaaagagtttgagccttgtgtaatgctctacgtctcggttagaatagcaacaaccatatcttta

SEQ ID NO: 206353 - DNA, 2055 bp, Cannabis indica
taaagtcctaaatttaggaatttttcgtccctagtaactttttagatggttaggattttaaggattttaggcctaaatttttgtaaaaagtctaacatagatgaaaattcaggaggcttgatttagtatatttaaagttcgagagacatgatttgatatatatcaaagtctggggaacatagtttagtacataaacaatcactcaaatagtcaaattgaatgaaattagatagacttcattttttcataaaaatttataagtttttatatatatttttacaaaaattacatgaaaataatatcaaaataatataaaaaataatatgcaaataataaaaagttaacaataataaaaatattaacatgaaaatatatccaaaaactgtattttatttaaataaaatcttaaaatagtaaaaatatttaaaatttttgtacagtagtatttttataatttttttttgaaataatgccgaatagaaatggatgattagtccaataatacttcatgggcttccagcccaatctagcttcccggcccaaatataagtaccaccctcattattgggcttcagctagcccactgaaagcaggcccatttttaaaagttaaaggccacaattgggaaggaaagccatgattgattcataaggctggtttggccaatggccacataacaaatgctcattttctaccctcctttgtttttcttatatccttatagtcacttactcatatatgttttctccactaaaaataaatatatatttttcgaaaaaaacaaatatatatgtgcacttacaaattatattcaaaataatatttttgagaagaataaataataatgggtctcaattaataaatataattaacattgtggttttatataatattttagtatagtgagttgttatggtattggttggtataaatatgaatatgaatggatgagagagttgtttgttgaaagataagatgtgattaattaatgatatgtatgtgcattgcatggtcaccacttctcacatgctactcatcccaattatttattcctatatatatgttcataattgctttataataatacacaataataaattatataactagatatacatggaagaaaaaaaaaaaaaagtgagagattagaattgtattgagctttaatataatgatatagagttgaggttgtattgtgcgttgtttggcattttgtactaagaattaagatagattatagattaatataagagatatttgaggtgagacctaccatgtcggccaattgtattaataatttatttatttatttatttatttgtatagagattagtaggagacgtattctacactcttattttcaaatttcaacctccactagtagtgaaactcatgtggggtaatagaagaaaaaaaacataagtgaaactcatgtgcatacaaatttcaacctccactcttatttatttatttatttatatatagattaatttgtggtgaaaatatttaagtttacaattaataatttatgtggaataattatttttagtaaaagttttccactttcatgttcaaagattatatatatatatatatatatatttacagtatgtagttatgaaaacaataaaaaaaaccacatcaaaataatagaattacaacatcaaaacaacataagaaaataatatataaattacaaaaaaattaacaacaaaataacaagagttcaatataaaaatacataaaaagaccgtaatttatgtaaataaaatcttaaaaaccgttaaaatatttaaaattccattcaactgtatttttattctttttgtgtaatttgaaaatatttattttttaaaaacaataaaaaaaatatatatgcatttaaaagaaatggaccctaaatgtggggttagtcagctttagtccaatattgcctaagactgtcaataaattataagatttttataaaatttctaatttttttattatgggctggaatttttttaaaaaataatatgtttttttaaaatattagtatgtactgtgttaagtttt

SEQ ID NO: 206354 - DNA, 467 bp, Cannabis indica
ttactaatgatatcatagtttttagaattttgtggtacaaatttagattatgggagttaattacaaacaaagtaaaactattgaaagtttttacacaatttactcatattaatatacttaataacttccaacaaacaaaacaatcaatgtgttctctacattctacgtatgttatatgtatttatgtaccaacaaaaaaaaactcttataattaatgacattatgatctaatatataattagtactaatgattaagtttcattataattgaacattattaattatattagagtttgttacgggtatatattaaactacttagcacttttatgatattttatgattagttaaattaaaataaatgaaagtcgatattaaattacactataataataataacaaaattatacctcataaaaagtactagataccataactcttctttaacatttctcattatattatat

SEQ ID NO: 206355 - DNA, 2070 bp, Cannabis indica
cggttagtgatcttgtttttatattcaattctattgcagtcgtatgtttttcaagtgttaaaaattttcaatattcacctttcttgtcttgtgtttgtttttttcctctagtctctcattgaccttttatgttgttctatcttttgctatcgagctacaaagtttcttagtagatgtcactcaaacccactgaacatatagacgtttagattaaaaaaaattactgataaagctatagaaatctcctcgtggaataaagttgttctttcggcactctggaaaatttaaattttcagagagcagcctagtccttgctccaaatatgctgcgatgaagatttgaggctgttgtaactttctacttgtttatgtacactatatttacatatggatttgatcgaattaaaggacttaagaggctagtggcttatgctcgaagcagtgcaaacttgttgacaaagcttgcattggagaatcatagtgattctttgagatgggaggtgagtattaatgcctttgtcaaagtgctgttggcctacatgtttttgttattaatattgctatattgtaaataattctcactctggaacttttcatgtacagtgtcttttccgaactcctttgaacaactttgacgcagtggttctcctccatagagataaattaccacacccccaacgtcttctcttcccctctgaattaaagcagggtatattatagacgtaccgccatgcctgaattggcatggctacccaaattttctgctgtccccctttttggggaaccatttcttatttcagatattctaaactcaatacacatttgttggccaggattgtatgtggcacgggggagtcctagcaagatttttcatcccttcctcttgcatgaagaattgaaaggaagtgcagaggaactaagaaataagctgctggtagactttgatccattgaagtgctttcttggggatatagaggtaaagcactcattaccaccgagtgcattggtattttaacttgttgtcgacctatttacaatgtgtttttcttgtatatatgtaggaggaattcccaagtacgttcaagatatggtatgattctcttgggggtgatgctgttggcttaacatgggggataaatagttcaaaggttcagtacctatacattttagaactgagatgtactttttatcgttttacgcccttgcaaattagttttcctatcaacaaatcttaatcaacttaaatcttattctagaaacgtgggctggaaggcgcaaatgaggaagaaccaaatcctactaagttactgaaaggtgttggtgaagctggaaaagggtttgtgaggagtattcatcttctcaaagcccctagatcaacgacttaatattttctttttcctttcagcaccaatctccaagggtttcaaattccaattcatttttgctttcttattcattgttgtacttgcttatagttaacttaattaatttttttttcccatgctattttatttctgaaaaatgcttagatgatgatgctcagtgtacatattagagaagagttcctgcaatgcagattttgcctctgtatcttgttcgttcctgtacacaaaagtggtggcatgttaaatcccaaatgtatcaaagtcaagacttagtaggcccaaatgtattgccgatctttaagattaatctcatttgtaggccttatgaagaacaaattatctattactgttaaggttttggaagtgtatggttgagaaagtagaatatggcgtgtatggtataatgcatgattaatcatcataaatttttttggcaatgagagtaattatatatggtattatcttttcacaaattaagaatgtggattttctaacatcctcttagaatggtggttatttttttatcactaattttagatagctctcacaagggcagcacttttggttcgttatcttcgattgattattggatttagattggatgttctgtttagttttgatattatgttagaatttgaaagtgtatgattgaaaaagttacataaggtgagtgtatagtaagatgt

SEQ ID NO: 206356 - DNA, 1340 bp, Cannabis indica
tcaaatctggtaattgcagagttttaatcgttctacttcttcttcttcttccggttagtttttcttcttcttcttcttcctttattttatttaattttgtttattttctatcttggagatttggcaaatattgaataattattttttattttgaagaaattaaattaattatatttttatttttgtaacaattaaatgaaatttagaatatctcaaaaaaaaaaaaatgaaatttagaagcttttttggtttagtcaggtattacttttggtttagccaggtattactgtctttgtagaagagttttctaaaatttgcaaacttttaatagaaattaaccaagaaaaattagtagtttgtgagaccaataagtgcgaagcgagtttccaaaagttaaagtagcgactaattatagttctatttttgattttatgatcaaatcggaaaaatgtttgtgtgctatgatggctatgcttattgtgatgcctctaaacaagatccgaagtgtgctctgatataagttgtcaagatcattgcttatgtttctaattacatgaaaaagtatgagcaatgctacctaactcatgatttaggaattgtcgcaaaggtgtttgcatttattatatggcagcattatttccacgaaaggaaacacaaagtctacactgaccacaagagtcttaaatatttttttactaaaaaagattttgaatatgaggcgaagatggtgattggaattagttaaaaaaaattgattgtgagattctctatcatcctggaaaagctaatgtagtaccagatgctttaagtaagaaaggtctcaggcaagttttcaacatgaagatgattttttctcagctatcatccaaaatggttagggctggtattgagtttgtgtttggcaaacttagcgatttgacactttagtataatctattggaaaggattagtaatggtaaatactattttgaaccatgtattttgtaaaagttatcaattggaccatctgttttgttaaatgataattcagaccctttattttttaaattgttacaaaataaaccttaagcttaataataaccaacctgaagtgttatgacaagaatgattatatttttcgcaatcgttcacgctagaaactagtttcaggttagttatattaagaaaaaaaatgacgaaaattgaattcagggtctattttgtacttattatgaaaaatacagggtctaaattatcatttaacaaaatagaaggtctaatcgtaacttttacaaaacataaatagtatttatctgattagaattgctcaaattataaatcctaagttagttaagtttcgg

SEQ ID NO: 206357 - DNA, 736 bp, Cannabis indica
agattaatagataaatatgataagatttgatttgatttgcagcatgttgaagttggagttcccagtcctaaaaagaatgaggttttaattaaatcggaagctgtagctattaatccatttgattgcagaattcagaaaggtgtagcacgccctatttttttgcctcgaaaatttcctcacattccatgtacgtgtacctactttctttatactattttatgggatatttgtgtccaaataacaaacaatttaaaagctccctctctattatttctatgaaaatcttcaagcacagcaccattaacacatcttattggttaacacacataatctagaatctttctagctggcttaaggatggggtgagtggggctgttgtctaagccccttttgtgttttaaatttcattacatgtacaatattaagtgtagctaatgatccctaaacctagcccaatacactccactaggaatactcaataggggaaagagtgtggaatatcttaaccatgagaccagcaatgatcccatttaccaagcatagagccttcaccactttggccaacaagtcatagtgttgcctaagccacttatttagccccaaaaaaacccaattttagtttttttttcactttatatcataaacaatggtgaaccgagtaccaacactcaaggccagaatatatgggtttaagacaatttaaattttttcggccctcactttcataaatatataa

SEQ ID NO: 206358 - DNA, 504 bp, Cannabis indica
gattccaacaccagccatgcttttgctttccaaggagacaaaaataagtctgataatcaaggccaaaaaccccccaaattccaagaaaggaagacccttttgcactcactgtaacatccatggtcacacaattgaaagatgttacaagatccatggatatcctccaggatataataagtctaataagcctaaaggcgctgttacaaaccaggtgcaatcaactactgacaacaatcctaagaatgaagacactcacactatactgccacaactaagtgctactcaataccaacaacttctcaatttacttgctggtcaacatggtaatatcccttcgaccgatcctagcacttctacagaaaattctggtatggttttaacctattcttcatctaaattttctaataactcatggatcatagactcgggtgccactaggcacatctgtaacaacttaaggctattccaaagtatcagtaatactacccctactagactaatctt

SEQ ID NO: 206359 - DNA, 1655 bp, Cannabis indica
agaaaaacacttaagttacttaatactatgttgatgtgttgctttttaattatttagtattttttcatattatttattaaaataaaatatgtaacacccaatattaaaatgcaactatatatatactaagagataattaataccttaacatatcctttaacaattctctttaaattcataacaacacacatgattacatatatatagcatagaagaggagaaataatcaataccaaaagtgccatacacataaattggcaccttacattattaaactcaaaatacacattcttatcagtacaattaagtaaccattttaacactaattaatacatattaatttggttgtttattattattaactttagacatcattgtaacaaactcatccatattaataaaaccatctccatcaatatcaactcccttaaccatattccggcaagccctcatgctacaaccttctccaagcttcttcaaaacataacaaacttcctcggcgcttattcggccgtcgccatcaatatcgaaaacccgaaaagcattttcgatatcctcagccttagccttagccttagccttattgctgctgccaccaccaccagatcccaggttgaataactccacaaactcctcgaaactaacggagccatctccgtccgaatcgagtgcccgaaaagagttggctatctcgaaatctgtcatttgacggtcgagaagagtgagtgctgacttgtactcttctctgctgatctttccgtctctgtttgtgtcgaatttctcgaaagcccatctcaattcatccatgttcggcacctgattatgattatagtgatgagagtgagacgacgtcgtttgttcttccttggggatactgacttggaagaacgacgtcgcccctggttatcatagtttgtaaagctcaaatgtgacattttttttttatgaattcaaatgaatggatgagatctttggtattttattacacaatataacttctctatatatagtcattttataaggagagaataatataatgcgctatatgttatataaagaaaaggatcgattattttaatttggggaagaatataaaaggatatttattataaatatcagcacaatatattaattataattttgatgaaagtcccgttttttttttttaagaaattgcagaggttgttggctttttataatatatatgtgatacataattttttaaaaaaattattaaacttattaagttatgagttttttttttcacaatatttaatttattattaataacaatgtacatattataaatttgtagacacaattatattttactaatcaaatactcagacacaaatttaacttttataaaaacaaatcgttcaagataatcatacaactttaagtacttaaatctaaaaagaaaatcaaaaacaccaaatttttaaagaaacctaacatttacgtgtgactttgcaggtaacttccatctagtttagtttaaacttaggatttttttttccataaaacttagaaaaaataaaatatataattccaatattttgcaaaataaatttgagctgaaatttttctaataaatttataaatgatcatgaatttatagcctgtatttataaatattaataatatgaaaacac

SEQ ID NO: 206360 - DNA, 888 bp, Cannabis indica
atagctgacggttttaaaccgtggcctataatatatccgacggttttaaactatcactatagtggattgccccccaaaaaaaatattttcttcactcctcgaaaccacttctcgcatatgtcgcacccgctccaaaacctttacaagctttattattttgttttatctatttttgcaagaaaacgttgacattatttaaacaagtataacaataaaaatcatgacaaaattgtagtggtgtcaattttgcaaaattaaaaatagtcaaaataatttacaaaaaatgaactgttgttctacaatcagctatgtcatataggtaaactctatatctatgtcgcgttgacttttactaatttaaatcataatataattttttttttttttgaaagaacaaaaaaaagaagaagaaaatttgagttggcacttgtgatttgtgaagagactgaagaagggtgattaaaaaggtacatgaatcatctttatccagttggaaaggtaatattgagtacaataattacataaataagtggggttaatgtggcaatcaacacaccctaagtcttaccctagtttcttctccacttaaacttatatcatattaattttttgtaatttctaaatatagataaagagtttactttcttttttttttttttttttgttaaagggataaagagtttactttgtttttgagttttggactttttttaagagtagaagaaatagcatactgattggctaaggctaaacaatattggatatggataccctttagctaattggattagtgccaaggcccatattgaagtagtccaacttcaagtgaatacccatatttcatacccaagaacaactagactctctaatatgggataaattgataac

SEQ ID NO: 206361 - DNA, 557 bp, Cannabis indica
gtaggcagtgtgctagtataataaggtacccaatagcatatgagagccgaaagctcaatgagatagaaaggcgtggtccaaaagaaagagatgacaacaatagtgcactacttgagaacatagaggcaggtcacaatttttggttcaggcagataatgtggcaatgagtgacttcctggccgagaggaaactcacgcaaaaagagggacgatgacaagtttgattgatatggtgctagagtataaacttgataggggtaatacccattaaaagtacacctattttatttttcgcatttttttctatatttttattagcttttcttttttctctaaaatctaactttaatacatagcataaaagttaattacaaaataaaaactgaaataaatatatgttaacataagttttcactttatacatgttttcggtttttttaattgttttcataaattaatgtggaaagaatgtaaaatacatttccagcccaatattttaatgtatgaacttacaaaaaataatggaatttgagtcaaattttacaaaaatactgtcac

SEQ ID NO: 206362 - DNA, 1493 bp, Cannabis indica
cccacacatagcaagttagtattcaattatagtgtgtaaaactgtgaagaatcaaacaacagaaggagaatcaggcttagatcttgataatactctgcgactgaaaggaacaaggattggagatctgagtagaaggagacatttaattccgttgcaatcaatgtatggtttcttgaactttttagaggtttaaattctattgttttagaaattcaaatttagaatgttaaacaacatacatggtactaaatctagatactggtaaaataatccacaacattcccaacgcgcgattttccaaacaagtaattatgacagctaaatatttgaaaatacatggggagatcaactatagacaggtacgaacccctagggctcaaatcacgtgggctggaacacttttcatatggctgcctaacgaaggagctgagaagttcacatacgaccatacattcctaagaggacttggggacaaatattatcctaaaaatcacccgagcaacgtggcacgagacaaggtgacacgtggcatagaaagaaaggtggtcagcacatgacggacccatgaagtaaaatgttgggcagagtcacgagaaataaagaagtacaatgtgttacatcaacaaaatcttcgaccattgaatttagctgaccagaatgaggaacttgattcatctcgagcggcagaggggctacatactggccagaacatacaacaaggattatcaaaaagacttgttccaaatccacattatcttcactattcctgaagactatgtcataatggggacctagaattgtgggattaagagaatcgtgacattgaataacataacctttaatgtgtaaatctttaattaatttaatttcttataacttgaaattctgtaaatagtagttcatttcagtgtttacgagatcgaatctaaaattgaaaagagagttattatgctgcaaaaatactagttgtaatttacaaagaaaatagagaatctcactagaccatggtcttgtgatctttatatattttagagaaatattaagtaaggggagtaggttattaccagaaatctggggctgaacttttataatctgttgtgtcgtttattgtttccttattgtcatttcgcaaacacttttattatcgtttatatgactctgcgttgttgaccaaaaatgaggtcaacacatatatataatttaaaaaatttatcaataatcgcacacgaagagcgtcatatttactaatatactgtaataaaatataatacaatattttctaaaaaaagaaatcattaatatttttatatgaatattgcaaaattttaaatgtggaaacacaattaattatatgtctaatatataattagtgtgcaaacactatttcaaacatatttttatatataaaatgtagctataacaagttttgttggtttaacaaaatattttaagaatataagaatactgtgctaaatttaatggtgttagtagga

SEQ ID NO: 206363 - DNA, 626 bp, Cannabis indica
cccttatcatccttaaaggagaaaaaatgtttgtgcctttcaagtgtttcacttttgtggtggtggattatccgacgacatacaacgcaatactaggacatccagtcttggtagattttggagcagtaacttccataggcatctatgtatgaagttttcctgtgacaatgaatgcgttggagtaagaggtgaccagaagagtgtgagaatttgttataatgtctccattcaaattgtgtttatggtctgggaagaggcacttattgcttacaaaatggagattcaagcggaagttgaagccgtctgggaggactatgaagatgaattagacccccatgtgggaactaaaataattatcaaacctatggaggatgtggaagaggtcaacatttgcgatgtagttcccaccaaaaccatcaaggtttgaagaaatctacgtccaatggtgaaagaaagcattataagtactgttaaaagatatcaagatgtcctagcatggagtcattctgacatgacagggatcaatcataataacatcttccatgctttgaacatcaatgaagatgctacaccagttttccaaaagtagagaccctgagattcggtaagggtaaaacagtaaaagc

SEQ ID NO: 206364 - DNA, 1341 bp, Cannabis indica
tgctctcattgtcacaagcctggacaccttgttgacaaatgttactttatccatggctttccccctggttatggtgacaagaataagtctgaaaagtctaaatcgactccccaggctcaccaaacaaatgctgcttcaggctccacagcccccaattcttgcactgaatctggtttgaacatttctaatccaccaccagaccttactgctcattaccagcagctcatttcatttctgagtcagcaacttcaacaacaaaactccaaatctgacaacagttctgttattgctgctacaaatcttgctggtaatccttcttcttcatctttttttttggattattgatagtggtgctactcaccacatttgctatgattcaaagaaatttgcttcttttaatagtacagttcatccaaagcatgttacattaccaaatggtagcctcattcccattataaaaactggtactgtcattataaaccagcaaataacactttacaatgttctatatgttccctcatttaagtacaatttgttttctgtccaatcctatcttgaagattacaacaacttcattttcttcactaatgcccactgttttatccaggcacccctagtgacttcgaaggttgggatggctagcaagattggaaaactctatattctcaagcagtctccaatctctactgctacaactcctttaccattcaataattgtactgttaatagtgtaattccaaagaatgacctttggcacaatcgccttggtcatccatctgtaagcatcttgacaggaataaataaagagattactttctcctttaataaacaatctccacatcattgttccatttgtcatcaagcaaaacaaaaaaaacttccttttatttctcataataatttttccaaaaattgctttgatttggttcacatggatgtttggggtccctttcacttacctagcctcgaaggcttcaggtactttctcaccattgttgaggataaatctcgacatacatggacttacatgatgaaaacaaaaggagaagtgcaaactattattcctgcattttattctctggtacttactcagttttcggccaaaatcaaagccatacgtactgataatgccaaagaattcaacataaataatttctataccaaaacaggtatttttcactataattcatgtgttgataccccacaacaaaattcagttgtggaaagaaagcatcaacacattctcaatgtggccagagccttgcttttccaatctcagcttgctcttgtttattggccccatgctattcaaacagccacttacttgattaatagaacacc

SEQ ID NO: 206365 - DNA, 1000 bp, Cannabis indica
tttttttttattgtggtagtgacccaaactctttatatataaatataataaattcactgcattatatgcgcattagtctatactatattacacaattagcatccataagttttttttttctatggactatattaatgattcttgttatgctgtatttaaataagattgttaataactaagaaacaatgtgctttctaattgtattttgtttaatgataattaaagcataaaactctatggaactttactcaaaaaaaattgatcatactattttttatttaaacaaaagaggagataaagagatatgtgaaaaaaaaaaataatgtaaataaatttgcaattatctacaatacactgaaaaagaaagaaaaaaaaaacttgtacaagtgattttctcttggtctcttttttcctttgttttttttttttgacaagtttgattgaggaagggttagaagtgtgtttattagagtagttgaatatttaacatggatcataatgattgggcagctttgtatgattcgtttggttgtgatgatagtgatgaagaggtgaatgacgcagatcttgaatcgacttttttggaggttggcatagatattatggctcgcaccctcgttgaaaaaatgattatgtcaatgttatctctcgtgagcattattcttgcaataaaaggtttttgaaagattattggcacggtgaaaattgagagcattggtcgtgatacatttttgtttcatttttcgaactttggcaataagcgcaaggtatttggtggctgcccttggttgcttgaacaccaattattggctttggagattcctacaggtgttgatgattaccacaagatttcttttcatagggtaaaattttgggttcaaatacatttgatccccatcttgtgcatgataattgatatggagcatgaattgggtggtcttctcagaccgatgattgaagttaatgaaaattctggcaaagactatttcggcaagtttct

SEQ ID NO: 206366 - DNA, 906 bp, Cannabis indica
tttttttttttaattttttgtgaaattgaataactttcttgtttatataatttatctttattattatattgttatagctgcccatgtgattactattacacatatacaacacacttttatataattttcttatttgatcttagtccaatgttaaagtttaaactcaattcactttcaagaaagtattattatataattatttattaacaggggtttattatttatatgtggccaaagaccaagagtaatagatctatagagtgcctatagtcagttattttaggtggtcatgataaaatattcacatgggcagctctctaattattttgttttgacagaaattttttcattattattaaatttacaaatctgctaataaaatagttagaaaatcagtcaggacaagttttcaaccgaatcgacaacctaaaataaaaaaaaaaattaaatagtatgagctaaataattggttgccttgttcgcgaattgtttaacaaaaataataaaaatattgtttcaaaaaaagtagacacttataataaaaaataattaacccaataggcagctctctaattattaggaaatcactataataatatatataaatataggagaaattttatttaagattactctattcaagaataatatcttgttgatacaattaataattaaaaatgtaattatattggaccaacaaacacgcaatcaagaacaatactatcagaaaatcacaagaaacaagtaacagattaaagcagtaaattagagaaaaataacaccaatttaatgagtttaagacttgtgcaatgctctatgtctcggtcagaacaacaataatcatatcttaattgatatctgtattttttaggttacaagaatcctttcaaactattacagagatta

SEQ ID NO: 206367 - DNA, 635 bp, Cannabis indica
ataatgtaggttaaaattaataatcataatttaagctacttatggaataggctaatttttgtatatatctcaaaatacttctcatttcaaaactttctaacatttctatatttttcctcgtgctcgttctctctttttctctcttattggttctcactaattaaaatactcatcaaaaccccactaaagaatccaagactgcgaccactgcgaccatcgccaccattcgaccgagaccataccaatccgaccgatcgagaggccatttcgcggggcggggggttacaagatttgagacagatttttaagttttacgacttggtgcttctcgcagtgcatgatataaccgatatagagaaggaacaatcatttgacgttgtgtcacaaagattgacctattggttatcattaatgaaaagccaacatcaaatgttctttattctttagaatatcatgtaaacattacttaagagataatttaaaattgttttttttttgcttataacttgagaaaattatccatttagaccctatagatgaccacgacattccccaacaaattcatgcgaagttaaaaaaataataatttaattatgtaacaaattttttaattgttaattaattgaaatattaat

SEQ ID NO: 206368 - DNA, 501 bp, Cannabis indica
taacaaagttatgtatataagattatttcaaaattctaaacgtttacgcaaacaaacaagttccttttcccttcatcttttcactttacttaaaaagttaaaatttaatgttgttgtcattattattgccataaatatataaatattaaaaaaatttacacaaaaaaaatataaaagccaacttttattataaatatatcttcacagggctagataaattttgagaattgttaaaaataccattgctatctagtattttcgttggtgtcaaattattattgtggtaattaagtagcgggtttcatataacttaagaaaattacttttgaaaaatatcactaaccaacggtaaaatgatacttatggaaagtattatgcaccactagtgtcaaataacaatgcttataaacttttatatcttttttaatgttttatttaccaaaatacatttttacacatcatgcatgcactacttatgtcattcattttgatttatttcag

SEQ ID NO: 206369 - DNA, 1075 bp, Cannabis indica
atttgaccttcctcttcctctagatctgcctcctcctcctctgtttccagatctgccaccattgttctgttgaacttggttagatcctcttccacgacctccattgttgggcctgtgagcaaagttagcatgtggatctgccatagctggcattaatttgttgcttgagttgagtccttgcagcctctccagcttgctgtcgaaactaagcaagatttcttgaagttcttgccatgttgtgtgtggtctggactcgatctgaacaacaatggacaaatatcctgcatcaaggcctgaaagacagttagcaacaagttgggaaataggataagattccccagccagagccaaagaatcggcccaacttttcttttgtctaagatactccaccatgggggtgcttcctttcctggtggtttggatgagtgtgcgtgtatcatccattttggatttggagtgcgcaccatataggtgttcaagtgcacgccataagcctgctgcagtagaggagcccatgacctctgtggctatagtttcagacattgaactatacagccaccccatcagcaattggtcatttatgatccaatgttcataagctgggttgatgattttcgcatcttcggaatcgatactctccatgacggtatctgcatcaacaaactcagaaggacagatgttagtaccatttaggaaaccatctaatcgatggcctctaactatggtggaaaccatagttttccataggctatagttatgtcggtcaagcttcagtgagaaaggttggttaagtgtgctgaaatggtgagtgacagggtttgggagctgagaacttgcactggcaccagtcaaggctgatgttgctgcagcggctgtgttttgagcagtggcttgggttccatctgctccagagttttggggtgtattttggctttcggctgacatggtgtcgatattggctctgataccaagaaaagattataaaaggaatgatttgtaaaaatctcagctcaaattgtgctgagtgattctattgctttatatagacaaggttcattacagcaatacaatggta

SEQ ID NO: 206370 - DNA, 765 bp, Cannabis indica
aaagtgatagctatatatagatttctaaaattgctaaaattaacttcaattttaccgtggctaattaatgctatcttaaattctttaagtcatcgctagaaacatattccacgtcagcttcaaaaatgcactctgtacggacaatcccaaagacaatacacatgttccgaatgggcgttcaagactgacaacaagctatctggaagtatgtgtctagatgtatgacaagctattcagaagactttacttacaaaagacaatccatatgaaccatccggactagccacagttttacgaacaaagcttttcgaatgaacaccaagctttacgtagtaacaactagtttcccagaagacgaaaattgtaaccataatcaaaagatctccaccttagtttcaagttgaagtcacttgatgttgttttaaatattgttgtttcctagccccttcgaatctcaattaactccaatcagcttcaagaaatgctcgaacttactacttgaccctaccttggtaatcacaaattctcttataaagtgaagctttatatctatgggcttagtacattcatgtgcacacaatttatggtaaattgcattttgcactttctttatcacaatgtacagcgataaccttctggttgagttttaactcttccatcaatccgtcaaccaaagtgcctccttgatagctttcgtcaaggccatatagtcaacttcttgtatttttctagtagtttagtactatttttataattttttaagtt

SEQ ID NO: 206371 - DNA, 858 bp, Cannabis indica
atcactttgtgggatctctctctttctggttggttctcattctgaatatctgtctgggattactgtgtttttttttctttacccagaatggaagcggagaagaagtacattaccactgaggaactgaaggagcacaacaaggcaggggatctgtggatctctattcagggtaaggtttataatgtatcagaatggcttaaggatcaccctggtggggatgcgcctctactaagtttcgctggcagagatgttactgatgcttttattgcataccatcccggtactgcgtggaagcatcttgatcagtttttcaccggttattatgtcaaagatttcgtggtctcagagatttccaaggattataggagaatttcaaacgagtttaccaaactggggttgtttgaaaagaaaggtcatgggattttctacactctcacatgtgttgctataatgctttccatggttgtttatggtgttgtgaaatctgagagcattttagtccatatgggttgtgctgtcgtattggggatgctttggattcaaagcgcttatgttgggcatgattctgggcattatcaggtcatgttaagccctggatataacaaatttgctcagcttttggctgggaattgtcttactgggattagcattgcttggtggaaatggactcataatgcccatcatattgcttgcaacagccttgattatgatccagatcttcaacacattcccgtctttgcagtgtcttctaaattcttcaagtccattacttcacgcttttatggaagggagttgacattcgattcattgtctaggttcatgatcagttccaacattggacatattaatcccagttat

SEQ ID NO: 206372 - DNA, 1350 bp, Cannabis indica
aaaagtccatataccagtcgagccaccgttttacttgccgcgttgaattatacaataccaagttttttacactaccccggatttagaattcctagcaaataacaataataagaaaagcttattagaattaaaaaaaattatttacttactatttatgtcacaaaataaaataaaaatatataatttaatctcgtacactttgctcagtactatcaaattttttcataacataaaaccattggcgccgcaaaaattaataataaaaaaaataaagaaaaaacacgattcctttttcactagtttaactaacttatataaaaatgggttttacatatttgactgccacagatgaaagatgagtagatttcttcacaagcataatatttcttcttcaccaacctttgctgatttggatgcacctgatttaccatgggagataatgcctgaagccccagtgcctcgtcttgatggagcttcagtacagatcaacaatcttctatacgtttttgcaggatatgcctcacttgatcatgtaaaattctcttcttgttttattaaattccaatttcacaatgtgttagcaaatcaaaatttgaacattgacaatgacaatgacatgacaccactactactattctggtttttgatgttttttttaaggtacattctcatgtggatgtgttcaatttcactgataacaagtggacagagaggtttgatatgcctaaagaaatggctcattcacatttgggagtggtcactgatggtaatagatacatatatgttgtttctggacagtatggtccacagtgtagagcccccatagctcgttcttttgttttggatactgagaccaagaaatggagtactatgattcctctacctttccctaggtaatgtttcctaatcacattcccattgctttgctacatatgatatgatatgagttatttgttttgttaaaagattttcaaagttgcaggtatgctccagcaactcagatatggagagggagacttcatgtaatgggagggagtaaagagaatcgacacacaccaggattggatcactggagtattgctgtaaaagatggaaaagtattggagaaacaatggcgaaacgaagttcctattccccgtggcggacctcataggtgtttgatctcatccttgaatctccatcattattatcatgacaagagtttctctaagattcaatattgctaacagggcttgtgttgtattcaacgatcgcctttttgtatcggtggccaggaaggtgatttcatggccaaaccagggtcaccaattttcaaatgctcacgcaggcacgaggtatacttcaaaaagc

SEQ ID NO: 206373 - DNA, 663 bp, Cannabis indica
tgtatttatgaaataatctttttaattaaagactatttacaaaaatatggggtaagaaagaaaagttttgatatatatgatatgcaaacttaaatgcatcaaatatgacatttttttcttaaaaaaacttaagaatatgtgataatcaattatagaaaagaaggaataccataaaaaacttaagaactcatacataaattttacttctatataatcgaaaccagtttcctgatgaaaaaaacagtttttttttttatatagaaagaagttaaaaataattttgttaaggaaatgaattaacaaaccagttacttctatataatcaaaactagtttcttaatgaagaaaccacttacgaaaatcaaaactcatatagatttgtttattatgaaaccaattttcctatttaagaaactggtttctaaatctccaactacagtagaatccgttcgatcttttgggatttttgtggtggagatctcatatcttgatttgtttgagtcgtcggtcactcgatgtgtcgttgtttaccagaggtcagtagatgaactgttgagggatatggtaggtagggtacatgaatggaggagaaataactttgagatttttttttttattttttgtaaataatttctctaaccatcaaatatgggctttaaaaat

SEQ ID NO: 206374 - DNA, 772 bp, Cannabis indica
  modified_base (528)..(528): a, c, t, g, unknown or other
aaaaaaaaactaaacatatatataggaaaaattccataaaaatataaaaattaaaaactaccacataaatttaaaataaaaaaaaactaccataatttatgtaatttccacaaaatcaaccaaaattaaataggattacacaattctatcacaaaaaaaacctaaattatagaatcacctaaaaattccttaaatattttttttaacagtcagtatagtaaaaaaatcaaaaaatgtaagaaaaaactatgagccaaaatcatacaacaaacacactccaaaaaaataaagaatgataacaacacatttttttattatatatatttctttattatgttttctcaagtcaaacaaaaaaatagtccttattttttttttaaaaataaaacatattcacacagtctaatattgcacagtgtatcacatcaccatgtaaaagcaaaattgcgaatgatttattttgggtttttttttttctttggtcttcaagtcgataggctttgttttgttttggtttttttttttttnttttttttgtttttttttgttctattgtaaaaaataagatatatttactaaaaaaataatatataatttaaaattagaaaagaaatatatattaaaagtagtcatacaaaattaatattatgttcataagaatgtattaacaagtttaatgacatttactactaaattagaatttagtgtataaatagaaaaaaaaataagtatgaatctgaattgtatagataatgacattaaagagagtctc

SEQ ID NO: 206375 - DNA, 937 bp, Cannabis indica
ccatcgaaatcaacaaagatcttaccttaaaacctaatcggcaaagatttcaattttctcggaaaattggagagcaagaaaatgaaaaggttcggagatcaataaaaaactaaccaagagaagaaaagacccgtttatatagttggggttcaatggagcctcagattctctacggccggctgcccagagacgcgggagcttagattctcatactttccacgctgcttctatgaccttctagaacttactagccaatcatcgcatgacacgtgtcttccacaattggaaattaaaccacgtcattaatttaatttaataatacttggttaacgttaagttaacggaggcgggagaagatacagttcgtgcggtttcgctttatgaactcggtctttcgggaagcggtgacattttttttttttttcttatattctatgtaattatgagagttaaagggtaaactaagcaacaaaggaacaatgcacatttgtggcacaattaatttattggcaagagggaggttagaattcaatgtgctataaatatcagcatattttataagagtattgttgttggacactaatagtgtttagcacttctaaatatgtcatcttgtgattagttagtaatattctctaaaaaaatttatattaaattagacctgatacttaattagattaataacaatattgacacatagtagtgtgatagtaactactggtaccttttagtatttcttattttataatagtgtgcttagtattttggctaagttttgggagagtggaactcccttgttacatgttgggagtaatgggagcaaggagcaccattagtttaatgtggaggaaagaggagagggggggggggggggggagggggcaaggaactcctttggttgaatgggaagcaacgcggagagagagagagagagaga

SEQ ID NO: 206376 - DNA, 756 bp, Cannabis indica
tggtgctaggcaccatgaatatctcatagcaatgctcatataaatatggagggagcttcttttctctctctctctctctttttttttttgaatgtaaataatgcaatttattaataagataaattatctataacaatttctatcaattcatgaggggggttgtagtcataaaaaacacaaattcatgaaaaataagaatgcctcgttaaaaaatgcgtcgccttgttagtagaacgctgtacaaaattaaaattaagacaattcatatcagtcatcgaaagctgaaggtaactggactgagctcttgatggcttgaacagctaccaaacaatcagattcaagagagacatcttgctaacctttgctctaatccaactaagtgcctatttgatattagttacttcagctactttaggagaacacgacccaccttgtctattgaggcaactgtctctctctctttgaaaaaatcatacaattttattaataacaatcaattaaaagaaaaatctgcaattcaattaagacatctccctcgttagaaacaacaccaaaataagaattaaaacagagctaactaagcctaattcataaatctgtttacaaaaaaaaatattaaaaatcagataaaaaaattacaacatcataattaataacagacacaacattagatatattagagcatgttcattcaactctttaactaataaaataattaaaaattaaatataataaaaagaataattagataaaata

SEQ ID NO: 206377 - DNA, 441 bp, Cannabis indica
aattttatatatataattttatttctatacattaatagtatgtgactgatttaataaatatatgtatgtatagtagagatatgtgaagatttatttataataagatcattctaactataaggggatgcttttattttcggcaatttattaatgttccctttctatttcattagttggctaatccatttatatatttgtcttatttgaggttaaatcgaaccataaattctaacttaaaacaaatatgtacatgatggtacaagtaataatattcatgttagatatagtacaaatcaagtaacatggaattagcactatgtgggaactattaaactacaataacataggagacactaatacaagaggcataatatatacttgaaattgaaacaataattttctagatgaactaaaaatatttgatttttctacacctctatc

SEQ ID NO: 206378 - DNA, 794 bp, Cannabis indica
catgagtcactttcttgattctattcttgatccaagtacctgagctctgatgccaatttttgtgaaaacaacactccagcaagaacatacaaacacaaggattaacaatggaaaccaattagaatcatgcaatgattgacaacaagtataaataatggcaaaacaatatcgaacatacacaataaacacatgaactttatgaggttcgaacaaggtaatggagaatcaccttgccttcatccccgactagaaaacaaccacaatagggatatgcgagtctttattagctgatgaaaaaagaagagattacaaatggttatattacacaactcaagaagcttagcttctgcaacagaccaactcactcatggtgatgatgattagaaatgcatcacaccattacctccatcaagaatatactactctcattctttttcttcctaaacaactcccttagtttttcttacacttaatcaattttcccttaataagttctcttagccaatagagaatgttgagccttatataggcattggtataactgtcataatagacagttggttaagtttgttaagttggttgcagcacgagtagattgggaagtgagtgatatttggccaatacaaaacaaaacaaaatgaggaaaaagacaacatggcaataaagttggtgatctccacattttcctcaatgattgattagtgaacacaacctaaagaaaaatacaaagattgtgtaaagattgtgaaaaattcaagagtgtctcattctacttttgattactccaagtgtgt

SEQ ID NO: 206379 - DNA, 1198 bp, Cannabis indica
attttatttcttacccaatcgaatactgaagactgtagagttgagatttcatgagaagtacttaccttaaaaaatttatccttgaagaaacatggatgaaccacaggagaagaaaacttgttcaaaactaaagatttaagtttaaacaacttcaaaaccaaagtttaaaaaaaataaaaaatccaaaaaacctgcttgattacaactagtgaacattagggttagtttaattgagtgagagaaaatgaaaagactaggatgactactatgtggccaaatttatatagttcatatataatggagcttttataatggatgtagtgatgcaatattttaatttatttagtttaaattaagatattataaaattttaaaaattataaataaaataaaatagtcacacttataatatgctatttgaagattgttatttttagagtcttaaactttttaaattttttactaaatgtcttaaataactataatatacataattacgagaaaaaatttgactaaaatttttatttcagatatcaaaacaaacataaatacatcggtacatttcttttaaaaaagagcattataaaatttttctatatattttaacaatataagatttattttgacattgtgattataattacatatgaatttatgatagagatattcgtaatcagcgcaagacttttcctcaaactatagactgctaaatttttaaacgtgaatcacatgtgataaatctgctaccgaaatttagacaataaaactataatatgaatgatacacgtgtctaactataaatttaagaaataaaattttgaatataatagaagggtaaagtagtggatgaggggggtgaaaatgaagatggataaaggtgtacggaaggattgggatgagtagagagtgggacccactcaactatctctgattcaattcaacggatctcatacagtgattcgctcgctacctggtaaccttcacacacgcgtggtctttccacgtgaccaacttttatttccttctctattcttttcttcccaccctcttcttcccccccttttttttattattataaagtaaaattaattaaaacaaaatataaaaatacacttaatttaaattttaaagtaaattaatttctatataatattttttaattttttttaaatttttaattgtattgtagttttaaatt

SEQ ID NO: 206380 - DNA, 748 bp, Cannabis indica
taaaagaggtcttgtcaaatattcaattaataattttaagaaaataattaattataattaattgattttgaaaaagaagttttacctattgttaacatgctattattggcaaaaaaaaaaaaatgtaaccatgatggttacaataaaaatataaccattgagtagccaccctagtattaatatatgtgagagaatatgagagtaatatatattatatataaattataatgcatgtacgctttggtgatagatggagaagttttatagattaaatattttgttaattaattaattaaataaatttaataaaaaattaaaaaataaataaataaggagataatagatagaggtatttgagatgattttagagtatcatgtcacagttttatacctctcctttatatatatatataaaaatattttgtaacattcttcaataaatattattttttcactagaacaaaaaacacgattctcatcggtctttaaatcggattttttcgatgaccatcgctaataaaattaagtgaatatttaaaaccatcaacaatagtgaagtattaacagtcgtttattatttttgacgttttaaaacggtcacaagaccaaaattgaaaaacaaggtgtaaagggaatccctggcgattattcccaacagttttaaacagtcaggaatagtacacctgacaattttaaactatcgaagattctcatataaaagtccaaatttcagatctcatttcataca

SEQ ID NO: 206381 - DNA, 1159 bp, Cannabis indica
ctgatgggttccccataaccgataggtattcccatacctcgaatccgttggttattagacggggatggggcggggatgggggtataaataggtagcggggatggggggggggattgcatttcccgtatattaaccgaccaatttccatctctagtcttatgcctgttcaatttcttaattggttgtactaaataactcatttccgtgtttaaatattattttttttattattttaaaaaattggtttcattgtttatattttttactaccataaacgtaattggtttctattagtcagattccaacatctaactccggtgacgactccggcatcaaactccagtgacaatgacaacttcgacgaatttttcggtaatttttccagcgacaatgccaattctgatgacttttttgacaccagcagtaactccagcgcttttcttggcaccgacagtaactccatgacttttccgacaccgatagcaaactccgtcaactttttcggtaccaataacaacttcagtgatcactgtaattttttaaaaaaatatataaaaaaagaattttaatattttttattgtaatataaatgacatattccagttttttcttttaaatatcatattttgtcctattaagtatatttaccatatttatgtaaaaaaattattacaataattatataaatatcccatatatttaatttaaagtaacaatgtataaacccaaaatatttgcacgaaaagactatacttatttattgggtagtgttttttgtttttttgcttaaaaaattaaataaataataaactgatgagtcccgttatcatatataacttgttaaaaatatgattatctgtatgctttggggggttcctttgtttaaaaataaacaaaatataaaacaaagtgtgtccttttctgccaaaggaagtaaattaggatttgtatgtgtggttgaccctcgaataatggacgcttgagatgaatgcgatgaagaacgtggaacccatgatttcaaaaagttagaaaagttttttgtagattgtcaactcttttcactctctctttctctatttagctttctggtttgccctgtgcccacgttttatcccaccacttctccccaaccccaaaatacctcgtatatatatatata

SEQ ID NO: 206382 - DNA, 777 bp, Cannabis indica
agtttttcgtgatttgtctagagtgaaagtttcaaactctcatggacaggagcgccaaaatttcacaactgttattagatattgcttaggcccattacttaagcccacttgtttattgggctgcctaccacacacacatatatatatatatcttttatttgtacagaatcgatttaatcaataaaaaaagtcacttttgacttcaactttattttcgaataaagagtttccctctctaatactctaatatggtatcagtgatatacctcttctatccataaaatcttagccgtccccttctccattacatcttctctcttcttccatcgctccaagaaccagaaactccattgttcccgctgcttccgtcagtgagtctccatctcttccactgccatctccgactgtcgcccatgatgaagctccttcctccattgctgttcattccaacgatgctccgttcgtttcatccacgcttgctaactccatctcggagaatatcagtgtcgatcctaccttgttcgctccttccaccactactgtactcggctccattcctgatgccgtttttccaagttctggaccgattgaacaaaactccacaggaccggttatctcctgctccgctctggcgtcggcctcctcatcaactatgcttctgcctttctcatcttcaactccaatcttgactcatacggctcctaccttcactctttccggcaccacgacggatccgaccattccgttctctttaccacatgtccaacactcctctcc

SEQ ID NO: 206383 - DNA, 781 bp, Cannabis indica
ttttttttttttttccccttcttagtttcgaggaaacagagatgtgtatgatgattttaagatggtgatgttaatttcgagtacatggtagaaagacaaaatagatgtggatatggtgggtggagggtttcgggtggcaaggggggtggtggggagaaaaatagagagaagaaaaagaagaagcgagataaagaaaaaagaaaaaaattaataataataataataatttttataatttttaattttttaatttttttaattaaaattatgagttggacaaataaaatatcaacatatgacactgttaggataaattaacagattataattagttaaaatgaggactaatagaattatcaaaattaagagcttgacttatctctatatatcccacaaataataatgaatgaggttatttaactatgagtttatggcctatgtacattattatgctcttgaattttttagccctttaaaaatagtctcagaagtatttaaagtattgtaaattagtcttatgtgatcaagtttttatgattatttagacaagtgttatatcagtaacacgtgtataattattttaaaaagaataatttaaaaaattttaatttaattttacatatttttttaattattaattaattttaagtttaattatttttttaattttaagttatacacgtgacactcacaatgaatagggtaacactattttagcgagcacgtatatcattaattcaagccataaatatcctaaataacctataacaatttgagtggc

SEQ ID NO: 206384 - DNA, 718 bp, Cannabis indica
catatcgtggtggcgatccaacaatttaaatagatgaggccgtggtaacaaacctgtgtgtcaactttgtggccgtgttggccacattgcccttaaatgctaccacaagtttaaataacattcacatgagcagcttctgcctcaacatcatcttccaagaatggtgacaatcctcaagctcacctttctaaaatcaactccactccagatatcttaacaacctggtatttggacagtgtagccactcacaacatgacaaataatgcagacaatcttgctactcctgctgactacaaagggaaagcaaaggttgttgtaggtaatggttcctcctaatcaactcatgattaaggcacaagttctgtttccaccacatttccaaaccaatctctcatattacaagacatccttcatgtgcctaatgttaccaaaaattcacttagcatttctaaattcactaaagataacaatgtcataatttgatgacctttgctgtcttatcaagtacaagaaaacaagccatgttcttctatagggtcatctcagtgaagatctctagacacttcaagtctctcccacctattctcaagattctatcaataatgctcctgtctctttcagttcccagcctaaagcttagatcataccgctactgcaaccatgtcatgacaagtcacaaattggtaacatctgatatgtcaacttggtcatccatctc

SEQ ID NO: 206385 - DNA, 1149 bp, Cannabis indica
actttatcgaaggatggcaactagaaacgtcttcactagatcttagtgcctaaatgagcgcccactattgttaaccagggcaccgacacagtttctaatgcccaagttgaccacctttagtcccgatggttaggccccagggttttttccttatagccacgtgtcaaaagtattattcatgtcatcgagtcaaattttgagtaaacactactattggtacaaataaatatttggtctcacacattttgatttaataactaatataaaaaactgctaaccgtttaaaatgtgctacatcagtgcagtgttggataccttaagttgcccaataacaatgcataatgtaaaatgaccataaaaatattaataataaaaatagtactttctctgacacccatgtttcttactaattaataactcaaaattgaaataatagccgcaaaattttttccaataataacttgaaatcatgttaccctactcaaaaattattatgttatattattggtcaattttgaaatttaaggtagttttaagtttatatttttttttccataaacgttgtacttatataaaataatttttatattttaaaaaaaaaaattgaataatttatagtttcaaaaataatgttcaaacaatattatgtgtggaaaaaaaaaagctaagcatacaataaaatatataaattttatttttaacaagttaattattcagaaatttttaaaaatttacagttgttcttaaataattacaacttacatgatttttattttaaaaaaataaattaagcgaaacgaaaggaaactaaaaaaactccattttgaaggatatactataaaattatcctacataatggggtgtgtagaaagtcatctgatccaatagaatcggatatctaatcataattagattggatcagttgtaaattttaaaaattcaatttgatcgaatcggttgttgaatgagacatctgatttaatggataaccgaattgaaccaattcaattattatcttggatagtcatctaattatattttttttaaatataattataattttatatattttattttaaaaattatatcaattgatttaatatatatttaacacatgaaattgaagaaaaaaaactttaaatttaaaat

SEQ ID NO: 206386 - DNA, 1218 bp, Cannabis indica
ctataaacttattgtgtctctctcagttacttaactattttttcattctcgccaatcaagcgagcgagtgtggcttagaagtgtagtctagatttctgagtcaatattttagtgatttcattgagagccacaacttaagaaagttactattaagagggtgacaacactttctacaagtgttgacaaacagtctccaacaactagccaagcaactaggggcacgccacttagtggggttggaaccagaactacttctacgcctcaggtgccaggagtaggcctaaaaacttgctcctcagctctccccccaaggccaccaccaactgctcctgagactggcactaacgactagatcccgcttgggggacacacgtggagatagatgatcctgaggaggccgatccttaggttgcttagctcagccaaactatggctaacttgcaacaacagttgcgagactctctcgataagcaacatgaacgattttaacactagttcgtggaaaattggaagaacattgaaagccaatgtgttgaacaggaacaacagagagctaacttgtctcaataaattagagaagcttatcgctctaaccatggaactacttccattagaggttattccgagttggtgagagagactcctcgtcgacgaacaggtcacatgggaactagtacccaaggaaaaacccttaatgcttagaatgccactactgtacccaaaaactgagcatgcactaggcaaacaccaggcatgggacctctcggagggaaggtaatttcaagcaagagcccaagaggactcaagcttgagggcgccaaacaatgggccttccacctaatgttgagcgacctcgcaacaacgagagaaccgacatgactcctccacgaagtctttctcaacgttctcatgagactaggtctcaagaccttgcaagaagaaagggacctgctattcaagctgaaggaagtagtaggagacgctacttcaaaaccagaggctacgagatccgacgagtaaggactaatgaaccacctcatactcaaaagtactttcgagatgaaaggggtgaattgtgtcgttactttgctcgtggccccgataatagtacgagtacttcccttaagtacatgaagaggaattgaacctgagcaacttattcaattctcttcacacttgtgaaactgctaaagagtactttgagggaagtagccatta

SEQ ID NO: 206387 - DNA, 925 bp, Cannabis indica
caccaccaaggaagttttccttcaaaatcccttgtcataatcatcatatccatcttctcagttgtggtccttcttgcatttttctcattatattactgctcaaacgactcaaatcagccaaaaaaagcaatgacctttacaaagaatgtaatagcatcaaccatgaaagtggcagttttattgctcaaactgccataaacttcaactcaatcccaggtaagtacctttcctttcacaacttttataccatctctatactttccttgattagagaaataatgcgcatgggaagatcccaaattggtagataaaattaaattactccattgttttcaagtgtgatgattattattattaccattcttttttttgctaagtattattattaccattccttatttctcaatacaaaacatgtagtatggaccacaagtgagtgataaaggaaacacctttactctcctattaaagaaacccatatttctaaattagaaaaaggcctcaacttttttccttatttgatatgttccgttcatttcactacggatttctgatctgggtatttgaaaatgttgcagaattgagaggtggttgcctctatggaggtcctttaagcaagacacaaccacagatacaaggcagttcaaattttcacatacaaggagcttgaagtggccacaacagggtttagtgaagcaaacgttattggcagaggaggctttggcgtggtgtataggggggtccttagcgatggtactgaggcagctattaagatgcttcgtagggttggtaagcaaggagagcgtgctttcagggttgaggtaagtgacttcatttattagcttttgttatctttatctttatttctttttagtttttcaattcaatatgttctcactcaagttttgtcattattagatatgta

SEQ ID NO: 206388 - DNA, 1320 bp, Cannabis indica
gttgttcatcttgatcaattagagattatgtactaattaatcccatctcacaagttgtgatgggcaacaatagctacataattataaatcatgtgctttaaaggccatttgttatttttttcagagcttgcttaatgtgtcacctattttcagttctatattgtttttaattagtgcaatctactcaatatgagctttcctttcaagatgtcaaaatatacagatacattttttctggcgtattattttagaatatgggaatcataactagtttataaaggctatgaattgctctacactcctgcataatgacagtgaagtgtcaaatggttaaaaaatgatagagtgacaccaagaatttgacagaaagataatacacgagaaaagatataagtttgctattgtgaatgacgatgttggagattcaagcctttaatttgtttttttgtttttaatagcattgaatggctccatatgtacaatagttgcattgaccccaatgaacacgtcttcccacccatttatgttcgtgttgaaatgaaattgaacaattctaaatctctcagggataataataataagaaaaaatatttggcaactacagaaaaagacattataaactctatatatatatattttgaaagcatgataatgataggattctcaaggtgtccagtaagaacaatgtcatgaaataacaaatctctaaacaaagcgtcacaactgaagccacatatagcttaacgaaagccaccttgtccttgaaagccatccatgacaagcccttccaaccatcctggtaccaagtcacacctgagccacaatcccaggcttatatgtcctaggcggcccggtggtaccacagtcaaaggccttgatgagaagatacaaaataccagtgtgcatgatcagagctcaaaaaccaacctatgccagaattgtcactttgcattgagcctgcaaaaagttatgttatgggtgagaaaattgacagcaagtgaaaacatctaaggaataatttgtattgtgattttaccagccagctagagactgaagtaaatgccttcctaacaaaaaaatcctatagttatatatagttttttttttttaaattccaacacaacattatattgtagccttacatcctagtaccaaaatttctctaacttaatctcaattacattcgtccattaaattaaattattacgtataagaaacatgatttgctattaaagggtcatagttcagaatatcacagctcatcccttattcagagcaaattgttaactatgtagcattcagtatctatagcatttcacc

SEQ ID NO: 206389 - DNA, 733 bp, Cannabis indica
tctctctctctatctctcttctacacgcccctaacaatgtaggaaagactaaatctccctcatctcatctacttgagattgtaatcttaagagagccactccagaatccacaacacttgtgatctgagtggtattatctctaatatcaatacaagtaaaatgggagtaggtcattacctgctaactaagggggccaaacctctataaaaatattgtgtcattttcgctagttttaattgtgtacacgtggtgatatcagttataaatacaactccgttatctgttggccaaatctaaggtcaacaatttagtactttcattgagagtgttgtctactgatttgatctatcaccatggttaacacaaggagaactctggctgcaacttctgcctcatcgggtcttcctcaagaccctatgacaactgatcccaatgttcgtgttccagccaccactgtaatttccacaaacttaatggatgtaggcaatcctgctaacccagcaggcccaaaaaaactcaaccaacacaactgctccagtcgaccctaccaacctaacttatctcaatggccaggctctgccggtcagggaagatctgccattggaacgttttttcaatgtggagcaacccctgggcaccacaataactgactctggttctcggtattatgctgggaaagtaggcgatgaatcggtgaaccattaattggtgagccacatgtggacttgggaga

SEQ ID NO: 206390 - DNA, 2889 bp, Cannabis indica
agctgcagcatctgacttctaagaacaaagatcttgctcaagaaataatggcattacggagtgtaagtgaagaggtcggaaggtataaacaggaaatagcagcaatatcagaggaaaggaaagttcagatgatgatcttgaaggataagaatgaggaatctgcaaagctagaaatcgagcttaataatatgagatcaaatttgcaatcactccatgatgagttgcatgttgaaagaagcattagaagtaagttagaaagcagtgtaactgatcttacttctcaattgaatgaaaagcagcatgagttgctgacttttactcaacagaaggctgagttggttcacctgaaacagtctgtgaaagatttagaactagagaaggcaagtatctttcggactttgtcggattctgaacaaagtctaaaagcagctggtgaacacttttctgatatatctcgtttggaagcccaattttctgaaatgcatgagttatcattagcgacagatgtgagacttacttttacaaaagctcaatatgagttctgctttgaggagcttcaggacaagtatgttagtgtcgagagtatgcttaatcattgtctttctacccaggcacattacattgaggagaatgctaaattaatgacaagtcttgattcccttaggtctgagttggaggcttccactgctcaaaataaaatgcttcttgatacaaatagcagcttaagaattgcatttgatgaactcgagaaaagagctgaagatgcagaggataattcaagaaagaatgctgttgaagttgaaaggttgaagggtatgttggtgaaatctgatgaagagattgatgacctgatgctcgtcaaggaagaactagaagtcaaacttttggtcctcaaattgaaattggatgaacaacaacctcagatagccttgatggatgaatataagcatgaactggggatgctgcaaactaagtacaaccagattagccaaaaactctctgaacaggttttgaagactgaagagtttaagaatttgtcagttcatttgaaggagcttaaagacaaggctgaggcagagtgtcttcaggctcgtgaaaaaagagaaccagaaggaccaccacttgctgcgcaagagtccttgagaattgcattcatcaaagaacagtatgaaacgaagctgcaagaaatgaaacagcaactttcaatctccaaaaagcatagtgaagaaatgctgtggaaattacaagatgcaatcaatgatgtcgaaaatcggaagaagtctgaagcttctcacctaaaaagaaatgaagagctagggatgagaatcttggaattggagaccgatttgcattctgcactttctgaaaagcgtgaaataatgagggcatatgatctatcaaaggctgaaaaagaatgctcattaataagccttgaatgctgtaaggaagaaaaagaagagctcgaggccacattgcgcaaatgcagtgaagaaaaaactaagatttcattagagctcacctctatgaaggagtttcttcagagctcagcatcccaagtgaataatcagagaagagacaatgagggattatgcaaaccagattgtgtctctgatgagccagccactgcttgtcaagaagttggccaggcttttttcactcccattgatgaaggtgaccagtcaaaggaagccatcaatccgcaaaaaaatcaggtaactagcaacttttgtctgggttgtgcttgatttgttagtacattattaatttatgcatataggtactgttactagagttcaatttgcttcttttgcagctgagcatttatagctattttaattttgaaattgctcactgtaagaagaaacacttttttgttacttttaacatatcacaattctaaataacttaattcataaatcattcagcacttatctcaagtgttgtttggatgagtgtgtgagttgttgggggttcaagtttccaataatgtacaaaaaaattactatgatcattgagtaagtatcagggcttggtagcacattctgtcttccttgagttttcaaaagggggtacctgtaaatctcatttgaccctccaaatatgctaatttggttcgttatataattcaaatgatgttcatggaaatttgtttatcatgtgacatgctagtaagaactatgtaataccattgctttcatactatcatggtaatgttggtgtctaacaatctttgttcatcaggatgttcttacaactcgttcggcaggtcaagaggatacactacgaaaagacacagagcatttagctgttatgaatgaccatttcaagacccaaagtttaaagtctagcatggaacatttaaataaggaggtatttacaagagaaaagtgaaaatatgattttaaattttgctaggatatctggtatagctgcatgacggttaaggatacaatttttttgttcttttcattatgttctttgtcctaccccttgaaataattcacttagtatttaagaacataatttattttcatctttatacagttggaaaagatgaaacatgaaaatttgcttttgtcccaagatgatcatcaatttgatccaaattgttctggtttacaaagagagctgatgcagttacaaaaggtaaatcatatctatcccagttttatatttgaattttcaagtttcctcaaaactcactcttcattctgtttgttgcttaggtaaatgaagaactgggaaccaaatttcccttgtttaatgagttttcttacaatggcaatgcattggagagggtactggctttggaaattgagcttgcagagtccttgcaagcaaagaagtcacgagttcaatttcagaggtatgtcccgtctctctctctct

SEQ ID NO: 206391 - DNA, 944 bp, Cannabis indica
aataatgatagttaatagtgataaatactcaattacccaaacccttttgattaatgttttatttcctttgtttaccaaacctagcaaaagccaaaaacctaaaaaagtagccaacaatattgtgtttagttgtcaattaaattaattatatccaatccaatatatataataatcaatcaaagttcaaataatgggccaatttaagaacaatatgtctcaattgagggacaaaaaataatttggaagtggggtccacttgaaaaaccaaaataaatacaaaggccaaagttttaacatatatttaagaggggagagattattaacaaagacatctcacataaaaataaaataaaatatataaataaataatgggagagagattttgtttttgtttttgtaaagagataggatctttgggcccactaatgggctgggcccccactaaagattaggaccatctgtccctttatgaccggcatgccctcaataacacgtgaatccgattcccacccaagtgtgccttccttcctttcttgcaattcattatcattatctttacttcccaatttggcctactttttggtcacaatttaatttttatttatttattttgttttgtctatgtgagaataaattattgctatcataggttggacatttttctatttgactagcttgtgtgataatgattttcaattttttatttttatttttaatgattttcattcatttttttatatataataattgaattgcctttttactctttcaattactttattattgatacattttattataagatatttatttatattgggtttggggaggtgtaatatgtaattggacttttgccaatttttttaaaaggtgttcctgcctaggaatctaatcacacaacttatattaaaaaatttacctaaaaaagaaatgatacccctttt

SEQ ID NO: 206392 - DNA, 2131 bp, Cannabis indica
aaattacccaaccagcccttaaatactggtatattgatttcacccactaggtcaagttttcttttatttttgggctttttttcaattttaaccaaacaagttactaatattacaaaaactagtaaacaaccgcactttgggacaatatatttaaaaaaatttaaatataaatataaaataaattgtgtcttttaatttatgataactcaatggttatttataatttttagtcctgaaattttgacctatgtattagtgtgctcctaattttttcagtacattaaaaatagttcctaaatgttatagtgtgaattttttcacctagaaactcgagaccaggctcccataagtatgacatgtggactcactctcctcgagaagggctgagatgtcagaaggagacctattgagtgtaaacctcgcctgaaccaaactcagcgggatgatgtgaccctgacagagcctagtcgcattactatgcctcgcacgatgcaggaccgaagaccggatttaagactcgcatatacgagaactataaaggttttcctgcgagtcagtaaagatcgattctttactgagcgagttggtccggatgacctaacgtgctcgataacccgataaggactcgcatgtcctaagttattaaccttttacaagatatccatatatgcgactcaaacaggacgcagatttcttatacatgtgagactcgattagtcttgtacacatcttgagcctgcgagcttatgtgagaatatgaacaaacaacttgcaccacaaaggtcacatacgttgctgtagttagtgaattaggtcaaaactgttcttcatttattatatttacgttttaattgatttaaatgttgatattcaatgtaaaaacggattgataattaagtcaatctctgtgtaatcaaaggacacttgctttgtatataaaggagtgatccaacatgaaataaacaagacagaaaacccttacaacggtggactaagcaaaccgtcatctgactgaaccactatactccctttgtgttgtttacatttctagtacgtttgtgtgtccatagtttgaatactcgccgttctgggtagagtaatcgcatatgctcgtttatattttaattataatattttatttagtgttgtctaaattcctcaaacaacaattggcacagtcggtgggaagcaatcttactgttgattttggaggaaaattataatggctggaaatcaaacgaatggagataacaacataggttctttcaatgtcagaacaatgaacgttccactcccgggtaatggaacggcacctttcgacacaatcaatggaggagtggcacgtaccactgtcattcccctcaatttattttctgagaccaccggtcatgttggagaaacatcaacaccaacagccactgtgggatgcttcccgcctatcacaccagctgtggtgtctaaaggaattattcaactgaccacgacccaatatacgacactacaggaacaaatgcaggctttgcaggtagaagtcgattgaagggttaggacctgacgtcctcctcgagtaccaaacacgcgttcagataaccctcaggcaaagcgacgaactaataatcgtactcgcagggaacaacgaaatgaaccaaagggactcaatttgaactagcccacgcatagggaacaagttgcacgaaacgctgaccgagagatactgccaaaggaggataccgagcgacgcaaccctcaaagttgagcccaaccgcaaaatgaggtaaatgatgctgaatctcattcttcatcctctcaaagtcgttctccttgtgtttatatcaggtctggctccgtggagacacgacgaggagggagataccgtgttcataggggtgatcttcgtgatcacctcaatgaagtttttagggcacgatctcaaacgccccgaaattacaatgagccccgtgatccctaggtgggtgatcaaggcacaaacaacagaaataacccagctaacatagtcaacccgcctaacgcaccagctgccactaccgaggtagtgatcctggctaatatagctgcagttgttgccacaccatcgataactcaaaacaaccccgttatgcctgttgtgttt

SEQ ID NO: 206393 - DNA, 809 bp, Cannabis indica
tgagtaaaatcattaataataaagaaagggttacaaagatgcaaattagtatagacagtgtagttacttcgtggtgaaagaacaataaaagtattatatttagcacatattttgcgtgacttttcataaatgtcattttgtgaaaatatgtggtagagcaatatgtacaacactttattggaaatactttttgtaatagtaagtatatcatcattgatacaatttggtagtcgtgtatatttttatttttcttcttttcgcaatgtgaataacgttcaaaattacaagactgagctaccacaaagggacccctagcaaaggttctgcgaagtcttagaagtgagtgaccattttgtaattgaatcaacaatgtcagattttgtattttccaaatgaaaactaaaaaagaataatgtatgagatcgatatttatttgcactatataaagtattgcacaaacatttaattgcatgttaattgttaatagaatataaaagcagcagagtatatgtagttataagcataacttagtatttcgcatatcttttcacaaaagaaaaatacaaattctaattctaattctaattcacttatctccaatattgaaagatgtatatatattaattggggaatagattggcggtttttatgatttttatatgttagtattagtgttactgttaccttttgatcggtagagaagaaagaaaagaaatgagatgaagagttaaattgagttgttggtaagaaaaaaaaatagtaaggaaacccactaatattttttcctctctattttgaaaagaaaatta

SEQ ID NO: 206394 - DNA, 556 bp, Cannabis indica
aataaaaaacatatacatatgaaaacacatatgttaaaacccaaaaaaaaatcctagaaaatggagaaaaaaatacggtgaacacaaatctacaaaaaaaaaaacccataaaaatggggaagatgaggaacaaaaagtaaatcaatagctaagaacattcgagcacctccaccagctctttcccctggtctgccaagaaactccactacattgaagatatgaaaaaccttcgtccatcaaagattttcgtcgaagatttgagcaccctctgcttgcacagatcgtaccgtaatctaaaaagatctagcaaggtccaccattagactggttatcagagagagagaaagaactaaaataaattaaagttttaaatttttaggattaattatttttttgaaagttaatttaatttaattattaatttttagtaccttataatttttaatataaaaaaagttaattagaccaattaatgcttggcacgtagtattctgaaaacaataacaaaactattagaaagatactaacgaaaataacaaaataatcaagttttgag

SEQ ID NO: 206395 - DNA, 1245 bp, Cannabis indica
atgctgagttggaacaggaggcatcgacgaccagggcggctcaagaaattaatgctcaaaaccaacctcgttcgtgagtgaggaggccctgaggcagacctcgtggcacaagaactaggaggcaggagacaactcagggggaccctcaaaactctcaggaagaaccacctggggaaactaaggatgcccctgatgatgaacaaccaaatgaccaggcacatcgtcaagaagtgccttgaagaccccaaggacacacaacctagaggaatggaaataatgaccgaccggagccttcttaaagtaacaaacacaaaatgtgaaccaggaccagggaccaggaaatccctcgtgaaaacgagagagatctcgagcttaacctaggacaggtgggttgccacaaagacacggacaacatctttctcaaactaacagtgaaggggcacatacaaatcccagcagggggcatgtatcaacctgttcgcaaaagagaaggcgagtacgtgatgaggctagttctagttctggacgtacgaggactcgtagtcgatctatgcgaggaggggatagaactcatcgcgatcgagagtacgggcacatctagaattaagggttactcaaggacgacgtctgtaagtaactatgatccacaacagccgaatcttcgtcatcaactaaatcaaaagaaaccttacttacgccaatagctcgatcaaaagcaagaggatcctacccaattactaatcatagagttggtggacaagttcaggagctaccaggatggggaatttggaaaaccgcctggttacgactcggacaaggagcccgagcctttccacctaaacattatgagcgctgaattccaccaaggattcaaaaactcccaagtctcgccatacaatgggactacggatccggtcgctcatctcaataattttaatactatcatgcaagttagcaatattacgaataatttacgctgtattttattccctactttgctagttggagcagcgagcagacggttcaacaaatttacccatcattcaatcacctctttggaacaactgtctaaagactttaagaagcagttctatgcagcaagagacaggcgacccgaagcgtcttctcttactaataaaaagcagcagccaggcgagataattaaggcatacttgagtcattttagtacaaccgttgcgagagtgagaaatttgaacgacattatccagctcactgcccttcaag

SEQ ID NO: 206396 - DNA, 712 bp, Cannabis indica
ctggttaatacaagtgggaatgtaatgtccatatacataagagagcttcttcacctataagatagagccattacatcttcatcacaaaaaaaaaaaacactttagaagaaaaaaaagtagaatcatatcagatcagtaaggagtaggacccatcttttgggaccaaaattcattaacattctcgacctaagatttcctaataagctctacctaaacaaatagtaagaaactttttcttttaaaataataataaaaaaaaagtaatcaatgtcacataatgttgtagattttggagcccaccagtgctcaaaattgccgattctattgaaaatctatttactttgtattacgctggttggtatatataaaatatgcatcacctaccctacctagctatttaaattccccaaaatatatgtcacgcttgtattataagatttttgaataagccatacgttactcagcaaatcatcatttattttgggttatcattttcattacttccttaaaggaatatagtgacccacctcattacacttaaaaaaactaatcataggtccattaagcttgagaatgtgagctaattctcctttttttttaatttttttctttcctagtttttcttcttcttttgtcttttacttatttgcggcttataccccacgttattctacactagatatggaaactttagaacaatatacatatattt

SEQ ID NO: 206397 - DNA, 1554 bp, Cannabis indica
atattttttcccctttaaaaagtttagtatcatttatttatgaaattgattttttttttaacttaattaaagtgattttgctatagaaaataataaaacataaaatggtaaccagggtggaccacatgactagccaaataatgatataatacactttgacaacatatacaaatattatatacattattatacacataaattttttcatcttctaatgacaaattcatgtcgccttttcaagtgcaatatactgattgttaggaatgtaccctcttttgtccaagctttgtgcgatttaaaaaatgcttgaattgtagtttactctactcaaatatatatgctccaattaataataaataattctatttacacttcacaaaatgataagtacactataatatttttaaaaaattaaatttaaaataactttaaatataattacttaaaattttaaattttaaaagtattcatacattatttgttgaacaacagagcacgtgaaaaacttaattattttttattgaaaaaataattacaccaaaatttgaatattttaactacaatacacaccaagcacttactttttattaactagacattcacacttaaaaacttacttgcatactatttgatgggacactcttttaaaaatttgttgaaacttagttgaacacactatgacacacttcacttgtacactcaagttattactcaactaaccatacaccaccaccaaaggaccaactcccctatttatactactcaaatgtggtggattaatgtgctagaatattctagcaaattgtcaatttattatagactaaaaatttcttgaaactgatcttatgaatattaattttatataattctagatggttttataattttatcaaaatgatagaaaattctagatacttgtagaggaggtgttgatgttttaacactccccatcaacaccgactcatcatactgagttggtctacgagttactaaagttttgcagtgttgagtcttttagtgaacaggtctgctacttggtttttgctcttaatttggtgcatctcttctcagagtactttctctctaagaaagtgataatgcatctccacatgttttgttcatgcatgaaagactgaattttcagctagacgaatagcaaactcattgtcacaataaagtggcactgcataatttgtaaattggtgtagatgcttcatcaattgcatcaaccacgtactctcttaagctgcgattgttgctgctctgtattccgcttatgtggttgacaatgacactgttagtttcctcttactacatcaagatactactctagatccaagcttgaatatatacccagtagttgatcgtcgggtatcatgatctcctacataattagcaccacagtagccaacaatcttaacctcgtcacctttcttatagaaaaggccatagttaatggtatctttgacgtacctcagtattcatcgtactactttcaatgcaaatttttcggttgttgtatatatatcgactcactacaacaattacataaga

SEQ ID NO: 206398 - DNA, 1234 bp, Cannabis indica
acaattactatttataagagagtgtacgtagtgataattaacatattcaaataaggtacgttaattagggaagaaatattcaaagaattaatcaaaatggattcttctatgatgggcttgcggaaagaacaagaacaagaaaatgaagcaacatccaaaaaatctttgccaaacaaaagtatgtacatataaaatctttcattttctttatgtatataattaacattaatgtttcaagaaaatttaattaattaatttgtggttatgtactaattaaggagaaggacctattactaatttcacaactcatgagataaatgtagatgtgggtcaggtaataattaaatcaacgaattatttaagttctttaatttacattttttttaataataataatgaattgattttgttttgttttgttaatttaatttaattaggatgttgtgagtaaagtaatcgaatgggttaatacaagtggatcattggacattctttctattgatggcacagtttcatttgcatcattttacagtccaaggaagaacatggtttcaagtcattatgaccatgtaattattattattattattattattattattattattaattaacccctttttcttttcttaattaattctatttaattttagattaattaatttcattttgcagtgtttttttaagattcaaagattagtgtgttgtaaaaacacattgaatagtgagaaagaagtaattttgagagctcgaatttgtggaccaaccataaaccatgtttatcgtggtgttgtaagggaattactagcttctactcctgttaaggtatcatcattttaatttattaatcttcttacttaatttctctatcccgaaaatatatatcagaatatattttttaatagcagtgtttattatatttacaatattattactgtaaattataaaattcgaataatttatggcaccgaagataagtttaaactattttgaatacacgtggtaatttagaatattaaaaaatgtatgatatgtgattacaagcgtagagattaattaaaatattgtaattaatactcattttcgtttatatctcaatttaattaaattttcttaataatataattaagaagaatgaaattatatattgtttgataatatcagataagggtagcgagttacaactcagcaagagcaacattgtccgatatggccaagaagactagcccaacac

SEQ ID NO: 206399 - DNA, 907 bp, Cannabis indica
tggttcgatgggtccaaagcacccatggaaattcatctagtcatcttccttttaatgcatcaagttttttctttttagtagcttttagggtcttactgactaattcaacttgtctattttcttgtggtcgcgagactgatgaaaaacttttgataattttatttctctcacaaaactcagtgaacaaatagttatcaaaatgtgttccattgtctgatactatcttaattggtatacctaatagatacattatgtttttgatcacgaagtctaaaacgttttttgaagttatcgtaactaatggttcagccttggtacacttggtgaagaaattgactgcaataactgcatatatttcacacctcctcaccctatgggtaatgatatgattaaatctattgccaaatagaaaatggatagagcaaggtcatcatgtggagtttagtaagggtactctcagtatatgcaagaatctttaacattggtcgcatttctttacaaactcatgtgtatccttattgatagttcgctggtaatatctctgacaaattatcttctttgataaactttatcaacctacatgatctccataaaagccttcatgaatttctcttataatactctcaccttctattggtgacacacatcgtagcaaaggcatcgaatatccacgtctttatagccttcctttgacaatcgtgtatcttgaaattttgtacatagtttccttgcctcgtttttatctgatggaagtataccatttaagagatagttcataattggtgtcatccatgtgggacttgcattagtcatttctacatcttgatcttccatctagaaaatacttggttcttgcaatttctcaattagaaccaagttgaggtcgttggttcagattgcgatgcca

SEQ ID NO: 206400 - DNA, 794 bp, Cannabis indica
ctagattctggtaaaataatcccgatagctaggcttagagccatggtaatgatttaatttcatgaaataaggatttaaaataatgaatttgttaatttgttgatttggatgtgttcatgttagtttatgtgtgatttgatgattgaatgtgaatcacaaaaattttcatacaaataattttattttcactctaaaaataatatatttgaattcgttgtcaaaaattaagcaattttagtttttacgaaactttattctgataaaaattgagaaagttatgaacgtttgaaaaattcggtgcctatggtcgagcaccatgcgcacacacttcggacaaggtgatccgcgcgaggaaatcagacaatttttctctaatgtgcaccgtcagccttgttcagacaaggagggatgtgcgtgtgatgaccttgaaattggcatgcctagaggctacaggccccgagttttctcggctcaacaccctacgaatgcccccttcagtgcgcgtgagaggctgcgtgtagcctgtctcgtggggagtcatcaaaaatccattttgggtgatttttcaccctatttcggattttccaatttcaaaactataaatatcttaaataaaataatatttttaatatttaaacttaaatatcaatatttttaaattaataatatttaatttttgatagatctattaattttttatattttgagggttaaacttaaaaattaattattttatttttaaattatgatcaaattttacaatttgttaaattgttaaaatttatatattattt

SEQ ID NO: 206401 - DNA, 841 bp, Cannabis indica
gagattaattgctatagacataattatttacatgttatttttcaggttattaccattaatggaatgtttcctggaccactcattaatgccactaccaatgataacattcatgtcaacgtgttcaatcacttagatgaacctctactaatgacatggtattaattacttactggcttggctcatcatgaaaatgaaaatgtgttaatgatgatgatgtaaaacagagataattaattgattattaatttctttatatataggaatgggatacaacaaaggctgaactcttggcaagatggggtttcgggtaccaattgtgcgattcaaccaggaaagaactggacctatacttatcaattgaaagatcaaatagggagcttcttttacttcccttccaccaatttccaacaaagctgggggtggatttggaccctattcgaattaacaatcgcccagttattagtgtcccaatttccaaaaccagaagctgatttcgaccttctcaattggtgattggtccaaaaaaaagttacaaggtcctcaaattaacacaacattttcatttaaatttgttacgaaaaaatttataatctttgcttattttgaaggctagtattgtaatttgaaacgcaggatattagatctcagttgaagacattggaaatggcatatttgactgccccacctgatagaattttgatgaatggtaaaggtccatatatggacccacttactaaaacccacgagtcatttactgtaacgaaaggtaagaaactgtcatgaatttatctactgtcacatatatatattttttgtgttaattttatttggagttgtaaaa

SEQ ID NO: 206402 - DNA, 735 bp, Cannabis indica
caatacaataattagtggactttgggttggatattcacatattgaacctaaataaatataaaaattggtatttttataatgtgcggtgcagtgcgatttgaaccacatattaacaattcaaaaccgcaaaccgcacagcaccgcgcggtttaggaaaaattcaaaccgtgactgcaccgcaaagaattttaaaccgcattttttttacgatgcggtgtaatacaagcgatttgaacagtttgatgaacacccctagaattaactaaatcttaataaagaagatatttcatcaccaaccagcccttatttatttattttgaaaggcacgaacgagccctcaattattctattaataatatatatttatatgactatttccacaatattaaatttataaataataaccaaatgttacacctacatataatctgatagaagcgaaggcaatgatatagagaagaaaaaaaaaaaaaaaaaaaaaaagaaattgcaacaaattttttcaaaaaaatttaccttactagcaattaatcctcaaatcctattactcaaaaaaaaaaaaaaaatcctcaaatcctattatttatttagctgtaaaactttctaagtccatattctgttagtaatttgtcatttctatttatttttaactgttaattatcatgtttgattgtctatgtagacacagtgtattgtgcacatagatataatatacacatgatacaatttaattag

SEQ ID NO: 206403 - DNA, 718 bp, Cannabis indica
atcaaaatttatataataattttcttaataatcaaaatataattattattttttggaatttttttatttttatagtttaaatggaattttacataaaaactgctatagcaaccaaaatttatatagcaatctacataaaaatcactagaatgtattccataatacaaaccttcaccacctggactactattcctcggatcatagggcactcaaaacagaattccacaccagcaatgacccccctttacaccagaaattcagatcacgatttcgctatgaagctctttggcttaatgatcctggcactgaaattgtagatcatcactggaccatttctgatcatagctgactaaaccaagcggttcaaaatattcaatctatttcttcacatctgcaatcctaacacattaataaatatggtaatatgaagaggaaaatatctgatgcacaaaaaaaagtctcagacctcagagcattcgatctctcaagtcaagccttcttctctggtctccatcaatttgaacaaatacttgatgatctccttgagcaagaagaaacttattggcaccaacgttctcgtatttattggttgaaagttggtgatgctaataccaagtattttcactcccgagccactggtaggaaggccaataatcacatcaaaaaaatccaaactgataatggagattttgttactgatttgcaaggcatctctgac

SEQ ID NO: 206404 - DNA, 664 bp, Cannabis indica
atgataaagcaagtcttcaactgtcagttagttaggctattgtatttacctgtattttcttgtttctgttacaaaggttgttaattctgtttcctttgtaaccttgctgtactccttctataaatacaattgccttccttgagtcttgcatcttttgcaagctctgttttgtttcatctctctgttttcttttcttgcttgtattgataagatcattcatggtatcaggaagccattgacaaaagtctcctatggatcctacctttgttgaaaacccaccacgtccaactggaccaaactctggatctttgaatccctccccaaacacatggaatccctttcaaaattccctcagttcttcccttactgtcaaattagacagatccaacttcttggcctggaaatctcaggtcattcccacagtcatcggccatggtctagatgaaatcctgcttgctggaattgctccgactgaattactggtaactggagatgtcaaccctgcgtttcttgcgtggaaaagaaaggaccaacttctactcagctggctccgatcgtccatgtctgaaaacgatcctcggttctcttgctcatcacacacctctcactctgtctggcgtgcccttgaacagcgattctcctctcagtcgaaacgctcgattac

SEQ ID NO: 206405 - DNA, 1306 bp, Cannabis indica
agcaaaccaaatatttaaatgggctaagtattagttgggttgatattgataagtctgccttttggtatgtttgttaagtctctcttttgagtgttctgtgcggattcgaaaattgtgttgctgtactggcgttcttgctgattgaatcatggacttacaaggattggaagatcaatgggcatcattggaattggaggaagaggatgaggttggcttagttgcctcacgcgtcgaacaagaagaactggtcattgatactcgctggtgtctaattgggaaacttctctctggaagagttagcgattttgatgcttttcaaaacatgatggcgtttctatggcaaccaggcaaaggaatgtacgttaaggaactaaactctaatctatttttgtttcaattttaccatgagatagacatcgatagggtgatcacaggaagtccttggactttcaataagaaacaacttattctccatagattgaaggaaggggagaatcccaggagtgtgaatcttcattttctagatttgtgggttcatatctatgatctagaacatggatttcagtctttgaaggtggtcacggatataggaaatttaatgggcaagtttgtggaatcggatatcaacaatttttcaggcgtatggagggaatacatgagaattcgagtgacaatcgatgtcgacaaaccgctgcggagaagaatgaaaatctttcgtgaggatcggagttggttctgggcaaactttaagcatgagaatctctctactttttgctttatttgtggtatattggccattcggaacgtttttgtcctaaattatttcatacacctgctcacttgattcaaaagccttacgggatgttcttgaaggccaacagtaggcgtacatctgaaaaaatcggagcaaaatggctccggtcaggggctgtaggagggatttccgagagaggggaggggagttcgaggcctgtaactccggcgatggcagggggaggaccgacggaggtgaatgggggagttgattgggggatatggagattgtgggttggcaacgggatttgtggagggtggagttactgctcgtgatttgagggagaaattggtggaaggaaacttaaatgatggtgataaggatatacatgtgaataatagtgaggattttattatctatactgattctaaaaggaaacgggttgggggtaagaaaattagtggggtgggcgggcctagtgattttattgggccgaatggaagtgaattggccaaaggaggtttgacttttgttgatatggaacaagatgga

SEQ ID NO: 206406 - DNA, 848 bp, Cannabis indica
attcgaaatacattctttggttttgatttacaaatcaaagtaaatggaaatgatttcatacaaaagttaccactacacttgattaacaatcaagaacaaagatataagtccccttagatctcagaagataagatctccttgttttcgataagctgaacttcttctagcaaattagtttgaactcccttcagatatgacagatcaatattccttcttcaagtcttgaagatcaaatgattgacaacctgcaaatacaaagattatacaggaaaggaattcgccctagcagcgcaagaatctcaagaagattttatcaaagatgaagaagagttgattagaaaaagcttgatcaattttttatattcaatattttggtacaatcgacttaactaataataaaccaactgagtacagctggcaaagagacgaaacaaataaaacgaactaaaaactggccggccaaaaaataaatgaaacaaatttaacagatgcatctaacacggtcttagatgaacaactattaaagttagaacagatgcaactaaaaatccaatagacaaaacaacaaccaacataatttgccatagaaaatatggcacttacaatttttcctttggcaaattatgatcatcgaacaaacacagagagataaaacaaaaaaccaaagataattagagacaataagaaagaactcaaaaaataaccaattcatatacaaggaactaaatcaagataaactgtcactattaacaaaggcaacataaccataaaaccaaacccaaaaaattgacaatgtttggcacaactatctcccctcagtgattataatcacactgctggaataggcc

SEQ ID NO: 206407 - DNA, 1192 bp, Cannabis indica
aactaaatttaaatatttcaaaacagtttatagtccttaataagtcataaataattaacttttaatttcctgaacaatgtagatatttttcataaataaatttagaaataacataaataattcgtgaaaaatataaaatcaaccaaaaatccaatctataatttttttaacaatttatatcctatagacaataatggaaaataaacatagatttttatgagcaacctaagtgtttttcttaattaatttaaaaataaaccaaataattcactataattccaaataaattcagaaaattatcaaacttcaccaaacacctaaataatatgtagaatcgaaacctacaaaaaaagatgggaaaatacctcagatcttcccaaattgtggtcgttggaaatacaccggtgtagttgtcttcttcaatgccggtgagcccaaaactcgttcaacaatctgtttcgatgcgtctttttgattggaaaatgttttcaccgtcccagaaccttaaagaagccaaataccgcttgtatttggtctcaaaattgtcggtttgagatcatcttctctaaacacggtacaccgccacatatggagccaaaattctgatttttcatttcagagttgtttatcccgcttcttcacatcagtatccacaataggggtctcccaagcttagatgaggactcattgcaaccctaaaataatccaagtaggctcaaatatgaatttatccaaaaacaccgctttgaagatccaagaatggtgtccttcaaaaccttggcttttgtccactttgtccacgtccaaacttcttcttaagtgatagtaaaaactaagaaacaatccaaatctaccaagaaactctcaaactttatatgttaaaaatcttactttactctctttcgatatcgctcgatacgcactgcctccctcctcaccttttatgtgtgttatataccctaaaaaaaataacataaatatgctatatatatccccaaaccctaatataaaccctagaaaactaactttttttattaaaaaaaaatcaacattatatacacgtaccaataaatagataatagtatatgttatataattattattatttaatactatcttaaataataataactaacaaatacatatacactaaacaaaaacaacttactaccactatattatattactcata

SEQ ID NO: 206408 - DNA, 705 bp, Cannabis indica
cacctatatttttacgaactttaagaagcaatatgaaagtaacgtgtgtaaataatataatctgaatataaagtatcatgaaaataatgtgaaagcaacatagtataatattaatgtgaaagcactataaaaataactgtccatatttttgtaagaaaagatattaaattcgttaaaatattaaaaaaattataaatctgtatttttgtagtttttgtcacttttggacatttatgaaaatatcccaaaaatactctcaaaacatcttataatattattgggcctcacattgaaatgagatgagcccaaaaatctaatattaagtattcatagtttctttttcttttttttttttttttattttttttttttataaaacacacattttgtgataagtaagaagagtataatttttattttaatttattatatatatgttttgtaaagaagagtgtaaaaataattttattatgatataataataaaaattatttattgttattattgttgcaataattttttgggtattttattttttgtaagtgtaactctatttagttataacctgaatataatttacttggttccaagtttatttttagacaaaatcgtgggttaatgtccccgtcagttctaggctaaggcaggctaaggtggacgggctaggcgtatgcatcgggccacctatgaggggctaaagaatac

SEQ ID NO: 206409 - DNA, 1011 bp, Cannabis indica
atatttcttttagactgtcctcaatcaagattctagggtgatagttaggataagtacatgtagatgagcagtatgaagttttgcgataaattttatttagtttaacaaaattaaattaacaattcgtaataagaagttacaatgatgaagcaagtagacattgattgaatttgtctaaggccattcagtcatcttaatttctatgtctagaatgattatgagtgtaggccccactctattgtttgatttattctgctctttgccagccaaatgtccactataggatccttatatttacatgcattttatattctctagcttcataatagtgtgtcaatatatttaaactttggtaaaatatatatatatcttattttatacgtgaacatacattatatgcacatatatatatggttatgatatataagaattgcaagttgagaaataaaaaagaaaaaatacatggtatataacaggacagtttaataaatgatattgtgtattagacaagagaagattgttttctttgcagccaaatcttctgtcccaatttttctctgtctctctatcccaatctaattaaaatgttccacctcaatcaaatgtatatcactatttaatagaattaattaatttaaagactattttagttaaaataaaatgaataaagacgctattttagttaaaattggcacctcaataataaagacccttgaataaaataaaatgaattcatttaaaaaaaaaaagaataaaataagattttagttaaaaaaaataggggtttgtttatttttacacttcaaaatatatatatatatttgtatttttacagaattctatataaaaactcatattgcaactagtgctacaacctaacaaaaaatcgcatagaatttcctattgcaattggcgctgcaaccactttaaaactcaaaccgtaaaattgaaaaaaaaaaaataacagtatatagagtaatatccataaatattgcggatgaaagaaaaaca

SEQ ID NO: 206410 - DNA, 587 bp, Cannabis indica
atgatcatctcaacatttttggctgcatagcttatgcttatgtgttaggtaagataagttagaactaagggctagaaagtgtatctttattagttatccaaaaggtgtcaaagggtacaaaatgtggagtatatatagaacatggtaatcatcaaaagaattttattagtagagatgtggtatttaatgaggacaagatttaaaaagacacattcaaaactcaccaaactcaacaagaaaatagtcacactgaaacaaatgagagcatacagatggagacggagtttgacaagagcaatactcactcaaaacagagtatgacagaaaataaagaggatacctcaacagagcaaagaaaagaggaagaaaatgcaagtgaatcagatgatgaaggtctagattaccaattagttagggactaggaaagaagagcaataagagcaccaactaaatatggttatgcagacattgtaaattatgctcttcatgtggctgagatgtttgaggatggaccaaaatcttacaaggaagccatgaattcattagataagctaaactggggtggagcaatgggaaatgaaatggtt

SEQ ID NO: 206411 - DNA, 999 bp, Cannabis indica
  modified_base (44)..(44): a, c, t, g, unknown or other
ctccggactactgaaagaaaaattgaagagaaagaagtttaacnggttgattatgtaaagttttttacgtaatctttccatcagctttggccaattgcgcagagtttttgagagctgcacagaaattgatgatgtttacaaggtggggatgaccttgtttgttatgagcgttctcacttggaaggaggagaagattgccgttccttcatttgtcataagaatagttgacaaacttctattctttacgtacaacaagttgataattttttttaataaagactacatagatgtgaagaataaaatgcttaagaaaattgggaagggagttagtcagtaggaggcgtaatactcatcttacggctatactgtagcgttgaagtattgggcgtacgaggccatcttggagctgggcaacgagtatgcagtgaaaaagttgcatcgcttttcgagaatggtgaactgggagagtaagccaaaaatgacactcggaaaagacaaagtcatttgatgatttattagaaatgcaagttttttacattttatatttatttcatgttaaaaaaatctatctattaatatacttattttatttttcagttgacaatatactttatgttatgtccccgatcaattgagattgagtttgtgagttgcgttactagtggtcagacgcctttatttgttgacttggagaaatttgtgttgggtcatgatggacaaccgatacaggatgctttgcgaagtcagaccaaaaagcttatctcgacaattgaagaacgagcggatgcagtttgaatatttagagactctacaccacctgcatcgtctccaccacctgcaccgtcttcactactggatgagcttgatgttgccctatctacaacattagaggatcctcctctgggcccgtcaacatctattctcagcacctttgaggctcgcaaaccagtatcacatgccattttggcaaggttgaatactgtgaagagtgagcagatt

SEQ ID NO: 206412 - DNA, 2814 bp, Cannabis indica
tgttaaaggatacaaaatgtggatcattgaacctggtgaccatctaaagaatttcattggtagagacgtggtatttgatgaagaaaacgtttacaaggatacacttaaaactaaaagagatgatgaacacactgaaactaatgagagtacacaaatggagttggagtttgacaaaagaaacacccttgcagattcgaatttgaggaaagacagtgaagatgtcccaacagaacacggaactgaagtagaagatgagagtgaattagatgatgatggtcttaactatcaattagtcagagacagaagaggagagctgtgagagcacctgctagatttggatatgcagatgtagttaattatgctctccatgtggctgagatgcttgaggatgaaccaaggacctataaggaagccatgaaatcatctgataaactcaaatggggtggagcaatgggaagtgaaatgattgctcttaaaagaaacaaaacttggattattgtacctaagccaattggacaaaaaattattggctgcaggtgggtatacagacacaaagaaggcataccaggggttgaggaagctagatataaggctaggcttgtggctcagggatacacacaaagagaaggaataaactaccatgagattttctcacctgtagtcaagcacacatccatcagaattctgttgagccttgtagcaagtgaagaccttgaacctccatggagatctagatgaagagatctacatgaagcaacctgaaaggtatgaagaaaaagggaaggaagatcatgtgtgtttactgaaaagatctctctatgggctcaagcagtcaccaaggcaatggtatagaagatttgatgagtttgtcaccaaaattggtttcaaaagaagttcatatgacagttgtgtgtatgtgaagaactcaaggcatctggtgtacttgcttctatatgttgatgacatgcttattgcaagcaaacaaatgggagagattaacaaagttaaacaagctttgagtaaggaatttgacatgaaagacttgggataagcaaagaagatacttggaatagagattttcagggatagaaatcaaaggcaacttaaactatctcagaatgggtacatcaacaagatcctaaatcattttggctttgctcatgtgaaatctgtttccactccaatacgtcaacaattcaaattatcttgctcttaaaatccctcctctgatgaagacataagctacatggagtctgtaccttacaccagccttgtagggagtctcatgtaccttatggtctgtacaagacctgacttatgctatggtgttagcatagtaagcaggtttatgaaagaaccagggatcgagcactggaaagctgtgaaatgaattgtaaaataccttaaaggaactgtagatgttggtctggtttatggacaagacaacaacggaaataactgtgatgtcatagggtttgtggactcagactatgttggagacattgactctagaagatcccaaactggatatatctttcaattgaggggttgcaccataagttggaaggcaaatcttcaatctgttgttgccttatcaacaacaaacgctgaatatattgcctgtactgaggcagtaaaggaggctctctggcttaagggcatcactaaggaactttgtagtgatcaaagatcaactcctatattctgtgatagccaaagtgccctacatttaagtagaaattaggtcttccatgaaaggaccaaacacattgatgtaagactccattttatcagagatacaatcaatgaagggaaggtgaagcttctcaaagttccatatgcagacaatccagcagacatgcttactaaagctcttccctgtgataagttcaagcattgcttgaacatgctttctatctcacctttatagtaactatcggttaccatcgacattagtagtcaaggtggagaattgttattttctgatttgcctatctaatgtcttgacagttaatataggtagttagttagcctaggtgtcatgttctaataggttagtcacggtcagttcttcactgaccgttatagttagttaatactcttgtctttgtatctctcttgctatatataagggtatgtaattcaactatagactactgctgtaatcgacaccatttgtacataataaaataacagagcattgctcttttctctactgtgtgtatgtgttaagtgttctggtttgattaatacatcttaggttcattcttgcatggtgaattgatgctgaaccgaagtgaacttgtgtaacaaaaatgtatatatattttgaatttttaaaatgttgaaaaataacttatattattgcttaacatataatattattataacatgataagtattgttttaatgaataaaaaaatatataaaccaaaagagaacaaaatttaaactcttaacaaaattattcagcctctcataattttttaaagaagaaattggattaacatagtcgactctcattctattaacccaccaaacgagttttaaaagttatagcttaaactctttagaagtgatttttttttttaaagtaagtacaattttaatataaaaatattttattaggtgtgtgatatttttcagaaaaacaccttacataagtttaagttataagaatatggaaaaaagagatacaaaattatatcaaacatataaattgtatgtaaattaaatggtcgtaattttagagttaatattttcgtggcattcatatataatagaagtgtatggaagtaaaaaaatttatagaat

SEQ ID NO: 206413 - DNA, 1665 bp, Cannabis indica
tcagaagaattgagatcttggtgtgaacccagagagaaaaattctcgagttcagaaaaaataaaataagagagttagaaattgaaaattaagggatcagtttgatccaaagagaacaaagtgtaaaaaaaggagagattcatacctaattgtaaagagaagggtaccaattgatgaatgtgacttggaacccttgaagtcgtgtgtaatcttcgatcttgatagtggatttgatctgagctttctttgaagcagctcaccatggatgtaaccccaacatttggtggtgaaccttgtacaattgctatgtttgttctcatctctttgctctgttttgtttcaacattttttttctttgaattagctcaaattcttgagcttgtgttattctattttgatttttgtcctaattcttaagtgtgttgttgctgtgatgttcctcactagtaacaaaattagtaaagtcaaaagtaaaggaaacataaagaaacaaatagaaacaaaatgtgtcaattgtgtatccacatttcagaatcaaaagaaatgtaaaaaatgacattgtgcactaatgtgtgtgtgtgaattgtgtagggatacattagtaaattcctataatggatgagagttgtggtttgatcagcaagaataactcacaaaagatagagaaagagagtcctcccaaacatgagtcctcccaaaggacaaaaacgaagcaagaaaaatgaggaggaaagttgctcggtacctcatccttgacggggttatgtacagacgtggcttctcaatgccacttttgagacgtgtcattaaggaagaagttgaacgactattgattgaagtgcataaaggtttctgcggaaatcaccaaagcaaataaaaaaaatatttagacaagggtacttttggcctaccatgatcgaggattcaatggattatgtcaaaaaatgtgacaagtgccaaagattcttaaagatcctgagagctccaccaaacgagctcacacaaatgcagtctctttggccctttactatatgggggatagacttgatcgagcaacttcctaaaggaaaaggaggagtacgatatgttgtagtagcagttgactatttcagtaagtggacagaaactgaaccattggcaactataacttcaaagaaagttcttgactttattgtcaagaacatcatatgtcattttggaccccctcaaaaaattgtatcagacaatgaaaaataatttgatagcgacatattcaccaacttctgcaataggcacgacattattaaaagttctccgtagttgcacaccctcaagaaaatggacaggtagaggttgtaaacaagaccctcaaggacactatgaaaaatcatctagaagaggcaaaaggtagttggcacgacctccttccagaggtactttagtcacacaagaccaccgagaagacaaccatcggacaaacaccctttgcattagcgtatggctataaagcaatgttgcccattgagttagaaccaccgtcttacaggaggacaacctatgaccaaagaacaaaccacacattgttagcagaatcccttgatgaaatagaagaaagaagagaccaaaccaacttaaaactacatgcctactagcaaaaagttaccaggtactttaataagtaagtcaa

SEQ ID NO: 206414 - DNA, 874 bp, Cannabis indica
gtaaaattggtatagtcaatatagataccattaccacatagtggcattcaagtaatgtcatttgatttcctctgtttcaacctatgatttataaattacttctatacaaaataagaaagggtctctccaaggcataaatggttgagaatttaggttctcatcatttttggtaaaatcaagtccaccgcgaagacattcataaattgctctaccgtaattcttagcggataaccccaatataaatatattagttaaaaaataaaaagtcaatatgtatttgcaaaaaacactaattttatactacaatattactttaaaatttgcaatattactatttattatatccaatccaatgtattattatatttcgttaatataataatcttgtttatgataaaacaaaaataaatttataaatataaatatttatccatttttatctttagttttccattagcaattaacaaagtgagaataccttttatttgtttagttatttatcaaaaaaatttagtgaaataagttaataaaacacaacttacagtcaatgtttttttgaacataacaataacataaaaatttgaataaattatagtagataaacatataaattacagtcaatgttagcatataaattacataacaattacagtcaatgttatagtagataaattatagtagataaaaatttgttcaaaaaaaaaaaaaaaaacttaacagtcaatgttagcatataaatttgtaaataaacataacaatataacataaaagataaaatagaaaagataaaatctatttatttatacattcttcaatataattatagtagatatataataagggtaaaattatcaattaaattatagacaccaac

SEQ ID NO: 206415 - DNA, 706 bp, Cannabis indica
tcccttttcagtcttgttcagtaaagtatggaataacaatgtgggtggtgggtgcaggggatcttgataaatggtcaatttccagggcctcagattgatgctgtaacaaacgacaacttgatcatcaatgtctataattatctcagagaaccactccttgtttcctggtaatgttctccattcttttcgtgtctcaatcttttcaatcttttcttctcttgttgagaaaaattgggttagaaaatggtaaaataaaagtggtctttctaacctagtttacaatgcgaatcattttttgggacaaaatgtgatacttttcactcttatgtataatattgagttaaggaagaaagcttatgcactttatccacgtttaatagatctttggcttttaaactaatatgcatataactactaactaacttaacccttttcccttaatgattttctcattactaatgtctcctaaataaataggaaaatttatttaaatgcagggttactctggtcattttgttgagtgttatacatatttattttattctttttagcaaaatgaggtggtcttaatttgtgtctttccttttacttaacactaataaaattaagcaaaagcattgggactgaacagcatctttcttcttttaagcaatttttgtcgaattggtggtaccttcccctagagaagctaagagcatgtttggta

SEQ ID NO: 206416 - DNA, 891 bp, Cannabis indica
aatacaactgaaatactaactaaaagaaggatgccgaccactacaaataaaagatgacaaaagtcagttgttctacataaagctattaagcaaagagattgatttcacatggtacccattgtgtgtgaacaaaatcagcaacacagagagacatacctttttggtacctgacctaacaatgatgtgcaacaacatgatgatgacagcatatggcaacacctcaacacaggcaggtgtgcaaaaacctggaaacaatccaacaacaacaaacaagcaacaactatctgcagcaacaattggatcagttcaggatgatgcttttttgctcaatactgtgactgtaacatcagagtcaactatacaacaaccagaaaataacaacaaaaaaactcctgcagtagatgaatattttgacttcaccgactacacaaagctcgtggctgcaaaaatggtacaacaacttgaaaacaaccagaaagaagaagaagaagaagtcgacaatatagaaataattatcatcactgatagacgacataaaacaatagaaaagggacaaatttacaaggacaaagatacattgataagtgccctatgctactttgtaatcaagaaaatattttaatacaaagtagtaaaatcttgcactaaagaatacaatattgtttgtttagactcaacctgcaaatggagtttaaaggcttcaaaaaatagaaatacagaaacattcataataaggagttatcaagaacaacacacatgtgtggtttcaataagatttggagatcaacaacaagcaactgcaaagttgatagcaaatttcgtaaaaccaaagttcttgaacctgaaaacaaagtgcagtcatgcagatataaaggcagaaatgaaagacaa

SEQ ID NO: 206417 - DNA, 629 bp, Cannabis indica
caatttattggtctttagaaacacttatgggatgaggaaatgcaaataaagaatgagatttgttatcttatttacttttttaattttgttatggaatgagaatgaaatatgtgagtcctgtaataatttggaattgaggaataagattgataatcgtatgaggttggtgggactgccactcgtattcattctaaaattatgaaatgtcatttttaccttcttttaattattttttcaattaaaaaaaataaaaaaatcaaataaaactctattaaagatatttttgtaacttaaaataatttttttcaattacaaaataatgtaaacacatcaattagaatgttgtttattccgattttgattctcacgagtcaagtaaataacttattcaatctgattcttagtcattacgattacgtgtaaataaacacaccattagttgaatctgttgttaaagttttttttccttgtaaacaacatggagtttgcctattttattaattctagtgaaatcattatgtaataatctttattcgattgacttaaatttttttatttttctctaaaaataaataaaactaatttcctcaagatcaatgtaaccatttttcatttttgttgctattttt

SEQ ID NO: 206418 - DNA, 1579 bp, Cannabis indica
aaagagttagcaattggagaagtccaaagatcactacaaataatatcaaatggtagaaaagtgtatgataaagaatcataaaagtgaagtttagcatgttttctaagaggacaatatgagcaaaaaatttcacaagccttattacattcaataaatttattactacgaagagaatcgataatattattgccagaatgacctaaatgattatgccaaatatcatgagacatagtagtaaaagttgaatgtgtgggtgatgtggcttgagaatttgagaagagaggatataagtccccaacacagtcacatctcattagtctggtccctgtttgtaaatcattgatcgaaaaactaaaagggtcaaaagagatagaaaccatattgtcagtggtaaatcattgatcgaaaaaccaaaagggtcaaaagagatagaaaccatattgtcagtggtaaatttacgaacagagatcagatttttaataaagtttgggagcatgtaacacactttgaagaacaaaaggaggataaggttggggtaaattagtgctaccgtgattgacaactagaattaaatgactactaacaacaacaatgtcatgatgtttattgcttaaattgaaataagacgaaagaatacctacatccgccgtcatgtgagatgtggcaccgatatccatgtagtagtttccatcgggttgagagaaagatagagcatgcatagcagcctcaatatcagttggcgtgtaacttgtagtagatgtagtcataacattgaaggcttgaggtttgggcccaagcacatgaggcctaacaaaagatttttgtgtcatgtaattgggtggtggctgccaagaataggcagggaaaggacaaggatgaatggtccacccccaatttggctgccactatggccattgtgactgagtttgaggacgtggatgctgactgaatggaccaccattggccccgccttgtttactagacctttttccgtccctttacttttgttgttgttccgccctttgttgttactgttgatgcgtttaggagcaaaggaagagtcattggagtcattggtgcttgctgtaaccatggttatgccattgtgggtgccaaattcacatgtgacacgtgctttaatggtgcgttttgccatttttaaccttgatcgatagctttcgaacgaaggtagggggtcttgattttggatgaaatcaatcgtaccaatatacacctccagcaaagatcctgtgagacgtaacaggagccgcccaattgacatcgacatgcgcaagccgatctgcaagagattgaaggtaattgagtagttatcgatggtatggtgttccttaaaaaacgacagtggtgaagtcttcctcgaggagggttgctcgcgaagccttattgtcttgaaataaagcttcgagtcatttctatgctccctcagctatgtcattacgtcgtaggatagcaaaggagaaggtcggaggaaatggtaccatatatccactggagaatcgtagtgtcaaggcatttccataaggcaagatcagtatttttgtagcaaggtatgctgctc

SEQ ID NO: 206419 - DNA, 1445 bp, Cannabis indica
ggtcatgaaaatgccttttgtttttcccttatttattattttgccttccttttttttatgaaatattttgctttcctttcggtggattatctttctggaattagatcgttggtagattgtaattatcaaatgatttttgttttgtaataattacaacccatcatgtaatgtatatttataaaattatgaaaaaaaaaaccaggactggctgtttcctatctgtattgcaatcttgacttgaattggaggtgatgcacttgtgtgtcttcaaatcttcattttctgttattaaaaatgataaatttgcaatgtttctatttcatttttgataaatttaactacaccaaatgtggtatttactctattactaaaattctataatgggattaagatttggtagataggtagcttctatgtagtatttattaattttgtggctttaaaaaatatttataatattttacacaggttctatttttgtaaagtagaatattttagattttttaagagaaataaataatacataaaatacttaattaatttcataaaataaataatacataaggtttttattaagtttaattttttttttaataatgtagtatacttattattattttatggtagtgtaaatataactctccaaaattattaacactataatagttatagattattgatagatattgtttcaatttaattatatatactaataaattcggtatgattattagtatatatacaagttatataattatcaaaaagcaaaatactcacctaaaaagaataaagaaactttattattttaaaattatacttggataaaataataacttctaccaatattttacccaagataaaataccaactggaaggtaagtttatttaacattgaccttaataagtgtaatgtggtatttgttttattaattgagtaatttagattttttgtaatttaatatgtattgaaggtcaattatgtaatttaattagtggaagcctaaaaatattctcactatatagcttttttgttaatcatagacaattttttttaacatatttttttaaatggatttattttaacatattaatgtgtgaaaattgtaaaattttagtaaggcaaagctataatttgaattatccctctcaaagaaaactcttccttcctctgtaattgctctcaattcatacacaaaattcagtgtactataatgtgctataattatgaattatttaatatttgtgtgtaaattttgtgagtgtagaaagatgtgaacattttgatttttgatgccttaaagcttagatggttcggtttaatttatcatgcaagcagtggaatagtaaagaaatgaagaaaacaacagttgggcatcttcaattgcaaatattttactatgaaagaaattaaaaatagataacatattgactacaaacaaacaaag

SEQ ID NO: 206420 - DNA, 657 bp, Cannabis indica
tacatttccttatataaagaggatcaaaattggtgtagttgatttgatttcgaatacaattcctttaatatataatgaacagtggttcctgtcctctttcaacattcattgaaagagtatgagattgtatgaactttggatcatatttttgatatggaacccatgatgtttaatagtccttctatcgattctgaagtttcacttgctattcgtattttggaaggttattgtcttctccataaagatagtactacgttagctcatcattacaaggcaattcatgtctctgtagattttgttttattacctttcttttctatttgaatttgagcttataacaacaataaattttcacattgagaaaagaccaaaaactaaccttgtgtgttataagtattgatgaccatattatcaactagaggaatgcttgaatatagggtgtatgtttagatgctttgatctccattatggtggaatcattagctaatcaaatggcacaattgtatattattctgttattcattgcatagcaaatgttgcataaaaaaatatatgatggtaaatatttgaagagtaacatgtaacatgtatatatgtgtttgttatatttgatcataattttgatgcatgtaacgggattgaggaagttgcagagct

SEQ ID NO: 206421 - DNA, 1076 bp, Cannabis indica
agagagagagagaaacccacctgcattttctgtcatcttcactagtttccatctttttgcttcaaaattctcagtaatgctactactactcacaatgtttcagatcagaactatgaattttaaaataagaaaaaaaaaaaaagaatcaaagtactcaaagaagaatgtgaaatgtttttgttttggtcagagaaagaaagaatctctagtggaaaaacatagatgcccacacttaaatatttgtttagaaaaccaagactccatgagagactcactcattactcactcatcagatgaaagtttataaaaatcccttgtccacacaggccagaaaacactcagaaataattaagtatgttgttgttggtaaatgtgaccctttctaatcaacccaatattttagttttcaattttttattatttatatatgtaaaataacattttactatataatttgtattaaaaccacttttcacaaagtttcactttaaagtactccatggctcagatataccgcaacactcaaagctttcgatatggaggagtggagaggactcttaagtaggaagtatcaatctatgattctatatgaatcattcatattagtatttatatataaataatattattgatttattagacattaagaatgtttcataaactagctaagtttagagtaagcagtaagaatgtttcataagcaagataaaattaagtttagagtgagcagtgaaaactgaattaaccgtgaagaagaaggaccaacgatttgatcagatcagacgtaattcaaaattcaaattgatgcagaagaagcatttattattagtaaagatcagagtggtgggtagatagacaacacatgcatttgtgtatttatgtgtacacatttcaaattttgaataagtacaataccgtaataataagaaatgaagaaaaaaataaaatggcaacgtgatgtacctgatttgtttaatgggtaagacctcttctcatttacttattagaactatttcgggttctattgtctttgcctcactatttgtgagaaaaggattgttggaaagttagcatgt

SEQ ID NO: 206422 - DNA, 516 bp, Cannabis indica
aagcataaaaaatcaaatttcacctgttaaatccactatatcccaatatattaaccaagttatatattgtaacaataattcgtgaacagtaatttttgtttcacaatatatcacaaataatctcaccaaatttatcaatcaagtaataataatctaatttatctaaaataataataataatcacctaaacataatatataaaaatattataaaaaatacaatttaataaaatattatataatacaataaaatattatatataatatattaattagttgatttataaagcaaggtcgtttatttaataattgataaaatctcttaattacagtaatcatttaattagttacttaattttatttttcattaattgttaaaatattatgacaattaattgtatttgacaataggaggagtaactcattcatcttatgtatggtaatttatttctatacattagcaatatgtgactaactttaatacatcctcttcagaaagtgtgggtataacaaacga

SEQ ID NO: 206423 - DNA, 882 bp, Cannabis indica
tatgacatcatcaagtcttggataaaaatttacaatgcactagaaagcttttattgacaattctttacattgtgatatctagtaaggatatatgaaatccattataatttgtacactaaattgtgtgatttttaagatttagttaagaatttcaatgtttgtaagtttttttttttttgtagtcgtagtttgaatatttttgtggatagtcttgttacaagagttagaatctctagagggaatgctgatttggtttatgggggagaaatttcccttgttttctatttttttccttgtcttaatgaacttagtttctttcaactaaagaaaacttgttgcactgaatattactcacattgtgtaagtttatttaaaaatttaacataaaataaattatcacaaaattaaactataaataaaaatgtcttaaggatataaaagaggggactcttattcttttcttttttaaacaaatcttaagcaattattcacggacttcattgacactttgttgtatgagttttttttttttgatagctattgtatatgataagaaattattgcttcaattaggtataaattgacaatacatttgcagattccttaagtgggagaagagaataatatgtttggtggaaagaatgaagtgatagaagaaggatagatagttactaatttataaagttattatttcatcattgtaattattttaataatatttgttgagggtatttttgtaatttaaataattgaagatggagagttacaataattgctatcttctcacctctcattttagggtgtttgcagttgcaggtgatgtgattttgactatttttcaattaactcgcacatgcaatttttcaattttcaaattgcacc

SEQ ID NO: 206424 - DNA, 913 bp, Cannabis indica
  modified_base (118)..(118): a, c, t, g, unknown or other
gcaaaaaaactatggattcgtttggttgcagagaaaattcaggaggatgtatatatataatatatatataaatataaaaacaagcaagaaaacagatagactaccttgccgagtgtgngagcaagagcagaaccagcgacaccggctccgacaataattacgtcgacgtcgccatctttggatcggcattcgccgttaatggccgtgatgtcattctggatacattcggttatcttgtccgaagaatccttcggaatcttgttcttcttgagaacaagattgtagaaagcaagaaggctgagaaaagagactgagatccaaccaatcacgaactgatcgaccatttccggcggaaacgacaaacaccggctggtccttcccggtcgttctcggttctgtctctctttcggcaatgcctgagtttttgtttttgtatttcttttttggaaaacagacccacccacgaggaggtttatgaggacaacgtgacactttttatatccctcgctcacaactcaaagtctcaaaacgacaattttacagctcaacatctacgttaccatacaatgctaaattgcgccaactcagtggtcacactcaccagccttagcctgcgcctgccgaaccacgtgttgactaataaaataactgttatttccccacctctcctccttaattctaatacgttttcgcacaacaagggttcaacattcgggtccgaaactgggtccacctgattgaaccgtctgctccgccggatcttaaaaccccggaagcctgcaattccatatcgaaacacacaatttcaagtttgcgtttcttggtcactagtcggtttgggcgtcggttcttatttggagaattttcatatgagattgagggtgtagtttatttttgatggcataaataaata

SEQ ID NO: 206425 - DNA, 634 bp, Cannabis indica
atatatatatttttttaatataataaaactgcatgctttcataattaataataacactactaaaattaccatgccatgcatccaaatatatatactataattaaactttcagatttttaatcctcgtacgtacaacgtagttaatactgatagtaattggcttggagtttaccaggttagtattttttttttgataaatttgcaccacaatattattattctctttccaagcagttaaaaaaatcaataggaggggaccaaatatatttgtgtcaattgtgaaggtgaacgtataattatatatatatacattatacacgtacagtacaatactatagtatataagtaagtacatatactgatatttttcaatattgggagatttttaggtatgggcattatataactacaattttttctatttatatcttaaatatcatatgtttattatatattgataataaaatttaaaataattatatattgcatgcacacgcgtattaattaaaaaatacacatagtgtaaattaattatttaactcttattttccgtaatataaattattttaccaacaagtaaaaaagtacgtggtctataaaaaacacccaaacttttttataaaatatatgtata

SEQ ID NO: 206426 - DNA, 834 bp, Cannabis indica
ccatctctatttttaaaactgttcatgaaaccatctattcttaaaactgttcatgaaaccatctctcattctggttggcatagtgcaatgatagaggagatggatcttttagatgatagtggtatttgggacttggtggatttgccttcagggaaataagttataggacacaagtgggtgttttcatttaaggtcaatcaatcgggatgagtctgttgcttgtttgaaaacctatcttgttactaaagggagagctcaaacctatggagtttgttctaataccttttttcttgttgcaaaattgacctctgttcacttatttattttgatggcagctactcatgactagcttttgcatcaactagatatcaagaatgtttttcttcatggtgatcttcaggaggaagtgtatatggagcagactcctgggtttgttactcagggggagacaagtcgcatttatcgtcttcaaaaatctttatatggtttgaaacagagtcctcgagcctagtttggaaaatgggttgattatctatataacaagttgagcacgatcaatatctatgttccaacttaagggagtgttagctgtgtattagttgtttaattagcttaattctagtttcccaattgtatagcttcctataatagattctgagctgtgcatgtatacgtgtattacttttcaatgaaagttacgattgatttttcaccaaacataacacttctaataaaaagaagaatatattttctcttaaagtagctctgttgatgtaaatttgcctacaggacaacccaatctttgctcgccgctacaaatcatgtaactgataa

SEQ ID NO: 206427 - DNA, 1586 bp, Cannabis indica
taaaaaaatatttccattattttattaataaacacatatcttaaaagattaaattgaaaattattaaaaattcaataaataaattaaacaaactaagggtttgtaaagagaaaattaaatttgtttatatttacaaacacatatcttaaaaaattaaataaaaataattataaattcaataaaaatataaattattcaaaaatagaaattaaactaaaacatgttatatttacttaaacaaatctaaattttttgagtaaaaaatagacttaaacctgttctcgtacaatttaatttttgttaatgaacttttttatatctaaatgaactttttaataaagaataattaatttttagatcaattaattagttttaaaattttgatttcttttttgtaattttattaatcattcaaaatacatatatgttttgaagatttaaattaattttttaagattcaaaaaaaaaaaaatattgaatctttttcatttttatttagagttgtaattttattgatcattcaaaatacatatattttttgaagatttaaattaattttaagattttaaaaaaaatatattgaatctttttttatttttatttagaggggtacgatttgatagttgtcaaagttgcgaatttacaaagacacgttagtatttacacagaataatatgacataacctaacaaaaagactaaatataaaagtttagaatgaatttttaacaagccgtatattttagaaggtatgatcacatgtgtcgaaagttaaagggataaaattgctaattattcaaaaaatatggttcgaacaatctattgtacgcgtatcaaaattcaatacgcatttaagctaggcttttaaatcttatttttaatattataaatttaatttttaaaaaagaaaaaaattgcgaaacatcaaaattactataacatacatcgttgaaaaaatttaaattttcatcaattagctaaatcagacataaccaaacaaataatggagctcgaaaaacccgaccaccaaacatgttctatgtccattgaaagagccaaatgggttctagcaatgcaccatcaaatcccctattacttatatttagtgtgaaatcaagttaaaacataagaatttattgaaattcgaaataaataaaaagggcattgctattagatactaatagtcattaacattattataagatgacgcttttcaaataattaacgatattttataaagattattatatttaattatataagatctgatcgatacttaattatactactcatgatagtatttttcaaaattaaaaaaaaaaaattagtgtaattgaatagtaacattttggttggtaggaagtttttgggtccataacatctcatataatacaagatattgttactgttgtattttgtactttttttaccggtaataattatttattccaaactcacatttttattgagctcaattacttgtaccactcatttttggttgttcttaaccacacatcacttcttctttccaattcataatatctctcatctctctttgctttttaattttatttattcctctaatttt

SEQ ID NO: 206428 - DNA, 1200 bp, Cannabis indica
cctaatattagttgtttacgttagttagctatatgtagttactatagtagattttataaaaataacaaaaaaataagaaattaaaaaactagtttaaatagtaaaagtaaaaaaaaaactaacctagattatatattagatggtggcatttggtatgagtctaattgctctatatataattatatatatatatatatatatatatatatatatgtcaaacacatgagctttttattttttggggtgtgaaattaattagtatgcaaagtgttctaaaattggataattaaagagggccaatgttaattagtgaggctaagaagggaacacatattttgatttttgatgcttgtgtatacataatttggaaaactagaaatatatagctatatctatgtgaacataatgttccaactgtacaagttttttcatgttgttgaaaagccatgacaacaacaacaacaataataataatattcatagttattaattgtgacaataataatgggaatatgggattgggaggactattttaagatgataagatttattatatgatatccctactattaataacttaagtcaaggcaaaatacaatttttttttcttttgttataacagctgttggagatatattgcatcaaaactcaaacatttaccacatatcactcgaggctagtcctaaattaaggtgggctaagtttgcgcttatggtctacttctatcagtgatccaaatgaaaaaaaaaaaaaaccttttaataaatatacattttttttcaataaattttaaaatatcatttatttttgtaaaaaaggttcaaaaaattattctttctaaggtccaaaatttacttaggatcggccctgatatcacctcattcttggtgtataagctatattatattttttcactttctttggcaacatcatcacaattctattttgtaacgtccccgcttcaaatctccattggactcttacacccacagaatgatagctcttatacacgagtatgtcactctggctacttcatggactgatgactaaccctacagactagcacgagtgtttccagagtgctttgtcctcactcgcactcttcctaagaaaacttcccaggaggtcacccatcctgaaattaccccagctcaagcacgcttaaccgtggagttttttcatgatggactactgaaaaac

SEQ ID NO: 206429 - DNA, 756 bp, Cannabis indica
cattattagagaagatataagcagttttttctagaccaagaaccatataaattaacacactccataactgcgcccacctctacccagtcagctttatagaaaatgaaaacatcattggcaaacataagatgtgaaatagacggactcagatgactaaccttgaacccggtgattgaacctgacgcttctttttacaataacagtcgagagaacacctcattgcgtagaataaaaatgtaaggcgagataggttcaccttgtcggaggcctctgccagggcaaaactgtttcagcgggccgcccttaagaaaaatcgagaaggacacagaattgatacatttcatcaccagttgaataaatttgttcgcgaacccaaatgccttcatggtcttattcaaaaaactccactcgatcctatcataggccttagacatgcccaacctaagacccacaaacccaactctacccttgagttttttaaaagaatccaatacctcatgtgccatgatactgttctcggcaatccatcttcctggaacaaaggcgattagaaaggcgagatgagctcttggaggaggggcctcaatcgatttgccaaaatctctgagatgatcttatacgtaaagttgcacaggctaatagggcaaaactcgtcgaaggtattagcttcgggctttttcgtgatgagcacaatgaaggtctgattaactctttcacaaactcccccatctcgaaaaattggatcatcgtggcaac

SEQ ID NO: 206430 - DNA, 954 bp, Cannabis indica
gagggacaaacattctaattagattttttaaaataattaaaggtcattcattatataaacatatatataggggagttttctattaatcaatatcaatgaagaaagaaagtcgtgcaaattaaatgaaatgagattgactttgtttcttattatatttactatttttaattacatgttttaatcatagcccttaatttagtttgatctcgatggtcaaaatatgatgtcaaaaattgtgtagaaaacttgtatccattgaacgtgtctctatatatatcatattgtattttattagtatttatagcatagatgaaaagaaaaatccattttttaaattacttaccaagttaaagagattgtttatcatctaatcatatgtcaatattacatacttatccaaatttgaatcttttattaagtttatactatacatttttaagtatgtatagattttttttttacaaattcaaactatgcattaattgaccaagacaacaaaagttacacgatatgcttaaactttttggtttttacaacaaagtcggattagaaataacaacattttatatattttaaaaaggaaaaaaagtcaaatcctaaagagtcaagtcattctttacgtactgtacagaagtcacaagtaccaaagaacattccaaatctaaaaaggcaaggccattgggcaatcagatatagtttgggtgagaaaacaagtggctaagcccctggtttcatatttttattagtcaattgctaaacgcatgcagcccactgtaattcaatttacaggtcgttattattctaatacgctccttatattatctatatatacataatatgcaaagaatttcagtgtaacggtttataagatatacataaacatagcaaaaattaaggttcaaaatcaaagtaataaatatatactttagctgctgttgctgatcatggggcgtt

SEQ ID NO: 206431 - DNA, 1898 bp, Cannabis indica
ggtttagcgccagggccgtagggaggggatttgggtccgggtctggtcctaatctaaaagattgattaaaaaaaaaaactgtttaaaaaaatattgaaagtgattttttttgtttttaaaattttgatttctaattataaaattgaaaagtaaaaacagttttatagaacatgtttttgaaaaatattttcacttttctacttttaaaaacagaaaactgattaaaaaagtgttaccaaacgccacctaaactattcaactttctgctttcatacaagtataaaataatatgttaactttacatttttaactatagatgatctccaactcttcatagcactactctaatacttaatgtaataaaattaaatataaaaacgttaaaaaaaaattataaaatattagaatactctaagaacaaatttatattgcggaactccaatttggactttgacacttttataatctctcaagaaattgaaaatgcttgataaatgaaggaaaattataaatctgataaacgattagattagttttgtaataattgaaaaaggacatcattaagcaattaaaatactttctagttaaaggtgaaattaatttaggataagaaagaaattttttaaaagaaaaaatatgaatatattttcactatagttgaatgacagcgataataaaattattagtatttttttgacccagctcattttatctttttactatcttttctcttttatttttttttaatatcttcagtctctttgtttttctcatttactctaatagttaatgtaataaaaatgaatataatgaggataaaaaattatatagaatattagaatactttacgaataaattcatattgtggaattgggtctttaacactttcataatctctcaataaataaaaatacttcataaatgaaggtaaaattctagatctgataaacgaagtagattagttttacaataaatcaacaaggacattatataagcaattcaaatacttgcaagctcaaggtgagattaatttaagatagtaagaatttttttaaaagaaaagtaatatttatatgttttcactatagtttaatgacagagagaataaaattattagtattttttgtgctatctcattttttttcaccattttttttttaatataattatctttagtctctgttttcccatttatcatacatacataaacttagcttatattacatattatttagtttcaatttacaacgagaaaaacaatttgtaaaaaagttgttaaattcgataatattttggaaaaaaaaagtaaaatagagatagtgatagatgagacatatcttaattgaaaattgaatgaatataacttatgtaaaatgttatttttattaaaaacaattttatatataatatgaaagcttttttaaaatattaatcataatgatataaaatgaaaattataatcaataaaataaaatatttaattatagattcttctttttctctattgtacacaatttattacaatttatatatatatggagaataaaagattaaaatataatttttaattatagttgatgtatatttattgttttcacatcattaaataaatccttctaattataaggacataacactctctaaaacacagtacatatatatatattcaggctccactcgagcttgccaattattttcttctttatttctcttcctaggtacagctccctaattaataaccacacatacatatattatatatatgagcattgctattaggcactagtggtgtctagcacctttgcgacatgtcgcgttgcgattggctagcgatactccctaaaaactattatattaaattatatggtacccgatacttagttgtatcaatagcgata

SEQ ID NO: 206432 - DNA, 851 bp, Cannabis indica
gtgattgaaaaattaaaaaacaataagcgtatataaactaattattttgaacactgacttttattattttaaacttatttaccattaatattaaaaatagaggtgagatcgatacttagtaatagtataactataaatatatggtcacataaaaacatttgcattatatatatatatatatatattttgaaaaattattgagccccccaaaagaaaggtgacatcaagattgcaccctattacaagagaaaactatctgcagcactttgtttttaagaaagaaaagggaaaggggattatctgatgtatgatatggttggatagttaaaaaagtttcactaccaagtagaaaactaagttcatttttaatggcatgtaaaaatatgaattagtaatattagtgtaaaaggggatatccgatgtaatgagtggtttttttcacattttaacattcaaatatatatatattttttagagtaaataatacgaaaacaataaaaaaaaactatataaaaataacaagaaaataacataaaaataataaaaactaataacaaaataactagagtacaatataaaaataacattaaaatattagaagatcgtaatttctgtaaataaaatttaaaaaatcgtaaaatatttaaaattctgtacaactatatttttataacatttttattatttttgtgtatttataaaataattctccccggttctcagttttaatcttaaaacatttattatatttatgatatagtgactaagatatattattccacttctgcgtacatggttatattctacttttgcatatatgtttaatagatagaatattattattagacatc

SEQ ID NO: 206433 - DNA, 778 bp, Cannabis indica
aactatgcaaattcccaataccaccataactgaagcaaagacatcatttttaactaaaaaaaagctaacattgtgagaaatgggtcattatgcaaattcctcaataccaccataactgcagcaaagaatgtaagattttgagaaatgggtgatcaccatacctgcagcaagaagtgcatcccagagttcttcaggggaaatagagccattatgctcaatatctatagattgaaaaatgagatagagttgaagctctttatcgtccatataacgcttaaattcatggtaatcgactctgccatcttggtttgaatcacagacatttaaaagatcttttgcgtacttgtattgaggtgggatttgaagagaggagagaccgctctcaatttgggaatattctaagtagcctccgtcggcggtgtcgaagaagttgaatagacttcgaattcttaagtccctttcttcttcggtttcttgcagagccaagagaacatgctccattgtcacagacgatgacgatgatgatgatgatgattctcccattccattcaattcaattcaatttcaatttcaatttcaattcaaaatcaaagctttcgttttatgccaaaattggaaggaaatgcatttagcagagttacctactaataaaaatcagatctttgaattcggagtcggagggatcattcccaatcatccacacacacacacaatggaacagaatcattctttttttcttttctttttgcctattttattatttattttataaataaaa

SEQ ID NO: 206434 - DNA, 1011 bp, Cannabis indica
gataccaattcaaacaatgttaatttttaaatgggcctagcagtttccaaggtaacatcgaccgatcctgaatcagaagatatgagcccagcagcttctccagtgactggatcagaaggcccaacaaaattaaatccagggatcagaccagtgttgggcccatcatcatctgctccagctttgactcatcttattccatcttctcttcctcataacatcatagcaaccatgatttatttgatcctcttctaacttatattatgagtttctttatatgtatcattgtgctaaaaaatgtttgctagatcttaataagtacttacgtctcttattttaatattggaatatttcatttctgtgaattcctaaaagccaagtataattattataataaacatattattttttattaatgagaaaatattaacgaatttaactcagatgatatgaagggtttgatggattaaaatctctaaagggttttacaaaaaaaaaaaaaaaaaaataaaataaaaaatctctaagggaagcttatatgtatttgtgtctatggggaattttcataaatataggagaaaaagttgaagtttatttttttatggcaaaataaaataataaagaaacttatgggatcaaaaatgatataattattcaaatgtaggaaaccaaaactatataaagaaaaaaaatactttgaaaatcttcattataattccaaaaaaaacaaaaactatgaaactctctctccaaatctccctcgtcatcttttatctctgtaaatcgcgatctcattgtgtgattgactacagtaattcaatctcaaaaaaccagcaaattcatcttcttctctcgtcatttcatgtctgtcgacagtctagaatgaaaaatcaccactgccgatcgttttctccagctctggtgacgtcgtcaattccttccgatcgtcttcttcagcaactggaacctgcaaaataatgcataggtaactgcttagacaaaaatccaatgctt

SEQ ID NO: 206435 - DNA, 959 bp, Cannabis indica
aaaatatgtttgtgtgattcctattaggaaaaaaacgtcatgccaacatcaatttagattactagtcaaatataataacctttcatgattataatagtatacctacatatcttaagtctttgaaatatagttggttgaaagaaaaatttggctccatcttggaaattacatacaaatgtggtacattagagatgcaattttctaaataagaacagtatttaataaaactgttggccgggtacatattcttctttttcataatgacaaaaataataatgaaaaatggtaaagaacaccgtaagtactattctcacactaaattttaatattgttttctataaattttaatttaataaaaatttaaaaaattaattcaattataaagtatcacatcgctattgtattagttatcttaaaatatcaaatactaattgtttactgaaattttttaaaattgattataaaataaataagcttaagaataaagtaaactagagaagaagaaaccaattttttatgcagttcgagtgttaataaatattagtccacaagtcaatactattgaactagaaccctaattgaaaaaccctaattctcagtattcaatttccaactcattgcatgaagaaataatattctatttataggggaaaattaggtatggacatactcggacccggtagcgtacgtgctctaccaactgatactgtggggagggtttcgagtaaggcaatgtctggatgttatacctagacgagtctttgattactcgctttcaggcagtcttttgaaggtatccaaacttgtccgggcaagctcttagcttctgggtcaaagggccttttccgaattagctagggagatttgatcttggcgagttagtgagatgggcttatgtctggatcagatcaatagcgtgacttagttatttgggtgaatagtaaatcaaaaggagccta

SEQ ID NO: 206436 - DNA, 896 bp, Cannabis indica
tatgagcttgagccaaactttcagatctccacagtctgcaaatttaaacccaaatctcaaaaccttctttcttcttcttctccaaagaaaagaaatattacaattacagtatgtcagggtttgagcatcaagtgaagcagagagccagagagctcaagcacttgctaaagaagggagttagggtcgtctcaaactcctgcaagaaaggctggttcaaggtcaagcacatcagacgctgattcctatgttgtctttttcgctatgtctacggtttcctgatctctttcatcgatcacaattttattgtaaaaaaaaattatatatgagaagaaaacatctgttaccatctttttctttttaattgtttttttttactgaactttttcttttcttatttattgtttcaatgaatataattatctctttttccggtcatggattgttcgctctcttctggtactatgaattctcccatattgtaatttcttattcatttctggatcaatgattattataagtttgatttgaatacatttggcgttaaaagtatttatttttctatcacataggctttattttttttttttttcgtttccttccttcggataaagtgaaaatgatttagttttctcagttacagaagaaactacctagatcaactagatttgctaataaaaggtcttcctattttcgacataatagaatttttaattatgtttgttttctagagagaattttaattattgtatttttagtagagactgaatatgaaacagattaagatcaataaaccattaaatttatgttttctttttttctttttttgtttttctcttaataagaaataaatcgatgatttaattcatgaagctacacatactgtcaagcatgactaa

SEQ ID NO: 206437 - DNA, 994 bp, Cannabis indica
aacacaactaccggctgatagcgaccttttttcttttttgcttaactagagtgagctctttttatgcaaccaaaatcacactaaagtgttcaataaatgcaatagaaatcgaatatttgttgcacatatttgtctctcttggacgactccgattcatctgcagcgtttgtgtgattctcatctggtccctccatacaatcttaaaagagtaagacatgtactgaatctaaaggtactggttccctacacagtccattacatatggccatatggggtcctctggctagactgtaagtcgagggggacaaattggtctatttgggaatggtaggtgagggcaaaatggtaatttcaagtgaaaaggatcacacatagaaaacaagcaaatctcagttcagattgagatctaaataattatatctcccttgtggtccttattctatggctgtctttataggtatggaaatgtaaaagatgagagggagagttgtggggatctttagctgttttgctattttgctaaaaaatggttaggtctttcacaagttgcataaagccacaactaacagttacccttaacttttggtttccttatagcaacctgtatgaaactttagggtacaacaatgctcacctattctatctcgcatgttcttttaagcccataattaaaaagaaaaatagtaataatagcaaaaactaacacatgggttttgcatatatttaaggcttcttctagtaatcttatatacgcatatatactatagtgatgaaataattgctaaaacgtgccactactcaacactgcttactttttttttaaacgtagaatcaatttttgtcaatttaaggattacagtattttcattatcagttaacgtaatttttgtaagctagtgtgagatttctatgaaaaacaactaactttcaactttaatgaatgaatttatcatttgatttagattgtaaagaacacatctttatactgtgaaat

SEQ ID NO: 206438 - DNA, 608 bp, Cannabis indica
aatttattaactattatagaataccactaactatttatataaaacgtcaaatctaaatagtagtaggtatataaaatgtagcattatttatattagccaagagaagaaatcattttaaaactacataaccaatctagagaattaatcttgctagtaattaatgacttcatatagaattcttcaagcttgttttaaattttttttgttgtcttttctgcgagctttctactcacactgttgaacaaatacacgatgaacatgtaataagccatctcttctaattttgatttcttttctggtttcttttctgttggacaagtacattgttgttattagtcaatataatctacagcagtaatatctgtattcactcattgtttttactttaattttaaatttcttgaaaaatatatatagttaaaagtaaattattgcttcattttcttttaaatggaaatcaaattattacctcttcaaagtgacagatattttctaataattttttaatttatttaatcactttcataattatagaaatcgatcggggaaatttagtattaaattgatttacatttggtatttagctaaagctcaggaacataaaaaaa

SEQ ID NO: 206439 - DNA, 677 bp, Cannabis indica
tttttcttttttattgacagaacaataacttggattttgctctgtccaaatttagtacaatataaagaccatgtctgactagggccatatccatagactgccaccaacattttattaatattaattaattattatgattttttaatttatgttttgaattttttgtcaagcagtgaaaaaaatagaaataaaaattgttttttggtgtaatttaattcttgttattaataatccaaattcgtgaagacctaggaaactgccacctttttggcttttcttttcctttatacccttttactttttattatttggaagatattggcccatatatttttgactaatttactcaatttacccaccgcattgatcgccgctcgttttggtttaactctcattataatttcccgcttcactaacttaacttattaaaatacaaaattaatttgaacttttttataattaacattaaaatcatgtcttaatgattaactcatattatggacaaccctaagagagaaaatcccttattcactaacatgtattttttattattataaagtattattggtgcctagtaccttactcggtgttttattgttattggtataattgagtatggaattacatatacttaaaaaaataatttttagagaatattgctaaccaatcatatgacc

SEQ ID NO: 206440 - DNA, 1408 bp, Cannabis indica
atagttccataagcacgtaattacattaattgcatcattttacccttctcgggtcatagttactaaaatgcccatggcccaccgacagggtcttatcatataattaatcaaataaattctcatatattgaactatataataatataattccttaattatttataatcatctaattaaggttttgctaatccatttcttaaatccagggtaacaggtgttgcttggcattataggaattagggcagacctctatagttcttcagttgaaagccctgattcggtcgtgctctcctgattttatcttcattaccgagttgaaagtggatgccacctttttggtacgttctcttaaaaatttacacttttagtttaatattgttgttccagttattagcactgctttaggtattttttttgcttggaaatcaggatttatctttgaaggcattagtatctccaaaaatcagatatctagaattgtgtattcaaatccagagcgctacccgtggttactctcttgtatttatattcctccttatctccatgctaagaagaatttttggtcaaatctaatggaagtcggtaacaagtttggtgagccttggttgagtttaggtgatgtgaattttgttctaggtaactctcatcgtgttgcgtcaaaagaaaaggaccaattcatccagtttatctctgagtttgttaaatgcaatgctttgatagatatgcccattaaaggggacaatttaacttgggataaccacatggagggagttgagcatgtgaatctgcccttgataaagctttggtcaatgaggattggttacgtatcttccctagagctgtgatccaatcacttcatactagtaattcttatcataagcccctgtatattcatactgatgaaccccattccttttcaaagaggctgttcagatttgaggtctggtggactagggaccctcgtagctctctggtggttaaacatgcttggaagtccttgtcttttgactacgctctggctagaatctttagaaagattggggctactcgcctagctttgagcaaatggaatagagagcaatttggtaagctagatacctatatccgccaattagagcatcaactaaagaacatccagagtttgccagcggggtcacgtagttgggccagcgagttagaggtgagaacaacactgaatgaggccttaatacggaaagctctttactggcaacagagatcacgggtctcgtggctcaaggaaggtgataaatgctctaagttcttcttcgttttgaccatgatttgtaataggcagaatgttgtggagagtatcttgaatagagatggagtttagattacgaaaaggaaggacattggtagggaattcttaacctttctttgggacatc

SEQ ID NO: 206441 - DNA, 730 bp, Cannabis indica
ctgctttcgacatgataccaaatgcaagcttttagacattttagaccatgttttttgaatgcttaccggctgtggtgatgactttactgggccaggataggaaaaatgctattggtttgaaagagagacttgattggtgttttatcaatactgtgtggaaagataatttgttaattaaacccaactttgacacacttggactattttggttcggatcatagagtactttgtgcggatattacattctctcaaccgcaaaatcctattgttcggaagaaatctcattttcgatttgagaggatttggcttaatgatgaagagtgcactgatattatttctaattactggtttaattcggaacatcaagatccagctgttggtttaacatcttgtttacaacagtgtgcttcgcacttgcaagattggcactataaaaaatttggcaaaatgaaaaaggacatttctaaagctcaaaaaaaggtgaatcgactgaactctgctgcaacaacatcaatgaatcattctcaggaggttcaatcggctgagaaaattttagaggagttgttagccaatgaagaacaatattggcaacaaaggtcatgagtttagtggttgcaatcgagaaatagaaacacaaaatttttttcattcaaaagcttcggcaaggcaatccaacaatcgaattaaagaactttaggatgctaatggaaatgtcacaacttcaaaggag

SEQ ID NO: 206442 - DNA, 1369 bp, Cannabis indica
aaccctaaattactctaattcttacttgtttcatatttctaattatcttgaaattgaaattaagtatattaatatgttgttagccatcgatgaaaataaattttgtttaatattttatataaatatattttctccattaattattaaattaaattaaaataagtacgtttctgttatccgtatttttagataagtgatatatttatttctaagtcccaaaatcaatttacgggcctattcaccatacccaatcaaactagtgagtcagcccacaacgaaatcagattatggctctgggtttaactgcccaaccttgactttgacaaagccaaaacttgtggtccctaaaggatgaatctcatcctgagaaggaaagactcaaagaagcgcagttggatactcttatgggataattggggaggagtacttagtcgaaggggtgtctgggaatagtcctacacgacatcccctgatactgaatcctacagacttaggagtatgtctcctgtgtcatgcctgggaaaggcacccgacaaaactcaaactaccttttttgcttaacacccactactctgatatctattattcgcgattggcagcgcacacccagttattaacgacgtcagacaatacgattttatacgaacaacggaaaccttctaattaagctaggcctcacctacccaaatcaatattataatgtattttaccctatctgtgtgcttattttctcatgcaaaaccctatcagagtctgctcgataacccagttttagcctataagtaagactttatcccttcatgccaagttacgaatttttgacaagaatacttgtgtaaaatactctatagccaaaagtttaataatattgactcgtacactaaagctagttaacgtcacaaccacttaaaaattcttatctcatttactttataatcattttccccttagcttaatcctttattaattcgtttttttgaaaattttggtaaatattttggtatttttattaaaaataaaatatttaaataatgtagggaaaaaataaagaaaaaactgatgtatgatgtaatgtaaaaatttgaggtaaagttaaaaaatgttagtaaaatattttaaagaatagagtaaaaagttaaatgtgagtgctcttataatatgcattttttaaaaatattttttttattttaattaatatttactttttaaaaatttccttaagaaaatatcatgcaattctgatacatacaattacgttacacaataaaatctatcataacatatatatgtaaatgtatgtgaaaacatcacaaattttgtgtctccctcccccaaactatgatcacactagcttgaaaaaataagatac

SEQ ID NO: 206443 - DNA, 505 bp, Cannabis indica
ctttcaagtttggggtttgtgaggaccgatgattatgatttcgtgatcccctaggctaagattggtcattaacagtcgttgaggccttctcgtggctttgccgagaaaggaagagagagaaaagagaggaacggctgtcaggctttctattttgatttttaggtcgtcgaacacggtggcattcaccgcttcgtaaaacaatcgccggagctcggcatggttgctcttcgaatttttgtttttgctgaaagagcagttgtggattctccaagagaagaaagagaagctattgaaaaattatttgggctgattagggtttcaagaagtttcttaaatacctctataagtttaggcttgaaaatttcaataataataatattattaaaaattataataataacttcttaaaaaaataaaactaataagatcatgcacctttaatatttgtttttagttttttgataggtgtcgtactatctttatgcgtttttttttaatttttttt

SEQ ID NO: 206444 - DNA, 1145 bp, Cannabis indica
atcttcccgattacttgaatccaccttttttatcgggggggcagatcttcatcaatgaaaccaaacttcatgttcagctcttccttttatgtttctccttcttggattctgagcgttccttctcactgccataatgagatctacttggagaggccttgcttctgtgaccatggtgtttagaatgctttttgctgctgcggctcttttctcgagaagattctttccttctttttgatctagaatggtgacggcttcgatgatcacttgatgaatcactatctgaatcactgatgttccggtgtcgcctagagagtcttctactcttttcaccttctgaagatgaagtcttttttggattcactttatcatttttactcttagaagagccaatctcaagcagtctactactcttggttgagtcaaatatttcaactttcttgtcatcatgtgaaaccatatgatcacctgtagcgttagtgttcataagaagcttattagcttgaaagtgcaggaccttgtcatcccctgaattctcatctactttctgggaaatagatgccccagctttgtcagtcgagtagagcggatcaggcggaacctctagacctagttctttacccaaggattccaaaaagtctcctgccatcaaacggcttaatgctgtattggctgcttcgaccttcttttctggatgctccactttatttagaataggggtagtgtcctcttcctcatctgaatcatcagagaagatagcctgcataaaagtgaagactgtctgagaatgggtctataacatacatacagagcaagaacctaagaatgaaacaccagtcatggtacttctgaagagaattagggtgcaaaatctttggacatcgcagaataaactttttcttttgttaacctaacatgcagatgcactcttgtttaccatatatggaataatggaaggcttttttcttcaaattaaagtgagatgcagcgtataatgcaaaggatgagtgagatgaaatttgaaagtaatccggaaaagcttcagctagtcaaggtgaataatcaagaacatacatacaatgcatccaaagtaaatgaggctggaagtaactgaaaagctgtggtaacatgagagagagagagagaga

SEQ ID NO: 206445 - DNA, 1757 bp, Cannabis indica
  modified_base (1645)..(1645): a, c, t, g, unknown or other
gagtcacattataattagtattaaatcatattttcaaaattatatataagattcatgaatctaactatattttcatccataaacaaacacagtttacaaattttctgacaatcatatattccttcttaacattctttgtacaagatgcccccgtgttgtcgtgtgtaaccaatttacttaaagacaatcattcttttcaaattgcaggtgaagtgcagtgtgagcagccaaacaattcattatacactttcacaggcaatctcatttttcagaagcaaactatacctctctccccaaaccaactcctgctgagagtaagacatgattaatttttcttcttgcagtttatttctttccctttcgataggagtttagaaagttgtagtgttcttgtccttgcttagaattatatcatcgtttgtagcaaatgtcttcgaatgatggaaaggaagattatcaaacagtaccatgttgcttgcaaattgttttaaatttttagatattggtagaaggtttttttatcttgcacgaagaaaccaatcattaatctggaagcagtactttgttggtgtctttgacccagagttttatccatattcctttatttttactagaattactatgaattaacattgggactatatcatgttttttcagggatgcagtctaaggaacacagagtatattgttggggctgttatgttttcaggtcatgaaacaaaggtttgttttcaagaattcctgtgagctacaaagcctatctaactgtttagttgtagcaaacacttttgtacaaaattaggtttgctgatagttcttcattttacttgtttcctttgcaactgggataggattgagcagattttgagctccattttactgcctttttgtcttttttttttccgggaacctctgacatatggtggcagatctctattgtattttttttttctttgcaactggagattacaaaattctagaattttttgtcacttgtactgttgttttctttctgtggtacctctccgatatttgttctttctgtcacttgccaatttgatttacctttcaattgaatctttgcaggtaatgatgaatgccatgaatgttccttccaaaagaagtacactggagagaaaactcgacaaacttatacttacactttttggaaccctctttctgatgtgtctcattggagcaattggcaggtttgatgcccactaaactatatttcagggttattcaacatgtatttcccgggttgacgatgtatgcttttgatattctgcagcggtgtattcattaataagaagtacttctacttgggtctaactaaatctccggaaaatcaattcaatcctgagaaaccttttgtggtaacatatttgtccagaaatgaactactgtagaattgatagctcattggcagtttctactttgcttaacagtttgttctgtttttctgctaaattatgtttcttggtatcaggttgctattcttactatgttcactcttattactctatattcaactatcatccctatctcgctttatgtttccattgaggttaagactttttggctattatatatgtgtctacctatagcaatgaccataaaacttcctgatggctgcaaacatatntatgatttcagatgatcaagtttatccagtgtacccaatatatcaactaggacttgcatatgtttcatgctgagagtaactccctgcattggctaggcttccaatttgatga

SEQ ID NO: 206446 - DNA, 647 bp, Cannabis indica
  modified_base (61)..(61): a, c, t, g, unknown or other
taaataaaaaagccttattaggatggtcctttagtggttgtcacatacatgggagtttttnttataataaaagaaaattatggctcatatatacgtaatatatttatgtatgacagttgaattttatgtttagaatttatccaagtgtcggtgggggtttgtttgtggtgggcttcaaattcaattattgtgaaacttatattgtgtgatgatgtgtttgaactttcatgtttcaagtaatagtaatagtgacccaatttatcaattttcccttttagaggaaattttcttttctttttcaaaatatatattattcgataagtagtgaagatgctttacgaaacatggggggatcacttattttcacttggccaatcataatattacagagagagagagagccatattatatgtgaccaaaatgtatgtagaataattaacaaagtatatgatgattatgattatgattatgatttgattagcaggtggggagtcagtactgtatatttatttatttatgtgcactgcatgtgaacaaattctattctattatcaaagttacatcatattagttctttttttattcttttgtttccaccacattttctctaaattaaactacaattttagttcatttatcaccatca

SEQ ID NO: 206447 - DNA, 1151 bp, Cannabis indica
tatatatatatatttgtcacttgataaaaattgattaactaacaaaaaaaaaaatcaaaacatttggtttggttaattaattccatccaactaaaatcatactagatataattagatgagcatggtatttgagttgtttatatataattgaatataattattcttgttattgtatattgattatgggattaattatattatttattttgtaattatacagacaaataataataataaattagtgatgagggatgtacctgagaagaagactggattcaccccagggaggggtggtaagcatcatggagcaacaaagaataatatgtctctacccaaaaaaatttcgtcgtctttataattatgaatagattaatgttacgtgcaatgcacatatatttaataataaataatgttatatataatttaattaaataaataatttcttttattaaaatataattaaatattttatataaattatgaaataaaacataatagtaaataaaaaataaataaagaaaactatacaatacattcatagatattgtgctcatcattttagacttttaaaagtattcttcaactacgtatactaacatcaaatctatatacatataacaatttctaaattagaaatatcaccaagaattattattacaagaagcatcattttaatatagggatatttatgttttcggtatacaaaaaattataatttaatttatttttatatgacaatgttacattataattattacaagcatatattatgtattttatcgagtttttttcctttcaaaaaaatcgaaatagtttatggttgtgaaaattaagttctaaataaacaattacacacgtataaaaataaactaaaaagattaatatgtacggtgtaacttactatttgaaccttcttttcaagactataaattattagaaaaactagtaaaatacatgattataatatatctatattactgcttataaaacaaattatacatttagattatctctaatgaataatttaatttttgtgataaaattgacttaaaaaaatgagtaatgttatgcaattatttggcttaatctttgcaattatacttgctaattaattaaaaatacagcaaattcattttattttatttttttta

SEQ ID NO: 206448 - DNA, 848 bp, Cannabis indica
aaaacatagtaatcttttaataggaaatttgaaaaaatgaaacatagtagtaattagttcttcacatttttcattccttctagatcgtcatttggattttttattttttgaagtttaccagtgacatttgggacaaactttcatgttcctacaaaaataaatatagatgagaatattttacctagtttttaagttagctatatatgtcacaagttgttgatttcttttagagagattttgtatgttattggttgataattttgtgctggttgagtgccgcccaatgatgtattgcaaatagctataagggatggatattactttgcctatgcagtaatggaagttaagttcatatgtttaccaaacaaaggaagaataaatgagagaaaattaaagctgtaatctttgcataagtcacttgaaattaaactgaaaaaacttaaatgatatgatagaaacttctctttctcaagcaagtcaaaccttgcagtttgacatggcgaaagcaagacaagaaagagaaattccaaaacctcatatattattgtatctcgtccagagccatgcaccttcttcatcgattattttttcagcctcaaacaagagtttctaagaacattcttttgaatcattacaaataaggaggacaaaggagtaggcaaaatttgaccattattaagtcataataacttttccaaatagattgaattttattcaaccttgcaaacatataattcggacaaggacatgaaaaagaaatttgaaataaccaatttcagttaaaacattcaacaagaagctcaatttaaggaatcccgaatatcaaatctctcctacttgattggccc

SEQ ID NO: 206449 - DNA, 827 bp, Cannabis indica
tatttataagcttgtataataacttataagttagacttcttcaaatgaactaaaaccaaaaattgtatttcctttgttccgttgctgttactattctataactagttaatttgaaagcttttcaacggctacaacctcctaccatctacttctaaatttagtagttgcgaataaattttatatatatatattttggtgtttagttaatgacaattaagaaaatctaattagtgactgtacatttatagacatacatgtcctcatataaaatttgtttagattgatttcaattttttgtttttttaagggtaaatagcgggataagtatccaaagttttgagtttgcaagcggcataaacccaatgattcttttagtagcataagtacccaatgtttgtaaaactgtaatttttctctatattttcgtcagtacagactctgttttaaatttattaaaaaaaaagatttagaagtaattgatactacatattttcgtccagactaaataatttagattttaggtcttatatgtgtactatttaagacaataacagaatctgtactgatgaaactagaagaaaattacagttttataaagattgggtacttatgccgctaaacaaatcatttagtttatgccgcttacaaataaaaaactttagatacttatgccattatttactattttttttaataattacgtgtactctttgtttaattacacttgtaattacgtagaaatgctttttaggttttaaatttaaaaggagaaagtacataactttaaatttttttttttgtaaagtacataactttaaatttgtcta

SEQ ID NO: 206450 - DNA, 618 bp, Cannabis indica
aatttattcttaatttaggatggtccactccgaacttatgtaaattaagaacatttatattagattagattaaatagtagtagtaatatggtacccagcctattatttattaaagtaaaatagtatttaatatttaattgtactaactagttagtggtgctggacacacctgatcataatgtgtttgaaactaaataccatatataagatgtctttattttattgttaattgattttgagatggaaccacatccaccttaccacacattcacctactctactcctttaaccatatactgccgcattctaatatagaaatgctaatatattgttgatgatgtacttacttgcaagacaaagagagaagcccaagcaagtgtggcgattataaggaagatggagccaaggaaccagtgcttctcggcggtggtgtcagcaacatcagattccttaggttgaatatgcctagaccataccatctccactatgggacctttgtataaagtcatcaacattgccccagccaccgtcactgatgttcccactacttttgcttggcacctcactcttttcatgtccaccttttccattctatattttaaaaaacaaaaaagaaaa

SEQ ID NO: 206451 - DNA, 818 bp, Cannabis indica
aggaaatcaatataagcaaaacaccaagaactctacatggggttcaaattctaaaggaaactcaaggaaacagtgctttactgcaagaaaggagggcacttcagagatgaatgtttgacattgaaggctaagttgagaagagacaactattaaggaaagaatgaaaaccaaggtgaggctgatgttgtaaatggttatgaatctgcatgagttcttgttgcatccagctcaaacttaggtggagaatggatcatagattcagggtgctcatttcatatgacactaaataagaatttgttgagtactcttacaaaagaacacaatggtactgtgttactaggcaacaacaaagcttttagcatcacaagaatttgtacagtgaggattaaggctcatgatgggcaaatcggaaccctgcaccaagtcaaaattttcccaaaactaaaaaagattgttatccataggcatatttgacaaacttggatacaaaatagatgtgaagtgatggtgtgatgataatcagacaagggtcacatgtgtagatgtaaggaaagttgaataatggtttgtacttcttggatggagacacagtagctcgatctgttgcaccaactattaactcagtataggtgcaaatcatacaagactgtaacacttaagactaggtcatgtaagccaaagagggcatgaagaacttgacaagcaaaggctattcaaggataagttgaaagaaaagttagaaattttgtaaagaatgtgtcttggaaaaggcctgcaagattaaattcaataaaagagaaaatactaccactgaaaga

SEQ ID NO: 206452 - DNA, 584 bp, Cannabis indica
accaactggtcacatgggaactaatgctcaagaggaaaccctaaatgcacgaaacactactaccatgcatggtaaccttgcaagcactacgcaaacaccaggtgttgaggccccccagagggaagcaaacttcaagcaagagtctgaaaggactcaaaatcatgggtgccaaccaatgggccatataactaacgtagagaaacctcgaaatatcaagagatccaataagactcctccaccaagtcctcctgaatgctctcagggcaccaggccccaagaccctgcaaagggaaatggacctactactcaaaatgaagggggtaatcgaagactttactttggatttggcagttatgacatccggccagtagggaccaacgaaccacttcatacttgaaaatacttttgagatgaaagaggagagtggtgccactactttgcctgtggccccgatggccaaaaatttgagcacttcccttgagtgcatggagaggagttgaacatgagtaaaaagttcaattctctccctaattgtgatttagttgaagactactttatggaaagtagccactacaatgctctga

SEQ ID NO: 206453 - DNA, 671 bp, Cannabis indica
atagtttccaggtttgaattctttgaactaagatttatatggtttcatatgaaatgaacactcaaaatccaagatccattcaaaatctgaattcttagaggtaaatagcaaagcactagtcaagtcatagccgtcactcatcactgttgcatctccttcagatctcaaatcacctgactttagcctctccgaacacatccttctgatatgccctagttttttttttttttagtaattacagcattgaacatgcttctgaccatcaaactgtgattttgatcttgagtttcctcttattcccttgtgatttcccctcttctcacttctgtctttcgtataatccatcaccactttcaaatttctttaaatcactcctttgattcagctcttttgaatcaaatgttgattcgacaccatcgagtgtaattgaccctcttccgcatagcattgtatctttaaattgaccaaatgaattcggtaaagaaatgagtaataataaagcttgatcttcatcttcaatggcaacaccaatatttttaagatccataatcaacttgttaaactcgtcaatctgttctgcaacagatttgtcctccatcatcttgaatgaatacaaggcctatttcagatataatatagtcaccaaacgatttagtcatatatagactttc

SEQ ID NO: 206454 - DNA, 710 bp, Cannabis indica
catgcagtccacatgcatttctccatatatcatatatatggccacgtatatactatttattactattggctatgatatatattaattaatctactttaattacttagagtttttttttaaactatgaaattatcaactacattcaaatttaacattcatttacaagagtatttgaagatcatcagggacaacattcctataaattctataatcagagaaaaaccgaaaccgcctaaccacaaagtgaccgactctattagctagatcgtctaatgaaacgaagactaacattttgtagagatgataataaaaatttacaatcattaataatcaacccaaaaacagaagccatttgttgtttactaaaaattgtttgaaccgtaactatgctatcagtctccaccttgactttttactccaacctttaccttttagccaactaagcctcctttacaccaactaaggcattaattagcatttggcataacccattattataattagttcatacatgagttattgactagaatggttgtccatatattagtgccacgtggtgtagaataatagataaatagtcttcgaaagctttagggcatggtttgtgttctcttctccacccatagttttctcataccaaaaagttctggtattatatgatttaattattcccacccaatctaaaggaaaaacagctctaaattaataaa

SEQ ID NO: 206455 - DNA, 672 bp, Cannabis indica
ttcacacaaaaacacaatattggattttttttggatagttaaatccaatatgaactgaaaagcctaagggttcccaagcccataagagttctagcagagaacactcattgttgaaagtggcccttgcatctaggcccatggactgcaagctttttagaggcccttgcttaacttggcccatagttacatcattctcttcaattttgaattcaccattaggacgtatccttttggattccatatataatactccttcattttgtgaagccactttcctcccaaaatttatttaaatggttgcccttaacttttatcagttaaaattctagctggaggcaaattattagcgccataaatttatccattaacaccaatctcttgattcattacaccaattatagatggaaagccgccagaattgcccttaattgccttctcatttaattctatcattgattcatcactattcagattcaccaaaccactaccatccatctccaatggaaatgcaccattcggtctttgccactttgcaccaatagagtagtgattagacttgatcagattagcacgcatccatactccataagattttatgatttcagctaaaaggtttaacaaaaagctacttacacaaaaccactcagaatggccaataaatccataaatgaa

SEQ ID NO: 206456 - DNA, 2633 bp, Cannabis indica
tggttttggcctctttcccatcaggtgttaccatggctacatcgacttcccttttgaacttcgggcattcatcagtcttgtcctttgcctccttcttggcagcttcatgctcggcctgaagattcttcttcaccttctcggcatctttagtaatgcgagtaatctccagttgggcatcattatattgcttaatcacaacctcgcactagcctatcaagttctggatctcaccctccatatacatgatcttttccatgcctcattgctgggcaaaaaagaaatgaaagatgttgtgaaaccaacaaacaaaaatacataaatattttgaaggataaaaaaaaaataagagaagtgagcaaataaagataagaaaatttacctagaggctgtgagatatattccttataagcatttgccccagatccccatgattgattaaatcccattcatgggggaggaaagccttgaaatgacgccaaaatattgcaccaaacactgcagtgtaatctgagctagtttttccagcctcgacaggcaaagttttgagggcctggctcgaggaagaggaggcttgggtcactttgggaattggctcgttggtacttgcgggggccggaggagggattggatcttgggtctctctttcagggacctcgagattagcattctaggaggctcgcttcttattagccgtagttttcttggacctctttaagggatcaacctcgacgtctaatggggcctacgagatggtcaacctcttctttccctttctgtggacgagaccatcgaagttcatttttgcgagacaagacaaagtgttagcatttattgaaaaacaagtaaaagggtatattggggcataatttcctacctaaggaatttaccatactcactagaagatgaggaagaaggactataatatccactaaaatccctacaacatgtgatcctgaatatatcatagggattaattggttctaaatcccatctcgtgtctaaatgacttgccctatctgtcatggtaccgtactgctcggctatcccatggtacgactcaatacagttaatttggacgtggaacctgggatataaactatcaagcctatgtgtaatacgatctatgaggaggggattctaggtgtaaaagttatagcggctatctcgaaatgaaactagagtattacgctcggccctaagcactgtgggtgaccaaccacattgattacctcaggatgctccttctttggcttcccgaggggcagtattcttggggtattgtgcctgagccttgcgatcttgagctttctcctcgttcgggacaagaacttgcttccaagaagaatacttgggatatttataatcgcaagtaaactccttgccacatacctctggttgacctcattgagaagaaagtcacatgacctaagactgcatgggagagtcaacaagagcctgcgtcgctcggccatctcaagagtaggggcaggtcttttcgagacagctatcgaaaaacaaagcaaaattacaatcagataaacccaaataaaaggcatggactaatttaaccaaatcttgtgcaaataatcacttacgtataatgcagaaagtggttgtgccgatgcgggagagaccggtcgtcaagaagaattcatccttgaaggaagttttatttggaaaatccttgcgatcacctgtgtgagtcccaagatagtaaaaatccactgttgcattcttcctcgctagaacagccttaacagagtagagatactctatttccaagggagtggagccctcccaattcaaaattttctacagaacccttaaacttgcgaggattctatatgaaattggattcagttggaatggggcaagcctgaggtggtttaggaagtccttgaaatagtctcgcagagggattattgctccagccctaatgtgttcaaggctccaagcgcctatcctagtcgagccacttgtactggtctcaccactggccccctcagatattttgcttgtatgtcgcacttgaggatagcaactgaactcaccatcaactactgatctaacccaacagtctcgcatatattcgaccccacaagtcctcagggtattacgtacatagtctccgatgactcacacctttgactctattagctcagcctcgaaggtgatgttagggtcctgaggagtctttgatttctgtggcttggaagacataatttcaaagtccaagtcccctggttcaaaaacaattgtgaccttaggtaaaaacaaaggcttagccaaaggaatagaagacaaactgagaggttcaggcgaagcaatgtctcacaagaaacggaatctgccttctgtaatttcttgcaagaagcgtctgtggtgactagcaatatcttcttggtgggttttcactatgtgttccctaatttttgtatcatttatctctaatttggatttgggtttttaaattctgggtttgtattggatggcaagttcagtgggatattctatttctaaatcttttcgatgataaacttctgaaccagtttgggacactgctgcaagaagaaagcaatcccaatttctagaagaattttatcaaaccaatagttggtaaattggagaatctc

SEQ ID NO: 206457 - DNA, 1150 bp, Cannabis indica
tagagccagttctaagattcaccttttccagtcatcctcttgtggatggtgtactgtatggtgaaatagttagtgaagaatttaacataaagagaattatgattagtaagaaaacttactgatatgatgttatatttaaaagtcagaacatatagaacatcatttaggaccaactagggggagatagcaacagatccacttttattcaagcatgttatcattgtttggtagccaaagttttatgggagtaacattacaaatgaactgaaaaagtttaaaatcataacacatatgtctggttgctcctgagtccaatatccaaaatccatttataggaaaggaactcatattagaaagtatgatacctgtgatacctgtggatgtgccagggtctgaactagtcataccagattgttgtacaacaagaaggttcacaagttgttggtactatgttgcaatgagttaaggcagtaaggttgaactgtcattggaagaagtcccaccctcattgttggtctggatttggttggttgtaacctcttttcctttgtagttcttgttgtaaccaggtgggtagccatgtattttgtagcatttctcgaaagtgtggccaagaacgttgcaatgggtgtagaaaggcatgttcctcttttgtggttgagacttatgtccattggaatcaggtttgttcgagttattcttgtccccttgaaaggaaaattccatggtaggattctattttatagcagcagtgtattttcctctttggtttttctcttgagtaactaaatgaaagacacagttcactttaggtaggggatccatgcgaagtatgctacttttgacatgaaaataagaatctgagagtcccattagaaaagacatgatatattccatgtgatggtgttcttgaagtttcgtgacaccaccttattacaaatgcaagaaggtcgataattagacaattgtttccaaattgtctttagcttagtaacatacatgcttattccttgattatcttgcttcaagttcattaaaaatttctcaaattatatatgtatggcccattcctttgatgaaaaggaacctttagatcgttccatatagttgttggagattcatcataaaaaatactaaaggaaattttttt

SEQ ID NO: 206458 - DNA, 1035 bp, Cannabis indica
ttttaaggggtgcactgtagaattacccaaaagtatttaaagtgcttaattattaatatgagagagctcaatattgaataattagtcacttaatttgttgaaaattctagtccaaaattgagctctagcagaacatacatactctaacgtttaatcagaggaacaacatgtatcataattacattatgttaatccttaatcctgttaatcgaatcgataagccaaataatttaaaaaaaatactaaattatataaaacaactagtaataataaaatttacctttacttaaaaccaaaataacaaaattacatatttaagatcccgttaaatttttttacaaaatattacaaatcatttttatacaagccgatctaagcaacaaaataggattttatacaatcaccatgttggacccaaccctcgtggtctagcttggccgaaacatgtacaaccagggtaggccatgagcataggcaggctaggcctgtgcctagggcccacctagtccaagggccaaaaaaaaaaaaatctttcccttttaaaattacacaattttttttttgctgattttgaaaaatattactttgttttctgaataagggcctaaaaataatctttttccctatggctcactaaatttcagggtcggccctgtgtacaactcatcttcaaaaccctcaaactcatgtgttgacctcaaattttggtcaacagacaacagagtcttatttatgatcggaatcagcacatgtaaataattagaacaagtaaataaatggacacaataattttatagaggttcgccccccttaagcgtgtaatgaactaccccccctttagttgtattggtataagagataataccactcagatcacaagtgttgtgagttctgaagtggctctatttgaattacaatagtgagaatgtaagacagatttcaagtacatgagatgagggaggcttagtctctactacactacagttggcgtttaggagagatagagactagggtttcaagtgcttgaactcaaga

SEQ ID NO: 206459 - DNA, 545 bp, Cannabis indica
atcctcacataagatacagcaaacttatgcacttggaacaataagacgatttttataattgtgtaaactatgttttggctatgttacattttgcaccgtatatttatttgaatagtacgttttcgggtaaaatttgtttattttattttatttttaggaaaaattaatgataacagggtatattatggtactacgtaacatgagtaacagacatcctacgggaaaaaaaaaaaaaaaaagaactatgaataacaatcattaagatcttaaaaacagaaattacagatgaaagaacattcaaatgagtagaacgtagattaatttgatgggttctagggaagtgtgctcaccaaaagactaacattgctatgatgacaaagaatatttaagctatttcaactaaacaggatagcttgtgggtttggtggattgatgttgtttaaatgaagaatgtttatttttggttagtgactcctaatcccgatgctagtaggtattccaaaaatttaagtaagctcagacattgtattggcaaacaagctatg

SEQ ID NO: 206460 - DNA, 650 bp, Cannabis indica
atggagatggagaagcagagaaatgggtgatcgccattatatagatgaaataaaagatataaaaaaatcgaatgagaatattgacagttagatgaagaagttggagatggttatggctggaagtgaattttgatcgtgtatatatttcgtggtgggttttgatcgtgggggaagaatgtagtttttaaatgtaaaactgaaaatgaaatggaaagagaaactgaagtataaattcgaaactgaaaataaaagagaaataataaaaaaaaaacgaaaaattgatggaatttgagttgacatgcatgcagcgtgtgtaagtggaattttgttaaataaaagctcattaaaaacaaaattgttgccccgccttatggaggtatttttgtaaataaaatatcaatttgtatttttcatgtaaaaatttgtttgattattgaaatatcttttctttcataaaaaaaaattaaaaattaaaaatagtaattaaaatagacaaaaaatttacttaggaagaaattagctttataaagctaggtagaatggtaaccacttgaggttagcacaattgaggttagtacaagtgaccatagaagagtgtgagcgtgttggaggtactgaatttgagttctaaattatgtattgtaatatat

SEQ ID NO: 206461 - DNA, 1235 bp, Cannabis indica
ggtaatatttgaaagagagtagctgtcaattaccggcaagcttcacatagacattgtgtgtcatctaaaaatatttgattgacaatcaatttaactaatccatttgtactgactataagtctcatagggtcttcatggcaagcaaggtttccaatgatcccaaggcaaatttcctagaccaacaaaaaggaaattaattccaaatatgcataaaatctctccttttcttctttcgaaaagaacaatacattgtaactatatcatcaatatcatcccaaattaataaaaagtgcataaaatctgtaattaagcgtagaagtatacacttacaatggcacgcgaagattgctgaaccgtgagatttgctgaaagcacttgaagcagaagattctccacctacatatttcaaattagagaaggaattttcaacaaaatgaacgtatatgtatagagaattatatatagcataccataaagtcagcatgagtttattagcagcaagatcccataaaatgcagccatagtcttcccaagcctggtctccaactccgaccggagagattcatgatgatgattaggttgttgttgctgttgttgttgttgatcaagctgcatagtctcttgctgaggctgagtagttggtaatagtttccgaatgagagagattacatagctaggatccaccgtggtggagacctcgaatagctgagcaaaaacaacccaaaaataaaatacaatagaaggaatggctacagacattgatacacatgtatatatatatatatgtatatgtacttacctgatcgtgatcggggggaggagaagggtgatgggagggagggtcttcatcttggaaatttgttgggttttgaggaactgccattacttccggcaaccgactcactacacagtactcactaagtttaaaataacaaaatctgtgattcagagccagtttggcatatctgtgctgtgggaatataattttaaaacagctatgaatatataaatgtttggtaaactaaatgattaaatagtagtttcgtgtcgtggtggtaatctaaaataacaagaattcaatagtgatgtctgatgacatagttttctctcttttgttttccctgtttgcttatgttgtaagccctgaccttctaatccattgacttatcccctcttttttctattactgatcgtgctgtcccttttgttgccccttcggttgtactaatggcctc

SEQ ID NO: 206462 - DNA, 925 bp, Cannabis indica
ctcctacaatatgggcatgatgacttttcaagagataaccatgtgttaatacaattgtgatgaaatgaatggcaacaaggcgtgttggcaatctcttcttcttccaaaaattcctccaaacacacacaacacatctcattattatgataatctttgtttttcgatgtataatatttcgagcttttgagtactttttcagtagtactttcttgatgtagcatcatcaactgttggggtataaaatccaacaaaggtgggttctctagcgacaatgacgataaaggtaaggtctccagcaacaacgacgacaaaggtgggacctctaacactgtaggcaactgcggtggcggtataaacctgtgtatcataatgtttgatctttcataatttacgaactcatgtattgtattaactctctccataaataagttataaaagtgactcgttagaaaatattgatatagtttagatgtgagatgtgagatgtgagatgatttactattatatatatataaaaaataaaaatgagttctaataggattaggagtaatcaattttgaattttgaaatattgataggattattaattatattttgggattttaattttagttttttaaattcaaatataattcatttaaatttaatgcatgttattccgtatctatacaaacgatatatcaaatattatattatttttttaaaaaaagataacaaatatttaagattaaaaagataattataattcttggtatataagatgaatataccttaagttaggatatattgttaccaaatacggcagcgttttggtcatttggactccaatacggcagttgtgaagggttttggaaattatatatttttcaatcttttttaaatatagatgagattaaaaaatgactaattataatttttaaatcac

SEQ ID NO: 206463 - DNA, 659 bp, Cannabis indica
tatatcgataatataatataattcaaaagtaacatgcatcagcatagacgactttttttttcagaaactatatttaacactctgtatgcagtttcaaaataaattctaatctttcgatttgaaaatttatgaatgatagatatttttttattttttgtttgaaaaatcttaagagaggactcatatatttttattattattattattatacaaaaaaaatatcacctcagaaactagattgattgattaccaaatctaatgtaactaaaactaattagcatggtctgtcaatgtcacaccacctttaaatttaatcaattggagaccctacaataatactaaacacgtttattgttatataaccacataattcagcacacaaatctatgttaataattatgattagctctaaccagatagttttgattaacaaattatatgtaatcaagctgaaaagagagagacagagagagagagagagagagagtggagtggagcccatatgcatggaaaaatgaaatggagacatcataagaaagtctcccttagtcaggtgcaccatgtcaaccactaccaccactcattctcaacaccccaactcaactctaataataataataaataaaattttgtaatcaaaatagtccgacatatgccgg

SEQ ID NO: 206464 - DNA, 720 bp, Cannabis indica
aataatagtaattaatataaggtatataacgtgcatgggtgcttctattcactgtttttggcacatgtaataattacactacaaaaaaattaagcatattcactgaattatgatttttgtaggattttgtgtcttttaattttttattgctgggaaaattttctaccgatgtatataaatcattacaaatatctgttttcacatattttgtttattttttttaaaataatttacttatagctataaattacatgtataattacagtaaaagaatttatttaataattttaagttaggtacctaaaatttaatttattaacattaaacatataaatattaattctaaaaatatatcatatatattttcataaacaattatttagactgctattttttttattaattttttgcttggactcttaaaaatttaacatcacgttaaattgcttacaaaaataaacatgtaacagcaggaagatatttatagtgatttttgtacagttcaaaaagaattttcgcagcaaaaaaaattcaggacaaaactaccctataaaaatcatagttcaagaagaaaattgtctttattcttataaataatatgtatacgttattattaaaattaaaagacaaaaaagtgggacgaaactacctaatcttttttcaccctattcctatagtctctcaagataagatttattagagtttcaaacttaatatttt

SEQ ID NO: 206465 - DNA, 1076 bp, Cannabis indica
atataaagatactttcaattttcactctcccacaaatttaaaattaaaaaattttaatttttctgagttgctaatgtgtaagttattttattatttatttttttttaaaaaaatattttgttacaaacaattgtttacaatggattgtataccaagtaatataatataaaattggtaacatattgctcgtagaatgacctatccaataatccaaatgtttttttttcttatgttgttttaaacaaggtccccctttatctctacaatagttgaaaacaaaactatatcaattgctacaagatagactcaaactcagaccttgtaggagcataagtactcctcttgctggctaatttcatcactaaaaaagaatgttaaactaataactatgcatatcatctatggtatccatcactaactcatccaaagcatcttctactatctcaccaatgatgtctacaacatcggttcggatatctaaccatgtttcagaacttttcaagtcatttccaatgagttgctccattgttcttggagatgaatgtggctgcaagtgccaacctacacgtttcatcacctcttgattcacaaaattctcaattggaagcgaatggacaatgctgagcttgatatatgagagcccataagagcatctgaaatagctgtcataaacctctagaagaacttcactaatgaagtcgaagagtagtttacaatcaccacagaattggccagactgacactttgatgagtcaagcaaacacgagttgagaagcgggtctgctccgtggcacttcaaattgatgtcatcccaattcaagtcagaagcttgcaacactgcctttacatactcagagattgatccataaagatatgaagaagtagtcatgttgacttcagtgtccatatgggagcacataagagcagaagctgcagaaagtaatgtaattggggcacagtcaatattcattgctcaatggagttgaaaggaaaataaagttcataacaataattgtcttgttatgtgtaccaggttggctaatggtgctttgaggactagaaacatcagtgaaaaa

SEQ ID NO: 206466 - DNA, 950 bp, Cannabis indica
aaatgtactttttaatatcggtggaaaccaattttaggtcctacatataatgaagctattgatatgtaaagaatagaaactagaaaggaacattgtattgtacaaagctttgcgcgtggccaggagtacttaaactatgtcaagaaattgaaaatcacatccattgcataatgatggggtttgtaaattgtataaccggcccatctgcgtgaaaggaagaagctcaagtgtacaaacatcccaatcaacgcgaccacacatgattattatgacaaacaaaatgccaaattttgtgtctaaataatactatgtacgccttttgtaattgtaacgtttgcatgagctaaggcttacatattttaatgcaaaacaacattgaggccatgttttgttggaatgagggagtaggatggatggagagtttagaaaggataggaagtagaagggattgagaagatagttgttatcatttgtgttgtttggtattaggaataaagttggaatgatgaagggtgttgacgtcgagtctttccagcctctctatcagaaatagcacgacagttgtatctcaagcttttcccgggatctatcaattcatgggaaacacttaaaaaaaatattctatgatcgattctctccataaagacacagaccgatcaagcccaatgatttggtttgcatcaaacagcaagaagatgagcctttagaagattacttataacaattcttagagacgacaacatagacaaatatactcagtgaagatgccaaggtcatgatgatagtttgctggactaactattatgagtccattatggaaagacgcaaaactctaatcactacacaccattcaagagtttctagatagtgctgattttatcaggcttgaacaagccatcaagaaggtcagcggagttgctcaaccaaaagcaacaaattacactgcatat

SEQ ID NO: 206467 - DNA, 520 bp, Cannabis indica
ggttagatcgagttaggcaaaatttaaaggaaaagcagggaaacctaccagactacacaaaccccaaccccaacccaattcaattacagcaaagcaggattctctttaaagatcgaagaaagaaccctaacatttccactttgttagggtgcatttggttggggtaatggaatggaaaagaatcaattttcattccactcctttgtttggttggattttaaaagtgttggaatgttattccaatggaatgacttttccaccatttttgtggaatgattattccatttcaaaaggggtggaaagaccattccgatgcaataatagtttttttttttttatctatttttgtgtgcatattaaatttaattccatccctattcctattcctattttcattactattcctatattttccttcattccagcacaacgtaccttagattgtactactattcaatatttttcttgtaaattctgtgtgtgtgtgtggagaaatttagaatctattagagaattttat

SEQ ID NO: 206468 - DNA, 545 bp, Cannabis indica
ttttattttttaaaaaataaaccacatttgaaaaagaattttaagctacttaaacattggttaaagtgtttcaagaaatgtaacagagataagataggcttttaaaatgagtgattattattattcaattcacatttacgtttggattgtatgaatttaattgcataaataatattatatgaaaggataaatttatttaattattttttgccaaacttgaaaagacatgatattttattttttttaacattttaatatagaaatcgattcgttgtatttagtacacaagttttgttggaatgtataaatttgtttgatttgtaatttaaataactcgaaaaaaaaaaaaaaaaagtcaaattcaatttccttaattttgtaaaaactaaaaacaatttttaaagctacaatttgtcaataaataatgaacaaatattgccacaagtaacacataatttctttttgcttctttcaaaataataataattggctatgaattaaataattatgttgatcctttctaaaaaaaaaagaaataatcatgt

SEQ ID NO: 206469 - DNA, 346 bp, Cannabis indica
tacatctgggaacgtggtaaaggaataagcaattgggttgaaatccgtctcgacaaggctctcgtctcctcactctggctcaatcatttccctctacaactctctccaatggtgatttctctttgtctgaccacacgcccatcttcctcgagtcttctcctgtagttctcactggttcagtgtatcagtttcggttcgagaatgcttggaccagagagcctctttgtgctcaaattatccaaacttgctgggaccataatgctcatttgtcacttcatgataaaatttctctctgcagtaagcaacttgatgattgggggagaagtttaacttgcaactttaagaa

SEQ ID NO: 206470 - DNA, 1020 bp, Cannabis indica
ttagcaaaaaaagaaaaaaaaatttgggttgcatgatttgaaagtgagaaatttgtcaaaacgaccatttgtcaaatatttttattattttgctaataaaaatttaaggaattattttatatattattttttaatttacaatttggtttgttctcatagtttttaagtgggttctatataaattttgattgctacgttggttgatccggtactctagtaattcttatatgcgtgttgttttacttgttgctagggaggttttgatgtggaatttgtaaaaatacaaacataataggtttggtggcacagttcctgctcgatattttgtttttgacgaacctccaactcgaattctgatttcactttcatttgttgttcttttgaagagaatgtcgacgccccatcttagttggtccttcctaatcctcaacttactcatctttcattttccattaagaacctcagcaatcaggtaacccaatctgctgttagttttttaattttgcaaatttcagttttccatggattttgtgtctgtaattagaatcggttcttggagcaagaaaacgggtttatttgaatgatcatctttcgttctttattcttgaaatttgtaatatacttctctgtgatatgttttataatgcaaatatgatcaaaatgggtgaccatacccattgtttcaattctgttattacaggaaggatattggattaggaaaacgtatttgcaggaatacggttcaaggaagatactcactgtccgatgacaatggtcaagaattttcccttcttttattcaagcttttaatgcctttttttgttaatcttaccttaacctttactatgatgtagatgttttgtattttttagtctatttatttgcataagagtgcttgtgtgtatttcgttggaagatgatttagtttctgtatggacaagagaagcattgcagaacactctcagtattgcacaaaatttcaattaatgcattgagcaaaaatgtactatttcatgctgc

SEQ ID NO: 206471 - DNA, 1060 bp, Cannabis indica
ttttcataaatttaaaagaaaaaattacatataacactgtaattgttttttaaacaaaaacaaatgaaaagaggatgaatacacaaatgtgaggagaaaaccttacaatcggtaatttttgattgcttgcacaatcttgggcaattctgcaaacatcttaaagaaagagacctagtccacgactcaacccagaaatttcatttggtaatattgttcttgttttatttttcagtagcagtctatataataattttaagacattcgttctgctatgaatactactggcgattttcttggttctactgctgacattaacaagtcttttcgttttgagggattgcattttaaacgttggagacagaaaaagttgctttttctgactaaaaaaaaaagttgtgtttgtgctaacagttttgaaaccagttgtgtctgagactccacctcctgccgagaagaaggatgaagtcgagaggtacgaatcacaggttaaagaaatggacttctgggtagagaatgattttcagtgaagaattttattttgaatggttgattattataattctgacaaatctgccaaggaaatataggaagcattacagaaaatatgtaccgaggaggcaggaacaaagaaatacactttgagtcgctactaaaagtttcaaatgaccgatgataaatcagttaaagcccaatctcacaagctttagaaaataggtcacggaattctgtctgaaggtatgactattgatgaacaattttaagttgatgttatgattgataaattattcccttcatggaaagattttaaatattttcaggcacaaaacaaaagagtttttgtttggaagtttgatcactcgtcttcgaattgagaaggaaactcaaaaacaaaaccaaaaaaacagaagatgagtggagccctcaccatgcttatttcatatcaaggttaatctctactctatttcttatgttaaggccttccattattccaagtgaatcaacataaatatatatttagtaacgctaaagattgtattttgtgataattgcagcttcttgc

SEQ ID NO: 206472 - DNA, 577 bp, Cannabis indica
attgtcatttcacgtaacatattatatatatcagacaatacttgggaatttagttttgcaacgactaacgaacaaaagcaatcagaacaagtgttaaaactaagtcatacagagttgaccataaatatcttattcagtaaaggctaaacaagctaagtaaatctcttaagatgcaaacatttcatttgaatttcaattcagaagcccttattttcctttgccttttccctttctttttttgtaatctaacttggcttgaattcgagcggcagcagcagcttttgcttcctctctctttttcttttcctcctcttttgtggctgcggcaatttccctctgcttcttcagttcactggcataaattgtcaaatttgcaacatatcagagaatgactataaaaaatataatatggtattttttttttcttttgataaaaatttgacttactctagtctagccctttcctcagaaacactaccaaggcttgatcccttccgtggattgcaggaaattaattccacctcaaaaataagtgttgccctacaaaacatatgggtcaggacacgagacatggtta

SEQ ID NO: 206473 - DNA, 668 bp, Cannabis indica
attaataattattcattattttttttatgagaataattattcattattatttacacattgatacatcttcaattctctaccaccaaattatcttccaccataattgaatttaaatctaacaattaaggatgattggattttactatatgtgaccttagagtaactaaattgatttagtaaagaaagttgaaaaaaaaagttgccttagttgaaagtgacaatcacattatatattaatatgtaattcttatagaacattataaaataaccattatttatattgacattcaaaataatttttttgttatttttttttctataatcgtatgcgttataattatttgaaaataaaatatttataatatcaaaaataaattgtattttcatatatgctagtcagcaattatttaacttttattttactaaaaatttcctaaaaaactacaatatatataatcataaaaaataaatttaattgaaaaactctcttaattaaataaatactacaatagataaacaatatatgaaaatataacattttaaaagattatgctatagattttctcatattaatatcatgtgttgcctaaaaattataaagaaatttaattagtcaactaattaatagtgtgtacattatgaaaaaaaatcaatgaaactacaataag

SEQ ID NO: 206474 - DNA, 2234 bp, Cannabis indica
aagtgtatgtggcattactgccaatggtttgttttcgattgtcaacacatctgagttagatcatagcttgaggattagaaatccaacaatgagcacacaaaacagaaaaacttagcatgtaatgtaacactagcatcagtgacgaagccagaaatttagctgagtgaggacttgaataaatattaagtcaaaactaataaaaataactgataaatgtatcatctcaaattttcatcttcaactaaataaaataaaacattgtcaatagtattaattttatttttttaataaagtgttattttttttattatttgtattgggctacttttaaaatgggtttgattagaatgagggtaggctcataaatcatgattaagatattgagtgagggcttttgtaaattggaactttaataaatttagtgaagtgaattaatatatgtatacatctacatgtaaaaaatttgatgtatatatttgagtaagggctaagcctagactaaagtccctacgtccctgtcctagcatggcatttatacagaagttaataagaaagtgacatacaaaactaacttaactaaccattcattgtcacctttattttttccttgttttatattgtttggatctatagctctgatatgatgacaagaatcatggggttccatctaatgtcaattggtgatgagtggagcattccatgcatgttcttatatataactcaatatttttatatttgatccatgtgggacaatattgtacaatacaacacaagtcttggatgaacaggtgggaagagttttagttataaagtctaaactgttatttttgtttgttttaacttgacatatatgaggagttaattataaggaaaagtagacgatttcttgtcttgacaaataacaaaccttatgatttatgatctgttgtcttgtcttctcaactcatcagatcaaaactgaaattaaaagcatagaaacaacaccaaatatttatttgcacctatatatgtcaaaagagcatttgttaaccattagtaatttttatctcaaaataattagactaggacaattcaaccttattcattggatgcctcataatcatacaagaaaatcagtgtcagccaggtacctctgaatcttgtaataaaagtaatttgataaaaaaaaaaaaaaaattgcacttgtctttatatttcttcatttatttgttctttatgatcatttactcatttactccactaactctcaatctccctctccctctcagataatatatatatatatatatatccaaccctctatatacctactcaaataactcaatcattttgctatttttgggttaatttgattctagttaaaacaacatattatatcatcaccatgaatgggtgatgcaaatgatgaagacaggatttccaagcttccaaatggagtgattcatcacatgatgtcgtttctccccactaaagatgtagttcgaacatgtcttctttctaaacgctggaaactcatctggtattcagtccccgcactctctttctctgatcatattgaagttgaagggagacaagagttttacaattatatcgaaaaatatttggaacaccgaaaaagaggtatgtattttatcgtcgattcagtcataactagttttaagcttaacatgcttaactactggcactgcaaatgcgaaaaaagtaaagctgatgacatcctagataaatggttagcttttatagtactgaataaagttgaggaaatatatcttagtatatggcctaagcaacattggatctttgaagagtcctactactacttctgctactactgcttacctaaaatatggtttgaaaatgcaacatatttgactgttttggagttggaatatgtagagttggatgcttcttgttcctttagtttccagccatcgttggaagctcttatatttgtaatattcctcttctagagaatttgaatttgagctactatccttcacctttggactaccgtcttagaatttcgagtcaacacttgaaaagtttcacttttgagttcctttctggtggattgatccatgttgaaattgagtcagctccaaaattagaatacttttgttacaaaggtgatgtaaatttcagcatatccatggagtcatctaattcgataaaatggaaaaaaattgtaaattcatgagaaaggaggagttggactatgacagaaaaatggttac

SEQ ID NO: 206475 - DNA, 1214 bp, Cannabis indica
ctggacattgagagttggcgatgatagtggactagttttgtttacgaagtgtctaggttggaagaagaaagtctaatagtggtagttgctgacaaactctatggagtcttgaaagtgctgaagatggtgtaatgagaaaagcttaccaaagggatcatttatttcatggtggttaagaatctttacctctacagtcagtttgttttgctcatttctttccaagtaatttatttttccttcttggggtggtagtggggtggatcattatttcatgtagtggaagaaaaagaaaattaccttggcttaaggtttaagatgagagaaagagaatttgtatataaaagcccttcaagttgagatttcatgaatcatttgtaaattgtaatcggtttataccccttaattttgcattgtaatcaggaatgaacgatgtcattttcgacataaaagctacttcattataaattagtgctaacttgcttaatttagagattatcaggcaaattaggatatcggccctcaaacatctgacataccagaatagaaatgttgctgctcaagaaagaaaggaagaaaaaacaaaggccacaaattgcataccaagaaggaaacttctgctgtgttcagatgttatcataagaagtgatttttttttacatctttggttctctaaagtatgatgtcaatgcatattcagttagaaatatacatttttttgcttttcgtctttcatatctcagatttcgactgaaaccgaaactgttctgtattttttgtaaaacaaagatctaagggagctccgaatctgaggcatgcccagatgatgttcttttagtcttggacttatcataagtagctggctttctgaatttcttcgcatacttctcctgttaggatttatttgtggaggcttaagcgattgtgctcgtgttattgtacctgtttgttttgttttaaaggttaatgatcaaacagaaaaaccaaattctagcacaattcagttaaaccagcaatggggggaggtgacaaacctggtttctttgtttttgcatctgaaggtttcttggagattgagagtctcttgttcatgctatcagatgaagttaaagatttccttcttgtgctgatggcaatgtatcatcaattatattcactccttcatctccacagatcgaagctgcatcacttcctgattcttcagaggtatcttttga

SEQ ID NO: 206476 - DNA, 1246 bp, Cannabis indica
cacatcccacatgaataatcctactaactgctttaaccttctgtttggtgaggaggaaaacttgtgggaaaaatatggctctttgaagctcggtaataaagataggctaaaccaattatgacaagtaagaaatatatatatatatattattatataattatatataatgtgtgtgtgtttcagataaatatttgtagctatgtgattagaagttgctctctcatctcatgatcattatacataattaattaattgacctgtttttgtttaattagaaagttatatattaatctaagcgtacagatttacatatgagttaacaaagtaacatcaatgttctggctgtccctctagcttgattaattaactgaaattaatttatatgtgcactactatataattattatggttttattgttgataagcataattagtgatcatttcacatgtacacccgaaatttgagccccatcctcaataaaaaaaaaaagaagaagaaagaatatctacacacttgtacatactatctacacataattaatttttgtcacactatattaaaaaaatttattcactttttatatataattattaactgtagaaattaaatacacatgattagttatacccatcgatgggtatttgataaaaatttgatttctaaaaattaatattatctaaaattaatatttaattataattttctttttgtaaccatcaatgggtataagtgttccataaatatacatattattttgtgtagaaaatgtacagtttacattaattacacgttgttgtgtgtaaaaaaatatgtataatctaaatgtatcttaattattattcatataaatataataagtagattttacaaaaaatacaaattgaagtaaaaaaaaaatcgtttaaatggaagtatggagaaaaatatattttgttcttatcattggatattttttcctttaaacacaaacataagtttaggaaaatattgtggtgcacctcgagaaagaagtgtaatgatacagtgccccttttgtatttttgataactaagttataatttcatttttttatacattataattattaaagagattttgtaaattttaaaaaatttagaatatataatttactgtattgaaaataaatttcaaacaatttatcgcatacatatctattttgttttatagcatgtaaaatagattatttgaatcatatattttatatggttaattattttaaatttc

SEQ ID NO: 206477 - DNA, 752 bp, Cannabis indica
gtaactaattgtaaaagttgttttaactgcttttttggttagttttctaactaattttgccacattggttttttttttgactattctgtataaataacagtctccctcatttaaggttgaccttgatttaaactttgcttctctcttcttatttttacttctcacaatttcttgattctctcaatctcaacatggtatcatcgatgggaaacgatcctggcaacttcgctcaaaatcaaattccaccccatcgttaccctcaagctctagagattcaaccaccacaatttcagatacccaacaatctgcttttgctcaacattaggctcgatcgaaacaactatgcgtacttgagatctctcattctcccctcgattcacgcccatggccacgaaggcctacttcttggcaccacacctcgcccatcaaccatcaatccagtcactcggactcctaatcctgcctttgattatcggatttgctgtgatgccctcatcatgtcttggctcatgaaatatttgtctaaagccatgattagtcatgttctacattaccaatcttcatcacagctctggaacagcttctctggcctcttcgccactcagtctaaagttgaagaggttcagccgaggtttgctattcaaacaccaagaaaggctcactcaacattgatgaatatactcctcaagatgaaaaaatctagctgagtctcttactgcagcaggtcatcatctctccgatcaagacttgcg

SEQ ID NO: 206478 - DNA, 1310 bp, Cannabis indica
ttttttataaatttattaattttctttttttagatgttttgtgtgaaatattttttaatttataatatctttttcacgtttgaggatatctttattttatgatgattttttttacaatattaatttatgttttcgaaaaattaaaataaaagcttattagaataaatatctttcagtattaaaaaaaagtaaataaaaaatatcaaattttaaaagttgatataattttatgatttaattattacaactgcacgcaaaccgtaatttgtttgctagtactaatatattttactattatactttccacaattatcactctatattgaacattatttattttgaaattgcatataatatttttctaaaaaaaaaaccaaaacttaaaataaaactaaacataacttgggcacttaccatatatatagtatatatataataccatcaattaatgttactagcataaattgatctaatatctaatgtcaatcgatcgatccaattacaaccgaccaccaaatattagatatccatttgtgatcggattagattggatgttattttagatattcaactggatcgtatcgaatgtcggatggagtgcctaaaaatttattacatccaacatccaatatcgaactaattaatattttcatttagtttggaagagtaattagattttataatgttatacgtaaaatatatatgtatatatgaaaattaacatgaatattttactctctttttatggatattatccaatctaatacatattggacctaaaatattagatggatccgattcaatccaaaaaatactaagcctaaaatattagataaacccaaattaaacaaataaatatatatataatacattcaatggatagaaccgatccaatctaacatctaagcgatgttggatcgattggatgactgaaactaattggatcggatcggatggtaaaatttaacatccaatatataattaaattagatctgtataggcctaaaaatattcgatgtggtccaataaacacctctaattactatgaatatatgtaaatcacttgaggttagtttaagtgatcataaagtgtatggaagagtttgtgtgtttttggggtcttagattcgaatctgaaattgtataatgtaatgtatataatgaacgcttcaataaaaaaaaaaagagtactaagaattttaaaaacttgcattaggagtcattaaaatataagatattcacagtaacactactacaaacaagagtttataaactttgttttttttttttttttttttttttttattaag

SEQ ID NO: 206479 - DNA, 966 bp, Cannabis indica
aacaacacacaatgcataccaattatctaataataaaatatatgtgtaagtttcgagcctataaacagaataataaaaaagcaacttaaaataaaaaatatatgcaataacatcataaatggagtaaccccattatagaactctcaaaacatgtaaaaccagtttcgaacccttaaactcaatgaaactagttttgaccctatgaaaaattataaaaaaacataaatgataaacaataaagtcaacttaaactaatttcaccagtcaactaattaaagaaaaacacacacacacacgcacacacaaaaataaaaataaaaatattgatcacaaatatagttaaaattcaaaaacaacacataatgcaatatagcaaaaaaaaaagaaaaacatcacacgatgggctaatcaatttttatggagtctatccatagtcgacacattttagaacggaaggtggggctcgaatgcaatattcaatgagcaagagctcagatgttctccctgtaacagtctcttgaaatttgaattagttcccacatagcacctccactaatcatgtcttgcatttacttagaaagctaatatttaagaaactaagctataagaaaataaaaataacttagtgttaacgcctagcaacatttattttataatttttaccagtaacctatatgtttccaaaattaaaaatgagctatgttattaaatttttaagagtaatctaaatattgttaaagaaaaaagtgaactacattttatatatatatatatatataactatataaaaagtgtttaaaattttaaattatgtaacatagcttattgtttaatttaatcaatatttatatatttattattgatacacacaaaagagtatccaaaaaatcgatatacaataattattgacatcgtaaaattttaaaagtaaccgaagtgttgctaaaaaaataatttaaaatatct

SEQ ID NO: 206480 - DNA, 984 bp, Cannabis indica
aaaaaaaatataatataatattgtagattaattaattaatataatttgtgtttaaacgaaataataaaatgagggattcaacgactgttgcgggaaaaagaagattaatggtaaccatgcatgagtttgggtatatatattgtaacattaattaattaatattagtgacataatttgtgtgttaggttgttatatatttgcatgtaccacatcttttagatcatttcatactaacaaaataataattattagtagtttattattagtgattatggaatcattaatccgtttcattccttaattagtatttaattaacaataaataattcttatatgacacatgctatacatatatgattatccacctactaattaatagcacattctcattctttagtttttcagcttttttgatatttcttattataatagcacggaaaatatgagcagaacgttgaataaactcactttttttagaatgtgttatcattgcattttagtatttactcacataataattaatataaaaaatatttggtttttaataaaattatgaaatataaaaaaattgatatttaaataaaattttcaaataaattttgataatatatttttttaaaaaaaataaatttattgggaaggacaaaaataaccaaaagtttctaaaaaaaaaaaaacattattttcatggaggatttttttttatattaggaatgacattgtgttgttccagatattttatcaagaacaattttaaatatcgtttctaataatgattttcaagaacaacgtataaggaataaaatatacatcgcacctgataatacttggaatgactttgggggtttcaaggaacgaaaaaaattctttcctgatgacctattttcttgtagtaatattattcattatttaatttgttagaaatatagaagagagatatatagattagggtgattctatattagaaaaattcggaataattta

SEQ ID NO: 206481 - DNA, 991 bp, Cannabis indica
acatgggcagtccaccgtggaatttaattgagccttttgaacagaagtgtaaagagcaaaacagaatgtgagtttagtaggttttgccacaaaaaaattaatttatgtgtttaagtgttaaaaaaaaaatttggggagttttgccgataatatgtaatctctttttaaaaaatactgaaaactatttatatttgggcccatgggctagttggaccctaggtgtgggtctagcctgccttagactaggcccgaccttgtataatatatatatggaggaggtttcaatggttacataaaatatgtaatcatactgattatagtttatcttagttgttggattattataaaatagttgtgattaattaaaaattaacaaaaaaaaaaattaataaattacttgtaacctatactaacatattttcattttgtttacttaaaaatgaaattaagaaaaatatttatatatattaatttttttaaaaggtcttattaaatatgtcaattaaaaataaatttacttctaagtgtataattaattataattaatttaagtttatgtaagtatatgtatgaataaatagtatttgtcccctgaattgtgatccttaaagagtttaattttatcctaaatttttttctgtttggaaaaattctccctaaattataaaaaatcgttgcaaatatcaccttccagttacattatgttcatttctttcagtaatttgttgacgtagcactaatataacgttaatctgaccaagttcaaaaatcctgataaataaaaaacaaatgcacaaaattagcattctaataattattattatatatgtacatgcattcttagagctaatatatgtacataagcaattgcaataatttgtataattttaaggagaatttttaaaaaaaaattcaagaaaaaaaactctacaagagtaaaaaattcagagagaaatatcttattattatatatatatatatatatatatat

SEQ ID NO: 206482 - DNA, 732 bp, Cannabis indica
tatagataagttctcagtttataaccattatgacatcttgttgcttggattcatggtatgtaaaatgattgtaaaaatattgttacatcttattgttatgattttagtaagctaactggaattggtcctagactttactttgcggatgacttggtttgcctccatctaatggagtgttgccacaatcaccaatgcacacaaaaagcctagcagttctcaagaggcaattgaagagaaggaaaatggtggagagtgccaaagaaagcataaagctcaaggctaccaactctgaaatctatggcaaaatgcagggtgtgtttgtcgaaatggacagcaatcccgttgtaagtacttaaacatgctaattcatgtgtttaaatatgtaacataaaccactaaaatagacataatcttcaggtattagttttccaagaacacaaggcaagttatctctatgattctctctctcggtggaaaaagagttgaattgaacgatgttatgtttcttggagaccaataccaatattaggactgtctgtaagaggcttcccagttccagactccttttcttttaagattttgtgttgtaactagttgcaagtgcagaattcagttgttcaagagctggatgatttaaaagagccagtgatgaaaggcaaaagcgaatcggaaaatcgaaaggatacatttgatcccgaaaagcatatagatgcacacttgccagttcgagtt

SEQ ID NO: 206483 - DNA, 330 bp, Cannabis indica
atacgattatggagcgagccaatccagtatgatgatttcttgtgttcctcgtcctcaagactacaatacagcattcagtcaagtgcccatcaataaggggttcgttctagtggtacgtttcttgttcatgcattaaatttaattatcttttaacattttgtatatacaattaatcaatgtgctttaaagcaatataggatcttcttatgtggaactaatttggtttatgtgaggtccttttataattattttgtttaataaaaacaagttaatcctatgtgaattctctttttatttcttatcattccattacttttaacagattatgtt

SEQ ID NO: 206484 - DNA, 543 bp, Cannabis indica
tatattgacttctctatactacaagtgcaaccaatctaaaatatttttaccaactctaaaattgtggaagttattgggagttatactgttaagaagataattcttgaagaatattgttcctcaacaagatgactattcaaaaattactagagtttgattagagtgatatgatgatgacaacaggtgagatatagtgttgaaagacacataaaatgataataatgtgtgagatacagtgatgagaacgaatgagatattatgagacaacgggtaagatacaatgatgacaacgagtgacatacggtgatgacagtgggtgagagacagtgatgactacgacgtgaagcaatgtgagataataggtgagacaatgagtgagatggaacaatcataaaaaaaaataatgtattatagagaacactccatattttcaacaccacactactatttattttgtaatataattttaataaataattaaatttcatatatgtaaataataataatataaatttaaataaataataatagaacacatcataa

SEQ ID NO: 206485 - DNA, 568 bp, Cannabis indica
tttttgtttttttttttttgacaggtttcagagataaaagcagaatattttccacctaaggttgatataattttacaaaatgagattccaacagatttctacattttggtttctggattagtggtacagttttcttttctatatttatttagtattgtgtttcatcgacatacatatttgataccttgtgtttttaataatgctcatttggtacttttattttaaaattgtatacattttataccctaaattcaaatttaattagtaaaattttatcaatttgatcaaacaattttcagttatatgtaattaaaaattcataaaattaaagagagtttgatcgtatccataagatttcattaatcaaatttgagttcagggtattaaatttgtaccgaatgtatagacaccctaaaaataataacaattgttgttatgaaaacttgcaggaggtgctagtttacaaaaatggaactgaacaggtaacattttttgtcacttattctaaatttgcatatcatatcatgtcatcatgactgaatctgaatctgatgttgttttttttttt

SEQ ID NO: 206486 - DNA, 770 bp, Cannabis indica
gtgcacacacaaacacatacatataaacctaaatcaatacctaatactctagaaatcataaatcacctaaaaaaaccaatgacaaaaataataaaaaaaaaagatctaaaagcttaccttcgacatctctgttcgaagttcggtggtagaagattggaattgcaactcacggtggccgtaggttggctaggtccgttgcttggtggtctaagtaggcccttggtgatttggtgagggtgagactgtgagagaaacaacgagagagatagaggaagagagagagttgaggtttgaaaaatgaaaatggtatttttagatttaatgtaaagtgaacttatttttaaaattttaaaatacataaatttatgaaattaatctcccatttgtaagcataaataatcaaatttccctttaaaatctagtatatgaaattaatttcacaaaataagtcagttgtagaaactcatgactaataccaccagtgcaatgttgttctcaaaacaccacaaccattgcaagccggcagtcatatccattcaaaaaaataaaaaaataactgaaaaaaaaccacacgcagcacacattttccaaatgagtgaaacataaagcgagagtgggaggcaatcaatttacaaaagaataagtatggaacgtatgattcacaaagtaggtatgtttgtcggtaatccatatgtgaaaccatagcagcatctccataagctgaaaagacaaacgattcatttacctaattaaaaatactatcatatggg

SEQ ID NO: 206487 - DNA, 536 bp, Cannabis indica
acaatctaactttaaacatatgaccagaattagcagccagcttcatctccatcacaaaaagaagttgaggttgatgttgtttgatcaggagggagagattttggaatgcttgggaactccctaatccacgagcattccaactgattaaacttattttctgggcaaggttgcctcgtaacacctgcctgttcattgaagtcagacatagaaggaaccacgacaaagtcagaattggaagagcgagctctttttagcatacttctaacaatggatccgacctggaaattctgcctactaagagtccacttcctgccagacctagttctagtagtagtagaagctcgaggggttgaaaaaaccccaagaagcggccttggcatgctcagggaacacaggacctttgcctttagaagtagcagtagtaatagtggtaatcatgatggggttagtggcaatgggtgaaaacaaaggctgtagtgacttggttagatgtaatagggtgtgtaaaggtttgagtgttggtaccgatggtggtt

SEQ ID NO: 206488 - DNA, 632 bp, Cannabis indica
aaactccatttattttcacaaacttaagacaaaactgtagctaccagaaaagtaccacgtgggtttagatggggccaagtgaaaatgccacatcggacatcacagacccaatgtcttcaattcaattctcatcaatggccactgatttcttgatctttcggccacttattcctcatcacaaactcctcctttgatctaccatcattcaatatttcactattcaagtcctactacacacagcaaaacccaagcttcgtagctggcaaagatggcaatggagatgaccatccaagcttcagccaccaccaacaacaacacaagacctcaattgtctactcctaaaacttttttcaagccccaaattagaccatcttctgtttctttacctgcatcatcaactacaatcactctcttgggcctcttcacacctcttcacgaggccaaggctctcactctccccaaggaccagattacttcttccttaactgaagtaaggaaaattcatgcaaaacatcttcttgcttttaggatattagttatggaaatcgttgtatatcacgtttctagaaagaaaagaaaccatatcataaatgaatgttttactttagcatgaaatgcttggaatttttttt

SEQ ID NO: 206489 - DNA, 570 bp, Cannabis indica
cagctcctttagcacaccctttaatattctaagctttgtcaccacttgaaacatcttgtttccctgtgtttgttccagccaagtttctctaactcgagttgcatactctggatgtgtattccacattctaaaatatctaaatggttttttaccactaggtactgttgtatgaaaggttaacataagtggtgtatgatccatcagcccttcattcatgaaattaacctcatcattagtgaaattatccatccaaacctgatttgccattaccccatcaatcttcgaaaaaattctttcttctccttgttgcttggtgctccaagtgaagaagttgccacaagctttgatatcttctaattggcaattggcaatacattcaatgaaattctgtgaaggatggtatttgactctattaccaactctttcttctttggccaaaatatcattaaaatcccccatgactagccaagcttcttgtcttgctacctgctgcgaatctctccataattctttcctcccctcttcatcgttgtaagcatatacaatgatggaatagcatgtacattatat

SEQ ID NO: 206490 - DNA, 761 bp, Cannabis indica
tctttttatttattcaaaatcatttataaatgtaaataatatatgttcatgatgattaaaagtcatcacgtacggaggagacagtgataaattatagacatgttggtaataatataaatatttatatatattttagtaatttacgtacttgtttgatttccttggtcactttcttctcaattatggtagtttctttgatctgcactttgggcgaaatcaactcaatcttcttcttgctcaatttctgaattcgtttctgaactttaatggggtcaaagcatcctttcacccttatttcacatttctccatttcgatctcaacattttgaatacctgcatgaatatatatatacctccaaataattaattaattaaataaaatatgtttattaatatatatccaacaacaaaaacaaattattattgaaaaaaagtgatacttaatttgaaaaattctcttcaatcatgatcctaatttgatctaagtgtaatattctaattaaaattctatagattaattaaaatgtttgagagattttgatttcataaagatattggaaaattccgaaaacaaaattaagcctatagtatatatatttatatatatatatttatatactcttaatgggtattacccattcatgaataatattatggaaaattgagtttttatgcttagttttttatctaattaaaaaatatctcatttttatattatatgagttgggattattttattggctgaaaaaaaaaattaagaa

SEQ ID NO: 206491 - DNA, 1391 bp, Cannabis indica
tctgaggggagaccaatagtctgtctagctctgttacaaccaggctttatctaacgctaagaaagagaagatgctcgccaagagctctaaccaagagcccgacaaacgggaatgaagtccagcccaaagtggcgaagtagacgtagatcctcactttggggatcctacagatagctttggaccggtggaaaaactggaagaagtggacattaatcccattattccaaccagaaaattgaagattgggaaaggtttcgcgatagaaataaaatcaatcttgataaaatttctaaggtcgaaccttgacctctttgcatggtcgcatgaagacatggtggggatagacccttctgtgatgatccatgcactaaacatagatcccaacttttaaactgtgtaatagaaaatgtggttattggataaagaaaacactcaagatgtgaaagatgaagttgaaaggttgagcgccaatgacttcatgactgaagcattctatccaatttgggtatctaatctcgtgttggtacctaaaatgaacaagtggagggtgtgcatagatttcactgacctgatgataaagcatgtccaaaggactgcttttcgcttcccaagattgaacaactagtagatactacaactggtcatgagatcctaagcttcatagatgcttattcaggttacaactaaatcaagatgcatccaccggaccaagaacacacaagttttatgaaagacctaggcctgtactgctataaggtcatgaaaaatgcaggggccacctatcagagacttgtgaataaaatgttcaaagatctcattggctgcaacatggaggtgtatgtggacgatatgctagtcaagtccaaaatggtttggggcatgtggaggatctagatgtctgctttaagatcctccgagagtaaaacatgaaactcaaccccctcaagtgttcattcaaagtaggcttaagcaaattccttggcttcatagtcaatgctaggggaataaactcaaactcagacaagattcaagcccttttggatatgaagtcgcccacaacaatcaaagaagtacaaattctaacaagacatattgctgcactaagcaggtttgtgtctaaatccacaaataaatgtgttcctttcttcaacatactcagagaaaacaaaaaatttgagtggacaagggagtgtgaaaaaacattccaagagttgaagaaacaattggattaatttcttgtcctatcaaaacctctagataatgaggacctaggtgtgtacttggctatcacaaagcatgatgtgagttaagttttgataggagaagaagatggtatccaacatctagtatactacatcagtaaaagattaatcgacgctgaaagtcgatac

SEQ ID NO: 206492 - DNA, 1424 bp, Cannabis indica
acggtttcacggtaattttaatattttttacgattttttttgatttttatttacataaaatacagtcttttatgttagaaattttgttcatttattgttaattttttgtatatgtatgttattttttgttgtttttttgttgttattttgatgttattttcatgttacttttatgttgttttcttgttgattttatgttgtttttgtgttattttttggaaaaaccgtaaaaattaaaaaaaaaacattctttgaacgtaaaaatgtaaatattttacaaaaaatggtgccttatgtaattattccttataaatatatctcttagcttatccttaacttaaaacattttattaactctctaaaatatcatcttcataaatgtgtaataatatagtttccgatcttcatcaaattttgtaatttgtttctccattttagaaaatattagcactaaacatatttttttagggcccagcacggcataatcatgatccttattttgaaaagtgaatttacagcattactcttagctagccttttattgtgtgaaaaaattatatattaataactttttgccaaataataataaaagtaaaagcaaattgattggattttgtagtataaactacatgatcgcattcccacaacaatataacaataggaaagtccttttaaaactttgtttttattttttgacttatatatacacatacagaaatagaggggatcatttcgagttgtcatttttaacaatgatacaactattattttcccattttgtctccctcaaaagaccaaaaaagtagaacaagataataataaattctatcaagggggtaggtactttaaggatatgcaattagaaccgtagaggcattttactaataaataaatatatatttatataattaaaaaacctcatgtatgtaagtaaaactataattcaatttattcataatttaataatttttagttttaaatataaaattatatcaattgtaataaaataaaagtgaaataggtttaatttgataatagttaagtatggtgttatttaaagtatgttttgtaaactatacagttattattatatgatgaataaatgtacaaataatattgaatattttaaaagcttagagtaaattaatatttctaattaaataattgttttttatctaaaagatttgatgataaatgctgcctctaagtgagtcttttatcatgataagaaataattaagtgggccatcagccatgagaagctgctactctttcttcgaaagaaaagcacaccaatattctcatccttgtatatatgttatcaataaatcgttatcatatctcagttttgtgcctttttattattttatattaggagaaattttaaatatgcccttttattatgttttatttttaatttatggt

SEQ ID NO: 206493 - DNA, 916 bp, Cannabis indica
ctaattttcctaattgtttgtagtttctactaaaacttcttataacttttctttttccttcttcattttttggtattgtagcgtgcttagcaatttgcatcaatcattagctttcttcttttcccttatgtactttctttccaagcaaattttatggcttatccgtttaagtatttcatttttcatttcttactattgttaattattaaactcatgaaaatacctacttcagaatttagcgcaaaggaacccatcagtattgagcaagcctggggttactcttttgttgcttgaattgatgaactaccgtttgcttccactttacaggtaattatttaattgatcccgatagagaaataacacttaaactgcagttatgtgtacatggactacatgatctggattcctgagttgtcttctgactacatgacctattacttctttatatactatgtttgtactttaattttaattttctcttttatttggtatgttgatatggtaaattaagttgcaaaatggtcttctgggtaggtaccaaaccaaatgcaaagccttaatgtacgatattacgaaaataatttctgcactcaaagggaaacgtggagaacatcgtacatttaggttggctgaaaacttgtgcatgaaccttattttgtccttgagggactttttcttggtgaaaagagaagggaaggtgctctctttgaactggaactcttttttatttttgtccaattagatacactgacagtagcgtttcattactttttggcagggtccaactgaatttacagaaacattgaaccgaataactgtcattacttatgctattatgattaaaacgcgtggaattgctgatgctgatcacctgctttatcttcaaaccatggtagaacaaataatgggagctagt

SEQ ID NO: 206494 - DNA, 1018 bp, Cannabis indica
caatgggctggcataaaaaccttcgatcttgtaatactttgcaatataaagttatttttatatgttaatgacgacaaagtatagcaacatttaactatgttaaatagaaatattctaatattgtaatcaattcgaaacacctacaaatctcgttaataacacctgtagaaggactctgcgggctacgtactctaacaacgaaaattggtagacttttttttttttttaaataatgacaaataaaggttcttctaacaacatgcctatgtgcaaaatatgtatggttgtcctgctcacactcttgtcgagtgcaatctaccaatagttcaccaaaatggaactcactaaagcaatctttagtcgtttgattttttttttttttaagagcactttcaaccatgctctcttaacacgctcattagttaaaataaaaagttagactcaaaaaaagagttctatccatacaaaaaatagttttctataataataataaaaaaaaaactctcttgaagctccctatttttttgtcaacatttataatagtattttaatcaaaaatattattactcttttattattttataaaataattttttataattcgagcaagaacaataaaaatagtttttttattttaacttttaactaaaaaaataataaaaggtactattgatcgatggttgtataatttcgaataattcttggtacatattgaccgtgcttctaaccacaaaatattatttccttaacttaactatgtatgtcttggccaacttatagtgtatcatatatggagagctccaaatgagctgctatggcatgcatggaaaaaaaaagaagagatggcacatattattggaagagtcaaagaaactgttagccaaagaattgtattggtttagccaaaaagggtcaatcaaaaagataagagttggtttaactctttgtaattctttatatacatgtatagaggagggatttaagacgtttggtattggtgcttttaggttgtacaaaa

SEQ ID NO: 206495 - DNA, 734 bp, Cannabis indica
atttcttctttttcactaaaaactttctttcattttttttccctttatttttgttttcttggtaagaaagattatatttttctgttttcttggacgacggcgacaatctcaggggtggtcgccggagtgggtcgacgtcgcacaaggggcacaagggggccggagagggatgggagttctgtgagggctataattattttttaaaattaatattacgtggaccactaaaaacttgccacgtgtacaagtgtgtacacgcgtacagtccaccgtggcacttaactgtgatttttggacggaggtgtgcagagcaaaacggaaccagggtttaggtagtttagccgccaaaattttagtttttgtggttaagtgttacaaaccgtaaagttcaggtggtttagccgccaatatcccttttatttatcacgtatgataaaatttgacagaatgaccaatttacaaaattgtgaaaagttcaaagctcatttttaacaagctgaaaaattcaagggcacaacaatacataggtcataattcaagggcaaaaatcctaaatagtatttattttttttttttgaatgaaaatagtatttattttagtataatataataatgtaaatataggaaacttttttcttgtctttttctttttacagtgtcttttttttttttgtaagaaaagcgtacttatattagattagaaactatcaaaccttgcggtcattacaaaatat

SEQ ID NO: 206496 - DNA, 658 bp, Cannabis indica
ttattggacctatattatataaaataattatttttttgaatttatgaagattaagttatatttcaggtaaaataaaaaagagaaactaaaacaaaacaagtttatatatttgcagagacactttcttgtaaaacttagaaactttattataattggcatgttatacaactgtactttttttccttccaaaacttaaaatcttattggcattgtcagttatatttaaatagcattatatataaggataaaaatgttgaccgctacaaatttagtacgttatagtaaaaaaaaaaatcagctcttatttaaatgaaaatgtgttattttttaaaattaataaaaaatgtgtaattttaaaataattttttttcttaggctcttggacttagactaggtgggagtgtaattgaacttaagtataattcaaataattataaagtttaacgtatttgttcaagtaggtaattatacagtaattatgttgctaatagggataagttgataagtgcccgttttaataacacattaactaaaaatacctgcaaaataaatttagttaaaaatatactttcttttataattgaattacctaatataccctcacatatctatcaaattcttcaatgcagctacttgaattccaccctagcaactaaac

SEQ ID NO: 206497 - DNA, 1028 bp, Cannabis indica
gttatcaaatactatttttttattttttattttttattttcgaaaagaaattaccaatcaattataatttttttaaaaaaaaataaaaatgtatttacttttctatgagtgcattttatctaattttttttgtttttagatttttgaaacatacattaaaatacatctttatttttaatttctaaaaaaaatgtgtttggtaataaaatgcgattggtaacttttatttttaggtgtctcattcaaatattcatatgaagagacaaaagtgaggttatgaaagagaggagagacccaatgcttctcctaaaaaaatttgttctagaggaagattctttgggacataatttttaaagtctccgcttcaagtctcattggacattttcccacagacttatggctgtatacatatgtcattttgggtgcttcttggaatgaggattggtcgtgcaaacaaacattagtgttttcaacgtacgttggttgaacatctctcaaagatgaaatgacccaatttattggtgtatcctggttgatttggaaacgacgaaactaatttgttttccaaaataaatacctactgatgtttattggattccttgggcgttggaggttttggatactcatctgcggagagagccaacgaaaataaatatgtagaaaacctgcagtcgtgttcttggcagccccctccccttggtaaattcttaataaatactaatgcatctatcttgccatgtaatttggggtgcggtataggtgcgataataagggatcataaaagaactttagttgcagctgaaactcggtttatccctgtgtttctttcagtgatgtttgcagaaactgctgctattcagttgggcattgatctggctttgcgttggtcttgcttggatgtttggattggagctaactgtcaatcggttgtaaaagctctaaaaaacagagagattgttccaacggactagggtaacttgttttataatatcttaaggatcatcagcaattttaattctttagacttt

SEQ ID NO: 206498 - DNA, 1315 bp, Cannabis indica
cattctacaaatttaattcaaattactaaaaaaagaaaaaaaaaaaaaaaaaaaaagacttgtgtgtgttctgttgtgaaacaacaatcctcgatcaaagaacaaatataagaaactaataaagttatcaaaaaaatcaatgactagagaaatcaatagttgaaacagattaagaaaaataacatctgaatagtgtagattaatctatgaaataatgagttttataatcaatactattgaagcaaattaaaaactttattgatgaactttgataaccaatacagagataattcaagaactcgagcttccttgactagtgtaattagtttacagaatcaatctcacatgagggatgccatgtctaagaattggtaatctctttaacatcctccaccgtcaatctgtttcttgctcaaagtctcttttctctcaattctctctattacaaataattgaaagtcttaacttcaaattgtaaagtgttgggctatttataagaggttggttaggacagagactaacagagttagttagtttagttgctgatatggtaaagtttatatttgatagtgccttaattgtaacatgttctatctcacatcattcatgtattagtgatttggggaatacataatacttaacaaaaatattactatcaatctcttattacaactttcgtgtttgaaaatatatattagaatatttttttatagcaatatttgtaagagttacaacattatttttgtaaatttataaatttttttgaatagtttaaggtatcaaaaataggtttgaagatttttaaacacgcataataggctagaatatcaaaattctgttttcggtcctgtaaactgttcagatttttttaaaactttataaaaatgatattatatccataacaaatactgcaataaattttctttttttaaaaaaattaatttcaacatataatttagagcatgaaagctgattgtaattaacacctcagtacttaaaaattaattaaaaacatatacacaagatcaagtcaacgcttgtaaaaaagtcaactgttttctatttgtcttttcattctttagtttcttgcttgtagtgctattagtatattgatcacaattattcacaagtatacaagtatttctaatttctttgcttgtaacaacttgaactagatatataataattattatttgattagtttattaatttacgtacacttgcaaataatcaagtgatctttaattaatcattttgtccaaattctgaaactttactcgtttttgttttttaaaagatcatatatagccaagtc

SEQ ID NO: 206499 - DNA, 686 bp, Cannabis indica
aaatccctatggtcgagcacctataattagataatgggtcaagctagggctgaacattgagcgacttgatcgagtttcaggtgtacatgttttgagttgacgagttttggactttaaaaataacactcgtacacgctcgtgaaatgaccaggttgagcgagtttttgggttgcaggtaaggcgggttcacaagttttttttctaaaaaataaatattaaaaaaagcccagtccatttacaactgcaaccctaaaccctctacttctctctttcttttcttctatttatctattttattcttttatttatctatcgacctctctcgctctatcagtaagagtttttttttataaaaaaaacatgattgaagattgatggctactgttagggaaggaggagctgagaaggagatggagggggtggcgactggtgtctggcattggcaaaaatcgtaggtgaggtggtgaatcaaagaaaaagagagagggagagggaggagtccactggtaattgaagaggaagagagagggaaaggagggagtctgttggtctgaattagtgctgtaaatttatgcgtgttgtgctggcctgttccatatttatatgtgcttttcaaaaaacgggttgtatcttgccacaaaaaaatatgagtcgttcagtgctgtgccaatattttaaagggtagg

SEQ ID NO: 206500 - DNA, 630 bp, Cannabis indica
gactctataaatttcggtatctatatctatttttttttcatgatcatgtacgttgtagttatttaggattacttgtaaatttgtaaaaaaaaatctgaatagtttataatgatgaaaataatatttaaatagttacttacatataagaaaaagcagtcgagcgtacaacaaaatatataaattttgtttttggtatgtaaattacttggaattttttgaaaatttataaatggtcctaaataactataatatatatacgatgatgaaaaaataaataaaaaaattctcttagtcgaaataaatagagagtctaccgaaatactcgtaaagatgatttataggaaacttacccaatattatatataataaatactggggacttattacgtaaaacctacagtagaaataacttggtaaaatcggttttcataagcaaatggtacacaaattttaacgagagaaataattatttaatgtcatttttttaagtaaataagtatattgataagagttaaatgtgtaatttagatttattgatttatgtatttatttattcttacgttaaattttttatcaagaaacaaacttcattcactacaccaaaatataatattagtaacacttcaaaat

SEQ ID NO: 206501 - DNA, 1082 bp, Cannabis indica
ggtttcatctctttctcttttcctgttcggctagagacccagccgttggcctggctgtgcagttggtgttctctagccgagagggatggcggttctcttggtcatggttccttgcacgacgaactgggggaagccagcaacaatgatgcttttttggagtcgtcgtccaggggaggtcaaggtttttgggccctcgtggtctacagcgactgacgttcggaggtggcaccaatgggcctccgaaaatgtcagccattttttcttggccattttttgagcttttagccctatcctttccttttgaagctcggggatgggctgagatggggagtggtcaggttctgtgtttcctccggcgccgagagcttgttggtggcgggttatctcttcctctcctattggtgtgggttctttagtcttatttttatttattgatgttgttttattttagatgtactgctttatgttgtctttttggtttagttttctggtctagtaatggatcttctcttgttagagatttgagggtttgtatccttattttagttctttaccttccatctctggtggtatggtacttgaaaatgactatgacctcgattggtcggtctattggccttgttgtcatttgctcgcccatgttggtgttgatttgcttatgtttatcgttgagctttgtaatggactttgtctgttgtttctttgttgaatgaaatcttatctttccctaaaaaaaaaaaagaactaccattttgataataattgaactatatataggagccccaaaatttgattttactttaggccatataccttaggatcaaccttgcttgtgactgacacctccaattacaaggtaagggtcagcacagtacaacccaattctatataattataactagaaaatatatcgtaattcaatagttagtaattgccatcaggatgaaattagtaattgtacatcgaaacgaatacaatctcttcagtattctttgtgattcaacagcagttgttggatgggtgaataactctcatttaaatgttgcttttaatgttattcttttggatgttaattctttaat

SEQ ID NO: 206502 - DNA, 1020 bp, Cannabis indica
acgagagaaggagaagccacaaagattgcccttcctttcttccagcaagagaagtctagctagcacctccgcacccaatataaataggtaaggcgagagaggatcgccttgtctgagccctcttttaggggagaatgacttggttaaaccaccatttaacaggacctggaaattaactgaagagatgcagcatagaatcaaattacaaaaatgttgattgaatccaaaacaccgcattaccttaagcacaaagctccactccaatcggtcataagctttggacatgtcgcacttaaccccaacaaaagccgaatttccttgtcttttgctcaactcaataaatatctcgttagcaattatagaattttccacaatccaacggccttttacaaaagccgactggtttggggatatgattttatccaaaaccttgctgagacgattcaccaaaagctttgaaacgattttatacgaggtgttacagaggctgatcggcctcaattcatcaaaacagttcgcacgggccttctttggaataagaacaatgaaagtccggttgacttccttgctgaatttcccggaacgaaagaactcttgcacaaactcgataatctgaggtcccaaaatgtcccaaaaatccttaaagaatttcgtgggaaaaccgtctggcccaggagatttcaacgggggcatactccaaacaaattttttaatttcctccgaagtcgggagagtactcagaaggaaattctcatcatgagaaatgcaaggttctaaaattctttccatctcagaatcaaagacaggattcgaggaagtaaaaagatccatgaaatgggatctgaagtactcaccaatggggtctctgccctcaatccaggatccgtcttcttctcgaatcgcccaaataaaatttctcttacgtcgaacagcaatagaggcatggaaaaactgggagttacagtctccttccttcagccaacattcacgagacttttgtttccagatagattcaagccg

SEQ ID NO: 206503 - DNA, 807 bp, Cannabis indica
aaaacaataatggagttgtacccccaaacgacgacacaatagcaatacccatattttagagagtgttgcctccgccacatgaggatgaaaggaggctgccattgaatcactcgaagaacacaaaaccaccctgtcacggtctatcaccaccgccccaagacccatacaatcgtgatcctcattgataccaacatccacaaatagattaaaatcacataacctcaaagtctcagtggaatcactagagagcctaaccacagtctcccttggcttcacatgactagccagagccaaattagattgaacatcttgataacgccaaagaaactcaaaacccattgactaacaaactcatcggataataacttattgtcatgaacaaaagtgttgcgataatactaaattctccaacataacacaagaaattcttccatatccagctttgaaagaacatcccgacaatccacaagcaattcataaaaacatgaaacctctcccaaagtatccaaccctttaataacttagcctttttgaatatttttaagtgatttttttttttttgaattagtttaggtgattttattatatttttctatattttttttaattattttttataaatgttcattaaaattttaaaaattatttggttgcatgtgaatgcaatattttgaaattttaggtatttttgctactagaaaaaatattagataaattaaaaataaaaaacaaagatttagtgaaaacataaacactatagacaatgttttagtagctcttcgatatcatcaacaaaaaaaaaaaaaa

SEQ ID NO: 206504 - DNA, 1249 bp, Cannabis indica
cttactaatatgacaagggacaataccttaacaaatccaaacaatgcttgtctgtactaggatggtgcttccctttgttaccggtctctggtatcggaagctttaagtgtccatacagtacattggcaatatctgctgctgtgtataacgaaaatgtcatgcctgccagcttataagcttctttctcaagattccttaacttcttccccaccaaatttcgtgctcgaaggcatccctccatatcaacacctattccccaaagttccatgtctgcaagaatgttaaccttgacatacaaaaaattattctagtgtcagagattagtaccaaaagaagaactaatacaaatttgtaacagatcagatgaaagaattaccaaaggaatttcaacattcaaaagtgcttcagtgagttcatcagacacaatcaacttccagagaacagaacacaatgctcgtatttgtgcaactcgacgacagcaaccattatgagcagctctacgcatctgattcttccacctaccattttgattagcagcagtcgcagcctcactagataaccttttctttacttcctgtcatcacattaaaagaatcccacttattaaataaaaactgagacaaatagctgacctttttttttctttcggttacacagtttaacttttaatgtcgaaattctggctgtcatgatataaaatatcttccaagaatataaaaatggtttaacttaacattttcgtatgtaagtatttccaaatacatttgtttatagatttattttgttaccttctccaggtttggactagagcttctctcctcatcgggccaaagaatccatgccacaatgcacatgtcaattccataatttacacaaataggtgtcaacaaaacaaatgaactgtctatgatttcaaaccctctatttatctcttcaagattctgggatctgaatttctgaactgaaactgccggacatttaagtgcctgaatttgaactttcaaattccaagtatactttctaacatctcttttccccattatcctacttatcctctcccatcttgtctaacaatctctaacccatttccaccaggaaacatactatttttatcaccagatgcattcacatgcgagcaatcgtttatacttttgtcaaccattgtaaatctttaggtagattgacataatacacagcagaatttttcccaacagatggctattccgtgtacttctaaaagaggcctcag

SEQ ID NO: 206505 - DNA, 524 bp, Cannabis indica
tattttattttttaaaaaaaatgctaagagcgacatgtcattattagtgctaattaaaatcggattttacataatttaatttaataattagtataagaaatcgttaactaattgcaacgcactataacggacaatgttaagcactatataatatgctatattaaaaaactaaaaacacaatatttgaaaagatttgagaggtcttttctaaaagaagtaaagaaaagaaagaaagaaagatttgatgtgtcaaaattaatgtagcaagattaaaacaaataataatttaaaatattcgatctaatctaattctttaaattatttttttaaaaaaaataccattccaaaactaaactattcctaaagtgtattaaatgtagtaatgtttgaaatgacatttagtagggtttgagtttaaatggaatatgttcaaaaacatatgagatttattcaaagaatacttcatcaagggactactaccacacttagtgctctacactaggccggccctgagttgaaatggg

SEQ ID NO: 206506 - DNA, 1523 bp, Cannabis indica
tgtattcggtttggtcagtttttctgttacgattttttcttgtatctttaggtgacgtttagttagaggtaataaaataaaatggaatggaaagaaaatgaaataatttttattctattcctttgtttggttgcattttaaagtattagaatgctctttctacattttgatggaatgactattccaatttaaaaaggaaggaatgactattccaatataacaagaaaacaaatttaatgatttttttattaatttttttttatatattttaaattttattacattccattcctatttctattctcattcttattcctatatttttatttctctcaactaaacgtcactttagttcttatggcatgtttactaataagtaatgggaatcaatagtaaggtcctttacatttgtttatttattaatttagaaaagggaaaacttgattaaataagacagattagaaagggagaactccccccactaattttctaagaaatgtcattaagggtaatggattttatttatttttattttattttataatattaaattaataatgacaatttcatctttttaaaatatgtcttacaaaataactaccatatactagtttaattcaaaagggtcatttagtcaatttaaccattctaattactttttctgataaaataaataagataaatcactatcgttctattttcaaaaaaatttagtacacaatatattacagatattgattctaattattttttatttattatgttacatttttctattattttatttcaattgtaaatactacacgataaaggtgccattattgttctctttgttcagttaattgtttcttgtttggtgttttgagatactgcaaatacattatattatttttgttgtcacaattttctttcttatttttagtctgcactagtggtactaatttcttacaatcttgtacaaaataaataacaaaaaatatcagctgtgaactgtggtattatttttgagatactgcaaatacattatataatttatagtttaatgaattttaatcgcgttctttaagtccattaactaacaatgtacaaaataaatagtctttaaaagagtgaactgtggtgttagcagctaactagttccaattttgaaaagcaaaataaatattaaatatataaaatatcataaatattcattaaattcaaacattaattgaagagagaaatatatataaaacaaaaaaaatgtaacaacacatatccatatatatgaatctgaaactcttattcgtaaaataaatgaacattatacaaatattaccattcttcatattatcatatatatatatagtatatattataaaatcccaacaacaccaaccatataaacactcttcaaacagagtgaatacttacaaaatatatatatatcaaccccaaatctgcaaatccaatttttctctctctatatatgctatttatttctctcactctcaataccatacaaaaattagaaagaaaaaaaa

SEQ ID NO: 206507 - DNA, 991 bp, Cannabis indica
caatgtaatggtgattacattatccaatagaatctttattatattggaaaagctatgtaatgagaattacattataaatattaaataaagggaaattttatttacacctcacaaaatgataagtacaccctaatatttaaaaaaattaaacttaaaataatttttaaactatatatatttttatatgtatattttttaagaatatgaatcaaaaggaaattgaaaaaaaattaatataattaaagatatataatttatataaaataaaaattattaaaataaggtgtatttataattttttggggtgcaaataaaaatctccttaaatgaaataaaagtaaaaggactcaaatactattttttatataagaataaaaattaaagtaaacataattttgtgaatgtatcaattattctaatatttattctaacaagaaacaaacatcctaattaattctctaccatttttattccattatattactattttactattccaccaaactaacatcacttaaattctataatttctataatattatttactaataaagaaaataaagaaagaaaaaaaactaaaaaaaaaaaaaaaaaagaacaacaaaacaaaaaaaacaaaacaaaatacatagaaaaaaaaaaaaaggaaaaaaaaatgtaaaaataaataaaagaaatcatccatatatatatttaagaaaatagagtacattaaaggagagagttattttttttttttttagaaaagaaaaaaaaaaaagaaaactaaaaaaaaaaaggtaaacaaaattgaaaaagaaatcacatgaaaaaaaggctaattaggatatttattaagtgtaaacaaatagcccctaagaatgcataaaagactaaaaaacgatatttattttttaaaaaataaaataaaataaaatctaaaaaaggagatttttattttatttttttaaaaaaaattgagatttagaaaaaaaaaaaaaaagaggaaaac

SEQ ID NO: 206508 - DNA, 1393 bp, Cannabis indica
cttattttattactcacttttacattatatcatataatcacatattttctcaatatatcatttaaatattatacatttattatataaccaaaaaaaaaatgaaaaagaattgaaaatggatagaaaaaatattaaaataatatttgaagattgaataatatttctctacatgtaaatcattttcaacaacatttcttcatattttgacattttaagttatattaggtcatgagatgtggatgctattacactttaggtaagtaattttataaaattcttagttgacatgtttagtaaaaatgacaaaattaattaattatgtatgtattttcaaaataaaactgatatcttgtattggtataaaagctttttaaaattagaatattctgtttatgttaataaataatttaatttttctatataaatatataataacaatatttatatttatatgaattatatttatttagtctgatttattgtactaaaccgtgtacattagagtaaatgtgaatatcgttttcttatttatttaagaaaattgtgtttaaactctgtccaagttcgtttgaaaagatttggatttttttttttcattgaagattttttttttattgttttgttgttttcttgtttgtaaagcacgatttgatgtgtattatttgatggagtctagatttactatattgattagagaaattaagatttcgtctgcacactttctatatctgtccaaacagaatttgttcatatttacgagtttttgtgagaaaactaattaatgaattctctttgtatcgagactttttaagcttgattttgggtgtcatctattcctataaatatcacctaaaccaacagtaataggttgaactcttcaactcgtcaatttcttatattttaggaagagagtgtttcttttgtaaatgataattatttcgttattttttggtgagtttatgtgtcatttgattacttttatgtgaagtaaatttcaaaataaagaacgtgaaaaataatcttcgggagaaattttttactagtcttgcatcgggaggaagcaatcactgctatatttgaaagaaaatttctacaggtcttgcatcgagaggaagcgagaatttgtcaagtaattgaagggagttcgttcaaaccttagtgccttaaagagattcatttagcaaatagagtacaataagcttgcgccaaaaccattagagagaatctaagtttttttaaagtcaattactttgtacttgttgaaatttgactaataaatcgtatatttgggggtgactctgtgtactatagtagcaatctacaaggattgttgataccatatataaaataccgtgtgtcttttttaggattgttcgcggtgcgatttttgact

SEQ ID NO: 206509 - DNA, 1247 bp, Cannabis indica
ttatttttattatttgttttcagatgaaacaaccccaccatgtataatagtaaaaataagaaatttttctaattaaattaaaaaattaatcatgaaaactcaattttttctaatattactcattaatgggtaatattcattaaaaattaaaaatgcacctatatatattttctttcttttagcctaaaaggatatggttgcatgatttgggtctttacagtttacaacttgtgggctactaaataaaacattttcttttggtatgagaactttgttatcagttaggtatggatgtacatgcatgtcctattatgtatcattaatacatatctttaccaatgctaatatgatcatttaatgcctaataacaccctaaacaagtagtaagttagagtatttccaaccatactctttagctaaaataaagagtgaaacttaaaaaatgagctccgaccatataaaaactgactctatataacagaaaattaataaatagagaggtctttatttttttgctaatattttttaatatattttaattaaaagtattattactttttttattattttataaagttaaattatatttgacaaatgtaaattataaatattaaagtaatcaaatatgaactaaagtattattactttttttcggctttcgattccgtcaatttcggttccaatgatattctgtaagttagtttgaacagttttttcggtattttaaattttatgctcagtcttagtttttcacaagtattgttcttttgcatttttcttttctcattttattgtttttctttttcttttaaataattgtcgttgtcagaccaattcaaagtgtagtctatataatattgaatggaagaccaaaagaaaaacaaaggctaggttgttggcaacaacactttttatgtaaatagttctctaattaatgacatcataaaagttgtattaaataatttgatatatactaaaaaaaataactgctacattcttataaatagcaggataactcgaccctttcactccttgtcgatcagatcagacactctttttccaatttccctgatgtttcccttctgcacttaccgcgtcagttcaacacaactgctcactttcttgcgagggaggatattaggttgcgaggggatgccattgaggattcggtttagtctcctctgtttgctgctctctttgatttgtattgatcctctttgcagcttattttattgtcaaaaaaaaaa

SEQ ID NO: 206510 - DNA, 914 bp, Cannabis indica
caatacaaaatatttaagggcgcatttggaaagcaaaacaaaatggaattgcacagttttggaagtaatagagatatcaattacaaaataattttgcttatttgtctaactacgtaattacattcagttgagattacgagaaagagacagagagagagagatttctgaagtaaattctttattgattgaaatgaatgatgtagaaagagctatatttatagtccaagctaataacaacaccaagacaagtaaagacacaaactgtcttaactaactaagtcaacagaaaacaacaaactaacagacttataactaccactaactaacagtttgaactagtcttgagtatcctcaacacattctaacagtgtaactgaaaaaattgagatatcaattacactctccaatccaattctcatattcctatgagaattgggtgtaattacactgtgtaattactaactattttgtcaaataaaaaattaagaattttatacgtacttctcacctcatattctgtagaatgagaattgtagagaagctaaacagcaaagaaaagaaacagagaaagtgaaaaatgagccttactcaactgagtagctctatgcctttatttatatcaatccagtcaagtacaatacaagaaagtagtaacagaattacaaccgactctaactaactataactgacaccaaacagtaaagaaacaattagttaggtgacatcagcaataaggttgttaacatattcaaacacaccttatattttaaaatagagtgtgattagtatgctatgtcattactaccctaatgagaaattaccctagtaattatagtaactgaaagtctaatgaggctcaaacaaaattgtgtgactaatcttcgactactccttcaaatatgagtaactcataa

SEQ ID NO: 206511 - DNA, 1149 bp, Cannabis indica
acacacttaacttttcagcacaacgggatcatttacttgagaattcataatcgccaacactgtcccagcaatcccgaacaatctcaaagcacaaaggttctttaagccaagcgttctcaaacttaaacttacgattaaaaggaaagacactacttggctctggttctagaaatattggacaatggtcggaagaggaaatttccaagttagtaagagaagcaccttgaaaaagattgctccatgaaggattgaccaaagcccgatccaacctcacctctacccaactgctcgaccccctccctttctcccaagtgaatggatgaccccaaagttccatatccgccagattgcaatcgtttagggcctgctgaaaaccagttatgagactttgcggatacaaccttccaccacgcttgtcttcttgtctaacaatgttgttcaaatccccgatgacacaccaaggctgagtacggtcagttgctagagtacgaagcaattgccatgtttgatgacgaagaccgcaaactggttcaccataaaatccagttagtttccaagctcccctttcggatgtttccacaagaaaatcaatatggttattagaataaccaagtattctgccatcatcttgttgtttccacaataaggtcaaaccacctgaactaccatgggcctcaacacaaaaccccttcaaactttaacattcggcccacaccttcaattttcatcttgttacatttagtctcacacaaaaaaataacattggaattcttttgagaaacaatctcttttaggaattgaatagcccattggttctcaagtccacagcaattccaacttaacacattgataattcctggcgggcctgtgcaccagaacccgccccaaacaagttttttgtgttacttttcattacatcagtctccataacatcacctatgcattgattcgacccatttgtaatattatttcccacagcccctttagtccattggcccacttcaaagtcggccccatactccacattcccctccccttcctgtgcgcctccttttgtatctgaattaagatacttttttccttaataataacacttcctttcacaaatcttcacaattaatcctctgctaacgtgtggtcaacttgtct

SEQ ID NO: 206512 - DNA, 725 bp, Cannabis indica
caatgccaattgttctattttgaaactcaaataaaaaaatgtgaaacaaagatacgaagttgaatgttgttttcaactagcattaattaatcatggtgctttgcttttgtccttgggttcacaagtttgaacccaacacccagctggcatttgtttttatatatctttttatgtgtgtggtgtgccaacctatatttctttatcaatatttaatttgtgaattcttatataacaccataaatcattaatacaatatatttctcaaataaaataaaatgtgaaataaagccaaaacgagagcatactatacgaaaagtcaatgcagttaattacatgtttttttaggaaaagggagcccactagaaggaaagaaagtctctaagattgcaggggtcatcaccaatccaaattgctacttcatctaatcccaaagcccagtgtgtcagcttatctgcaaatgtattggcagatcgattaacgtgagagatatgggctacagggaggtgagacaaagcttctttgatttgacttataaggtcaccaaaatacgagatatcctctttaggatgatccaacgcgtcagtaatagctttgcaatctgtttctaccacatggactgggaaatgcttttctatacaccaacgcagcgcgagaaggagggactttgcttcaagagtggcaacattctcggctcctgtgtaggggaaagccactgccgcaactac

SEQ ID NO: 206513 - DNA, 828 bp, Cannabis indica
atttcgtttcaggcatattattttagaattaaggtattttttaatgacgtggaaaggtattattgtaattgagatttattaaggtatttttatgaataatttatattttaagtatattattgaaaaaattccattatttaataggtatgggcggggcctagttaatacttattctgataacccacaattggatcagtttctagctgagcttagctgaagtatcataagaattgggccatgtaccacgatcaccagcccaacccaatttttatgaagtccaatatagtgtgataattgataatattataagtgaaattaaaaatgtcacatattttctttttcttctttcttttaagtcttgaaaagaattgaattgattttgaattataggataatgctataatacacctcttaaaaggtcatttttagtacatttcctatctgtttaggcattcaaaaaatcttaatcacctgtaaatttttagaaaaaatttaaattgtttacggtcttaaaaataaggctcaaatgttttattgcactcgttacttcttattttgcacgtgctaatcaattatttgaattttattttcgatattgtaaattatttagaatttttttaaaaatttataaatagtcttaaaaaatttacaacgtaagtgataaaaaaaataactataaaactcttgattttgatgtcaaaacttattgagaggagagtatagatttttcttaaatttttcctaaataagaagtgactaataataccttatatttatctccttggttattatggtgtttgcttgaagaatgtcactgaatttttattt

SEQ ID NO: 206514 - DNA, 647 bp, Cannabis indica
ggtaagagcattagttattaggcatcagtagtatttagtaccttttataggtgacacattatgattgattagtgatattccctaatagttattgtcataagttatatgaaattcaaaacttattacaatgaccaaagacaataaccaaaacaatagtcaaactaactaaataattgaagtaacatagaaaaataaactaactaaaataacagaattagttaggttcattaacacaccattttgaacgttgtttgcttgatcgtttctagctctcatcatgtgacccctaattcaccgtaattaattctattagcactcattaaattaaagacctcctaatagtcatgggagtttgcagaggcggagccagaattaaatagttggggagccaatatcggacaacgcagtatacaacaaatttaaattttggtgactaaaatatcttttaaggatgtatgtcaattgtggaaaatattatgatttttaaattttataaatattttatacaatattttaaaaaataatcaaataattaaattaaagataaaatacgagtgatactttaaaatttgacggagttcaatttaatattaccaaaattaataatgatatgtagttttttcaggaaaaacaaatcatattgattt

SEQ ID NO: 206515 - DNA, 502 bp, Cannabis indica
ggtgatcgttttcacaacccagacagacacgcaaaatacgacgccgttttatgccattttcttctgattattttgattgggccgtaaacggatcggtacttgtagcccagcccggcccatatctattatgagcttggtttaataaactggctaattaataagtgattaaataattaatctataagttagtatcaacaaggtcgttgtagtatagtggtaagtattcccgcctgtcacgcgggtgacccgggttcgatccccggcaacggcgtaatctccttttaaataatttttttattctaattaatttttaataattttattcatattattagctataaattttagtgtttgggtcacttttttccttaatattaattaggaaaaaaaaatcaacgataatttttaataattatatatattagttaaaaaatttgtgtttgggtttgtaaaaataatgaaaaattgtgcttcggtctaattaatttgaggttgaatattg

SEQ ID NO: 206516 - DNA, 649 bp, Cannabis indica
atttcgaaattaattatgttgcttaacatccgtccaactctcagtatttattttttgaattctcaactagacacaatgaatgtgatcacaacttattgtgttacaaaagacaatctaagatggctaaggactaacctaacttaactcactactacgaaatgcctaatttgcatcagtcaacgcgtctcaccaaaatggttgaccgaagcaagaaatagatagagattttatgctttagtggataaccgaagctaaaagaaaacaattagcgtcagctactattgtgacgctaaaagaggaaccgaggaaagtgaaaatttttaaaattgtctttcacatattgctttggtggaaaaaagaggcaaatttctttggcttcgatttcaaacaaaggttaaaaaatttgcgactgttatccaccgaagaaaaaagatttaatttttgtatatataaaatatacaatgggcttcgagtccaaataataaaccctaaattaaaagataaactaaacctaaatatcacacagccatacctccatattttcccgattgaagtgctcatcggagaccgtcgagatgcccattgccaatcacctagacaagaaccaccgcacagtcaccccacaagtcatggtactctctctctctct

SEQ ID NO: 206517 - DNA, 585 bp, Cannabis indica
tattaataattagtacaaataaaacaaaacgcatagattatattttgatggagacatgttcacttggcacaataacaactctaagggtaccattgtcaaagaaagattagactatatgccaaatggtctaaatttttttccgtgtcaatccttgcacacctagacttttatgcttctgaccatagagtattgaaggttgttatttcccaagcttatcgctcactgcctcaacaattcaaatctcggtttcgttttgttgagaaattatggttgaaagatgaagattgtcttgaactcattacttgaaactggaagcatacaactgggggtgatctaatttcacaaatattatataacatcttctcttgttcttcacaggtacaatcttggcataggagtaagtttggagatttgcttaagaaaataaagcttttacatgaaaaatttgcagcctttcgcgattcaaataacaccagctctgaacactttgttgaacttcaagctagtgaaaatatcttggatgatcttttggctcaagaagaagattattggcaccaatgttctcatatatcttagttacaatct

SEQ ID NO: 206518 - DNA, 1016 bp, Cannabis indica
gggagagaaggaaggtaacttgtgtttctgatcaagttaatcccatttgtgagattttgtgaggagttaaactctaacaatccacaagctctctctcggtcattcattgtataaattcaacaaccaataaagataagtttttctctcattttggtacattgaattctgtccagaattgttcttatagtttcttatttgcattgttcagtttttaattggcttttattcttgaataatggtgattatgatcaccacagtatcagagttatttgtggggtcaaaggtaagctagcttaatagtgttcttttctaagccaagagggtcaattacatataaatccaaaagcaacgaaatcagattccatacagtgggtgcaacaagaaaaaaaatcaaacagtatgaatatcaaccactgaaaattctaatccaccaataaactccagtttttatttcaaatggccaaagaaagttctttaacacaagtatatacgataaaataaaccccttaaaatttactcagcagatttgagtaactcagcttctttagaagagcttttagcaatagcaccagcttcagtcagcaaagggaccagtttcccctgcttgttcaaggcttttgtgtctacaacaaaacaataaagtacagcaaaatcaaattcaagaacagcccaaaatatgcctgtgtgtataaatatatatatagatagggagacgattttgtcctgtggtagattagatgtgtctcagagtacattagacgagtgtcaagatacgtttactatttttttaaccttaattatcctagatcaatctcagctctcagatcaaataattcttttatctaacggataaaatcacagaacaaaatcatatcctatttctcatatataaatttttgaaaagcaaaccttaccatcacatccaccgatgtggtttccaccatgaacacattgggcacagtacgctgtccagtccactcagccagacgctgattgaatctgagctccatcacctt

SEQ ID NO: 206519 - DNA, 966 bp, Cannabis indica
attttttacatttttctatttttttctttcacactaaaattcaacttccaattttatatataattttactaaataagtgatgcatgccctaagaaaaaatgagccttaggtgaaactaaattatgaggcctttttcttaataaaaagaaactgtggtattttttcaatattatactctaagaagttatttttataaataaattttgtcatgtacgtatgagactcttttggatatataagagccctaaattattagactaagatatattgtcctttgtttggacttgatgatgactcaccttagtcaagaacaaattaaaatacaattaagattatattataatatagtattatagaacatgatatagaaatacaaaaacttaataaatagatggaccacaataattaatattttgttctcaaaagtacacacaaatttgaagactttttctgacttggtgatcatatgggccatataaatatatatatatttatatatatatatatatataaatcaataaacatgtcactactacaaaacaacttgacatgcatggattataatcagcaccatgtgattaataatttgatggtttccatattgtttattaatatcctttttagttgggaatatgcttacttaatacctacttttccatgcaataataataataattaaaataaaaattaaaaaaataaaagaaagaaatggttttaatttacaagccacaacatttcaatttgatatatatcaaattatattttccaatccaatcaaatattccaacccaattacaaacagttataaattgaatatgaatagttgaattttaattaaattgagtcgataattgtgttaaaaattaattaaaaaccaatcaaaatatataatatataatatatattaaaacaattattgtacgtatttattaatatatggtaaaataatgtttaaaatttaatttt

SEQ ID NO: 206520 - DNA, 718 bp, Cannabis indica
aacaatgtattccatatcctattctgcacttgtgagtataaatatttaaagcacatatcaccattgggtgtacaataagtttttagcaccgttgtcgaagagttgtaagaatagaaacatatttatctgaaggttagtaaaattcttcactagttattttattttcattttactctattatctaataaaaaaaaattaacagataattttgggtcagtcctacaacttattatttagttatatttttattaaaaaattgggtcagttttaagcctaaatatatatatatatatactatatttatatattatattattgtcattctttagttggtggcatgagttgctcctatcagcttgttttcattatctgctgatatagttgatggaattcgtgcctcctattctctttaatttttgtttttactattattattatcacttatattattatttttttgttcttttttcattgttaaaaaaaagaattcattctaagtatgctctatggttgcggttctaattgatcatccatattagaaattttttcttgtgattttgtttttagttgtgtgaaatttgcatgtatcattggcaacgagattcaaagattcatttggttaaaagaagactgcatttgcttgaaattgaaagtgttgttgggaatattttaccaagatctaaatttaccaacaagtatattgaattaacatcctaaa

SEQ ID NO: 206521 - DNA, 683 bp, Cannabis indica
gaattaaagatcaaactttgatatcatattattattttaaaaaatttatggtgcatccccaaggtatattttagtacgctttatattctttaagcatctatagtagttttgtatattatgttgtagttatttaaaatcataaaattttaaaaaattctgaatagttaaatgttctttttataataaatgtaataaacaactatttaaatcttattttagctaaatattttaatttatttaaaaattataagtaattctaaacaactataacatatacgactataaaataaaaattagatttaaaagtttttcttgatgctgaaacagttaaagagtataccgaaacacttttttaggaattgtactctaaatttttccaaaagtttagaggggtgcactacaaatattttctattatagctagctaccaactcaaagttgtaaacaaatgtttttcatctatactgtaataaattatttgaattttttctgagtattgtaatttattttagattttttaaaaatttaaatataatattttaatattttatactttgttagactccattataaaattatttatttttatctcattattgttgttaagagcttcttaaaaaaatggttatgctttttgagttgccaaaaagagaaaatgtttttatcagtgacaatatctagctc

SEQ ID NO: 206522 - DNA, 1272 bp, Cannabis indica
gaagtctattaattgtatcatatatactatctcatatatacatccaaacttgttgtgtagagcattcatgtatatagtacaatctaacaccaagcgatcggccagactttataaggaagagtattattgttgtctaacatatcactattattttttttctaataattattaaaatcatatatataagatgtaatattaagttggacctgcagaaaatatttatctagtgttagacttataatatctctttagttaaggaatttcatcactaaacattatataactttttttttcttttaagaaaatgcgttatacataacaaataaaatagttagaccgtaaggtcattacaaattaggtttgaaggaatgtcatcatccatctagagaatcataacgattgtgggtaaaaatgcactttcaccacataattatgaacacaaacattacaagaacaagctacattagagtaaaaaccccacaaataaagaagtgcttaaatattgccgagagtaattctcgattttccatctagactccactcccttaagagagtaaatcactgcctgagagtgactctcaacaataacaaaattccatcttttccgtccccatctcaaaagcaaagcaacaagcagtagcctcgccacaaagagggtctgaaaaatcaagtctagcagttgccacccaacaaaacgtccccatgtgatctctagcaacaacaacaatacacatgaactccaaccccactctagcatcacaatttaatttgatttagtccagcaaaaggagtgccaaacatctgtctgagtcagagtgagagtgggaataatggcaatagctctgtaatctgtgtaacaatcaataaagtgtttgatgttacccaaattaccattgtgaaccttatcatttctagcccgccaaatagtatccaccacaatagaggcatacagaaacaccttattaacattaatgcccctatccttaaggccccaaatgaactttacccacacatacgaataccataattaacaataggaaagatgccccaaacaagaaaaacagccataagtgataagccaagttgcactggaggaacaagtgctccatagtttcagtctcaattcagcaaatagggtaaagtggagttttgatacaacatctttcgttcaaaattgagttgataggcagcgcgttcgaaaggatgctccaccacagaatcttgtgacactcaagagttttactgttctaaagtttattctagagggagggt

SEQ ID NO: 206523 - DNA, 703 bp, Cannabis indica
gttctgtacactggctggcccaatccgccaacagtctgctctcatattttggtatacaatgactaagaagtaaaccacatcctgctagaaaactcccttgacgaaagggaaagaagaagagaccaagtcaacttaaagtggcatgtttgctaggaaaaatttggcaggtgcttcaacaaacaagtcaagaagagtaaattcttcgtaagagactaagtgctctgaagaatattctttgacaataaagatcctatagcaagcacgtttggaccaaactgaaaaggtctgcacaggaaaaggtgcatacaagcctggtgagtacaatgagaacttggagttggctcttttatcaaaatattggaatagagaacatctcggtaagtgctctcactagccagttcgtatagtggttcctctgacgtttcaccgtccaggaattcacaaaagagctagtacccatcactttttagcatggcctcctatcgcacttcagtgatggcctctgcctgacatcttaagcaggggtagtaaaaacgtgatttcaaaagcgtacattaagctgtaagcttttgttacacgtaagactgaatgtgtctaaaccacttgctaataaagataacttcttaaattatttttttcagttccatatgtgtacacccgttagcatccctaagaaaatgtccaggcaaggtctatgaaactt

SEQ ID NO: 206524 - DNA, 712 bp, Cannabis indica
acacaggattactttcagcataatccaatcttgtccagtccagtccaatccttttcaatccaatccagtccaatcctgcgtaccaaacgggcccaagaagtattattagtgctaggtgttattacaattaagtattgagtctcatataacttaagaaaataacttttaagaatatcgctaaccaatcgtaaaacactatctataaaaggtacttaataacaatattttatttgaattcctattaataattaaaagggtaaaggggtagataactgagagggttagagcatatatctctaatagtaatattttttaaatacgttaaaaatttatatattatctaaaaagataatattttattttatttttcttccatataatctttgacactattatttcttaaaacactcaaatggtataatacttttcaaaaataatataattatgatttctcgcattattatttaatatattatttattttgattataaatattgtcagactacttatttacttttaattttttattttttttagcatcaatgacatatagtaacatcaatacaatgttttataatagcacctatttatttttaatggtatgttagaagtctcacattgataatgtgtggaaagataatagaatatataagatccataaactgctcttctcatagccaatcagttttgagatggaaccctatgcatctta

SEQ ID NO: 206525 - DNA, 1066 bp, Cannabis indica
cggtaataacagtttccaacccttactgttcgttatccacgagctacgtatgtcactatcattgcccgatacagcgaatgataagtaaaaacctaaccgtggtttcaggagtaattactcataacggtaatgaccctttccaacccttggtcataaccgaggcataacaaacacataaataggatctcaatcataatcgagattataccaatcataatcgttaatcatttaatcacaagtggtgcgtaacacttttcttacctcaatccagaaatcaggcgtgcgggccgacctaagtggaaacaaaacttgacgatcccaggtcctatgtcacgacaataaaattcaataaattccttaaatcaaaaattccaagaataaccctagttccgataaccaaacatatcctaacttctgaaaactccaaaataggccatacaatacctaaataacctaaattatatactgggtaccacccccgagtcaaaaccgatttcgaggaaaaacccaaaaatttcccctacaaggcaatcggtcgatcggatctgtaacaccagaaccaaccggtcgaccgattctagtagggaagaaattttgggttcttttcccccaaaactgatccaagctccaccacacctatctaaaagctccagaacagtttaatatcacaaacacaatatattctagacttcaattcacaacaattcattagtttaagcaaatcaccatgattgagaagaaattaagctcaaaaacctctaattcctctaatacaaaattaatagctatatttctataagcttaaacaatctttaaatcacatctaagaacttgttctaattcccgtttaacatcacatctctgacatcttagaaccttagtccgaaactaacctaaaacttgagaaatccttaaacaacatagaaaagaacatacttcaaagcttctagggtgagttaaacagtgaaacctactaggatttgaagaaattggtgaggaacttctctgattttagctggcctctagatcattcgaagggaagagagagagagagagagagaggaga

SEQ ID NO: 206526 - DNA, 1207 bp, Cannabis indica
atctaacatcctaacatggatactttaaaataatgaaattgacacataagggatttaagaaaatcttacattgattgcggtcttttcgttcagttatctaactcttgttcctttctgttgtagagtattaccaaaaattgaacctagatcttctctcctttcactgtgttcatcacagtcttccacaaaaggcctgaatatcaacttgaatagtgtgggctaatactcaaaataccttagaacaatattgagaaagagtttagtatagtgaatttttaattagaagaaataagagaacagaattatctaccattaaattttgtcaggctagagttatgaaaataagattcattctctctattggaagttattttaccaagatctagatttactaacatgtatgttgattatattctataatctaacactctaaacatgaatttcctaaaataatgaattaaacacatataaaattgtagaaaactttacattggtagcagtgagatatatgttaatctctagagaataaaataatttggggaatgaaagaaatgaaagtgaagtagttttgatagtaattatatataaataaatgaatagagattagattagatgatgtgtggttgcagatcggtataacacagccctagtttgcgacagatggggatacttggcatgtcatcttcgactatggcttcgagttgatcgttctcttaaagaatcaagctggcgttttcccaaacattgactcagttgtagctgttgcaaggttggttttcttatatatatataaagaaaaaaaaaacaaaaataacctcattcattttgagtgttttgtaaaattgaataaatgtttattagtaaatttcacactttcatgttgttagtttggcgaattccccattaattttgcagactatcattagttcggtgtaaatttagtttatggttgcttgagctactgttaaggtctttcatggctgcttagtgtaattccatgaatttatcattgcacagtgcacaaacccatattatatataggaatagaaagagaatcctattgataataatattaaattgctttaaaaatttgttttgcaaatgtaactttttcattagagtcattttatatatgtgtttctcttcaagcctggtgacactattttaattgcagctggtgggatgcatctggctttaaatattcaaa

SEQ ID NO: 206527 - DNA, 794 bp, Cannabis indica
accaacagtgcataaaccgcttacaacacaccacaccatacaaaaaatgcggtttgaaaatatttgcattgcagttacggtttgcgtttttatcaaactgcgcagtatagtgtagtttgtagttttgtatttaataatcgcggctcaaatcgcaccgcattatatattacaaaaatactaatttttacattatgatttctcttttcatatatgactatatgagcaactcatatgtttataaaattcaaaccatacaattaaattcagggacatctatataaattattctcatatattattgttaacatattattattaatatatataatatgtatattttataattttttagagacaatttaatacaataatttgattagtatatatgttatgacgttaaaagtttgataagataatttttttcttatttaattgttgaaaatttattggactaatcttttaatttttattttaatgtttgataatgatgatagtgtaaactgcttaaattgcatcgtcccgtattttcacattatagttttcgcagttttaattaattgtcttacaatgcggttacggtttaaaaaattacaaatatcgcatatgtaattttgtttgaaaaaataatttaaatctccactacgaacacccttaattagtggcctcttaaaagggaagggtgttataggtctttatttataaatttgtttagccaataaatgttgtatttatgaagattaggtaaaatcttaaactaggacgaatctatattaactcatctcattagtatgcat

SEQ ID NO: 206528 - DNA, 739 bp, Cannabis indica
catatgataggatgaattaaatatgatccaagatcttgtaaaaatatttccctcttcccattctgcatagcaatggctccaagagttaatagagtttagtatgaatagtttttgctcaaatgtttgtacgaatattatttttattataatagtttttcctttatgctaggctactatccataatgtctcggggtttatattatccttgaaaattgcacagtaatcaatagaagagagaagaaatatatatattagcagatgtttttaagagtatatcaacccttcaactttggatttttcaagctaatagatatgataaaagttggagaaaaagaaaggaacctgaaattcctaagtcatagcccaaaatgaggccactagagacagcaagcaacgatgcacgtaatcactactggggctgttaatcttgccgtgaaagccactgagcagaactcctccagccatttttgtgcttaatttcctttgatacatttttagcaataagaatctttgtacatattttctttcttttttatataattaaattactacttcgagtccatggttcggtgggctccaactttctcaagtagacttaggggctatttgtttacacttaatgatacatttgatcttattggaccagatttagatccattaagagtattttatttttataaatcacttattggcacttaaagtattgaccgaatcaaatgtataagtatagcttaataaa

SEQ ID NO: 206529 - DNA, 875 bp, Cannabis indica
cttgtgttttgttaaatgacaaaatagacctgtattttccaaatggtaaaaataggaccctgagtttaatttttgacaatttttttttaatataacaaacttgaagacaattcctaatacgaatagatacagaaaatgtaaacagttttgtcataacatttaaaactttgctattgtccttaaaataataataataataataatatcttgcacttataataaaattataaataaattacttgcttaaaaataaattttttatttattttatattgtggtaaataatttattgcacttcgcatgtaataatttataaaaatattacgttatatataaatattaattaaacaataaaatcatatcaaatgattttaaaatttgatgtcaaattttaaaactatttgacataattttaaaatatatatttattaaaaaaaaacaataaaatttatacggagaactctaatttcacacaatttcttatataaaaaaaaagaaggtgcataaagaaacatatagtcaaaataattgtcgttaccgttctcacttgtaattataattacatttaaagatgatttatatctcacttgtagttattattaatatcatttccattgagtttgctttgtacaaaaaataaatcaaataatattcgataagtagtctcttttatatgtatctgaatcattctattataaattaattaattaagtaaatcattaattatcatagttatataatttttttaatttttaattaattaatgatctctattttttgacaaaattaataatcttttaataaaataaaataaataaattaattaaaaatctctaagaatattaaaatagaaaaaatgaaagaattaagttaag

SEQ ID NO: 206530 - DNA, 1041 bp, Cannabis indica
tagtccaaccactaataagtgcagaatactcaaccttcacacttcctcaatcactcattcgatgattttaagcagtaaatctccctcttaaataactaactttggatacattcttaagtttatatatgccgaaataaagaaaaaaaaccatccaaatacatattcacacaaaatatatgccaataaaaaagaaagtaaacacattcacgtatttaatgaacatgggtacaaagaaaaagaccttcaattgcttccctgggggtcttgaaacccaatccaacgctcttccagaaacgattccctccctttccaggtctcttccccttggaagatttcttggagctgaaaattgattatattaaagtaaataaaacataaataaacaaactccaataaacaaatatataccaataagaaaagaaaggtttatttttctttctacaatgtaccttagaaaaacctttggttgcttaagaaaagccttctcggtctgcaacgaaatagagtgttaaaatactgaaattatagagtttaagaagcagaactgacaaaaaaaacggagttgagaggtgggatagatctggaacgaacctgctctgccatggctgcggagtgtggagaggtaggagacgaggataccaagtgagaaaaccctaaacttaagctatactgatattactaagaaaatgaccttatatacatgtgggcttcacatatgggctcggctaattctttaaaacaaaaaaataagtgaaattctttttgaaaaaacaaatatgtgaaatttttggggaaattacattgggttaatttttatatttatttttatttttatatttttttaaaatatgtctctattaaactacttagggttaatgtaaaacttataaaactaaaagtgagatttaacaaaaaaaaaatctcaacttatttcgaaatagttaaatagttatgtgtgaaacatataaaatcgtcctttaaaaaagaacgtataaaaatgaattatattttatttaataaagagatatttattaaatacct

SEQ ID NO: 206531 - DNA, 672 bp, Cannabis indica
ttcagttcaatttcttgtgggtttgatttcatttatgtgagtactacttgattatgtgcattttcgtagttgtttataatttatgtaacaacaaatcggatatagtgttgctcccagacaaacgaatcaacaaacaaaagtcctggaatccaatgtgagccattcatatagcaagagaagcgaaaataattagttatggagtggagctctgaagaaagaaagaagtcactatgacactcgagagaatgtgtataaggctacttgaaacatggtccactacaaaaatctacctagaatgttcaaagaagaaaagtaaaaagagaccaaagcaagaggtgcgagtaccacgacgacattgaaaaaactaatgatctctggtaggtgaagtttttttatcgagttgaatcgcaattgggagtaaattattgttgaacagatattatgatccaacaacaacgatgacagcaccaacaacgatattttgagcaggtggagcagctggtggtccggtgttcatggccatcagctctgataccaagttgaagctataaaaagcttattttgcagagaaaacaaaaataaaagaaaagatatatattgaggaataaaaaatgtaaaaaatggctctaattttgaaataaggtgagattttcttttatgtatattcaaaaa

SEQ ID NO: 206532 - DNA, 613 bp, Cannabis indica
aggtttcgagtttgaatgtattgcttgctcccaaaatcatatctcgggtattgtctactcggatcccccgacacagccatggcttttgtcatgtgtttatggtcctccttacttccatgctaagaaatctttttgggagagatgcatgaagatagggaacagatttggaggtccttggcttattttgggtgacacgaactttgtcctgagtgaatctgaacgtgttggatctagaggaagagaccaattcatcccggttatctccaatttggtgaattccaggggcctggttagcctggccattcagggagacagcctgacctgggataaccaccgctctggacccaaccacgtcaaatcggccctggataaagggctcgcgaatggagcatggattagtctattccctaaggcgactctctgctcttcccagacctcaaactcggatcaccgtcctctgtgtttgcgctctaggggtgtagaggataaaatcagaaggaatttcaagtttgaagaagcctggactagggatgaaaggagtcggttagtggtggactcggcttggaaatcagttagctacccctgggcgccggctaggatattcaagaaaatt

SEQ ID NO: 206533 - DNA, 779 bp, Cannabis indica
ttatctttcccttttcagctctctggtcttcatctcaagtaactttcttgtcttcctccactttctacattctttcttttctcttggctattcctacaattcaaaacaaaaaaaaaattgtgtgttttcattttttcgtatgagaaactattattatccgccaaaagttttgagatttattttaaggtgtatttattgtagtgttcattagattattaggcctattcagatttgatctagatatataaattatatattggaagttaaattttactgtccaatccgatctaattatatattgggttgattctattcattaaatatatttcatatacatctacgaatttaatttgaatttatttaatattttatatctagtattttttggatcagatcacattcatctaatattttaagatataatattgattggatttgattagattcatccactaaaaaaaagtaaaattttaatggtaaattttaaaaaatttatatatatattttatgtataacaataataaaatctaattactcattaaaacttaataaaaatactaattgatttgattgaatatgggatgtattggatttttaaacacatcatccaatatttgatccgatccaattgaatattaaaaaattaacaatctaattcgatacaattataattggatatccaatgtagcggtcagggtcggcccaaccaatttgggggccttgtgcaaaacttttaaaattacgctcttaaaaaaaactcgtatacattaaaactacaa

SEQ ID NO: 206534 - DNA, 711 bp, Cannabis indica
taattttacaatatttgtgtaatgtatgattgtaatttaattaattgcttctatgaaatgaaattaagtatattggctaatcataaaattaatttaaattatatttaatttaggttttaaaaaaataatatttaatttaaatttaaattaaataatatattatataaattaataaatatataatctaaaaaaattaaatgtcctgatttataatagttgtttagctgaaaaataaataatttagcgtcaagttattaggcctataacgtaagttataaggccatatagcgtcggttattagtatataactgatgctatagggtacatatgacgtcagttttgttgtaataattgacaccatagggtaacttttagcgtcagttgttttcaaccctacatcgttgcctagatcagcatcagtagcaaattttgccaatatcaacgatgaaaggccttaaagactgcctctaaagcccagatttatagtagtggtaaagtaacttaattaggaagaaaatcattaaaaattttgttaccttgtatttgctctctgattcgtttttgagtaagcttcgaattctatctgatcttcttgtattcaaattatctgccagtacgattcaaatttttaattttaggttgttttagtatttttttcaaattaatgaaggtagaaatcttttttttttttttttttttttttttttattg

SEQ ID NO: 206535 - DNA, 1393 bp, Cannabis indica
gaaaatgacacagtccattatatattttttttttttatataaatcagataagatacagattgtattacttccaaacataccatttacaaactaagcagcaccttataagaggcccaatctagtccattataaatatcaatataactactgcaatgaagtagtttcaagtttcttattaaataaaaagtccccactcttgtttcaagtttcttatcaatataccattagattatatagaaagcaaattcaacaatcaaaataggccgaggtatgtaatctctcaaaatgagcatgaagtgaggaaactacatagaatcccttcatataatacataataattttctcatggtataacgccaactacaatatggattcgctgaaaataaggggggtgacgcaaacacgaaaaagaaagtactactcgctaattattttacgtacgcgcgcagttatcaatacaaattaatatattaatctatttatacatgggtatgtaagccattgactttttcgcacgtacgtaccactatttcttaagaggaattccttaagtaataaattaatgttagcatgattaattttagtctgtgagttaatatataatagagataaagtgtaacttatatatatatatatataagttataattgatcgataatagtgcttaattgcctcatcaatattacgaaaacaaaaaaatcaacaaaagttctgaaaccaaaaaaagctaatggtatctgaacagtctttctctttacatatacacatacatatataatatatatatgtatatttctacatatatgatagaaagtcgagggagcaatctaataattagctgatcagagaattattattaatggtgtttagggtcaggtccaccagggctacgtcggttcggataataatggtcttgacgcctcatgagctggtcagctttttgaatcagttcacgcattaacattttagtagtgtcgttcttcatccctacaattctagggctcatcggctcatatatgggtcgcccactttccacctttgaaacgacaataatgaaaaacaagataagacatgcggcccataataacttcaaatgattataagtagttgtcatgatattttctcagctcaataattctctatatatatcttcagttttggtgctgcttatccaagagttaaatctatatatagtactgatttgcatggagagaaagaggctcattaatttggactttaattcttagcaagtagtggagaatgaccatgttatattattaaatggaaagttataagtcaaacaaatttatttttgtttttttatgtcgatcaattaatcatgctctatatcacccgaaaattatcaatatatatataagaatagatgagagca

SEQ ID NO: 206536 - DNA, 1735 bp, Cannabis indica
aattatatccaaatgatgatggatgcaacatccaaaacaaaggtcaacgatgacataaagctggtggccttaatttcaaagatatgtatcagatccctgtttatggggagatttgtaaataaaaagatctgatactttgttagatttctagtccagagctcaaggcttcataaatttggaagaagcttatgttcatgcttatggagtacctccagaatcatcaacaagtgtcagtagttcaactccgactccctaattttctgctctaactaattctcctccaattgtatattcttgactcagcagtgtacggacccaatgtcttaggacaaacttccacacaaactagtttcattggctttgtggttgcacaaacttgatgtagtgttgcctccagacaaatgagtcaaaaaacaggtgttccagaatcaaatgtgagttattttaggaacaaaagaagttcaaagaatctgagtttggttgaagctccaaaaaaggggatgactcatgaaccaagatattctgagtgtactagcttggtggatactcgaaaaaatatttatagagaaacttacaacatggtccattggaagaagccaccgcctatgtacaaaagtggaaggcacaaaaggaatcaaaacaaaagatgtgaataccaacacaatgttgggcacactacaaatgagtatgattacctataagatgaaatcaatggattggtaaggaatgatcatttatccaattggatacggatcctaatcatctatgtaggacaggttttggcttatggtactgacacgtgtaatgaaggtggattatgaaccagttttaattatacgataataaatatatttagacaacttgccttagaaagtaaaattagtagtaatattcaaacaaccttgttctaaagacaacgacaagccataaataataactactgattgatgagaccagcgagatgaacgaaaacaaagaaggttcatctcacacaagagaatgacaatgtttagaaagagtagataataaattattcaaagagctctcagcttattgacccacatactcgtgagtatgtggaaagactagacaacattctcaccaaggttcatctcgtagttgtcatactgtgataagcatctcgcatattatgcctgactcaatatttatgaaagaacgcgagaagtactacttgaagtatacttaggcgctgataattccttttttttttttttttgataaagcatcctaaggatattggttgcattgcgagaagaataagacatagtcaacataaccgcttatagataaagtttaaagagtggttatgaaaagttatttttcattatcccatgtgatgtaagtgggaaacgtggggattaaccacatttcacgaacgattacaagtgatacgattccaagggaataactgtcatcctaaacttctataaataaggatagaacccagaaaataagggacgaccaatttgagaaaaagagagtgttataccagccttttattgtattttgtatacaatcaagtaattgtgttattttgtctatcttctatacctatataaatttgttttaaattaatttatttttaatctttgttaaaagtaatattttatttttttgtaagtcctccacttaacttatactaatatattgttgtttacactaattaactaaaataaattatatattgatatatattatttgaatcatagtatgt

SEQ ID NO: 206537 - DNA, 857 bp, Cannabis indica
atcactacaacgtataaataatcattataaattttatttttatatacacaaataaaataattatattattctcgaaaacatatacatttttctggagtcactgttatatttatcaaactttatattttctcatcatcaatttaatgatgtatacattcaaaaagtataagataacttcatcatgttgttgtaacggtcaaatatatatatatatataattataacataacatttattcttcttcatatttttctaacaagtggtctcatttattaatagactatatatttagcaatataattatcatgatttgataaaaatatatctctaggtacatacaaatatttttgactacttcaagtagcaattttatttaagacttcttcataaaaaatttcaaatatttattttgtgattttttattactttgaggaatgtaactatatattaaatttatttgatactcacaaaatttactataatattaataaaatatatattcacttctaggaatatacaaaactgaactaaatagttattatatatacatatcttatacaaacaatagtttgaaaccattaatttcaagaaataacaaaatatgtatatattaatttgcttctggcagtattaatatacgtaaaatctatattcattgaaatactattttatgtccattcattctcttcagagtgcgattttagaataatttaaatataaaatagaattaaatcgtatagtgatttatttataaacaggtcacattctattcaataatcaatataattttactttgattataagtgtgtctgttctaaaagtacgtgaccactgttctttaattccacacataaaag

SEQ ID NO: 206538 - DNA, 886 bp, Cannabis indica
cacgagcttctcaatttatttttaacagctacaatttatctccagtaccaactattattggttggagtttcataattccattaatctttatcactcaagtacacactatattatgaagtcgcttcactcacaaattatcttgcttggtagcattagccagacatatttctcaatagcaacaacattccattgaatttttcttctaaatctcaattctccttcacttttttggtttgcaaatctcactccaagacaagacatgcactacaagaaatgttccctttactagtacagttcgctactccattggtaaaagtaacttttaccagcacattctgcaaactgcgctgacaaaaaggtcaaagttttaccagcgcacatttgcggtggctaaaatctaaattttacgcactgggaaaagtaatttttgctagtgcttttcattttgtgctgacaaaaattttaataccaacgttgatttgccaactttttttgtcaacacatcaaaaataaattctattttactagctaaataccaaacttttgccagcacaaaaatatactgacaaaagtgatatttcttatagtgatggaccatcataattagtcacccctttccataaaagaaaaacacaatacaacgcattcactttatgaagtactttcttggctaaaattattatttgagcccaataaacatgtatggtgattggggccgagttgattaatatcattctcccagcataggagagatgtcaattactccacgccctaattctttgcatcatttattctattataatctcatttttagaaactgacaatcgcgtggaattaatgggaattctcaagtgtctaagaatcttaacctcttcatcctacttac

SEQ ID NO: 206539 - DNA, 1383 bp, Cannabis indica
atttgaaggaaacataaatattattacaaaaaaaattatgtaatataattaaaaaaataaatacatagttttcaaaataacaaaaagatatgcaaaataataaatataaagaaatggtatttgttatattaaataacaacttattagttttgaaaatatattttaagattactcaaatttattttaaatgatattttaatataactttaaaacaactaaacgattattaatcaataagatgtatattttggaagtagctaaaaatgtaatttaattatttgatataaaaataaaaatttgagtaaaagtaactatgatttcttatcaatatcatatataattaaaaagttattttttgaaaacagagaacttttaaaaaaaaatgaaaaatttgagattaattttattttaaagtatattagtatggaataaaagtatttttaataatgtgataagacattattataattaatatttattaaagtatttttgtaattattttatattttaagtatattattaaagatattcctactttttttattgaaaatgttgttgccaggaatatggggttcgagtaattagaacacgtgtaaagcaacaattggtgagatttgtaggtgaaagatttgtcaatatttggcaaatgattgaatcttattcaattgatttttatttgtcttatttaaaatatatttagtaatacatttaacaaagtaaaattctcaactcaaaatataaaatcataactaaacactatttatgaagtaaaattctcaactcaaaatataaaatataaacaaaattatattattaaaataataaaaaattataactaaacacttaaactaaaaaatagtagatatgtaatgcaaatagcaaagaacaaagaaatccaaataggtttcactaaagcaattataaacattgtcaaacaataaagaaaatctattcaaaaataaatgaaaagcacaataaagaatttacccatgtaaaaatgacaagaaattgatagagctcaacagatggatttttactctgcaaacaaacaaaaagtaaagacaatttattataatttagtaaaaattaataaaagaaatgcaaaaaaaaaaaaaaaaccagattcatataatcttacagatgagttggtgagactgagagaaagaacaaaaaataaaaattcaatctttttgaccctaaaaaatggccaaaagaactaattacatgtctcagatcaaaatcaagtgaaattgatgaaaaatcagcaatacccaatttcgaaatcagagaaaaattcaatacttttttcaacccctaatcccccaattttcagacaaggataaaaccctaagcagcaggttagtttcccctattcagtagata

SEQ ID NO: 206540 - DNA, 701 bp, Cannabis indica
aacaaaaattaaagcaaaaaaaaaaggaaggagtggttggatagagtcatcctttagtctattcaatgggttattccaaagattggcttgagggaatttcattggttgggataatgggctactcttgagactgggctactggactgggggtacatcttgagtcaaagctggaagatctgctggctcatcctgggttgggccctggaggtcttttgcagcagtccctaagagaccatcacttcaactgaatgctccatctcaaagtttttagttaattcttcatcagactaatcgctattctctttgtcaaagtaatttttaagatacatatcatcatcgattgtgagaaccttctgagtgtattcctcctcatctgccccaaggtgcccaagaacaaaaagatctttttgtccatagacggtgaagtagcataacgtacgacatatccatcgaccgaaggcaaagcattttagctgtagcccctaactcaatagcatcacaaactgattgtattgtagtctctctagctctttgcatttccgccagagtaataaaagcctttatgccattagcttattgatgtgttagctacttttggagattggcaatagtggcgttatgtttgttgctggtcgtaggagtgctttgtggaatgagattttggttatcattttgatgctctctctctctcttgttatctc

SEQ ID NO: 206541 - DNA, 1071 bp, Cannabis indica
tttataaacacgtatcttaaaaactaataccaaaattattaaaaattcattaaataatataaaaaaattattttacttatttatatttataaattcatattttaaaaaataaaaaaacaattaaaaattcaataaaatataaaattattttgaaaaaatttagaaattaaacaaaaaaaatattatgtttactcaaacaaatttagatttttggagaaaaaaataaactcaatctatatctgtaaaatttagtttttacaaaaattgaatttttaatatatatttttctatatcaaaatgaattttttaataaaaaataaataatttttaaattacttaattagttttaaaattttaattttcttaatcatttgaaatgaatttttttaagatctaaattaattttttaagatttactaaaaaagtattaaatttttgttattttttattttgagagggttacaatttaataatcgtcaaagtttagaaagtacagttgttaatttacaaagacaagtcaacatttaaacggaataataaaatggaatctaatagaaagactaaatttctataaatgtaaaagttcgaaaaaattcttaacaagctgtatattttaagtgacagaatcagaattgacgaaacttgaggaagtaaaattactaattattctaataataataaataaataaatctttttgctgggtgcaatatattctaaaattatattcaaaatgaacaaatcaggcactatttgaaggaaaatatttgttgtcctcaaattatttgggatcctactatttatatcttagaaattggctgtgtattaacacataaatatagacattttaacaaattctcactattattaaacaaagaaaccaaatgtgtatttatatatatatatacatagacacacacatttgattaagaaaaataattatgagtgagagaattatgacgaaattagtaatgaaaatgttaataactacatcaataatgatgatgatgatatgtgttaatgaagcaattcttggaagtgaaagaattcacgttcgaataactaattttgtt

SEQ ID NO: 206542 - DNA, 646 bp, Cannabis indica
ccaactcgtccctgcatcggcgtctcagctggagcctcttctcccatttccatgagactcgaagccgccgaaaaggcctctacggcttcgttcttggatcgcagagagaccggtttccttcatttcgtcaagtaccagggcctcggcaacgatttcattctggtaattttgaaaattggagctaacttgtttgttcttctcccttttcgattttttcatctgaatagggtttcttgtaggttgataatagggattcttcagagcctagagtcactcctgagcaagcagtgaagctttgtgatcggaactttggaattggaggtgatggagtcatttttgcgatgccgggaatcaatggcactgattatactatgagaatttttaattctgatggaagcgagcctgaggtgattgataattgagattggagatttcaattcttgttttgatattcaaaacaatttcaatattattatgctttaattgattttgtactgtttgaaagatgaaaattttggttgtaatttcatgttttagatgtgtggtaatggagtacgttgctttgctcgatttattgctgagcttgagaatttgcaaggaaaacacaggtaacatatacattcatatgtatgtacatatatatata

SEQ ID NO: 206543 - DNA, 1390 bp, Cannabis indica
aatagtgtttcatgtaattatccaaaagatagaagatatttttctaaagcccatatcaaaagaagattggagattatttcaaaaacacacaaatataagtaaaaaaaaaaacaaaattttaaatatttttacggcttttaagagtttatttataaaaatgtaattttttggtgttttgcatgttatttttatgtaatattcttgttattttgttgatagtttttaattatttgtatattatttttatgttgtttagatgttatttttttcttattttcatgtaattttcttattatttttaatggtggttttataaaatactgtaaaaatatataaaaaatatatttgaacgtaaaagtaagatttttttttttttaacaaaaaatagtactttgtgtaagtttcgcaaaaagaagatttgtaacttttttcagtgatacttataaaatactaaatttaaaattttgaaccatagtttacataattcaaccaactaagcttcacataaatatatacattatatttatagtggggaaacaaaataaaattaaagatttattactctttttcactcattacaaatgggtgtgcaaaatattattatgattggattggattaattttttaaatccaaatttttaattatttatatccctacctagtctttcgaaaattatcatgtcatttgctaaagaaatctaagttgacttaaatagttatgtctttatcaaaaagtattaaaaaaatttatgagaaaccaactttttatatagttataattatagagtaaattaaggtttttttatgagaaactttttatatagttataattagaattaggtaaggttttttcataaaaacttatgtcaatccatataaaaatcttaacattaaaattcaactatttataaaatgttaaccactaagaataattaacataaaatgtcaactactaagagagaaaaaaaaaaaaaaactattattatatgcataattttatttaatttttttttaaaaaaaatacaaattgttgattgatcagagattatgaagagtagataaataagttttaagcaagaatatttatatggtttagacgttaatgagatttaatttacaagtggttatactaaaatttcattagcgttttggtcctaaaaaactaaaattattatatcaaaatagcttctatttatatgtagttatggttcgaatttgacccagtataaataaatcatagaagacatggaattcaacttacatttgcccaatggatcgcttaaatggtggtagtagatgagttgacatgtcttttgtacatagatttagtatatatcagagtttcccatgaaaaatgttctctcgttagtacataaaggacatactaaaa

SEQ ID NO: 206544 - DNA, 1369 bp, Cannabis indica
acaaaaatattataaaaatacggtagtatggaattttaaatatttatttaatttttaagattttatttatataaattcggttttttgatgtacttttatgttatcttgttatttgtatattgttttcttatgttgttttaattttatttggacgttattttcttgttatttttatatgatttttttttgttgttttagtgttatttttatgaccactgtaaaaatgtaaaaaaaaaaaaatctttacaacgtaaaaatataaaaaatttaccaaaaataatagtttaccaaaaaattttcaatgtagttttagtattcaaaatcataagaaaagtagtttagtactttttttttctttttaaaaaaactacatgatagttttctctctaaaaaaaaggtataacatgatagttaaatttgcataattcataaccattaaataaaatattaaatgatacattttattaacaaagaattattgggtagtaattatttttaatcaccatctacgagtatttttagtatttttgttacatagatgcaaaagatctttccaaaaaaatttaaaatgttctaaataatttatgatgccgaataaacaactaattaaatacatatttattgtaaaccatgattttaacatcctaaataaattagttgtaatttcttaaaaatttgtaggagattctgtgtagctacattatatattatcatgcaaaaaaaaaaaattaatttcacaaatacataaaaataataaaaaaaattataaaaatacgattgtacgaaattttaaatattttaacaattttttatgattttatttacagaaaatattatattttaatatatttttatgttgtattcttgataatttgttattaatttttattatctgtatatatatattttttttgttgttttgatgttattttcctgttacttttacgtagttttattgttattttcatattatttttataaaataccgtaaaaaagtgaaaaaaaaaataaaaaatctttaaacgtaaaaatatgaaattttaacaaaaaataatgttttatgtaattatctgaataaaattgcaacttatttatttatcaaaagtatcaaaatacctttattaactaccatgtattaaaaaaatatatttatagaaaaaatggaggatactaaccgggaaaaaagggagttgaagcaacaatacttagaaggagaggaagaattatgatttgaaagagcatgaatagcagcattgataagttagtgttgtgcctgacccaaaaactaatgtatttttccttagttgattgtcatttaccaacaatgtcatgcaaatttcgaattagattttcgagttgaatggacatg

SEQ ID NO: 206545 - DNA, 720 bp, Cannabis indica
catttttaacttccacccatggaattttgacactaaattatccaaaataaagttgaatctacatcctttctgcgagacctaacaaagggagccccaagtaattaatgctcccagtgacactattgatcccaagttcttgtttaatgcctcttttcataccctcactagtattgctgctgaagaaaatagaggttttaagtttattaatctgttggtcgaaccaggcacataatttctccagacactgccaaagacctctaactttcgctaaatttgctctccccacaaggattaggtcatctgtaaagaagagatgagaaagacaaggctcgatcttactcaacttgatacctttaatggttcccttatcaagaacgtcctccaggatgcataaaaaaatttccacaacctagataaaaagataaggggaaaggggtctcctgtctgatgccacactcaagaacaattttactaacagtgcctccattgaggcaaatagataataaaattttttatatgttaattaattttgataagtaatgaacaagattccttatcatttatgtcagggtttataatttacaaaaaattcttcactttattatgaaataataatatatcatcaaaacttgaattgtgtgataggtaaataatacttaataaactagtaataaagtatatatatatatatataaatatatatatatatataaagccttc

SEQ ID NO: 206546 - DNA, 1404 bp, Cannabis indica
tctgacttccaaactaagcagctgcacaatcagagattaccgaagtccacacaccagtagcatggtacaaacggctccaattagctaaacaatgagactacactattacacttcctaaggagaaaaaataaaatgacagattatagagtcttttgctagccaggatacaatcatcaatcacaaacccccaatctgtatttatgtgagtcttccccttcagagcattaatcaccgattgactatccgaagcgatgaagatgttctgcattaatcttgtttcagcaagcttcagagctagacggattgccatagcttcagccagtaacaccgagcggcagccagggatgaactctgttgtagcagcaactaaagcacccaaatggtctctaattatcactcctaaaccacatcctggttgcccttcaatgagagaagcgcctgtgttaatcatgaatgtacctgggggcgggggagaccatctaaccgtttcttttgagatattttggtgtggattagtttgagcagaagccaagtgtatctccatcatcttcgtggcccaaggaatccaaatatcatcttcaatgtccttgttctgaaaaatacatttattccttcggtaccaaattagccaagtaatgccaatgaagaagagaaactcttctttagaaagtttccctttcatcaacattaaaaaatcaggggtttgccttaaagaagaagggaaaaggtgaaggaacccaaagtgcttccaaactttgtgtaactttgggcaataccatagagcatgacaaatatcttctacttggctcttacacctgttacaagttaaattcatggacatacctcgcttggtgagctctgttttgactggaatccagtggtggaacacacgccatatgaagatcttcatcttaggagtgagccgagacccccaaaccaccttccaccaagctctagatgctgaattatctgaacattctgcaatgttagggtctctaaatcgcaacttataaccactagccacggtgtattgtccattagtagtgagagtccaaccgattgtatcattcttctctctcaaaggagtaatgcccaacacccaagggatgtcttctttatggaaccagccacttatttcttcaactttccatcccccatttccattgataaaggtctgaactgttacatctgttggaacttggaccttggttcgaaggtttgaaaggagctcctctaggtatccaagggtcctcatttatgcgaactgtttgtccatttccaataacccaccgataacccttgagtaacagctcgcggccccaaagaatacccctccaaatattagagctgaaatgtcccaacttggcttcaaaaaagttgttgtttggaaagtaaagagctttc

SEQ ID NO: 206547 - DNA, 1175 bp, Cannabis indica
tgaaaacgtcgaagtagtctgttaatcgcactgccatgttaagtgtttcttttcgaaacctctgaatctgtagtatatctcttccgtcacatgactcaaccaggtactttctagcccagtccctggtttcatcaggctgaattccgtgaaaccacctaaatgttagtgtagacaaatcatcgctgatgttgaagcaagccattccaccggtatggtgatctacaccataaaatgcccctctgtggaacaagatatcatcgtaggaaaacctacaaacttcaggaatatctggcatggtagtccatgatgggtctctgaatggcctaatgtaggccacctgacatggctgtccaaaaataattgccatgagaaaagtatggggttttgatattgtatccaaagtgtatgtagtgaacttctttattatatcaaaagagaggttctctcggggtaataaaactggggaaggaaggaagatatctatggtgtgcataaatggcttgtacaaggttagcttgtaatcggctctaagggtacataaccatccttgcgatgaccctataaacggtaaggtgtatggaggaagtaccaaactcgaagttaccaatgatataggatcggtttctttagttgtattgaaaacagtccattttgtattagtatcatcgtcttcatttggaacgagaagcttgggaactaaatgatgctgatttagcatcgttaatttagttatatcctccctgcctatttcgtgccatttttgacaaaccatagaaaatgaaagcgaatctttaacgtgtatcttctgaaacaatacttttagaacaggatatggaaggtgtccccattctggtacaaaagaaaaagaaaaagaaaaaaagattagtgcttaaaatctttttttgccacacattgaaatctttttttcctcttaattgctatagttatgttttgaagatcaaagtttttgtgattttcataattatttttcatttagacatcaaatagtgcaccattttttaaaaaaaaaaattaaaataaaataataataataattataataataataataaatttacttgtaataattattctataatttctcataacttcaaaattttcaattccaaataataataatacaaagaaccaatcaaaagtcaaatattgataac

SEQ ID NO: 206548 - DNA, 640 bp, Cannabis indica
cttggtctcaatgctctctcacttcttcactaaataaattaaaaaacactctcctcctgcctagctgggtaagttccctcactttctaatctaaagttctgattcatatatatatatatatattcaataaccattcatcataattgtacactacaatccacattatttaatatcatcatacatatgaattattaatatatttgtaatgcttcaagatttagttaactagtctcatacttacacaagtattattttagctgctttctagaaagatggcttataagttaacacaagtcttttcaacgtgttttatcatcactcgttcagaacttgagaaaacttactagtaggtcactcagattgctccagatcaaacaaatttaacttttgagttcttctttcagtagctcatcacttaagaactcaaaagttaagcatgcttaacctgaacaatcttagaatgggtgaccttctgaaaagttttctcaaaagacatacgagtaacgacaaaaaatactggaaagactcgtattgatttgtaagatcagtcgacattccaagaactaaagtaacatactcatatatactgtatagatatagaactacacagctgttacgctatttgatcacaagaaattac

SEQ ID NO: 206549 - DNA, 541 bp, Cannabis indica
atagtcgtgaacaagcaaaacaagtttttataaaaagcaagtatcgggtcatttttgaactcccagcagacacatcttgataagcttttacggttttttaacagtctaattcaatcttgtaattctgagatacgagcactgcatatgagtaacattggatatgtgcaaagatcagatgaaggaaaaaaaaaagagccagtgacacatttgatttctcttaatagttctctaatcagctttaagccttaaattcacaatcttttctatctgctaattgacttttattgggaactgctctgctggtcctaaagaatattctgtttccatttgttgcttcttacgggtaaatcaatttatcttgcgaaactcataaatggtggaaatagagtaccaagcaaagaacaccaactctgcaactactaatagggatgtttaatgccttttgtaaaaggaatttctagagagatgttctacaagaagtattattatttaaaacggtattgttttgaagtactaccagaactgatgacatcgtcattct

SEQ ID NO: 206550 - DNA, 1696 bp, Cannabis indica
gaggagttttttcaaaaagtcttatgggcatgttctctgttttcgccaaagattaagattcaactattttcagagaccaaaaggaacttccaagtggcctgaaattggaccaaccgcccagggtgacacctggtgctgggccagcgcgcaagtcgagatatttttaacctaggccatttccaattagtttcccaaaaaaattgtaccgaacactttttacgtcatcaaaaataacgaagatacatgcaaactcggggagaaatcaaaaataacctggtgtgctggtttcgatcagtcaaatgccaattttgctccaagaattctcccttaaatggtcaaaaacgaggtgggaaaccctgtcctcaagttctagaaccttggaagcatcaaaataaaatcctggaagctctgaaataagcacccaacgctcaggttgacatatgacttggtgcgttgggttctacttatcggattttaattccatctcgattgttcgtctagtttttcacaataactgagagccatgaagtcagaacaaccaaattcacaacttcatattttcacttttccgacaaggtgatttattgggaaaccgggtagttttgagtctctcgtttctgcaaaacaacatcttcgagaactagcgaccaactttgccataatacaaaaatggactaagtgatgtcaaaatatcacttaggcatcaaaaattacatccctgatgctttttctcactcacatgtcaatctgggcgctaggatgtcaacttgggcactggcccagaacaaccttcagtaaaacgaccataactcacttaatatttatccaatttatgcgattaaacttgcatttccaagctatttcaatgctctatcatttgttctcctacacttcaatcgcaattctgaagctatcgactccaaatttcatcccaagggagtgacaaatttaaactacaacttacctagagcgggtcccaccgtcgcgactcgaactccaaaaattgacaatcaaccttagaagttaaatttcaccattggatcatcatctacggtcaaaaataacctaaatgtagttttcatatttttggattattttattcatatttaataggacatccttcacctatataaggagagttcctctagctcatttttaaagatcagaaaagtagttataaggttagagcacttgtgaacttttatggtcgctaaaaattctcattgaactattgagattgttagatttaaggacttctgtctaatttcattcaattttactaattcgatgattgtttatgtactaaatcatgctctccagacttttatatttaccaaatcatgatcctctaactttgacatgtgtcaaatcatgtctctgaactttcgtccattgtagactttccttactaaaattggacacttaaatccaacaatctcaatagtttcggagaatttttaacggttctaaaagttcatggggcataatttagtacatgtcaaaattcaagaggtaaaaatcttaattagcctagtttgaatttgaaaattattttaattggcattgttttaattatgctagaatgtttaactatacttgtgttattttatgagctacttttaaatttagtgtaacttaaaattcatgtcatatttctctatattaaataataatgcataagactataataacattt

SEQ ID NO: 206551 - DNA, 1072 bp, Cannabis indica
atttttttttaaaaatttaagataatttaaaaaaattacaaatattacacaatatacccaaaaaaaatgatcattctaacgttttttttaaaaaaaattaaaatacttaaaaatatatatttatatataagctaaattattatagttctaatttactgtttaattttttttaattctatttctctcttattccctcatgattggagtttatttttttcttaccggcttaaatagtgatacaaatagttagaagataaatttacattaaagtttgtagaatgtgagagtcacttaatattaagtaataattttattcatactttttcctctctttaattttttttttattaattattcaatacttaatttgtctatcatttatcctatagaaaaaatctaatgcatacataataataaaaaaaatagttcttaagtttaagaatctgttgagtgaaggttttttataccgtctacaaaatttagaaattttggcaactacgggtgaatacataccactttcaaatgataataaatttaatttttgattacaacttcagtgaagagactagaagaataaatagttagcattcggatcaattggttttaatttataattttaaatttaattgatttacgtattgatgataacacaatatttttagatatttatttagttataaacttttattcatatttcaaaaatttattcaattatccatctttatattctaacatactcatattattatttttatactatgatcaagcttaaatataagacggtgatataatgttataaaattactctaaatatatctatttattatccttttaattctttctcaactctaattttttattaagttcatgaatattgattgattaattaagttaaaaaaaaaattaaatttataaaaattttgctcctttaaataatattctaaatataattgattagttaattaaaaatatatatttatatatttaccttatttgtgttattaaacttaattttttaatatttattaatcaattaatttagaaatgtctttaatttataaatattaaaaaa

SEQ ID NO: 206552 - DNA, 1096 bp, Cannabis indica
ggtgtaaggacccaatgaaaatttaaagcaacggcgttacattataaattattttaatattttacaaacattgaaagaggttaaataattacaatgtaaactgtcaaaaaaaatatttatattataatttttctacgtgacagtttgaatgtggaaaacatgtctcacacaaaactattttcaaattccaatatatctatgttatattaaatgtgattatacaacaaaattgttgtttttttttaaacaatactatttaaatttaaacttactatacattttctttatatcttttgtcttatattaaatgtgagtatataacataaaatatttttcttacattctgattcaaatttaaatttattgtacatatttaaaaattatctttctaatatcatattttttttaataaattaatttttttgcctaatttttttttatatatatttttatatttgtctcgacaaagaaaaaaaaaaacttgtctatgtaaatttatattttttatttttattttgtatatttttatatttattctataaaaaaatattatttatatttttattctcccatatctatatatgtccccaaaaattttatgttttttcaaataatatatattttttattaatagactatttttgcagatttttttttctttttctcctcctaacatttactgttagcttagccactgcccataccaaccatgaaccaaaacatgttccttgaacttttaaggtcgttaaaaatatcccttgaactattgagattgttggatttaaggacttttgtctaattttagtaaaaaaagtctaacatggatgaaagtttgggggggcatgatttaatatatgtcaaagttcgaggggtatgatttggtagatatcaaagtctaagaagcatgatttagtacataaacaatcactgaaatagtaaaattgaattaaattaaacaaaagttcttaaatttaacaatctcaatagtacatgagaatttttaacaatcaaaatagttcaaagggtataatttgatacatgttaaaatttagaaggtaaaaatcctaattaaccaataaaaaactacaaaacctat

SEQ ID NO: 206553 - DNA, 756 bp, Cannabis indica
aaaaaaaaaaaaaacaatcaaagtaactattaaattatgatctaattctgaaatttattgccatttcatgcattgtaaattaattaaagtacacacaatacatacatatatattgactattaataaatgtatagtgtgtctctggttttcttcattgttaaaaatttgtttcgaaactccacccaatgaaagaaatattaaacatttcagttgaggacaatttcagcggatcaagtacatcaacttcgattggctgttcacgatgtaagcatattaatatttgacaaaaaatttgtatacatgcatgtatagatataatatagatgcatgtattgtgactaaaaaatatttgttatcaaaaaaaaaaaaagtacttaatttgctttaataaagaaattaacaatcacactagctagttttatctaacaaatatatatgtacataatttgattttgcagtttgcagaaaggaattcaaggcctattcaatcactcaattcacgacaagttcacttggtcgacgggtagatatctttgatataaaagattaattaatttgaaatcaaatatatgatatattacttatttttgttttatattttatgtcttataatacatcatgtaacaattaatttcttatcttttatattgattttttatctctccgtgacttttttgatttttttttttttttttaagtacctcctaatatatcaatcaaatgaaatgaaaatacaattcatgattacatcaacag

SEQ ID NO: 206554 - DNA, 995 bp, Cannabis indica
gacattttgagtttggacctcagatataagaacctttctgtagagagtgatttggtgagaacatcagcaatttggtccacggctggaacatatctgacagagagttgcttggtcataatgtgctctcgtacaaagtgtaagtcgatctcgatatgctttgatcgagcatgaaacacggggttggctgcaattgctgcactttggttgtcaacccaaagtatgggacagtgggacatggagcattgaagttcagagagaagtgacattaaccatttgatttctgcagccgcattggcaagagatcgaaattcactttccgtactagatcgagccactacattttgtttttttgcagaccaagaaaccaagtttccaccaaagaacatagcataacctcctgtacttttcctgtcatccaagcatgaagcccaatcggcatccgaatacccttgaagatttaaagattcagcaggtgtaatatgtaggccatatgagactgtgcccttgagatatctcagcagtttcttgcaggcttcccagtgggagactgttggtgcatgaagaaattggcttagcttgttgatgatgaaagccacatccggtcgtgtcaatgtcaaatattgcaaagcaccaagtgtgctgcgatataaagtgatatcctgaaatggttctccttctttgagagataacttgacagaggcactagagggattaggacttggtttagctccttccatgttgagtcttacaagtaaatcggtgatatacttagtttgagacaagtacataccatttgaatttcgacaaatttccactcctagaaagtagtggatatgtcccaagtccttaaccgagaatgtatgattgagatcatgaataagttggtcaatttgagaagagttgggccctgtaataagaaagtcatccacatatactagaagtataataagagaggcacctgaaccataggtaaacagagagttatcggattgaga

SEQ ID NO: 206555 - DNA, 512 bp, Cannabis indica
atgattagctcaaaatccctttgtgaatgtagagtagaaaggtagaaaatattaccaccattgtacatttgttgtgctttcttagagtccattaggaaaccaatatgtttccaaacagattttgcgtgggggcaattaaaaagagcatgccaatagactctcatgcactagagcacatcgaacaggcatccgagtctagcacttttcgtcgatgcaatgctgccgcagttggaagagcattatgcataatcttccatgcaaacatttttaccttggagggaagagataaatgccaaaaagttttccaccaagaactatgcaagtctgaggtggaagaattttgttgctcatccaagtttgcagccaaatgaaaaccgaacttgactatgtactcacccgatgttgtgtgatgccatactaaatgatcagccgagggaaagaaactcaaaggaattgagacaattctatcaatatccaactgaccgaagtagttgtttaggatttcaaggttc

SEQ ID NO: 206556 - DNA, 872 bp, Cannabis indica
ctttttgcgaaggcagtcatctctcgagtttgttccaagagaatatccatggaggaggcaggcaaggcttcagagcaagacatctgtgaaggcgcttttcgaagagactagagagcatgcgagaggaagcttaaagaacaagaggaaaccctagtagagcttgagtctattaaggcaattaatccaacaatactttccgaatcacactcattatttatatcccatgtctaacattatttaggttcatcagtggaatatgagtaaatgaaatggtagattttactcttcactaaaattgtgatataaataaaaataaaatgagaaaaatgagaattacacactaattatataattaatttcaactatctccatttaaaagtatcataattaaaattaaattaaaaaagtgtgtcataaaacatagcattatcaaaatctgacgtggcacaaccttactgcttcatagtcagaaaaaaaaaaatctggactcttctcactagaaaacagactgacctgttcataaatttcatcaacactaaaataaaaaaaaataaaaaaaaaatactccataaaaaataatataatatacataaaaaaactatacacgggtgtgggtcccgccctctctaccttcactcgaaaacgacactcaaaattaatcgcccgtcatgggtcccgcaccacacaagcctactccgtcactatttacatcaaaataaataaataattaataattaaggcaaatccccaaaacacctgaaatgacaatattacccttccccgtcttctataaatgacaaccttttctccgtttcataatcccattccatgtccgggctcttctttcttacttagctagctacctagacaga

SEQ ID NO: 206557 - DNA, 1612 bp, Cannabis indica
aatcatattttaataaaaaaaaattattagttatattatttaataaatctcaacttatttatttattttattattcaataaaattaattaaatatagttttttataaataattttaaaattatattaaattttatatttttaaaaaatatactgaaattttattagaactaatttattgttattatttaaattaataatttagcaaataacagctcttataaataaacatacattacatgctactaatacttagtatatatatatatatatttatatatataattattgacataatttaagagttcatttttatttttatgaagaagaggttctaaattcaaatatcccttaataaaaaaaaaatatctagatatatttattggagtagattcgcatcacactgatcccatgtaacttaaaattatcactaatcaggctatgagaatttgtaagtactatataaataaataatagttcatgcctctatctagaaatttctaaaggtcggattcgatgattggaatctttgttggttgcgtctatggctgcattactacgtatttgatttcctttatccaagtgtggggcttccccacctgccttgtgtgcccccatacacacataattctgccttattattaatgtaacatattttttgccaggaatattctttaactcaaatattattaattaataaataattgccgattaattaactaaatatgtatgtgtgtgtacagggtattgcttggcagtgttagtaaccatgtggtgacaaatgcatcttgtccagttactgtggtgaaaggacctcaatccaaatcttgaaattctggttccccattccctattttgcccttacttattaagtcacccccatgtctttgcttttaaatttgtgtaacattatgaatctcatgaaaaactacaatttattaaggattggttaatttccttcaagattggtgtgtagatacaatactgcaagctttcatataacatatgtatatactagtttggatggcagtgctcattttcagttaaaaacttgaaagtatgaattacaattataaatgtgaatttaactgtaggaataaattaaaattaatattaaaatatcgagcgtattaaaaaaaaaacatagagggttcgtttggtatgctatattgtattatattatattatattatattatattataatgtattgtattggattgtaatgtattgtattggattagtattatttaattatattaatacttgtttggtattaacttgtattaatagattgtgttgtattgtattgcattagtattatttaatctgggtcgggggtctgggtctggattcgggtctgggtctgagtcggggcccgagtcagggtcctgggtccgggtctggggtgcgggtcgggattcgggattgggtccgagtccgggtccgtgggtccgggtcgtcgggtcccccgaacgtccgggtcggcgggtggcgggtggaggagttggagtcacgtgtcaattataggtagactgatatagagtttctaggtcgaaaataaaagtagcactataacacgcccctacgtttctacgatcgatagttgtcatta

SEQ ID NO: 206558 - DNA, 1168 bp, Cannabis indica
gggaaaatggggttagagtatatatccattaaatgactacaaatggctggaaaggctagtcaaagtaataacaagatcacactgcttagtagtggtgccagcaatatatgtggtccttactaatgctctatgaggaaaactatacataacatatactaaaaaaaaaaaagatatgatatgatgattaaaatacgaataacattttttgatgcctcccttttatgtttttgggatgatgtggtcctgttcaacaaagctagatagctggtagaatacaaaatgtcaggtttatttttgaccaaaaaaaaatctaaggtttatgtcatccaatatcatcatttgttcaagtcattttccatttttacaaattgatgtgaagacttatatatagagactctatacatagaaagtaggggggaataagaatgtatatggaaaagttgaaaacaaaaacaacaaatattgactttcttctttgaagattctaatggggaagattttgtatctgagatgataatagtgtgtttacttacaaataattaaaatcttttataattggattcacctcaaattatgttaataaactagaattagaataacttgtttcatttacttacataggtaaaaattatatggtataatattgatgtgtttatttcacattgaagtaaaaataaatataaagattttctttttctttttttttttctaaataaataaataaatacatacatacatatttcttattcatgtgtttatgttattacaactttttttttaataaaaaagtgtttttctctataaagaaatataggttttcgctataaaatacaataccttacatttacatacttgacatctaccaaatatcaacacctttaccacacatatactaacacttctataattataattaataaaaataatgagatattaacgacataaccatctgaactatataatttatcacacttgacttcacaaactaatttttggtagcaaaactaccaaaatgtcacttctgttatattatttatccttccgttactaaattgttattaaatgccaaggttgattatctgtgtgtacctaagtgcacacatgttatgttttgtttgatccatactgacccacaatccaagatcgtctctctcaaaaaaaccctaat

SEQ ID NO: 206559 - DNA, 724 bp, Cannabis indica
aaaaaaaaaaaaaactcaaataacttattggtaaacatttaaattgctaattagttattttaaagttataattttggttacattttaagtttattgtagaaattaattagttttcatataatataacaaataagcatagatattaaatagttttatttaatatactttatagtaatatttaaataaaactacgtaatatatatttagtctttcatattttttgttatatatatattaattaataaatataaaaaaaaagagtaaaatttacaagttatttttaaatcaaacaaaattttaaatcaaaacaaaaaacaaactattttattttttaaaaaaaataataacaaatgtaactacaaaattattttcatacataatataatctaataatggttgcattagattggttgctggaattggacttcctcctatttcctttgagcctgattgtttagattgatctctgtctttttaagagattttgtttctgtaatgaatttaggatctcttttgatgtttttttagtttactgtccaattttcctaagacatttcttattcatgtaaattatttgaccattatggctacacatgaattagctgcgcacgtacttagagtgaatggtgagctaatttggatggaagatctttgatctctctttttaattgtactcaacgctaattgaattgtaatgtgtaaatatacagtaaatatttttatt

SEQ ID NO: 206560 - DNA, 2184 bp, Cannabis indica
gtggcagttttgaaattgaatttatgggactgatatggcctcaatagaggaaaacaagcacaaccaaaaaacctttagaaaattatagtcaggtttttgaatgaataacaattcatagggagtgatatagtttttgctttttgtataggtaacctattaattaaataggtggcagcagtaaaagcatcccaccaaagtgagagaggaagttgtgcttgggcaagcaaagtaagccccatttcagtaacatgacgatgtttacgttcagcacgaccctgttgctgatgagtatgtgggcaaggatgtcgaaagactatgccaagcttggcaaagagaggagcaaggggtcgaaattcaccaccccaatcggattggacagacttgatcttagtatcaaattgtctttcaacatatgagttgaactgtaaaaatgtttttgttgtgtcagatttagctttaaggggaaaaatccatgtaaacttggtgtagtcatccaagaaatggatgtagtatttgtaaccttcagtggattgataaggggatggaccccaaagatcggtatgaatgatctgaaaaggagcagtagttttatttgtggaagagggaaagtgaaattgatgcaacttgccatattgacatgcagtacaaaaggaaggatcagtggtggggacatgcaaatgatgtaaaactttattcatgacaactttattggggtggccaagtcttttgtgccacaaatttacaagactttgactcttagtacatgaagatgttgaaagagaaggtacagactcaacaacattagcaacaacattctgatgagcaaaagaatgaggcacttggacagatgaatgggcggattgaagttggtacagcccttctttaacagttccctgaagaagaggcttcttcgtgatctggtccttgacagaacaacattcaggggtgaattcaatagtaacagcattatctttagtaaatttagatatgctaatgagatttttagtgatagatggtacatgcaaaatatttttgagatgtaagggtctatgtgcagtaagagtactagaaccaacatttagtataggaagtttagagccattacccacaataaccttttcttttcctttgtaggcattcttgtgagtcatctggtttggatcagaagtcatatgattggtagcaccactatccatgtaccaggcaccatcttgaacagtggatggagaagcaatgtatgcttgtggctgggattcgattgaagagttttcctcagggccagagtagctaatatcgaaacgtctgtagcatttgatcacagtatgacctggtcgaccgcatagttgacagatgactctggaattattaccagatccacgtccccgatttgagtagttccctcttccacgaccacgattaggaggctgtgggggtcgaccatttgagttgttacccgattgaccaggtttcttgaattgggcaagatttgccattggattagtaagatcaagcataggtgtggaagcattgatctcaagcctcatctcatgattttgaagcatatactggacttcttgaagactgagatgatccctggaagtaagattcacaacaactgattcatattcacttccaacaccagccaggatataaagaatgagttgatcttcagaaacgggatttccagctgctcttaggctatcaacaaagcctttcattttgagcatatattcatcgatggtcatagaccctttcttagtattctgtaacatggacatgagatggatcatgcacgacttagatctggtgttgaaaagttgttcgagtgttgtccagatctcagcagaagactcgcaattgacaacatgaccaatcattgattcagaaattgaggaaagtaaccaagaaatgagaaattgatctagacgcatccaacgagtgaagttaggattacgtaccatgttggtagatccttcagattcaggaattcttggagctggtcttggagttcgtcggagtaaaatgtcctccaagtcgtgagctctaatggcgggaagaacttgtgaccgccaaaaaaaatagttgctgcgatccagtcggagaggagggagaagcatcgtggttggaactcctgaaagaggagctgaagtttctccagagatggccatgaacgacctgctcttg

SEQ ID NO: 206561 - DNA, 1396 bp, Cannabis indica
tggcctcgggggaacgtcttcatgtcgatgaactactgtccagtaccatgcttgatcttctcgttaagaggtcttcggttctttagctgtgagggataaatttaatactaaaaatcacaatctactttctcctaggcagcatatgctatgccgcctaagtaccgtgcctcgagcatgcgaggcttcaatcctttatttcttactcacttgcgggtaggaaccccacaaacttccttcatatgataacgtgtcttctctttaaatatatgtcgcatcacttagttaaaatattaggaaaaaaaaaagagagaaatttatgaagatgatgaatatgaatatgattattggagatgaggttttaagaaaattaagaattaaataatagatttgagtaaaataataaattcataagtaattaattaagtgggtccattgaagagtttaataaataatttttagttatgcacgcttcttaagagtattattattattattattattgggtatcctcccatacattttatgagtggcaccttataattagttagtgatatattttaaaaattatttttcttaagtaatgtcacactcataattaattacaccaattacaatccgacgcggagaaaagtgataagtaacgtgcttttagaaaaaaaaaaaaaaaaaaaaaaaattcaaactaacaatataaaattagtactttttgtacatacatatctcttgtaaacgaaactatcgccttttaaaccaacagctacactacacaccaataaacacacaatcctacattacatattcatctattctaaattaaactaatgaaaatcaattcccaaatcatcacaaaccctagaaactagaccaagcaacaacaacacacagcttcttactaccttttcgccaacaaggttttgcatttttattttcattagatttgatttgctttattttaatcgtgttagatgtatggatcgtatcttcatctttggtttgggtaaaatcggataagttatatgtggccttgaaatcgaaatcaaaatcaaaatttaaatcaaaactttgatgttcgaagcttctgctttgatctttgctttacatatatatatttatatatgtatcgtttctgtacttttttggtgtcgccgtaggaccaattgtgtatgctgcttttatagattgttgaaacttgaaagtaaataaaaatgtgaattttgattgttttctgaatcaaataactgcaaaacttgttagaacgatctatttctgggttatttcaatttgggtgatttttgtatgcatatgtatatttatgctgaagttaatggtgttatattggtttgtgattatctttttcagttataacctttgatcaatatttgactgaattaattgt

SEQ ID NO: 206562 - DNA, 1021 bp, Cannabis indica
gttttgagggttttgccgctattaatccaaaaataaataaatggatacataaacattatactgccatgtcaccgtttcattgttctcctttataaatatatatttagtcacaaaaaatcgcgcttcgcgtacagctgtatttatttaatgataattttttttgacatattatttagtaataatttagtcgtaaatttatttgaaatttaaaattttgatatataaataaataattatataagtaactattttactataattttatttttgtattattcagtaaaataaattcatattgtaaaaaaaatttattgtacaattttttatctaaaactaaagacagttgataaatttatataattagaaattatagaatattctcccataaaatagtgatccaagaaaaagaacaattaataaatttatagaaaactcattatgatatgattttaaaattgttgtctgtcttatagttgtaactatatttttcgtcactgcatctcatttattgttgttattatattcaaaattgttattatcactgtattttacttgtgcatccaattaaacataatgtacaaacttgtttatccaaaaaattacttttcaataattattattcatgtatattacgtgtgatcactattcgtctcaatagatttattttgtatataaaatatttatttttgttataatttctccacgtgctgaaaacaaaaatactcctaccgagaaggacaagagtagtgtcttactataattatgtcttaatattctacttacatatttaaaaaaatatttagatcatattaactaagcttttaaaagttacgtagaaattattggttcaattttttttttaaaaaaaacttaaataacataatattttttaaatattattcatttattatttatcaattttactttttattatgcatcattgcaatttctaatgatattttttaagtcttaaaaatttaaactattatcctatatttttatattaattttttttttcttt

SEQ ID NO: 206563 - DNA, 1496 bp, Cannabis indica
ccaacaatcgttgaatccgatcaacaacgcccacaaggtttccttccgccatcagagtgattggtactttttttctctttagtaaaactttggtttttttagttaagcacaataatccatgcaaactgaacgaataattactaaaatagaccaaaaagaacatattattttgagaataaatacacatgaatcatgcaaatacgacgaaacaaacagagtttccctatattatatatgtaatttatgaaaaggataagtcaacaataattaataaagacattaaaatatggtgtttggtaattgaattagattggttaactgtagttagactgattcaagtgtaattaaattgttgagtttggactaagataatattaatttaaaagcaatcaaactaaatttaaaattaaaattaatagcaaactcttagattagttggataaaagacaatgattaaatggcagtagaagtggaatctgattgtttgaatttggttcgggatattggaaaattaatccatatagtctctagaatgttgttagtgactgtcaaattttcatattaacatttcattaattgcttatggatgattattgttaaataaattttcatattaagacacttagtaccccatagcaatgttcttttaaatcctttacttttgaagataacacctttaaggggaaaattgttgcttactagtagtaaaaaagttggaagcatgttgtttttcaaaaatcctgaaaaagattggcaaagattctatgatgagaaactttcagaaaatggttctgatgttttgaaaactcttgaattgagttatttaactttggaaaagcctttgcagctgtgttttgcttactgtgggcgtcacagggttatgtgaggctgaaacatcatttggaggatcttgacataaaaggttatgatagttttgagtaaggttatgatagttttgagtatttacttcaaagatttttctttcaagaaactgagaaagatgagtttggcttgggctcatgatatgcttatcatgatcaagtactcaaaagtttgccttctaagtaaatcagtggagggttatatgcttatcattataaattactcaaacgtttgagttcttagtaaatcagatgagggtgattatatgcttatcaagatatagttatcaaacgtttgatttctcagcaaatctgataagggtcattaaggtgagactagaaaaataacattaataggaacagtgagaacaggtgttgtagtcagtctgggtccagggtctcaagtccaagtcttgagtttgagacggggtcctagataagcattttccttctcaacgtagatgttgccttatttgagaagggaaatgcttatctagaacccaggaccccgaccctggaccccatctcaaacttgggacttgatgtttggatcaccattggacatatccatgaatctgtgaagttggttcatattgctgacataaatgatcagct

SEQ ID NO: 206564 - DNA, 1818 bp, Cannabis indica
attaaattaaagcaaacccatttcaatattcacataaataaaaatgctcaatctctgctctactacaaatagaagaacaattcattacccaaaaactaaaactaaaacctcatttttattgaatctgcattttcaaatcaaagggtaaatctagcataaatcaaagaaagctaaaaccccagaacagaaaatctgaattcatgtcttaatttgcaacctaaatttctcatttttctatccataaaacaaggtttttatcaatcttaatttaaaattaacagaatacccagaacagaacaagaaatcttaaaatcttaaaaagggcataaacctacctcccattgccaaaagaaccgaacaattacaaaacggagataaatagaatgagtaaagagtggaatgaatacaaacctcggctcataagagcccaaggaacggcgaaaacaacggtgataatagcgataccagccagtacatgcttcttctctccgctgtacaagtagtgctccattctacccctaaaacccccacctcctccacctttaccaccggttttagcgtcgctgctcatctttctttatcttcttcacttcacctatgagctatggaggtcgtccacagtcgccgattctctcttgggtttgttccggcgagttctctgttcgcaaatcaatccacgtatttgcaatgaattgaaattatgaaggaaaaagctttaagctagtatagtaagtaactgctctcacataaacgacatgtcgttttatttatttaaaagggctttaatatattaattctgtttgtcgttttacctaggttgacaaaacggatttagacgcggcacatgaatacgtcactaattttatgagctaggattcagaaaattagacgcggaccgaaaatagatcaacttgacagaacaaaaaaaaaagaatcacaagcacgatcagtttaacatgaattgaatatgtttgacatatatatttttttaaataaaataaaatataaaattattactaatattataactacgtaaaaatatatgcaaagttaattttttctttaaaatttaattattttaaaagtatatttattttttaactaatgtatataaatattctaatggaacaattttttttttatatatatataatttaagtttcaataataacaaaattagtcaaagtgggtcagaataaacagaagatagttttttatgggtctgatgaaggctgaaaaaaattaaacacgagttaaaaataaattaatacgcaatataaattaaataaaatatgacacaaacacgacataatgatctgttttgacactcttagttttacctactaaccacgtaattttttgttttgactctaagcaaaaggttcgataaacgacatgttgctttatttgtcgtttgactctagactataatggatttatcaatttgaaattatgaagaaaaagcaagtaaaagcagaaacactcccatatgaggtctaatacttttattttagtttttgtatctatgaatgctttattttcaaaaaaaaaaaaaacaattccacatttcctcatttaaaagggtagatcacttcatcttgatgtttgtatttttgtatctgaattcttaaattagacatattacattacttagaaagataaacaagtaaaaaaaaataagttttaaaataaaacaaaaaaaaaaaaaagaaaaaaaaagaagagaataaagttactcggcggccgacgtattgtgtgatgtaatggtaggaatgtctttactagtatttattttgtttgtagtgaagaatctgaaat

SEQ ID NO: 206565 - DNA, 675 bp, Cannabis indica
tgagctattttagctcatgagatgtggtgctcatagctccaacactattcatactttatatgtagtaatatttttataggtttgtgggcttcttcaaaaaaatttcttcaattttttattcatttttctatttttatctcaccaatgattatttatttattattttctctttcaaaattttatttttttcttatatcaattaataaaaagtatttaagatataatattataatattgtaaaaaatataaagaagttggtgtatgatgtaagataaaagtgtgagctaaaataaataaaattaagttttaacaatgtattttgaagaataaagtagagacactgatgtgaatgctcttaaaagttgttaggtgatactaatattgttaatatatcttttacatgttaagagatgttactttgggtgggtggaatgtttgaaggttttttttaatgatattaaagtttttgttcatctctaaagatatttctttcttatgttagttgcaattttaacattatggtttataaattgatttagtatgctctttagatagatgataaactttttcaataaaagaatcctttcacctgtttttatttctgtactatattataataatttaaaatataatatgtaacacgtgttattgcagcatcgagataaaataatatta

SEQ ID NO: 206566 - DNA, 709 bp, Cannabis indica
gactcaagcaatccgtatgttacttcaacacataaagagcttgtggatcaaaatgtatcttctctcatggttgttgacaataagtcttgagagattgatatattaaatgatctttttaatcctcgtgatagagatttaattcattctattcaactaagtgacaatacggctgtgggcaactggttttgggcagaagaatctttgggtttgttcacagttaggagtacttataagctacttcaacttaacaagggtgcttggtctgtgcttgatgaagatgttggctggaagaagatgtggcagctggccgttcctcctaaggtcctccatttcctttggagagctatttcagggtgtcttcctactaagatacaattgaaatctaaacatgtatatgttgatcttaaatgccctttctgtcatcttgcaaatgagattatttctcatgtccttatcgggtgccggtttgctcaatcatgttagaatttgtccatcttagttgcgcctactgtcaataaccagagttttggtagctggttttttgatgtaattgctaataatacattagctgaatatatggaagctgcaatggttgattgggggatttggaatgcacgaaatgaagtgttttggaagcaaaaaacttttcagttgttgaagtggttcgatcggcgcgttatgtccttggtcattggagtgttgctcaatc

SEQ ID NO: 206567 - DNA, 531 bp, Cannabis indica
aatataagagaatggttactttaccatcgattcctattacttattagtaaatatgccattaattttaaaatataaattttatttttattttaaatatattaaattgaaaaaagtttagaagtgaaagaaattccaacatatttatgtgttgacgtgttgtaaaggattaattgaaaaatgtaaataatattttaatcctacaatttattaattggtgatgagtctgtgttttgtgtaagtataaaacacaagagaaaataaatacattaatactcaaagcaataagtaatttggtgaacaaactaaatgacaaaagttactattggaattagtttggaattttgttaaactaatcggacccatctgattgtgggttttttttttttttttttttcttagatttcaaagagaggaagagagagagagaggggtccgattggtcagaccccattggaccccaaggtccgaccatcagactgttggggttttttttttttctagatttcagagagaggaagagagagtggggct

SEQ ID NO: 206568 - DNA, 1300 bp, Cannabis indica
gaatgatgtcgaaattgatcagttcgatctcggttagtttgattgcattcatcatccaagcttaagtgcgttgtcttagactcatttctcgaagctccatgatttctgggtttgctaagtaggatcagtttgttgcttgaagctcaggtgttctttaattcattctaaggcaagagttttcgtacttggacaattttgatgagtggaaaaatgttcacttaaaataaacaagctagatagagagttgtttgatcaattcagatactgaagaacctcactctcttatgaaattgttctccaattaccattttcaagatggtattattgttcatcatcattctggaacaacataaaccttataattaaagtcaacagacttgttaattattggtacgagaatgagatttccagacaatttttttgtatataacagaagtagagagaaaaaaaaaaagaaagaaccatattctctattggcagtaataaaagataggccaaacaagttcctgatactgtgcattaaagcatggaatgcattttatgtgacatggtgtttggaaattacaatcgaccaacaatatcttgtaaacaaaaaatgaatgaaaaaggaaagacaaatcactatggataaagataagtggcatgaattatttggatttagtttgaatataacttacacatttgtaacaaatagtataaactgttttcctgacatgaggaatgctctcaaaagtggggctaacctcaaagtattgattgtaagaatgacaataaaaaaagaaagaaaagaattttatgttgaatatgacaagtgttgtcaagatctaacctaccctcttcattcaattcctagggtaattagacttcactggtaaagatctaaccttggaaaacttcattttcagatctgaaaagcagacacactaactgcatagcaacatacaaacagagaaattttactcaaccccatcaaaactctacaagggaaatcattttgattggcttttgaggctatatatgtttccaaccactccaacaatgctgacagttccagccataattagcatcatccatgaaagaagcttctccccaaggttcaaactctccccttttcgacttaatcttaaagcaacgagagatgggaatatgaatcccaatgacacagctgtgttgctcctgtaacttaaagactgtccaaatgtttggaaaccatagtggatccgaatactaaatgagtgctaacagaaccactgtcaaggccaatgaacctctctactctctgactaatggagctgacttt

SEQ ID NO: 206569 - DNA, 567 bp, Cannabis indica
ttactaaatgtactccgtcgtcgcattgctgaagaagagagatttttaaagaacaaaggtaaaaccatactactaatcgagaattttcccttgtttatgttgtaccggtaattcactaactctctttggttccagattcgaagaaagccagccccatatctccgttcttatcaaagttgtcttccaagattacaggaagaccgttagaaacatcagagtcaccttccacaaaatcgtctttcttcagttcaaagctcatactcaaaattatattagtggctggaattgctgttgtttggaaattctatttggaatgatgccattagtaaacctgtgtacattaggaaccagctaattttacaagtaggctacacactcagattccaaattcactttgaaagtattttatttcactttcagttttgacaatctcaaactctaagagaactttcaatcttcattcaactcattagagaactcacgatcagagtacttgtacacaatgtcattacacaaatttttacaaattttctgtatggaactctcacaatttacaataggaataat

SEQ ID NO: 206570 - DNA, 1262 bp, Cannabis indica
ctaaaaccaaaattataatttataaaaataaaaaaccatgacctatagagacgtgccacgcgtgtgagcaaatctgtttgccaacgcgttatgcgtgtcactaaagccacgtgaatcacgtgactttagtgacacgcataacgcgttggcaaacagattttctcacacgcgtagcgtgtcaccatacacctttttattttttaaaaaataattaataatcagccctaattaatgcacatataatttatttttttagggatatgattttttcccgttattgtactttcacggattgtaatccgtgatgtacggcagccgtcagatgagagagttatttgatctgacggctgagattgatctaggggtaattagggttaaaaagtagaaacgtaccctaatactcatttaatggtaccctgagacccatctaatgtaccacgaaatacattccatgaaagtacatcacgggacaaaatcatatccctattttttatgtacaaataatattttttattatttgtataacaatctacccaatttcttatatagcagttaataccctatatcaaagtacacatagttgtaattaatttttttttaaaaccagttgtaattaactaatgctctatttttttttatacaagtattaatatcccaacgtcatattgcaagaaaataaaacaaaaagactcttatgttttttttttgattatcattgaaaagactagccaaaataatacacaaaccctatatgttagccctatacaagcttaaatcaaatcaccacctaaaattttaattaataaaataaaaactaaaaaagacacaacatatttggctctctctctctcttaaatcaatcacactaaaaaccctaagtctatctttatcatccttgcctctcatttttaaatagctaggtttctctatttctctcttccatttaaaatttttacagtctcataaaaaaaccctagctatctcttctctttcccctctctctgatcctgttttccttttttctttcggcagatggggctactccagcattcgacgactaagacttggctccaaaatcctaaggcgcagcttgctttgtctctgtctcaatgtcgctctgctcgttgtccctgtgacttatcctctcactggctcgctcatgacgacaccacctccggtgacgcagatccgagatcctcaaccgaagtcccaaggtcgagatctgagctactctatttctactcacttctctctctctctct

SEQ ID NO: 206571 - DNA, 826 bp, Cannabis indica
ttgtagccatagatgatgaagaagatattttgcttaaaactagtttaagagattgtttaagagtgtttatacaaacactagtattaccatgttcattatttttagagctaagaataagaacactcttaattctaccaccaatgctaactacatcagccctaactgctgtgaggtttaaccctttgaaaacttgaataagctcagagaacaactcaggcctatcctcacaacaaacagaggcctttatgtaattaacgttgtcacagtttttattagcgccagcttcggaaagtcttacgtaatcttgatccgaaagattgctttctatgattatttcatcaatttcagttggaactactgaatatttgcttacttcccctgcttttctcttgagttctttcacgtgatctatcacacttcctaataaagctgccttatccatcttacaagaaaaaaaaacaattaattaaacaaagtatttaatataaaaaaatgaaaaaaaaaaggcttttttttacttttattataattttaccttatcagatttgggaattagtttcctaagagtggtgagttgagcattgatccggtcacgacgtcgtttctcagcttggctatggcttttggaagcagcagcagctttatcttctggtccaaaactactgtcgtttggaaaagtagaagatgaagaagaagaaggaaacccacaaaattggaaagcagaggaggtggctagtacatggttgttgtgatgttcatcatcaagaggtaaatgccaatatggtacaagaaacgactcgtcgtttttgttgtagtgggaaaagtt

SEQ ID NO: 206572 - DNA, 1118 bp, Cannabis indica
aaccgctcaggataatgtttcataaagcaaataagtttgaactttcatcacttcctggtctcatcatagcaaacaaaaacaaatttgtaaaataaagcaataaccatatgcgtgcataataggaaaatatagttctagcttctagagaaactcaggttaatgtttcagtgagaaaaaagttgactcttagcatgtacagagcttccacagtcatatcatgcacatgttgctcagttaaccgctcaggataatgtttcattaagcaaaagagttttaactttcttcatttccttgggttcatcatagcaagtagcaagaagcaagaaaaaatacattttgaaaataaaataagcttgcatagtcatatggttgtaaccacagatgctcgtatctattaagagaatacttactgctcagttaaccgctcaggataatgtctcattaagcaaataagtttagctttcttcatttccttgggttcatcatagcaaccaataaacaaaacatgtaactaaagaaactgagttcgcaatgaaaccttaaatatgcaaaggtaaaaaaatatattagcatttgtcaaatcaattatcgaattgcaataactaccaagtagcttcatgattagaccatctccaatggatggtgtaaaatgtgtactaaatttggctcaaaaaatgagtcaatattatatttttaatagaaatgtgtaaaaaaaatcaacaaatgcatgaaattttgattgaaagtgtataaaaatcttattaaatacataaataaaatgtaaaaagttattaaagacattaacgagtgacaaaagagtaattaaaaaaaataatatttattgtggtgtaaaatttggcccatgacttttaacatgtgccaaatttacatcacactatatactaccattggagttcaattttatgaacatgggctaacaaatacatttacaccatctttatagcactccattggagatgctcacaagatagataacttcaccatcaccactcacagccctagtcttacacacacacacatggcggtagccacagccgtaaccatttatatatacttaaagaatataagttttaagttgctcagttaaccgctcagga

SEQ ID NO: 206573 - DNA, 659 bp, Cannabis indica
attattattgttattgttattataatagctttatttgaattgaattgaacatttcgaagttcgaactaatagtttatggaagtaaggttcaaccaatcacacaatttgcactatattttatgtgacaatatcttctaataaaaaagatttgttatacatatttgtttaaattttggtataaattaagtatatacatatattattattcgtgctttaaaataaatactttaaaatattaatgcttaatagtctaatgaaaatttatggctaaatttcttatcttgtttggttattctatttgaatagttagtttctaccaagtaacattaaaccaaccaaacatctttgtgaaattaagtggctacattagtaaaaaatttagaaaagtccccaaaaaaaattattttagtaaatatatattatatatatttcttttttaaaggaatttagtaaatattttaaaattatatctttcaacgaaaaaatatatatttttttacaaaataataattgaattgtcgcaattgtaaagtggagaaagacactaatttagtaatatggctctccaatgaccaatctggcaagacttcgtcttggtcaattcattcattattaaataaataataataattatatttttttttagtaaaaaaacaaga

SEQ ID NO: 206574 - DNA, 725 bp, Cannabis indica
tttaatagaaaatcgttgagagaaccctgcatctttgagttccttagttgagttttgtacttgccaatgtttgccctgttcaatgctgtataatagactcgaagagtttcccagatctgtgcagcagattcacaaccaaccatcctcgtgagaatcttttcggacatggatgaaagtaaccaagaaaccaatatgctatcttgttgatcccaactttcgtattctggagaggtccgattgttctgtcgatcttcattggagcgaaatttgggaggagttcgagtggaatcaagatgatgttgaagtcgacttccttttatggctgcaaagacttgatgcttccaaggaagataattgtgctcatctaatctaaccgaaagggaatgagagaaagttacaggagcggagcgaggaagattaacactagaattttgagacgaacctccattttcagccatgaacgaaagctttgagtgaacgaggatgaagaaatcagaagaagaaagaaaagaaaaaaaaagaggaagctctgataccatgtaaacagaaacgaaaagaaagaaagaaatgcaattctgtatattgatttagagaaggttacattgatttatatacagcaaagggaaaaataaagtgagctgttataacagccaaatcagttacaaccaataacagaaataacaactaactgatgttctcttgacaacaagtacctaaagttttat

SEQ ID NO: 206575 - DNA, 505 bp, Cannabis indica
ggggtgcacaaatctatgccaaccaccagagaatttggcttggacgtttaagtcagagaaggcggccgccatggcttatgatagcgctaccatcaaactccaaaatggggacataaatagaaactttccatggactgatattactctccatgagcccgattttcaaagtcattacactgtggaagcagttctcaacatgatggttcttatatcaattgaaattcgttttattaaaaatgagtatggaaaaaaagaagttgtggagaatagtgttagtactactaattaccatgatcaatcttcatcatcatcgtcgtcaattcaaccaacaaattaggatttgtgggggtgaacaattttcgtgtagacaactatttcaaaaggagttaacaccaagcgatgttggtaagctcaatagactcgtcatccctaaaaaatacgctgtggagtattttccttacattagtgaattagatagtaatcataacacaaataaaaatcctaa

SEQ ID NO: 206576 - DNA, 1092 bp, Cannabis indica
caggtatatgtcttcagttttctattattttagttaggatctttgatttgtaactgcattgtagttgttgtacttgtgcaagttgtcttcttttgtagcagacttatagttaggaaagtgttagttggatttacttccaacatataaatataccatttattaaatttaacaattttaaattatatacaaataaaatttatatctattttcctatgataatcatatgattgactcaaagaaaaaaattgagatgaaagctttacaaataatagttgttaaatagttttataaaacatacatacataatatatttaagtgatttcatcatatagttaatcgagaatagtagagagagaatgaaaagttaaaataataaaattttgaattattgaaaggaaaattacttgtgcagcgaaaacttgaaaatgtcatatcatgtgagtaaaattactacccatcataaaaactattaaaactcttcaaaattatttgttgatgtcattaattcgtcaaagtgcttgtgtatatgtcttgtttacactctttgtccatcgatcgcagagaaatatttttattagtgagggaaagattgaaatatatagttaaaagaaaaaaaaataagaaatgaagaagaaaatataatatatttttaaatcaatatatatatttatatatatatttaggattatgttatgtatggttagtttttttttttaattttttttaaattatatagatacacgtgcatatatatatatttaaaattaagttatatatttaatttttttaattttagtatagatatttttaaattgattttggcatagatattttaaattaatttacaaatataatataagagatttataaaaagaattaaaattaaaaaataagcgaattaacgagagaagagaaaaatagctttgaaacaattttagagtgacatgtaaccgtcttattattctcctttatatatatggaacaattcttaataggtaatacccattgatgggaactaaaaaaaattaataaggtaataatctaataactttttatggtaagtttctaataattatttttaaaaatatatat

SEQ ID NO: 206577 - DNA, 646 bp, Cannabis indica
ggaaaattatgtcttattgtaaaatgaccaaaatttttattaaggagtaaaaaaacattacattggctcacaatacaagaaatccaccaagcaattagctatgttttttattactagtgtgcaactgcatttggtgaagctaaatgcaaccaaaaccaaatataaattcaggatcaagacatacgggcctaagaaaaatttaaattttggtgcctatgtaaatagtttaatttgtgtaaattttaaggatttcaatactccattcttcatagtttatattagatatttttttaaagatataaaaagtagatattaaaaatagatctattcaccttataatttaaaataatacttcttaccactacactaaaaattatgcgcacacctgactcgcgtgcatacacggaaaaatatttactaatcaataaatatttaaaaaaaaaaaaaatagtggcaaaaatatcagattttttttttatttctagtgtgaaccactaaattttatttttgtaccaattaaaaataacgtgccactatattgttattccatattttagtaatttcaccattaaaaaatatatattttattaagtactgagtaaatctaaaatatagatatttagctataaatttacttaaattttaa

SEQ ID NO: 206578 - DNA, 543 bp, Cannabis indica
aaaaaataaaataaaattaatgaaaaaggctaagagaagagtgatgaccatgttactttcaaggcacatgtcaattttggtttgttgtgtagttgtgtcaatatatactagagaaatttccaatctagtcatatgagattttgaccctttttcaattcatatttatcaattatattttttaaatattttaattttaattttgtgtcggttcaaatatatttttggagaaattttaaataggggtatatttgtcatgtaatacaatactagctcataattaacattttagcaatttataacatataaaaaaaaaatctttaaaatttttggtacattatttgataaaattattgggaaaagtcaatacttacatatgccacttgattattttgtttttgtttttgtttaatgattgtagtaaaagatatgttgtctcacttgaggtgtgtatggtctattatagatctttttgtttttattttttacaatttcagtatatatgtttttacattaaatatataagtatacctcaatatttaaaaa

SEQ ID NO: 206579 - DNA, 511 bp, Cannabis indica
tagctcaaggacgtcgatctcgggggtgaagagtgattcgcgtgctcgatccagctcgagattagtgagttttgggccggccaggccttgagccatattttttcttttatctaactgtgcttacacagatgggtaaactagttcagcctcttaaccgacatgtgtcacgtcaggatcccttagagcttgatcctggatatggatgcctggttgagcggctggttgaacttattgttcgtccagacctcttcttctgttcaaatcattcctgagatcatggactccaaccaatctattgaatattgaagcaccaggtggcctcagtgtttgactagtttggccagtgggttggccagaactgtccgtttggatgaagtcattaagtataattcccctaaagaacaatcaaaaagaatctggccgtctaccgcttggcccacaagtgggacctgtgagggaggattggacggctgacctttatgagtcaaggcggtatgcccagcagcaattt

SEQ ID NO: 206580 - DNA, 759 bp, Cannabis indica
gtacacagtgattctaaaagtctcattgaagcttgggcaagaagggtgatgccaagttcaataataagcatgtgttttctctcaattaatctatttttttgatgagttatatgacatggatttctatgaataactctaatttaatgtaaaggacttgtgaatgatttgaattccgtacccccaatcagtttttatcactttaagctcttttcttagctgcaattcaacttctgctttgaattgcagaaacaattttaaggcatcaattttttttttctttagtcatgtagatccaagtaaatgtagacattcacataagtaatataatagctataagcactataggatacagtatgtgatggtcttcataagtcagcaacaacaagctaaagtggttcacgtaaatagtggtggaagcttttggaaaaggaaattaatggattttttcaagtcaacaaaactgaacaaaaagagatatttttatttatcataggtaggttacaagagaaaaaaccctttgtcacaggtcttctgaaggatggcctaacttattgtaaaaatctgtaaatttagttttattacatgatgaataaatagtgttatattaaatttagtatttggttgttcacttgtgtctttggagtagcttcacataaaagcttgagttaagactagtcaaaagtatatggtttttcttgtaccaccccatcaaaaatgtattcaaactcgtcccttaatatagcacatgtcatgataaaa

SEQ ID NO: 206581 - DNA, 760 bp, Cannabis indica
ctatgttcacctctttcgtttaggtatatgctgtagagtttgcgacccttctaattaattttcccaattcacaactcaatcacatgacacaaacacttccgagctttatacacaagaacactaatggcttgtctttgaatttcttcctttattgctttggaatgagtataatattaatagtatttaattacaattgtatagctatttatgctctctctaataatattgtaatgccatattggattggctctcttccaagttgtatatctgcagctttattagctacagagtagcctttgcccctttttgggtgtttacaaaaatataatctttcaaaataataattagataaataaaaaatttccatcaaaaaatatatttgaaagtgaaacgatattggatttttatatatataaatatatataataaaaattgtgtttttgtacatgttaaaaattttctttaataacaaaaaaaaaaaaacgattgtaagaatctttagaagtagattgaaaacttattaaatttgtagtaacaaaagagaaaaacagaaataaatagtacataatttaaaaacttgacacaagaaagttataagtggtattcgtattctttcaaacacttttaagtctacggagtcacatttagagaatgaaatcaattagtgaagtctcaaataattacaaatacaatagatttaaataagtttagactccctctaaaattttgccacaattttttgtaatttactttgccaatc

SEQ ID NO: 206582 - DNA, 744 bp, Cannabis indica
caacaaagtttgattgtagctctagaaattcatgcaatgggattagattggaagatgtgaacttgagttttcaaaataaaccagctcagtctctttgtaccaatgccaaagaaatatcttttggtactattttacctgatagttgtctattaaattaatttatttttctttgtaattaaacaaatttattgttgtatatatcatccatattattttttattaaaattgtattcacattaatattggtcctatgtatgtatgtataactttttttatgtaattattataaaagttactttcgtaaaatacaaaacctaacaataaaagttttttaaagttacgtaataatttacagatatgctgcaaacacaatatataaagaagaatatggaagaaagaagagaccattattcacatctagaaaggcagtaaagataataatagaaacttttcatttttttttctttttcttttatcaatttttttttctttcttgaataaagataaatatgaaattttaatggtatagagttttatttaataaatagtattttaaaataatttaaattcaaataattcaatagtatttttttgtatgaatcagaatatttgtattgctcacaatcaattttttacaacctaaaggcaccaatcaaggtccataatcttctttgcacatttaatagtatttgttatagaatactatcactttttgttaaacattgattttcactttttgtcgac

SEQ ID NO: 206583 - DNA, 1314 bp, Cannabis indica
gttgtatttacagatgaattgaagggaaagcttatgcaaattaaaatattagaggtacatagaatcaacattgagaaagccccagaaatgattactagaagcacacaagtcaaaattggatattataaacaaaagcatccccacctcttttcttaacattccaatccaaaatttccccatgaattcagctaatgaattcaaacacaagtttccaattatgttcctattcataatttaggaaaaaaccaaatatctgagctgtcatcagattattacgcatacttgaccttatcatttatataaacttttttcgtataagagtttgtgagggtgttttttaaagagaataatggctatacttagaggtcaaaaatctgaagctattctagagaacgtttgggcaagttttatcagtggcaatgaagtaaatgaaggaaagatactatccaaaagttgggacgaattgcctcatcttgatgggaaagaagagtcgatggaaattctacaaaggctgccaagtctagggaggtggatttcaatgggagctgagacttgggaagaactccttgacagtatcatagttgatccttcaagtaatttgtgtcctcaaaatgatcaaaatcagcagcacccttcgacaggaaatactactgccaatgataataatgacaacgttgatcataggacaaagaagaggaccgccatggccgtggccaccacaaggcactataggggagtgaggaggcggccatggggaaagtacgctgcagagataagagactcgtcgagaaatggggctcgggtttggctagggacgtttgagaccgctgaagatgctgccttggcttatgataaggccgctttgagaatcagaggcgccaaagcttaccttaactttccagttgagacggttacaaaggctatgggacttgattattcttgttcttctaagagtaataacaccatgaatacaactactcattgtagaaataacgatgattttgataagctctgcaggaagagatcattgagggagtgggaaaatcaaatcaacaataatgatcgtaaaatgatgaaattgaagaatgatcaagagccagctatcaggagatcaaaggcaagtcatcatcatgatgagaatggtgatgatcactttgatgtgtttgagtttcaagatttggggagtgattatttggatagtttgttggcttttccttgtgattgaaattcaaacacgacacttacatatgaattttcttatgctgagatattcaatattacgccatatattatataatacaaaaaaaaaaaaaa

SEQ ID NO: 206584 - DNA, 570 bp, Cannabis indica
tgatcaagagtgatacgagccaagttgacaatgaactacccgacttttcctacccctccttaagagttgatttcgtgcgaactaaatcgcccaaaccaacatcaccgcttgaacactttattcctcacccaatcgtgaaaataaattaaccttaatttcatgacaacattaaaccagtccccaaataaaccctaaagagttagtaagtcaaataatgttaattttttttccaaattattcacttataacctcacaactaaaatataatttttaagaaaaattctataatacacccctaaaacataggtgcatcaatacacctcttgtttttaatattcagatagttttaatcttaattttttttaaaatcaataaatatcataattatttaagacattttgtaaatttttaaaaaattcaaaataatatactttttattattattttttattttatacacgtgtaaaacagactatactataaatttatcaaaacattacaaatgacaagatatcttaaataactaacgttataaaatatctatttaatataaaatgtggctatgtaata

SEQ ID NO: 206585 - DNA, 961 bp, Cannabis indica
taatttttgacagttttgcatttatgtcctttttatttttcagcttgtataaatagcttgtcaactcattttttagttaagccttgtacatactctctaattgtaattctctccaagattaataaaacaattcaagattattcaatctgttcatcaattttgttcattagttcttgactggttttgtaccagcattgctgctgttagttgtgttaatctttatctttaattcctagtgttcaatctcgattgcaaaggtgatcttcgatcacaacaatcctgctggtcccatcatactctggactcactctgttagcacatgttgaggaattgcggaggagtttgaactggattaagatacttttcgagtagactcgccttgatagcagcaaagatctggtgccgccatgggagatagttgggattatccaaacaaattaagagagaatgagaaaatgtaactagagaagttttaaagaacagaagttgtgagggcctagagtagcagacttggaagaatcgctagggccacccccgaaagattcagccatttcataaaaagaaattagctcatataccatgtaaaaattttgaaaagagatgaaagaaattgtaattttgattgtctgatgagaattacaaagagaatcgtatttatacaaaactaaataaatcagctaaaaaagaaagctaaaaataattacaaaaattcatagaaaagtaacaagaaagctaacaactgtgattatagttaatttaacagaaaccaactagattagttattaacgaacttgctaacgaacaaggctaatataacctatctctaacacatcgcaccacactgcaccacattttagtgtttgtagttttgagatcttgtggtgcgatcatggtttgagaaattgttgaaaaaatagccaaaaaaatacactgcccgcaccgcaaacacaatagtttctta

SEQ ID NO: 206586 - DNA, 1098 bp, Cannabis indica
tgatgattcatatgtgagtagatcataaatttggaggctagctacatttcattttgaataaaatggaacatatataagaattaagatcacatgtgaaaaattggtgtctaattatataataactcaacacgctacttttcttaaatgttatcaaccatatagatagtttttttccataaaatactctaaataaattgtatatatatttaaataatttaatacattatggtataatattttttaacaaaacatctttattccatataaaactactatcttttttataaaaatttcgtgttaaaaaatattatctcatatcatactatattaaacaaatttaattctgacaagtcagttaacttaatttatattaaacatgctaactacttttattgactcttttcttaaaaaatttattgacgtgtcaaacttagaattgtttaacacattatgaaacactacttttaaaccggggatcttgattaattcccttttttgtgggacaaaataaaactatacataattgttttaaaaaaaaaaaaaaaaaaattgtaggcaatacgtaaattcaaaatattgcagcaaaagtgtcaaaattttcaaaataggtttgattaataactaatttaacatatatatcttttagttgctctaaaagtgtcacatgtcaaacaacaatttgttcacattataatttttcaaaataataaaatatataattaaataaaaaaaatatatatgttttaaatttaataaacattaaaccactacaaaaaaggagattttttattccacttttaaagtttaataaaaataaaaaatagaataaaaattatattcatacattttatcccacttttagatttggttctgaaatatatacagttaaactttttttagacaagaccctcttagtagaacgttaaaaaaatatcaaaggccaaaaataagttcaagactcaatttgtagggataaattgcggcaatactctccaaaaacttagatttcatgcagattagtttccaacttcaaaaattggcagtcatagtcctaaggtcaagttttttgtaagtacgttggtccctctttctaactga

SEQ ID NO: 206587 - DNA, 1327 bp, Cannabis indica
gctggaacgtccgagtaaggcatgtgagaacacccgaccagttctaacatgtgagcagctcgcatgagcctactagaggatgtgagttgaataattttaaagatatcccacatatcttcatgcttgcaagacacaatattcttaatttcatgggatggatatgtagtatcaaagaaaaaaaggtaacttgcctagtttcctatttttctcattgtaattatagaaaataaatagtttcctcatttacttcttattaatttttggaaaccaattgatgtaattaatccctataaatagtagaatcatctcactatttgggacaagaaattcatgcagagagaaacacatgagagaaacctagattcaagagtaaaatactctaagatcattgtaagagctttcgagagagatcaaggccttattgcttctctactcacaagtcaatacaaataaagtggagtaggctattaccatcatcaaggggacgatctctataattctggtattttctttactttacattattcatattttttatttcaattattgtgaaatcgctttaatttgactcaatattattggctaaaagcgagatcaatattttggtgctttcattgagagcaaagaaacacgagtctttattttatgtcttttcaggacacaagattggtgtaacaacgcggaggggaaattatactgacactacaaatccaatggccacaaatccaaacatgcagacacctgcaaacccgaaaatccagttaggacggatcccgatctaactaatcctcagccaccaacaagcccacaaataatagggcaatgagtgactacccttcttgttgaattcgcttcgggcgtgcaagaaatttgaacaactagtacttagaccgagcaaacagcccttggtactagaatcccttctgctacaaattctcaaagaccaatgggtgatgacaccgaactacagaacttgcaagctacactagggaaaatacaaagccacagtaacactcttcattacgatgagtaagatactagagcagctataagcttttgcagaacaaagatgctagttcaaagagtggaaggatcaagagatggaaatcatgaaagcccaacaagaagtaattatgttctaggcaggctgccgtactgatcaggagagcctatcaagtcactagccaacagccggcgatcgatacctacatttttattgggccacagcatgggccagaagagggtccacctaaacacacttagcaaacccaagttaatggtcgttcaatccagggccacagagtcaaactgtgagccacacagtaga

SEQ ID NO: 206588 - DNA, 503 bp, Cannabis indica
tactaacaaaaaaaaaaaagaaaccagataaccacggcccaacgtcattatttgacaattatagtgagtgtagtctaaaaattaaattctatcagatgatgctgcatgtcactagacaataatattccaagaaagcggctatggtatgacactgtcgagattttcattaaataaatatttgagaactaaagaaataataaagtgtaaaaagtaaagagatggagatttttacgtggttcaagtgttaattaaccttaatccacgagtcagtctattagcctctaatgacgtatttgatgtgtttataatattttacagaaaatcctaactctatactcttagattctcttaaaaaagaagaatactaagagtaatattggcagaaattcgcctatttaggttgtgatccctccccttcgtatggaaacataagggtataggctaagggcaggtatggacatgcccatgacctgcttaggatttctgctcaaagcccactaatg

SEQ ID NO: 206589 - DNA, 618 bp, Cannabis indica
aactgatgcaacttgttctaaaaaaatatgcacatataatgtttttgattagtttacctaatttttaatattaaaatcctaacccattcgaacaggggtttataccctttgatgttcagagctcttagtaaaaaatataaataatatgctttctatttaaaattatttatgtttaagaataattataataaatcataatgtattatccttcgagtataaaaaaggaattaagtgccaccaattttgttattaaatttagaccaatttgaaaaaaaaaaatgattaagatagtaaaatcttaataaattaattatggccaccaataaaaacaattcagtaattgaaaatagtcatacatagtattgatgaaagtgtcacagttaaattactaaatatttttctataatgaattaaattattttacaattatatttcacggatttaactcatcacacccacatacaaacccatatacaagccaactaggtacgtagttaagacgtaatcgtacatgtgatagatatacagtataataatattgaagacagagttaattaaattaaatataatatgtttgtgatgattttgcaggtgacaatatcgtttgtaaagataatt

SEQ ID NO: 206590 - DNA, 1746 bp, Cannabis indica
aggagggtgaagcaggtatacttttcctccttatccttctgtggtgtgggggtgttaaacttccctttctttccactgttcctcccaaagatgttggtgctgtgttggtttctagtgtttttgcctctagaaatctaggcagagctgttggttttttcttgcgtatggtgagtcatgagactattggatgcctcattaccgcttgttgctgacatcccccatctaggcttgtcgtatggcttcgttaagtttgataaagttgttagctctataaaggagctcattcatgttcttggtagagattttttggatatctttccataagtcactcaatgggagtatgcccccagtatggttgtaaatcggccttcttttgtatggcctttgactttggtagccttgtccatgaacctctgggtgtagtacttcaaaggctcctcttgtcgttgtttgactttgacaaggtcttctagctgcgatggtgcatgtctcgaggacaagaattttgtgtagaattcccataagaacttagcccaagagttgaaccttctggggtgagtttaaaataccattgttgagctgtctgtgacaatgtagctaggaatatgccgcatcgcacatcaccagtaaccttttggaggtccaattgcatctcaaagtatttgatgtgagccagcgagtcttctcgcctggtatacatctttcataccagcattttgaacttaggcaggggtaaggcttttttctatgtcaagaaaggttatctccttgaccgatcaagttcaaggtctgagggcttcagagtggctatgcctttgatcatgtcccctgagttttgtccaactctgcttgcacagtaggatatgttgctgtgaagacttgactgattggccctccttggggaggttgtagattctagagagataagggctggctggccataccttggaagagtgtatggtgatggttggccagacccatgttgaattgaagaccctagcaagtcattcccaggtacggaagctggtctaggctggccaagcctacacttgcatgttgtgcttggccgaccagacttgcattaggcagggtctggctgcccattgctcctctatggctggccagacctataaaggcaggctctggccacccatgacactgcagttaactggtgttggcttcatcctgataggtggtagatcacaccaatactagagtttagtggatctagatgtctaaagcgatcggtttcactcattgaattgtcgttctgggtgtttccacccactcctagtccttgtcggttgaaaatcgacgtgtgggcacctcgctccctttggggaggaggtgttgtactctggctggcgatgggtgctcctattgatggctagctagcagttggctgtggagtgggggtgttgctgagctagagatccttgctcggccccttgtgttgttggttgatctgtcctagtttctgaggactaggttaaggtctccttcaagtggatctctatggagatcctggcctcttctatcaattctctagttgaacagcattataagattgctagcctctcggttatcgcgatctaactctgcttgatgagatcgaaagatatactcctgttcatccatccatctcagaaatttgcatctctgttgagcaaaaacatcgcaatcagtagcgcatggttcttaatttaggcttgcaaggcttacaaattccctgagtttggctaactc

SEQ ID NO: 206591 - DNA, 701 bp, Cannabis indica
ggggttcttttcttttttcattacacaacacaaacaaatgaggtagatgagatagatgggagcaaaaagttggattagcttctccccagtttttttttaaccacttgaggctagctcaagtggccataggtgggtgtgtgagtgttggaggtcctgggttcgagtcccagtaaaacatgttgtaatatataaacgcttaaatcaaaaaaaaagcttctccccattttcaacactctaggatatataaacccaacaatggaccacaaaaataaagtaaacaatgaacaatctcttctctaatctagatagattctctggccaacataagagacaaaatgaacaagtaccacttcacttccattttcaatagaatggcttatcaaaatataaaacattattagtgcaatttaattctatttattttagttatcaatgggtcacactttattgattaatattcagtcatttttgctataaatatacaaaatgaaaagggaaaaaaaaaagcttgtttagtaggtaatatccatttgccaatgtcgttgtttgatatggagaatcaattcttgctagcaaaagagtaactacatattcattcacaattcacaatagacttcaatcaaatcaagaagtaacagggttggtaatggtggtagtgatactaattaatacacgagtaaggtaaaatggaacctcaacta

SEQ ID NO: 206592 - DNA, 1075 bp, Cannabis indica
cattcggatgtggttgtggaggtgtgattgggcttaagttaggtctactactcctaatcggttggctcaagtgacttaattggtttccctcttcgatccgctgtgtcgtatccatgatttgtgccaagcccacaggctgcaacacatgtagagttcccttaatcccttccttgaggcccttaacaaagctcccctccaatatgtactccggcactcttggtaatcgagaggccgccgcctcccaacggagcctatagtcacacacggtggtgatttgagtcacggatagaagctcctccgacagtgacccaattggagctgtgcgaaaccattgtaacaccatatgtttgagtatcgcccacgaggtaatgggatgtctctgattttcacactggaaccaagtgagggcgtcctcgtcgagcccgatgatagccgtttcaagcatgagtggttcgaagagacgaaatatgaggaaataacgttcggctttgtaaatccacccctcgagattggctccggtgaacactggtaactagggctgaacatttggacccgaaaatctgaaaatacgaccgcccgccccgacccgctgtcgaaaaaaccgaaaaaaaacccggattgtcgggtcgggtctaacccgaaaatgtataaatcgagtatcgggttcgggttttgagaatactgttatataggattggagtgtgaattcgagacccgaatactatataaactaaagtacaaagtatatatatataaaaattgaaatgtgtacgtgatcagaatgggaattgggaagtacaaacccatactgatgtggacagcagacccatactgaagtacaaacattaaacacatataatattataagttttttttaatacttataatatttatatttttttaaatattgtttatttttactactttatcagttaaaagttaaaaccaaaaaacaaaaacttaaaaacctaaaatcctaatcgtatccctattctctccctttctcgtttcttccaaatctcagtcagttgtatccctcattccctcgtcgacccttatctcctctctctttctt

SEQ ID NO: 206593 - DNA, 678 bp, Cannabis indica
aataagtttataatatataaataacaaataaaaaattattaatcctaataaaataaactcaatataatattctatctaaacttgttctcaaatattaatattttgtccaaaaaaaaaatatattaaatatatataataattatgcggattggtttggtttgaaccgctaccgagatttttaaaactgtgaccgaaccagagaatttaaaacggtccagattaatcaaatcattcacaccaaatttatttagtccgatcgcaaatagtttagtctggattgattggggttcggaaccacaaattgtagattatataaacaccactagttgccacaggcccttgctcttgttgacggacactttcattcagatttgacacactgtagaagaaggtcagaagtgttatattatttgtgataatataatatagattaaatattaatatgtgacgaataaatataatatatagtttgattatcattttataaggagttacatgtagagataataaaagtaataattgattttcagaaaagcaaaaagtaactcttttgtaactcttcatcacaatttcaaagagtgtaactaagagaattgttacacaaattaatatgagatcaaagctatcattatatagccgttagaggaggtaactatgttggaattttatgctctaaat

SEQ ID NO: 206594 - DNA, 873 bp, Cannabis indica
gacatcaattgtctaaagaagagtttgaagaggcgatcaaaatcctttgggctatttgggagaatagaaacaggttgtggaataatttgcctactatgaatggggatcgacttattgattgggtgcttaatagctaccccaaacctgctaacaatagcgaggatcgctgtagctcattggatattccgaataccaacctgaattgctggcaggcccccccgatggtgtatattgcgtccactgtgatgcagcagtgatccctggaaaagaaggcgtggggttggggttcatttggacagattgttctggcaaaatcatggcagcaggtatgcattttcttcctcatctctgctctgtgattattgctgaagcagaagcagtcttggccgccttgaaggactgcccgatcgacaccagcagcaggtttgaagttcgcacagattgtaagaagctagtggatgagtttaatggagaaagcaattcacttataacagccagacttgctattaataagatcaagcgccaccaaaggttccccttttgtacaaagcttaattttgtgaataggaaaaataatgagattgcacatatgttagccaaaagaagccttgagcaccatttaactcaatcctttctcaattcttttcctgagtggttagctaagtattgtaaagctaacctctctcattctttgtagttttgagctttggttaataaagtttactttcaaaaaaaaaaataataatataaataaacttcatataatcttaatgaatgcttggatgggttaaaaatttcacttcttcctaaaatatgtataataaataaataaattaaacaattttatttctattctatatataaaatgtggct

SEQ ID NO: 206595 - DNA, 610 bp, Cannabis indica
aattataatgatatttatgtgaaatttttttaaaaaaatacattatttattaaaaataatatgaagagaaattaatcaaggatattttggtaaaataaaactttacccaaagaaaaattaatggtgggtcccacatattttttctcccccattttcctttccttcttcgttttataccaaacacacattctttttcacttctccaactttctttcctaacttttcacctctaccaaacaaagggtgtgtgttggagtgtttcctattttaaacactacccgagtaggcaattcattatgaatagaagtttcaatataatatctcaatagaacataccatagaagccagaacttgtagtccagctgctcgcaattgtagagctacgtcatcatctccaacttcttgagctaattgacaaagtttaggaatgaggccctccaagttgaacatgtatgtactatccatctacttttatatgaaaaagtcagatcaatcacccaaatgtgataaacgttataagttttgaatctgaaggtctatgaacaaattctaaatggaacataattaaagaactattatgtgtcgggatatttaacggttccccattgga

SEQ ID NO: 206596 - DNA, 692 bp, Cannabis indica
atatttaacggttccccattggaaatagaattaaataaggttgtctaatataaacatcaatcatttttcactccttgtactgattcagaatattatttatgagaacataaatttcctctcttttttcccttttaacatacatttacgtcaacttgaactttggaccactcacccacccactcgagcgagcctcaagcggccttgaaaagcactccagcatattaactactgtatccctattaatagtatactattcaataactctggaagaaaaaaaaacagagtatctctagcaaacatttacctggcaacttataaaatcaacaagagtattacaacccaaaagccgcatgtcaagctgccgagtttgctccaaaagagtccgaacaagacctaataagctactagcaaatagtggcctgcaaccattaaaaacaccagtgaatatcatcatacatttatgtggcaaatcatagaaaatcgtaaacaggttgcaagcaacaacagcccatgatcaaaccaaaggaaataaaaaaacacaagcatgagtttaacgatgatacaaaatctcttggatatcattacacccttgcactccacaactctcaaacataggacttgactgaccactttcaatatttacaagaccaccatatagtccacattgtcttgtatttcacattgtaaattgt

SEQ ID NO: 206597 - DNA, 1228 bp, Cannabis indica
aagcaagactaacaaaaattcttaatatagggtatttgacagcagtgtctcaagattattctttgtttcttttttagtcctcactcctcaagctttataattaatattagaagttcgatttaattgttatggaaaaatttaaattttggagggtgtttttttatttattattattattattaaaatttttattgtgtacattaaatttcacaatttaaattcggtcctaagactctccacacacactccgattaatttttgagggtgtgaagatataataagaaaaatataaaaatttgtgaacttaaaattagagtttgttaccaatttgttagaaatttaataattatttcaaatagatcaccatcataaatgtataaattccatgaatctttaaaatcactcataaaattctaattcatttaatatactaatctcaacaacaagtacttaataataatatttgagtgttaactaaaaaaagccataacttcaattagttaatcactgaatttaaattacacataaaaattgaaacccatcaaaatacagagcccccaattgctatattgttaattataaaaaagaaaaaacaaagccaaaaagtacaaattatacaaataatacatctaattttttaatattaaagaaacagataataaacatataacttttttttttctttttgcataatttaagccttttgactttttttcgcgcgattttctattctttttaacggttattaatagtaacggactttccttctccggtaacggacggttgataatgatcttgatcaaattgaccggctcagatcgttccttctccttggataatatatacataattctttttccattgaatcatactgagttcgaaatcagactcgaacgattcgactcactactaccaacactgatcagtctcccaatttcgacgagagtagccagaaaatccagaagccatagtaagcggactcggacgcctcagaaatctccgatcataagcggcgcgtttagtcggatcggaaagagtagaataagcagcgtgtatcttcataaactcatcggccgaagaatccttccgatcgatcgtcgctacatcaggatgacaaaccctagctaatctccggtacgcggctttgatctcctgacacgtggcggcggtagggattccgaggatctcgtagagagacgaagcgacgtttcttcgagcggtgttgttg

SEQ ID NO: 206598 - DNA, 1112 bp, Cannabis indica
tttgttatgttttgctgagttgtccaatcaatcacagtttatttataatttataatattatataaatatttacatacatatataaatgagatgaaagaaaaattatgagtgtgactttccataaagaaatagaaaaataaaaagtattatatcttaaaaattttaagaaccaaacgccaaacacgtctgaccgaatcagatgaattaagtgcaaaatagtggttcaaaaaaagaataaaataaatgatattaataggtttaaatctgaacgaatcagatcaattatatcattaagtacaaacaaatgcacctttagactttagatgggaaattgaaaactcttattttgtaaaagaatcgctccttccttcatttttttttttgaagtaactacaaagaaaataagatagttacaaagaggaggaggagaaacaattcctccaaacgatatccttatcctgcttgagggcttctcgagcattgttatgtactgtggtgttgtgaactcgagggatgtaatgaagagaaacaccagggtaagagaatagggacttcctgatcaactgcactatacttgataaggccgaattatcttgctaatgatttttaatccttgagattagttgctaggaatctgatttgatggcatcgagggggatcctagtagccatacaccaatgaatgccttctagtaaagcttgagcctctgcaaaaaggggtgtaaaagcaccctatctgtgaatagattatcctgcaatgtggttttatttactgtcaagtatggtagcacccagccccgtttttaggttcttcaggtccaaagcagcatcaacttgtagatcagtatattgtgtattctgaagggagtgagctgaaggatcttgctgagagagtaaggacggatctggagcagatgaatctaagtggtctgactgaaggggtgtagcttgggctgcctgatagtcctatagtaaagaaacaatgaaatcttcctccttgatgggagtgttagtgtttcgattgaaaagagtttgttcctttattccaaatctgccaaagaagctaatgaacaaagtaaaagtatctttattaaaatcattaaaacctctcat

SEQ ID NO: 206599 - DNA, 588 bp, Cannabis indica
aaagatacactaactatgtctaaagttaagcagccttgaattcaaagaaaattaagaagaaagttgatgagcgacctaaatcaagtggtgatggtctgtttgttcgtggaagaacaaagaagaaagaattcaagaaacccgagaatgggtataagccaaggtctaactaaagaactgcaacaggaaagaagtgttattgttgcaagaaagatggacacttcagagatgaaagtttatcgttgaaggctaaattgaaaagaggcaacaatcaagggaagaataaaatcagaaccaaggggaatctgatattacagatgtatatgaatttgcagtgcttctagttgcatctagtttagaatcaggtggagagtggatcttggactcaaggtattcatttcacatgacactaaacaagaactatcaaaccaggtagaactgtgttgttgagagacaacaaggcatgccaaattcaaggaatttactccattgatttgatgatacatgatggtgtcacttgaactatcgaacaagtaaggtataatccttacttaaagagaaatattttatcaattggcatgtttaataatc

SEQ ID NO: 206600 - DNA, 1373 bp, Cannabis indica
aaaaaaaaaaaaaaaaggaatagtaccactggtagtagaatcagttgtgatcttgaaatgcttgaataaagaatatgaattatcagctaaaacacgcttgaacgagaactgtggcttgtggtcagcttgtaaataacatgaacttcgggggcactttaatgtccgacgccttcgatactctgctatgattaagattgagagtgctgagactgaaacgatggaaagcaacaccttgagttttcctcctaacctgtccattttcggtgaggtcttaggtttcttcagtgaactcggtaatggcggacggcggacggtggacggcggaagcgaaggccagcgggcaagtgtttgatagaaacgacttgaccgacggaacaaatgggcataaaatctccttcatggccgaattcactaaggaaagcccgtggaattgatttttggggggtttttacaaaaatactgaattttggacaaaaactacaaaataactgtgaaaacttaacacacagtataaaacttacacagtatttttgaaaataaaatataatatttttttaaaataattccgcctcacagtaaaaatataaaaaaattagaaattttaatatgtgttgtaatcccttaatttttttgccattttatttcaatttaatgaaaataaaaaagtcttttccaattttatcatttatcaaatttaattatttaaatactaacttttattttaataattataaaataattatcaaataaaaatacaatttaaatatatttactaattaaactaacaaaatatcttaattaacaaataaattattatttctcttttcttctcaaatttacccaaattaaataaaaatccgtaaacaaaacataacttattttcaaattgtaattaacttgttaaatcaattaattgagtctataagaaaatattatcccaaataatgtgagaaccatgatgttagtttttagggtccatatcaaagtcaaacaaaaaattagattattggtttttttaaaaaatatttattgaatccgatatgaaccttaaaccctcaatctcaagacaatatatcataaattaaatctaactacttggagtgaagattttacctcttgatgcctatcaatgatccttatatcttttggtataattgttcgatcatccaatccaaagctatatgagcttgatgaactagatcttccagatcagcctcaacacttaggataagaatggagttataaatttaatgaaatggataaattttttttattagagtgtattctcaacttataagacactgtaatgaagattaggaaaaatgccaattctctataaagaaagatagttgcttgagagagagagagagaga

SEQ ID NO: 206601 - DNA, 993 bp, Cannabis indica
catgacattaaaagcataaggaacatcaatcaccaggaattgggccattacagttatggttatcagagcttttcctactgcgagtagtaggcgggtatgtccaagtggagtaatgctctagccaaagaaaccgtgcaccaattgcatgcaaggaaataagtctttgagttgaagccccatcttctcgtatgttgtctttaaaagaatatttgaagaagctccattgtcaatcatagtccaaaccattttatttgcaatttgtacgtcaaccaccagaggatcatagtgtgggtaaataacatggtcagaatcttcttcactaaaagatatggttggttcttcattgcacgtttgtttaggctttctttcttccacgaccaagacttcatctttttgtttatgttgtaggctccaagcatccctctctctagctttttatgagtctccagtaataaaaaagagggcctctaataatcacttgtaagtgcccatccataggtgggggtatcaactgattctgattattgtctagcagggtggccctctgatcatggtaggtattaacatactttggcaagtgcgagttatttttcctgatgagaaatttaatttctcttttcagattattgcactcattagtatcatgactgtagtccacatagaagcaacaatatttggtggtatccctcttgctgatatcttttttcatgggagaaggtcttttgtacgacaccatggattgtgttgtcgtgaagatggattctatatcctcggtgatgatagtaaaggcagtgaactttaaggaattctctcaaggatgcaactctgagttatttttgagttttcttttcttccattaccttgttggttaacattattcgaccttttaccacgttgactcaaactactgtgatttagaactctaattttgctggacggatgtattggcagcaatgatgtgaaactgactcctatactgccagctgtattcac

SEQ ID NO: 206602 - DNA, 1440 bp, Cannabis indica
ttaaataacaaatcacactaaatacaaaaaataaaaggtattagcatttgatatatacttttcaccaataatctacttttgacaaggtaatcaactcaatcatataagtatatatatgtatattaattttattatacataataactgaaagcataaaaggctcctatatatcataataaattattgatcaatttgcttcctttctacccaacatggaaaataatcataattggatttattttattttattttattttggaaggaatcatgattgaaattagaagttagaacaatcattattccaagtttccaatagaatatagtcaagacaaatatataatttattttaattttaataagggaaaatggaaaccatgcattggttaagtcaagatatgtgtcaaaagttactaggaacaatatataaagggactaatgatttgttaagaaaagaaatgtattttattttactttgggattttttttaattaacaatataaaaacatagtctccaaaaaaaaaaaaagcaattagagatcattccacaagcttcttaaaaaaaactataattacagataatttatataatattagtaataatatatgtattcacaaattagaattaatattatattttaattaattacaatatatatttataattaaaagtgataaatatatataatattaattttgacatgataattaagttattttacacatattatagagatgaaagattcaaatcttaacaaaatcatctttatttagtttactttttacccattctaaaaaaaagtgcctccatcaatttatttttttgaatcaaagattgcaactttattaatgcaaaacagttattaaaataatttccaaaccaatagggacaatcctcttactgaaaatacggtcaggacatgaactagaagaacgagctaaccaattagtcgtttggttcccagactgttcaataaactaaactgaaatatgaaacaacgaaataaattttagttctaagtttggacatataaattttggtgtagatatacaaatatgactaatataaaaaatattacttttatcattatcagtattattttggtgtaatttttgaatgcacgtatcaatattcattataatgcattttttaaaagactaatttataacaaaatttttactactttatttgttctttgcttaaacataaaaaaatattaagaaaatttgaagtgtcaaaatttaaacttgaaaatcctaaattaaaagataaagccatgttatagattatactgcaaaattaacttttttttttgtctcccttgatattggtagaaacttacctatttgagcattatattgtcttttttttttcaaaaaaattaataaattaaataataataaattgaaatctaagattgcacatgaaattaccatattaca

SEQ ID NO: 206603 - DNA, 728 bp, Cannabis indica
ggtttctataatggaaaaattaaagttcttcacgatacaacttactggtaattttaatgacgtaattaaatattgatgttcgtgaatcaatataaccactgaggtcgaaatttaagtggctaacaatatttccagaataccttagttcatctcaaatatgtatgaatctaatctataatatcttaaagacacatcatcacatataatgcaactctaaggtggtctaaactttagttaatttgatatttcttaacattcctaaaacaaatgcaataccaaatcttatacagacttaggcatacattaggcttctatagatagaagcaaaaagaatgttcttaatttcttcccatcccagatcatttacagacactagtttgagttgaatttatcacccataaagataaaataatatgagatgaataatatataattttatttaatcagagatgttgtgactactctcaaattaattgatattatgtatcatttaaaaaataatttgagaatgaactattttgtaagtaatatatcatctacaaataaaataattattactctcactaacattctggtatataattaattccataatgttcttctcaaatcaaaaagaaaatatgacataatgaaaaatactatttgtgagaggcttgctttagtttgcagataaacttcttaagcagcttgcatatgtttaccaccatttagaggaaaaatctttatgg

SEQ ID NO: 206604 - DNA, 887 bp, Cannabis indica
aaagagtgggtcctaggtacgggcctagcccgcctatgcctagggctgggcctgccagtaaatgaaacaccacctgaaaggatagctttcacttcatgaggacaaaaaaagaaaaaaagaatcaaattaacacattattccaaccacccgaagcatctcttaaaactgaaatcttggtagatccatcaataagcaatatataatttctctattccaatcttgaacaatagctcctacaattcttactgtccacacaattgttacttaacaacattcagcttgaaaaatggtcactaccagctatttgaattattataataattactatttttcatttatggaagtattgattaataaatcacaatatattaattatataaatgtcatatatgtattaaattaatctgtaaggacccatttggaaggccgtttaagggtcgtattgtattaaataataaataacactatgtttagataaaataatgtattgtattaatatattacaactaaaaagtttaatacaatgtaagttgtattatttaattaatacataacaaatagtctgtattagcttatattataatatttacaaaggattcgaagtcaacctcaatctccgacctggagccagacccaaactcaaatcccggacctggacccgaatcctgaacccagatcggacctaaactcagatcctagacccagacccgacccgaagtcggtattggggtcgagtttactgaaaatatattataactttacacaatcttttaatacaagtcagtactaaacatatatagtattgcattaaataataataataatacaatacaatctaacataatacaatacaatatcacgtaccaaacgaactctagagataataa

SEQ ID NO: 206605 - DNA, 809 bp, Cannabis indica
atatatatatatactaatacttggcaacgtcacctactctcttgcgaaatttcgtcacgatatattattcatattgcgatcgtttatagtctttatttaatagtgattatattattgcatctacacatgttatgatcttgaatttttcataagatatatctaccttccaattaatttgtaaagaccaaaactaaaagatagatatgttaccaattatttatataaattgttaatttaatttcaatttttttttaaaaaataaaataaaatgattcatgaacgattaagggtattaattagctaatcaacgcgtctaaaaagaaaatttatgaggccaactatgtatgtaagtgtatatatatacgtactctcctatttaataattaaatattggtataaataattaatacgtaatttgctaaaaaaaaataatattcagtacgattgaggctttatttaaatacacatttatataatgataaaaactgttcaacttaattagttttgctttagtagttttgtaataatattaaattacatatattggtaaattttggaaggaatattaagcaataagacttattttttttggatacatatgctctataatattatgagttttaagcttgttatattaattttccttgaaactttttcaatgaaaaatcatatattgaacgaagaattgtagaatcgtagtagaggattaatgtaaaaagtgagaattaatgaatttagaaattcctaagtgttgacttaagaaggcacaaacaataataatccaaaactactttttttttattattttt

SEQ ID NO: 206606 - DNA, 870 bp, Cannabis indica
gacattatttttgtaaaagtttacccaaattcttgtattttttgttaagcttcccaataaaatatcccaaaatttagtgttgctgatggcggaacataaagattgacattgaaatgcatttcgtattcggtccaaaattacaaagaggcaaatatccatttatggacctgtcattggcatgggccgagaccgtaataaaaccaacaaacttattataggcctcaacaaaatatatcgaagggatcagtttagctaagtattaaatttcacatctttttattaatagctgatataaatataaattattgttaatcattcaacaattattttctagttgttcttttatttatatgtatttttttatagtgtattttttttttttggttgtatgtgtgttactttaaagtttaaatacttagtttatttttttatacattttattaaagtaaaataataagatttttgttttatttttaatttacaagtagtagtagatatccatattttaattatatattagacattatattatataacctattttattatttttataattaaaggaattattaatttaacttttaaaaaataaattattatttttaatttccactaactcaaaaagaataatagaaaaaatgaaaagtatgaagttataataaaaaattctatgaaaaagtaatgtagtagtagaaaaagataaatcaagttgtcaaaactaagaaaaaaaatcgtaatatagaaatatattgagttgacattcttttgcatattgcaattaagttattattttattattttttgttactttgcagttatctttttgtggttttatagttattattatgttgtttgttaaattgttttaga

SEQ ID NO: 206607 - DNA, 1150 bp, Cannabis indica
tatcagagcggattatatatctctgccttgatttattttgagttttatatatataaacttttacggggttcttcatttataatatataaatatattttatatatatatatatactttcatattatataatcccgattatatatattcaatactcaatttatttttatatatacttatacatattcatgttgatattcattcatatacatatatatatttatatatgtatggtatttgtatatatatttataatactcaacttaattttttattttattgcataacattgattagaatatcccattctaatctatttatcatgttttgtaagctatactcactttattcgagtatatatatacacacaaaattcatactcttcagtacatatatatacatatagctacgcctttatagatttatatataactttgtatgattgcatgatttgattatttaatattaattagaataatctaatttatatgtttttcataatttcatacggtaaagttatattataggtgtgtatatatatgtaccaattatcattgtcggaaccgtgcgaaagaaattttttccagtttcaaaaaatttgatataatttgttcatgaatcgtttcatcacgttcatatactggtatataatgaattcgagcatgataacattttttgactggaatttattttcgaaatcctcgttcggacccgttttttcattgataatggagtctacattttacatgtttttgatgtttgaaatcaacttggatctcttaatttattcatttagatcactttggaattggtttcatgaattttggacgtctaaaaacagttttatggtcgggtttgggtcgggtctaccgtgacccgcgtgtagaaaacgggtcaaatgtgacccggctggaggttggagacgactccgtaggacgtgtcgtttttctcgtaagagaaaaatgacatgtcgttttcagtataaagtttttgaacaggagatcgtacgacgtgtcgttttttttttgtcaaaaaacgacatgtcgtttttcagcatgaagacttgagcccgactccatacgacgtgtcgttttacacctatgtgtcgtttttgggtggcagattttcaaaaaaaaaaaaaaaaaatctgaat

SEQ ID NO: 206608 - DNA, 1236 bp, Cannabis indica
agtacgacattaaataagggcattagttgctttttgagcaacctgatcaagtggtgatttggagcaaaattatttgggataagcagagcatttcgaaacagagaatagtgctttggcttgttttgttacagaggatttagatgaaagatactatactacaaatggatttggtggctgatcaaaattgtctattgtgcgagcctgctaaggaagatacgacttgtcttttcttccattgtagctatagtagcacatgccttaaggagattaagcatttgttaggatggaaatgcggtgccatggatttagctagtctacttcgttggatcaataaagcaaaaaaagttagtaacgcttagagaaatattatgtatgtgattcttgcagatcttgtctattatatttggagagcaagaaatgatgttcttcacaaaaactttgaattatcaaacatattgtacaaagagtagaaaatgatattaatttagaattagtcttgtaataccaagaaaggctagtgatagaaactggtttgcttcaatttgtaaaaattagaagagattttgcattttttgttgtaaagggattgtaaatgggaggttgtaataagttttggttgaacaatataatgatcttattagtaaaacatataaataaattattgtatgcttaagaaaaacccctatattaatataaaatattttacttaattttttctttatgttttaaataatttttttaatatattttttcaataataaaaataaaataattttatagattttgaaggaatataaaccaactacaataaatattactttttcttatatgctatttcgtcaccattactcttatttattcaattatccttataataatttaaaattatttaacttgtaatttatttagtagtatttacatatataaatttcaataacaaaattaattatatgtaacatctatattttaaactaatttaaataaaatgtataagagcatatataaataccaaaattgagtcaaatgatcataataaaaatgttattaacaatacatgattttattaatgtagtaaaataaatagataaattagatttaatggcggttctccaaataaattgaagcaatacacataaaatagcgtactatttattattaatacatgagaaaaaaattagtaaatatatataatgatttattcattcatggattgaatcttcttctttagtatgttta

SEQ ID NO: 206609 - DNA, 722 bp, Cannabis indica
ctcattagcccaaccccacaaaacccttctcatcttagaaggatcaaaaaatgtttttgaagcataataatttccataatcatatctcaaaccagcccaaccatcaatggaagtattatcaggtacatacctatctttattaggtaaataagtaccaatagtatagtactcatacctagtaatatcaagactagctttgaaaacatgtttgatattttttccaagtgaagaagtgtccaaaccatttttggtaccagaaattgaaacagggtaaaaatcaggacactcccacatcccagtgtgtggcactgagtgtaaagggtgtttggctttgatccaagtcttgaaatctttgcttctatacaaatgtgccatgcctcggcggtttcttttgcctccaaccaccattctccagtgaccatcttcgcctttccatgcagtcgttgggtcgcgaaatgcgctggcgttttcgcttttgtctggtattgctattggattgttctttggtttgatccattctcttaggtatggatcagatgcattttttggtatggcatagttttggatttgtctaatgcttttatcaatacctgcaataacaaagttataatatgtaattaaggaattgcatatttgatgatttatgaccaatttattttagaaataattacatgacacactaattttcttaaatgaattatatttttactttatttttttta

SEQ ID NO: 206610 - DNA, 1466 bp, Cannabis indica
tgtatcgaaattcagtttccatgtaacaaatttacgattttttttgcttcataaaagcctatagtttgccaaaaaaaatcatgcttttaatacaaataatcgaaaacataacaaatattaatctaaatactaaaatttcatttaattatctaaaaacgtttatattaactcatatcaaatgaatctaattttataaacattgtaaccatatacatatacttttgagaaacaaaaagtatatgcctcatcgcgatcgcttaggggctcacatgcattttgttaaagaaaaaaaaaataaagttgatagtaaaataaaaaaaaaatatatatatatatatacacatattaataaatgtatattgcagcttaatggtaatttgtttggagtaataatatgaaagtcttaattttgaatttttcaaaagtaattagtaattgatggagtaagtcatatattcttacaaatactcaacatttttacattcgttgcatgtggtaatatatcatgtatcaaagcaacttgatcatatgataaatatatataatacatgtgtttgtgcatccgtccaatagtggggaaaagctagatatattgagccataatctgagagaatattagagaatcttcatgcatctaagtaataagtattcagtcgtccaaatagtgagaacaaatcaactgatctgatctgattcataccctgccagcgcgcgcgcacatatagtaactttcgtagtatcctgagccagagcatattatatatgtaacttgaaagtgtcagtttccttgttagtgctattatctaataaaaaagatgactaggcatatccgagcattgaaatctgacttggaatatcaaaagtaattatagtgatgatgatgatgatgatgatgcacaacatttacataaaaagttgcagccactatatatctagatcgtaccccttttttcgatgtcttgtcaagctattagatttcgcatagatcatcaatcatatatagtagtgactatcatatatatatatactgtacatgtatatgcatagaaagacagaattatgaatgttatgtatatgtatgtctcatatatatattttgtcaaattcgtcgtgtgtattcttttgactgttataaataaaagttaaaagaaaataaaaagaagagaaaatgaagagattacgttttttgggccgcaaaaggtacagttcgtactttgtgtgtgtgtcaccgaccaatacacaaaaccatgagtagagtatatatgtattcactacatgtatccaactattagttttttgtacaaggttcgatgtctcttataatatatatattaagaatgtaatttactaatttacatggtaatataaatgctttaatttgtaaatgatgatcgttgttttttcggtggataatgcttatatatatacttctcagggagttaacttttgtgagtataataatgaga

SEQ ID NO: 206611 - DNA, 584 bp, Cannabis indica
atatgactataaattatgtataattgtattttaaaaatttattaaataattcaaacctatttgaaattcagtttaataacattaaacatacaaacagtaactttaagaatttacatataatttattattataatgttattatgtatttattttttatttaaatttttgaactatacttgattaacgttataatagtgctatataacaacaatagttatttaaaaaattgagtataatgcaactaaaaagggatatttataacaatttgtatagtaaagaaaataattttgcaacaataaaaaatattaggtaaaaacatgtataagactaaaacaaatcccaactcttaaaggttggataaccaaatttataagttgaaaatatcaatggaagaacttacacctaattttgaagacttcatcagaagccaactactcccaacccctctctctctattaccaaaaaagaaatattatttaaccggcctcccacaaataatatattatcttttttttattatttattattattaatttattatgagcatgaatgttttataattcttatttcttatattgtattga

SEQ ID NO: 206612 - DNA, 1641 bp, Cannabis indica
ttcttcgatcatctcaagatcgaattcttcttcttcacgcaacaatggccaagcatcatactcggagctctataaatgatgagaatggtgatacttcttttaatcccattctgaatcctaaaattacatctactcccagtcaatctactcatgaggacttgtccagtccctacttcttgagcacaggagatcatctatgtcttatgcttgtcttcgctcctctaacaggaccaaactttcagtcctggcgtcaagctattagtatggcttttaatttgctgccaaaaataagattgtatttcttgatggcagtcttctaaaaccacttccctacgatcttgaattatgttcttggaccagatgcaactacatggtgatgtcatggcttttgcactatgtttcttcagaaattccacaaagtatcatgttcttcaatattgcatttaaaatgtggaatgatctaatcgatcgatttaattaagggaatggacctcaaattttccagttgaaggcagagcttcatagcattcaacaaggagatcaatccatcaactcatacttcatcaaactcaaatctctttgggacgaattgaaggagttccaacctacatcaaattgcacttgtggtgctcttcaacgtctacaggaattctacaacatggactaggtgctacgactagagaaacatcaagattgtctagttacaaaatgagctactcaatttacttgtcgtctaataaaatacaaattaacattattcaaagataataaaacttgatagtcttaaacaattaaatcaaactcataccacattggttgattatggcgaatggcctgaacaaaaagcttgttgtcagttttgatctcaacgtgttgctatcttaggcttttgacccaactgagagtctctttgtttcccatgacttcgactatctcgttagcataacaaccccccatgtgctgatgatctagcttccataagagtgaccgttccccatatgccaccgatctagcttcaataagagtgctagtactatctcttgctaccaaactgaaattatacattgaatttgactaaaaaataactatatcaatcttgattgcgttatcaactaattttattcaatacttagaaccatcacccttattgccaaagcataacaatgataacgaaattttgtcctgagataatactctcataacactaataatattaaaaattactaataactaaacaaaaacataaacataaacataaatcatgaaactataatacattccttctctagtacactttatatctgtttcagtatctagcagagtctttttaattttttttttttaatcgtatatgttgtacttatttaagattacatgtaaatattcaaaaaacaattaacaaatttctatgctaaaatacgtcaaacagttgcttactacgcgtacaaaaaaaatcaaacacgcatttaacgaaatatttaaattttattttcagttataaattatttaaaattttgtgaaatttaacaagtaactacaactatagaattgtaaataaaattagaataaaaaactcttctaaatactatgaaataaataaaaagtatagcaaaagaaccctactaggggtattttataata

SEQ ID NO: 206613 - DNA, 2057 bp, Cannabis indica
cacattaaggtgtcaaacaccactaaagctaatatatcgttattggtgtatctcaatatcaattaccacaaattttgatttaatatgatttagaaaactgctaactaattattgtgtatgtgaatcggtatagtattaagtactttaaggtaccacatagcaataatagtacaaaaaaattatttacaaaaataaaaaatattaaaaaataaaaataaataaaaagaattactaaccaattattgagtaccccttcgttatggcattgaatatgttaagatgcaaatattaagtacaaaaattatttaccaacaaaatagtagtatagtagtatattattaaaaaaaaaacaaaatagtagtatataaaaatacaaaaaaaaaaaaagtgaaaaagaaaaggaagtaaaggacatggacaagtcgtttttttggttttattatgacattatggatgttatagatatatataataaaaatatatggtcaggcacttaaactcttgttcattatttattcgaaaagcaatggcactgaaaaaatgaatgaacacacttaatttaaatattattatttatatatatttcggcatttattgccatgtctaatgttttatattattctatgtgatcttatattttcttttgataagttctatgtgatcttatataatttctgggcaggtggtcaattatatcgagacacctgtatagacgaaccgataatgaagtaaagaattattggaatactcggttgaagaaacgaggaacaacagaaatcaatagtaaagattctccagtccgacataaaactaatgatgatgacagtagtgataatggtaatattattattaattcgaccgcaatttctgaagaaaacatcattaataactatagtaatagtgacaatgtgaccaaagaggcatcaacatcatcaccatcatcatcttcttctactactgattatgtactcaacagaggtctccaaaatctcatgtcgccaatttctattactactacaactacaactaattcaaaaggtttagccaccataagtacatccttagacactgaaatttcgtcaaattctttacaaatgaacaaaggtatttctactgatacagctagtagcagtgttagtacttctataaaggcttgtggggatgatcatctaaatgtgtctagaactacaagttctacagcttcggcttccagcagggcactactcaacaaaattgcttctaaactcaatcagataaatctcggtacaatcattggaatgggcagtggttgtagcggtggtgctcgagatggggttgaacatcgtactatggactactcttctcctaatttttgttgcacaccaagtattgatgataatattaatagtattactagttataatgttgaagaccttttggaggaagcggagtgccaacagagcatggaaatgcttcattttgatgaccatattagttccaatgctactctcgaggctgaagataattctcttgtggatgatacaaagacaagtaattttaattattttgatgatgccaaagatggaggtgagagtgccaatatttcgcttgatgagcagcttttgctcacgcatcatttttcaatggattgtttggaagatgtcttaagatatatgtaatgatttatattgttttggaaaaaatcctatatattggtttttatttatatatataggagattttaatagttacattatttctgtaacaataatggttacatttattttttttaaatcattagattattattgaattgttgtcatacatttagaaatttaataaaaataaataataaataatttgtaacctaatagtaatttggtactttatttttcttataaaattttaattaagattaattatattttaaaaattaattaattttaattattaattaattttttataatttgttactaaataatgataatttagcaattaatttttggggttttttttttttttttatttttttttattttttacacttcaaaatatatatatatatatatattttac

SEQ ID NO: 206614 - DNA, 478 bp, Cannabis indica
aaagtaaaaatttaattttaattttcatatatatatatatgtatatattttaagtataacaatctaaaatttaattatttatctaaactaaataaaaatattaattagttcgatcaaatattggatgtattagatttttgaattaataacccatctaacatttgattcaatcataatcggatatccaatataaagtggtcgattgtgattagatcggtcaattgtaattatattgatggatagatttatgtacactaataattatagtttatgatattgtgaatacatcacattgttcataataacttttttctttaattataatattctcaagaattttgctctaatttttattgcagtgagatccattgagttgtgcacgcaagtgaaagctttagtaataattgtaatcaaatccaaattcaatattgaaaatattatataacttttttttttggttgatatatgataagattgc

SEQ ID NO: 206615 - DNA, 703 bp, Cannabis indica
attttagtcacaaaaaataattttttgttgtgactaaaagtcacattttatcacaaaaaatttatgttatgtgactaattaaggttgtcactaaaaataataattttgtagtaagaatttggtttgagttgagtatactcaactaatttgtacacatgtaaatttgattcttgagcaatagaactttattgaaaaaaaatgaaatattatataggtaaacaaaataaaattgaattaatcctaaagacaaaagttggggtatgcaaaatattaatatgaactcggtaattataataattatgatctatacattgatttcttttaatatttttcttagtaattgcagaaaaataattagaataaaaatgtttgtcatttaacattatagttagtagtaattacgtacataatttttcttaatactttttttaaatgttaagagagaaatttgatatttttggtaaacaataaaagttaccaaaaaaatataggttaataaagaattataatatttacgtcgtaaatgatctagtacaacaacttgttttaatatttttctaaaaaattaaagagaaattggatattctaggtataacaaaaaaatttcgaactcaagtcgaaactaaggtatttaaaaatatcttatttatagtttagcagtttagcatagctcacttttaacatatccatagcatttcaataa

SEQ ID NO: 206616 - DNA, 607 bp, Cannabis indica
aaaaaatataaagtaaaaaaacgatggtaaatcaatccatactaaataaaaagacttaaaaagacttgaaatactaatctgttaaaagtcaaaaaaccgttgaagtagaaattatatgagcacaaattggattaatgaaatgcatcattttattttaaaaaataattacataataattaatactactacaaaagaagcctttagagacgtttttttttttagcatattgaaaattttagaaagaaattttacgccacttatggcgtcggttatttggaaataaccgacgtaccaaaaggatttataaccctttgtcttcctcattcgatcagccaacccagaaacccacaaaccagagaaactccaaaccctctccgccaaccaccacggaaaataaacccccatttcaccattttttcaccattttagctcatttttaaatcttctattttttatacctaaagctatatacctaaaaatatcacttttttcctaattttttagggtaaaccaaaggtagaggtagtggatgtggtaattatacctccagtaccgtttttggtggagaaaatattgtatagcatcgtctattaatgtataaatctaa

SEQ ID NO: 206617 - DNA, 722 bp, Cannabis indica
aacaaattgctaaattagtagaaaaatacaacaagttaattagaatggcacaaatgtaattaagttacttaacaaaaatgacacttgttattggaatataaagagataagtgcaaaagattgtaaagtagagtgtgattagtactcctatggttgtaaaactcacataattaatgttcttgaacaataacaaaagtcagatttaattagaatatctttattctctcttaaacataattttatatacatgtatactttgtaatctgaatatgttgtttctggcttcagcaggtgcctggtggttcattggggtgccgattttcttgcttcgttacaagaagctaatggcaggtcgtgctcttgaagcgattgctcaagcatttcgccctgcattcctctagatcttgtacgtggtaagaaaatcctcgaatatcaaaggctttcgaaaccaaaggacacaaccacagcctttgaacaatcttattactttccaaaacaggctgagcaatgcagaaaaaaaactaaattctctaactaaagctctatcaataccaagaggatagccttaccaaactatccaaaggaaggagatgatgaggttgattattatttggagaagaaatcataactagcagaaatgcacttcctgtttgtcatgtcatctaatatgttgaaatccaaagatttatcatgcatgcatgcatgcggtttggatcaattgat

SEQ ID NO: 206618 - DNA, 559 bp, Cannabis indica
ttgagtttcttacgaagggctctgaggcgcttgttgatgagactaaggacgggtccgtcagagacatccgaggccgccattatcgtgctatgaaagagagggttttatttttggagtggattgggttgatcgattgggagccccaccggattagggtggtggcggtggttgaggtcgaatcaagggcttttggttttgaggggttttgaatgaacagagagagagagtgatgagagtgagactgagtcgtgcttgagtgaagaagatgctcaaaatagggattttgtagagccaaaaagaaagacctaaccttgggtttggctctaggtttagggataagaaagggatttcggaattatctcttctttttttctttttcttttttttatttttattttttgaaatggtaattaatgtaagattatttagaccctcaaatttttcaaacccaacttatttttagtatttttattttgtattaaatatattcttaaatttttattcattttttataaaaaaaatctttcttcttatatccttaaaaaatacatattaaaga

SEQ ID NO: 206619 - DNA, 979 bp, Cannabis indica
atagtagaaaaaaaatataatataaatataaaaacaacatgaaagtaacataatataaatgcttaatgaaataaaaatatttaaatttattttataaatttgtatttttataatattttgtctttttaaatagttttaaaagaatcccaaaaattaataataaaaataaaacattatatgtattatgattttttataatctttgatatataatataggtttagtaagattcggtgtatatttagtattcaactatacaaaataattttagcttacaaacaaaactacagaaaaatattttttttaaaaaaaaaatcagaaattgtaaaaataaaagattatctaaaattgtaaagataattaaaaacatagattttgtaataaaaagtacatagcagttaagaaaattgaagacttaattttaagaaaaaataataataacaattaaagactagtgggtttttttttttttgtattattgattttttttttttccatagttgattttctcaaacaccgtggatggaatttttaattacataatagtcaaaaggtcaaaactcaaaagcgcactaaaatatcaaaacacaattgtagtcttttcttttctcttattatttatttattatttttttaaaaaaaaaccccttcataattatgtaattatttgtcaaggtatttctttttattttttgtttttttaaaaaagcccagattgaaaacaccaaataccaaacaaattaagactaggacagataccataaaattgtaatgaaataactcatgcatgcacacatgtactatattatattatatatgtattaattttatactaaggtttcagtaattacaaatattaatgttggagttagctgacccaatttgtacaattttttaattttatgctgttatttattcttatgacactttcattgtgaaatcaatatatatataggaaacttattaattttttttttttt

SEQ ID NO: 206620 - DNA, 571 bp, Cannabis indica
taatgactattttacaaaacagtacttattgacaaatagtatatattattgtactacaactttctagtgacaatttacataaaaaaaaaattaaaaaaaaaaaggaaagtaagtttataaaatagtaaatttgattaaatctaatctgttacaaattactatatattttaattacacatatattataaatatcacagagctatcattatcacgcaaactttttgtttttttttttgttcatcatgatgctattttaccatacaatcaatgcagatatatatagcatcttacatagtctgtcccacatagaagactatgttcaaatgttattggttaccgtcgtcacaaaacaaaagaaacacattcatgaaaattattaatattactataatttatatcgtatagctataataattgccatattattagttaattaacacttcatcataatcacaataattattttagaagtgttatatatcaaacacaaatcttatcattgtccattcaataatatttttaaagggactaagcagaacaacacaaaacaaatcttctttttttttttttt

SEQ ID NO: 206621 - DNA, 837 bp, Cannabis indica
gtgcctaccgattaatttatctacttcaacatatcaattagaacaattttcttgccagtcaacgatttataagtaatacaaattaataagatagagaacataaaacaagtgctgctacgttaaacttacactcagtgcaaagtgtgaaattaaattaaaattttgtaggcaacaatacatgttaccatgattatatataattgaaaggtaaaaatgagatttatcccaataacattctttttgctataatctagtaaataaaattttgtacaactggggtgaattttttctatttattgtaacctttaatttaaaattaaggttttcacaaaacaattttaagaaatctatatatatgatatatttttacctattatataaaagttatcaaaaagaatttattgtgctagtgcatacatttttctctaacttattttcattccgtttaacttaacgagaaaaaaaaaaaccgaagcctaatgaggttcatggtttggagactgatgagtggaaggtgttcattaaattggatgatgtgggaaggactcttgatcggtatgaataagttgtaattctactgaataatttgagatgatgaaactcaaattcaaaaccgttctttttttttttttttttattttttttttttacgtttttttacgcacttagtcgaaacgtaacgtcttttaattttagttttttttattttttggggttagggttaaactaacggtaaaaaagggtttaaaaacgtcaaaacgtaaagggtggggttacgttttcttatacctacgaaagttaacgtctagttcgtatcctaaacggtaacgctagtcg

SEQ ID NO: 206622 - DNA, 1459 bp, Cannabis indica
accatagaaatgggcaaccatttttcatgaaagcaatccaacccattatcaaaacctctttcattattcaagatagtaaaacaatttaatctaactaaatatgttagtttttatatattatctcactacaaactatattataaattattttaattatagaaaacaacctatttagatacaagctacaatgatatttttatgtaagactagtcactataataaaaggtgttttcctttagaactttgtattaaccatctaacttttatctaaaatgaggttatttattaaattaaattatatataactctgtctattatacattattttttaaaaaaaccttaagcatgttaacctttaacatagtataaaagttaaacacttaaaatttgaatttttggtcaagtaatgtaataaataactgatggaatacttgttttgttttctcgagtaaaataaaacttcattaatctacgcatgacaaggtgtgcaaggagaaaaaaacaaccgtaaacatcaagaataaccattgttctattaagtaatcaattcaattcagttgaacaaccaaattagcaaattataatcactatcattgtcaccacaacagacacaacatcaagtggtgcaaaatataaactcaagcacccaaaatctactatcatggtatctcatttcagaaagcattggatccacaaaacattttatctattaaattagaagataaaattttagaactaggcacctaatgattcaagaaagaattcacaatccaatactattattactaataatgaccacaatctaaacaagaccatcaatccaaagattccatatcaatgaaatagtaaagctacgaacaaacaggaagattaaaaaacccttgaaagtattttcattactcagaaattcgaatagtaaatcaaaacccactagagtaacatcacattgtagctatcttcgacctgaagtctacccccaagcaaggcaggccggggtatttctacttctctcaaccaggcttcaagtggttgagcggcacggacgacaaggccatcagcaaaatagggcgttttgttgatgagtacttcatggtgaaggatccgagcatcacccggactcggtttcagcagattccgacatatcaccgtcctcccctcacccttactcttagggatagagctcaaaaacttgcccggttgccggaggagacatgaatatcatccagttgacctccgatgataatctgggtgaagtatgggcttttatccctgaggactttttctcctaagtccgtggcggggaagagaggagtctgatgctggccggcctgacgagctcataaggagaaatgaggtcattcaacttaagcgtgaagcttagttgagggaggtgccagggccagcagtatgctcaagagcctttgaatcctaaagatgaagccgaggctgaggctgagca

SEQ ID NO: 206623 - DNA, 537 bp, Cannabis indica
aaactattattagttattggaaatgttttttgagcccataactaacctcagtgagtgttttccggtgcttagaatcttgtgaagaaacctccttcttaagactattaagtcgtccatcaatctttggggcaaaaaattatatatcaagctcagcaagataccactacaactttttattccaccacttttgcagtctcaaagtcatacctgtttccgaagatcaaccaattccttacaagaatctttgaacaaagataagagcttatccacttcaggaaatagtgggccagacactccttgtgctgatttggctgcatccggtggccctcgtaaatgaccatttgccaatgcatcactcccgttgatgttgctatgtccttcagatggatctgtatcttcttcttggaaagagggaaggagatcattcaccaagtttccaaacaatgcatcaaaagaaaagtccccctgcaatcaattaaaaataaattatcttaaaattattggagactagtcttttaaaaaaattaaaacacccaa

SEQ ID NO: 206624 - DNA, 541 bp, Cannabis indica
ttccagtttattaccattgattgctcatagttcatgcttggttgaaagattcattgctggtttttgaactcacatttttagttctggttttatatattaattgttctttgttgtgtatgttcttgaatgaggcgaattgtgattcaccacaaatggtatcagagcttggtggagaaaggaattgattttcaagaattggctcaagattcaaagaatacatcctgaaaatgtcatcagcaagatttgaagtcgacaagtttacagggacaaacgatttcagtttttggagaatttagatgaaagctttgcttgtgcatcagggaatttcagaagcaatcgatcctactcaacttgcagaaattacaaatggaaagattaaaagggacactgaatcaaaggctcatagtgccatactactaagccttggaaacgaagtcttgagagaagtatctgatgaaacaactgcttcaagtttacggatcaagttggcttccatctactagaagaaatcctaagccaataaattgtatttgaagaagaa

SEQ ID NO: 206625 - DNA, 528 bp, Cannabis indica
agccaaccgattggtgagctctttcttccacttattttcttctttgttctctctgcttccccatagctcgaggaggaggaactcaaactcgaagcaacagtaacaatggagttgctaaaggttctaatcgatttgcagctttggatgaaagtaacaagtttcctactattgatccacgaagtccttattttctttcaaatggtgataatgcctctgcatccttagttcctaaaattctaactggtgcggacaactacagctcatggtgtagattgatgatggtggctttaatggcaaggaacaagataaagttcatcaatggaaaattaccaaaacctaatgaagatgatgaggattatgaatcgtggatcaaatgcaacagtttggtaatatcctggatcctaaactctgtttctcctactactgttgatagcatcatgtacatggaagatgcttcacaaatttagtctgagttgtaggaaaggttccatcaaaagaatgctcctagaatctttgaagttaaaagaa

SEQ ID NO: 206626 - DNA, 948 bp, Cannabis indica
aatcaagaaagaacttgacatactacataccttcctcagaccaaattgcagactgcttcactaaaagcctcacacatactcggttctggtttctcattgacaaactcgggataaaagaatcaccccttcgtttgaggggtggtgttagaaaccatgagtgagtatgtgagggtgcactctgtttcctctgcactctactacaacatagtttaattccctacagctgacaggttgttattatgcaatcattgctgagggaatattctttccctttttggttatgtattgttttctgtgtatgacacttgtcactattgtattgattcccattgtattggaaatgcctatttaatgaaaagttctacctctgtctcaaattgagctgagaaatccattgctacattttctctaaaacttaactgagagtatgaggagtctgtcatattcactagagtttgttataggttagttcttcaggttgttatttcaattagtccagctggtcaagctggtaaccaactccttgtaagttcctcttgtatatatactctgttttacacatcaataatatagttttgatttactatattttaatattttattatcgcagtattttaaaaaatttagttcgctcttacagtcattctttttgttatatcagtagtttagattttttagttatacaatttttattctgtccgtttttcatttttcatagacaatttatatcttcatcatattcaatcaagttttacaccaaatggtttgccttaaagctggaaccccatataaattattgtatatgtgctctctgttttttgtgtattgattgaatttcatatatttattgccattgtcggtgttctttacattttgtagatttcagtattagtaggtaatttttgatttggtgtcttttatttattttatttttatttatttactatc

SEQ ID NO: 206627 - DNA, 954 bp, Cannabis indica
ataaatttttcaagaagagttgcaatatttaacttttagtgagatatttctaaatactattataaatagaatcccaattctatggggatctatctgtccactataaatagaatccgaattctaataggattcatataaattttcaagcactataaatatgaactcttaggctaccgatcgacttcgaagtgttcttcattctagttcttttcttctccttctattcttattaaatattacaatttttattataatgtctagttctgagtagttttcttttagttaagggttattttaaaacccgagacatgaactcttaatttcattattgaatgttaatttttagtttccacaacacgcagcatgtcgagagtaagactcccgggggccaccgacccagatctggctggcggcgcccataggtgcaaaaggaatcttagaagacacttaaagagaggaagagactttaggaagaaaacccttacagaatactcacaattatcgtaatttaacaaagtatttctgttttattttcaaagaagatagtgtaatcaaaatgtagtaacattagagaatgtttacctaaatgactttggttctttattaaaggatgttgcaaatttatttttaaattttcaagagtgtccctaatccatgtacgacgaacagtcaatactgctgcacatggattagcagtgcatgctcttcggatggatgaacaaattgtttggctagagaacttttctttttttttttgtgacttttatatagtcttttagcctgtacaatattattttgattttcaatgatattgaccattgtttgcaaaaaataaaataaaatgtagtaacattagcataggaaaaatatttaaaattttacatgaccaaaagtttaaaaaaattgtgtctataattatttggaagaatataaaccattgtgtctataatgata

SEQ ID NO: 206628 - DNA, 681 bp, Cannabis indica
aacttaactgatgaacttggtgaagaagaatggacgtatcctcaagatttgacaacagttactaataagaaaacttaaattatcatgaatgtcaaagaagaaagatataaattaaaaataattataggtaaactgataaaatattagaagtatttgaaatataaacagaagctggatttgtgagttgttatttcgaatatttaaatactatcaccacgattcttaattaaaaaacgtacgaatatatcatatatcgtttcctgtttagtatgaaaacttgaatcaaactcctcagagtgagaatttaatgcattttaatgaaagtaacacttttccaaatgtagaagaaatagatgtaacattcatcaccaaggatttaatggatttatctagaaaggggtaggaagaaattaaatacaagttacacttggctcaaaatctatactctatccctctcttgagtcactatagacaccacctaccttccattaagctctatctctaacaatgaaaaaatgttaaaggacacccatagtgtctagcacccttgtgatgtttaatataattgttactataattcaatatcgagtctcacgaccccacatattttactttaataaatgttataagaaaaccgctaactaattatataggccatctcatagtggcattaagcatttt

SEQ ID NO: 206629 - DNA, 2427 bp, Cannabis indica
attcttgttatttttagattggagtaaaagattttttaggtgttcggagaacgtctacacaaaaaatcttttttgaatcgtatgtttttaataatatgcatttatttattttgtattagatttaatttaaattaaatttgttgtttatgttgaaattgtaatattatcataaaaaaaatgagaataatgaaaaaatttaaaaaatagaatttatcataaatttattttataaaggtaaaattttaatttcaagaaataaataaaattttagtttatagctttatatataaaataaatttttaaataataatatttgttttaataaaataattagtttttaattatataatccatccaggggtggttttttgagttgattgaactcaagttgacaaaactagaatggcacacaaccgagatgatcatcaacccttttggcccccttgtgctcttgcgccgatgggagagcaaagctcctccatcacgcctgcggcataacaatggtgtcgaaaaagattcttagggttttggaggaaacaaccgagcgattcacattctttgttttgggagtttttatttttttacactttgggtacaaagagaaaaaggaagaagaaaaagagattaaaagagggaggttggattgtggtgtaatagagttgatccgataatgatggtgagaaggaagaacaagatgatgaataggggaaaaaatataggaaagatgtaaacgagatttaggttttgaattaaacattatctttaatgatttgtttttaaaattaaaaaaattatataatatgggttttttttttttttgtttaataattttgtaactttttaattgtcgaataatttttatttaatttttaaatatttaaaagatttttttaaataaaaaataattaatccatgatctggaccaatgagatgttgccacgcagatacggatttggcacctaacggtcgggtacctacggaagctctagaagtgtgaccgaaggtattttaccgccaaaaatacgacttaggtatttatctgctattcggcataaaacttaggtatttatgccgcaaattactcataaattaatacataacttaaatattataaattaaaaagtttaataagaagaatttatttattttttaatttaaatataaattgtaattaaatgaataaaacttttgtttaagtttttaataaataattgtgaatttaattttatgttggtataaaaaattaagaataatgaataaataagaaaatgataattttatatgaatttatttgatgaagataaatttgtaattttagaacttaaatataaaattattttaatttttaataattaataattaatataaatttttaaaataataataatttgttttaaaaaaataattattttataattatttaaatctagaaactaactttattaatttgttttatataaattaataaatatcctaaaaattaaacaataaaaattaaaaagttaatatagagtaatttgttcaattttttaatttaagtattaagtataatctaaggaataatttttttatttaaatatgtatttatgggccattaagtaaccaggttgtgcctaggtcatcattacaatttttctgatgtacctcaacaatataaggatcaaatgctcaattgaataagagtgagtgatttttaattattcatggttgtaattattttataaccttatttgtaaattaatataatttttaaattattttattatatagtactattttgatattaatgggaatccccaccgagacctacttatggggactttatattcggagatggcggagaggtatagtgagcgaaagaaaatcacacacaagtattttaaaaaactttacactaaatcagaagattgggagaaagttctgtgattgcctcctgaccacttgaatacggagagttggaagcaaatttgcgaattgttcattagctaaaatttttttgaattgcgcaaagtaaaaataaagcaaatcggcaacaaatgaaatatccaacaacgcaagacacaaaatcgttggcttcgatacgtcacggaatggtatctattaattctttaattgttaaatatgttttttcttaataataaattaactcaattgttcatttgaaaactcgtctggcacgttcgttaatgaagctactgcaaaagattatgtaagtgaataaaatgatttattattaaaatttatattttatattaattatatattctaataatttttatttaaataggaggaattggtaaaggaacttgataggaaaagacttgaacgacaatcccagagcgatacctctggtactaaatctgacactggttatcagttcgaccaactggaaacatttctaggtgaaagatctgactatcaaagagg

SEQ ID NO: 206630 - DNA, 995 bp, Cannabis indica
gaaagaaaacaattagtttcaaaatttattttaaacaatttttttttctttaattataatctatttatatattctttcattaatattttagactcttacctcgaacgtcggctcctgccctcgacctgaaacccggccttatgtgtaggacccgaactccgaactatgacccacactcaaaccctagccttgacctaaatccagatccagactcagacgtgaagtcaaatcctagacctcgacccactttctctcaccttagtttctcattcttcacttaaataataataataataataaaattactaaacacatttttcttttctgtttttattaaaattaaaaatagttatgagataaatttttgcttctaaaaacaagaattaaaaataaaaaattgtacttcaatttttgaaatttaaaaaattaaaaaagaaaattattaacaaataccctaatcacttctagtcgaatatcataatgcataagataataaggctggttaagagagagtcaacaacgcgtagataaaataaattaaggggccggtacgattagatgcttgtccacattccacactagatattgctttagtaattttctgcatgaatatgaatgtcttgttgtacttctttatttaataatcaatatcacattctcccattttatttaacaacaatttaactaattatataattcatgaccaaaactagaggtgcatttagttgacaaaatcaacaaagcaccggcaggacagcagtcacttaatgaacctcaaataaagttaattggttatttgagtggagagaatgggaagaagtatagtaggaatcaaataatgtgtacaaaaaaaaaattatttattttatcaaaaaaatgtctataaaacgagttaagcaagggcagccagtgtacatagtttgaccactctactctctaccccatctaacacaaaataaatactcatataacctttgattaattacaaaaaaaaa

SEQ ID NO: 206631 - DNA, 581 bp, Cannabis indica
ataatttccaacagtttcttcctcattagtggcagaacatgtctattctaccctagccagactggctaaacgggcaatgtgagagtcagttgatgaattagtagataattagggtctaatttcaaaagtagacttttaattattatttttatgcaattgtggagagaaatttgaattctagatgtgctaattatgttatatatgattttatatttttcatatttttatgcctggtaacagtggaatgcgacgtatggcctatagagtcgctttttatggtttagtattttagaaatagcagagcgatctagatagacattgagaatatcaagaatgtttggggttataggttgacaaaaatacccttagatttcaaggctacttcttggtgaaggaaacagaaattggttattttaccctcttttgtttatagtgaattattaggaaattaatatttcctttgttttattagtgtaataggttgagtattagttagcagataaagttaagttaagttttatctgtcttaattctaacctaagtcaaagaggaaaaatagaaaccaactctctctctctctc

SEQ ID NO: 206632 - DNA, 980 bp, Cannabis indica
aattattagatatccaattgtgatcagatcatttttgaatgttaatttttaaaatatataattagatcagatcagatggtggatgggtagtctaaaaaatctaatacatccaacatctaatcagactaattaatattttcatttaatttggatgagcaattatattttatattgttatacgtaaaatttatatgtatatatgaaaattaacattaaaattttactcattttcttgaattggatgaattcagtccaatcaaatacatactggacctaaaatattagatggacataatccgatcctaaaatactaggtctaaaatattgggtaaacccaaattaaaataataaatatttttgaaatacatctaatggatagaaccaatccaatcaaacatccaatatataattggatgactaaaattaatcaaattagatcagatggtaaaatctaacatccaatatataattggattgaatttggataggcctaaaaacattagatgttgtccaataaacatctatatttaaagtcataaatgaatttagtgcaaaacataaaagttgtagttttctttcttagattttcaaaacatcttgtttcatccaaattagagtaatattgagcaagttctgctcaaaatacggatgggccatgtggcaggcgtctctcctcgcccaagggagttgctcctcacccgtcttctaaggaggagtgtcactccctgcccgtgggagtgttacccttcaccaaagtgtgtctcttctcacccatgggagtaagtatggaccctaaaatttactaattgtacatttgaagtgttgaccccaaaaatttacaaagtataaatatcaaagctcctcctaatatgttttgatgcccaaaaatttacgaagtataaatattggagttgatatattttgatgcttaaaaacctcatgaaaatgttaacacagaaaggcaccctctatcctctctt

SEQ ID NO: 206633 - DNA, 1039 bp, Cannabis indica
aaaggcaccctctatcctctcttttcattctctctgtccctttctttgttggtctccatgacaagctagccacacgaggaatgcaagctccctgccccttactctctttgactccacagaaagcttcccctcttccatcttcttcatgtctctccatccattccatctcactcatggaattggtcctacctaaattacattattaggatggtaattaagagaattggtaaaatgcttcaagacgatgttgaacaaagaaaaacataactccaacacatagtcaaatttacatggaagatgagggaaacgacgaggaaaatacgaaagaaaggcatgaccaaggacaagtcctttaaagcaagcacaatttttccaagcatgaaggtgagtagtggttatacaagagagtacaatgagtacaagtaatggagctaccacctatcagctgttaatacaggctgatattcgactactattacctccactacccacgtgtcacactaacttgctctatactaccaggatagtgtctcctaacttttgggaccatttgtattttagagctattcgagctctagtataactagtctcttgaagcacttgtaaagggcttgaattatcattataagagagataccattaagcaatacaatacttattctctctctattattgctttaagcaattattcttcaaattttctaactcttattgatctctttattttacatcttcactttgacttttacaatctaaattttgttgacgagaatcagtcgtcaaacttagggggcgtttggtaatacttttactttttaatttttcaatcacaaaaatgaaagtgaaatttgtgttttttaaaaaataaaaatatgttttataatgactttttgtttttaattttaaaaatagaaaataaaagtgtgctttataactttcattttaattttaattttttgatttcatttaaatcaggtccaggtctgagaccggggccgtggtcccgaggccggagtccaggtcccaagctccaagttga

SEQ ID NO: 206634 - DNA, 537 bp, Cannabis indica
agtttgtgtaaaattatattttctgtaccataaactcgacccaattccgacctctgtttgtgtcccaagatttgggtctggagcctgagtctggagtttggggtttgattttggagtttagggtccaagtttgggtctgggttcgggttcgggattgggttcaaggttcaggtccagggttcgggtcagggtctggggttcgatttgagcttcgagtttgggtctagggtctgaggtccaaggtccggtgttcgaagctaggccggggtccaaggtccgactttggggttcgaggtccgactttgggtctgggttggggtccgaggccaaaatggagggttcagctccggcgtctaggtttggggtctaaagtctagggggatccgaggtctagtatgcaatcgtggtcggagttcagggtctgatccaagtttgtaaatattataatacaagttagtatagatcattttatatgtattaaataacacaattcacattataataaaatttatagtagtaataataaatacaatataa

SEQ ID NO: 206635 - DNA, 765 bp, Cannabis indica
gttttattgcttgttgctttgtccagttcaataatactgcttatcctaatgagttacgggcccactggtgtagaagcttctcaagctcaagcatttacttttctagttagagaccaacgtcttggggctgatgtgggatccactaaaggacctaccagtttaggtaatatctaatgcattcaccgacaggggaagttatttttggaggggagactatgcaattttgggatgtacgagctctctggtgagaacctctaaggggtcccaacgatttggacttgggtaggctgaaaaaagacatacaaccttggcaagaacgacgttatgcagaatatatgactcatgctcctttagtttcttttaatattgtgggtggtgtagctactgatatcaacgccgtaaattatgtcattcctagaagttagctacttctcattttgttctaggattcttcctattcataggtcatttatggcacgcgcgaagggcttgtgcagctgcagtgggatttgaaaaaggaactggttgtgatttagaacctgttctttccatgactcctcttaattaagactggagacccaatgcttgaagtaggaatttgcttgtagtaggaatcaatttgattccaccctacttattaagtaagttagtaagttggggagtaatatttttaaagtgttcttttttgtttctttttatatctattctttttttttctggatcggctaagtggaatagcagatccattccacttataatactgaa

SEQ ID NO: 206636 - DNA, 575 bp, Cannabis indica
taggcgacggtttaaaatcgtagcctatagtgtccactataggcaatggttttacactatcgactatgttgtttcccaaccattttaaactgtcgcctattctacccaatattcgcgacgctcgtacagatgacgattttatggaccgtgcgataggaattgtttacctggcagtgtaaaattgttgggaatttaagatttttttagtagtgtttgttattagttatgtaaaaaaaaaaaaaatttgtaataaatattaaatttaatattaaaaagtaatcaatctaaaataaccaattcgattcacttttgcagattgaattggattagatttgagctatggtataaatttgatgcaaaatatgaaatccatacttagtgtgaatcagatgtactattagctggcaaaatagtacatattgaattggatgatcaacatgcatccaagtggatgttttgttccagattggttgagttctattctagttctctttttcaacagtctaattaagcatctctcaaaggatgaggaagtaccattaatgaagcttactactcataactagtttgtggcg

SEQ ID NO: 206637 - DNA, 1134 bp, Cannabis indica
caggtcatcttttcctcaaaaattagatccacgtgtcaatttttaaaagattactctcaaaattattaagcgaaaaattagcactataagaaacttaaaaactatatgtatgtataattactttaagaattattatgttcttaaggatacactaaatacccactgtaaattaaaaccgaggcgcgttctatataataacacacgcaccaagcttatatggatcaacactatactattgcaatttgcaaagaaatatatatattaaattacaactatatcattcatatatataaacacggggtaagtttttaatttcaagtgagacactatccagctataattatttaaggaatatatatattttttatttcatggcacaaattaaaattcttaaagaaagcaataatcacgagttatatatataagataccatttctcaactagttgatacaacaataatagaatattgaaaatcaacgttgccatcagctacagatccattttgcataattatatatatatagttaagatatcaacttatcaaatatcaagtatacctacactgtatctcaacagcaataataatccagtatagtagtgatgagtacgtaggtatgctgagagtgaataatagaataatttgtaataataataataatagtagtagtagtataaaagtgagagagagtagaaagaaagagaagaagagtacgtggtttaaggtaggccaaaagtgaaaaaaacacgtaatgagagtttgatagagcatagagaaaatggatataattagtaaatttgccttctcattggacaaacttggaaagtaatgagaaacaacaaaagggatccctccctgctttacccatctgcaccataatttgtcaacattcagatatttttggaaagcaacaacacaaaaaactacaaaaacccaatctccaaattacacgcaacataacacaaacacttattggttaaatcgaaacaaaatttactgttattctttctctttaaaataataataataatttctaaaaaaaaaaaaattatcatcataaatttttttattttattttttcgcttttgtagcagttaaaattacagcttttttagcttgctttttttttttttttt

SEQ ID NO: 206638 - DNA, 614 bp, Cannabis indica
acagtatttttagaaaaaaatttacctcacaacaaaagaatttaaaaatttttagtatgtggtataaaaattctatttaaagatgtgtgctctaaatttgtttgtttgtctttttttttttaaaaaaaaaaaaaaaaagaaaagaaacatgttatctctaatatgtaatttatttatttttactattaatagtttactataatttatggaatttcctcatacacattactaaaataaatcttaactaccgcatagttcctataatatatatgaattatttaagtcaattatagggtttgatggatggtgaattggcaatgcatgttctgattttttttttttgggttaaatatatagaatataatatatttatacatatgcatgtcatttgattaaaggtattattagcttgaattagagaaaagtgacacattaaagcacttattacatgtactaagaaattttaaggcggtgaggcatcacccataaacacgttgtagtggttgtcaaatcatcttatcatctcattgagagcaacctaatattcacatcataatattattgtccttctaccatttcattagacaataataataataatcatagcctaccac

SEQ ID NO: 206639 - DNA, 1037 bp, Cannabis indica
aagacactattattgatcattcccatgaaaacatgaggaaagatctaccaaaatatagcctaaattcttaaacaatgaaactttatttggtcacttgatttctttatgtttgtttgttacccttttacaaaatttaaaatttattaaatcaaggggtcaagaattttatcaaaaataagttttttattctcttttgagagatataatcttaatacttataccaaagtataatagaattctcatgattcaatttatattttgtaccataagagaagttataaggtctctttatatgagccaaatttcaataaatttataaattaaagaactagtagaacaaatattagaatattagaaaagactaaatttttaaattctaaatgaacaaaaattgcttaatttattcaaaataaaatttaaaaccaaaaaaatcatataggtgatgtactgtataagtctttccaaatctaaaaataactagtctttaatcatagtttgaatatccttatagcctcatctgtagatgtctcactttttacccctaaagatgaatctttcatcatcacttaacttttagtttcacataaccttctatagttatacttacataagcaatgtcacaaaattttatttattaagtatatttagtacaataaattaaatatatactaaagaaaagtacgtatatacttagttgtatgttatattttttttcttaataattatttaaagttttaaaaataaagtatatataataattgtattcatacaaattgtttcgatatgcatactttttcgtgtaagaaagtttttaaaaatttctaatccaactaagtaaaatttaaataaacaagaaaaaaaactttacaaaaaacttatgctaacgaaatgtaattgttgccgcatatagctattttattacaaatcagtcgatacatttatttttgtaagtgattcattctcatccattaataactttttcataacttataaattcactatctgaaatctcatttagtttttttttttttttattt

SEQ ID NO: 206640 - DNA, 864 bp, Cannabis indica
  modified_base (77)..(77): a, c, t, g, unknown or other
ggggtttaaccaaaaaaaacccgaccttaggtaaattcggtcttaccccctcccgaaacgacccaatttggggaaanaaggatgaagagagtttcgttctgtgtcatgttttgaagcgtttctactctttgattttgtttctcgaaaatgagaaatgaagaagctgataatctcatttcgctttgtttataaccagataatagctaatggaacgatgaagagcaatgaaggaggagtggtgaatgtgagaattgcggcactgcattttgtggcgggagtgttaaagagaatgttgttaggtaaaaggtgttttgggaaggaaagagaggatggttgtcctggaaaaagaagatgaagaacatgtggaggctatgtttactttgcttacccacattttttgcctactctatttcagatatttttccgtggttaaggtggtttgacttagatggacgtcagaagattgttggtaaagctatgaaagtgattgacaagtatcaagactcattagtgaagaagaggatgaaagagtacaagcaaaagcaggaacaaaaacctcctacagatattcttgatattctcatgtccctaaaagattctgatgaaaaacctcttttgtctgaagaagaaatcctagcacaagtcacggtgagttgtgataagtttaattttttaaggattaatctacatcactatctttcacatgaaattttaatttaagatgtcaatatcaagactcaaacaattaatagcataatggtgtgatttttgttgactaagcaggaaatatttttagctggaatagataatccatttaacacagtagaatgggcgctctcagagatgttgaaccacccagagatg

SEQ ID NO: 206641 - DNA, 1143 bp, Cannabis indica
gatagaggttctactgtataagacaataataataataaaatgtctattattgttgctgatttcattatataatattctttgttgttttatttttgggattttgtttggttatttttggatttatttgtttggttaattttgaattttgttactatatatatgtaagaactcatggaacatcatttgctttttgaatgaggatattcattcgttatttatacaagtgcaacctaaaaaaattaattgttaggtatacttagttgtatgtataggttttttttagtatattgtattttaatttgtagtcgttacaaaaaataacagtaatttggaaaaaaaaataatgtatatataaaaaaattaagtacagaaaattaaagaaaaacattgttcaaagttttgaacattaaatattctattattgtatttcatactttttattattctttctgattctgtacataatagtaaaataagaaaaaactttcagttaggaattagttgaagaatgtttctagatcttaaaattaaatatttaatataaaaatgattcagaaaatatatatagcatgaaaataatatctagttttgcttaggagaattatgcagccttttttttaaaaaaaaaaataattaaatcttattttatataaatttgataaacacatatcaatgtttaaaaaaaaatatccattattctttcccaaaagagaaattattattcttcattaaccgattggggatggagccctgttcaactacgctagcatcgttaaatgagttgggttggattgtgggacccgacccgacctttttcaaaggttggagagggattgggagactgtatagcacaatcccaccaaccaattcaacccaccaaatttcctagatctactttgttgttattgttatgattaatttagttataagatttttatgctttaggttggtagtatgtaccttttcatttatgaaaaatttcaagtatatgtagagaatagtaatgactctcatattatatgctaaatttccgatgcaccttatgttttcgatatttaaatatttttaaaataaatttttgagaaattaaaaaatatttaagctgggtaacacttttttaataagttttttatttttaaaatt

SEQ ID NO: 206642 - DNA, 767 bp, Cannabis indica
gagtgatgataggtttttccccccaatctcttctctcctcttgtacctaattttttttaattgtatcaattcataaatgatgccacctcgggtatatttgtacaaccaatgatttacacaggttagagatcacacatggcctcgtaattgtacaaccggggtattatttatttctaataaatatttttttttcataaatatccctttcccaatttcctactccataatggccagtactagaagagtagctggagtttaagaagctggataaaatttattaggttttgttggttgtggtccagtcttgaagaaagaattcttatattgacacttgtcttcctgttgtccttgatgagccaaaaccatattccattttcggaaagcatgtccttccttctccttttgcttcatatttgacacgttagcgttgtaatgattttagtacctttaggtggatgaggggtcccctctctataatctcacatcattttcgtatacttacatatgtatgtgtgtatatatgtcattgataattgatgattctgctgataatggtaatgttccaattctgataatgcatgcattcagctataaaaatcataatgaaaagatgtaagaaccagaacattggcattttgaattagaaccacctcacctgtgcaactctatgaagcatcatctttcatatgatgatgagtgatctcttttgtgcatctctgcaatatcaatcagccaggcctcaaaattagtttttggcgtttggttaa

SEQ ID NO: 206643 - DNA, 797 bp, Cannabis indica
gattttaaaaaatggaacatccccaaccaaatttttaaaacataaaccttaaattctcaaggaatcaatcgaaggtggctctggtaccacttgttagaattctttatcactcataaaaatatgcaatatcaagattgatttcatataaaaacatattacatattattctaagcatagatttaaataaaatatttgttgattcaaagagaataactcaaatagcgaaagcgtaccttaatgtatagatagtaataattttaactcatctagagataatctttgtggtgattttaaataatgcaccaatacatatgaacgaggattttaatccaatagccttagcaatatttatgtagaaattactattgtattttcctactctgtgttcacatctatattggtcaaatatttaataaaaaaggtataatgtagtagacaaatcggagtagtttcatatgttgttatgtaatacaatagaacctctatctaagagtttctactgtatgtatttacgtatatctctgtgactaagttggaagactttctttttcatttattttattttatttgtttcaatttataagtcatagccttttgagcttacctgtaaaaagttttgtccttagtttatccaaaattgagctttagcctgttttaaaattttcaccacttaattgagcataatgtgttatctttaactactttcattctcaatgtaccttattatgccataaacttttaatcaagtttgggaggggaatgaagtgttttaaatgggaaatattttgaaagtaaga

SEQ ID NO: 206644 - DNA, 1279 bp, Cannabis indica
taaaagatgttatggtatgatatttttttttgagttattcttttttacttcaataataaatataaactaaaaaaaaactaaaaatatatctatatcatcaaagtcgagatgctgttaggaactcttcagtataagtaattataagagaatgacaagtactatcaaatgttaaaaagaataatggtgttcaatatcactgctaggtgtatcaaaccacacaaattaaaataattgggtcccactcaaaagtactatatgaacaataatgtgtgtaataaaatttgttagtaattagaatgtaaaattaagattaaaaatattgaggcatataaaaaaaaacattgctataagttattatgtgcttaataccatgataagataaggtgttcctttataattggttagaaattttttaaaatatttattaaagtgaaataactgaaatccgatattaaattacaccaataataatattacactttacaaaaataatagacaccataaatattttaacatttctcataaaaatagtatacatatgtatattttttttttttgagaaagaatgcaacttccaataataggatatgaagattaaggatgagagattattttctcaacccgctccttatttaagcctaaagaatctgttgctaagttatgagctaaagtatttcctgttagacttttatttgggcttacattaaattttattggttttattaaaacttgggttgattggatagttctttgctgtgttagcccatgttgttggtgatcaattgttaatgggcttagcatctgtgagtaaagtctaggtgaagcagaagtgtgggcttttctagttgactgaagcctttgatgagcaggcccagcccaactagggttttgtagctaagtcccctccctaactctataaatacatattgtctcatcacaattgtataccttttgataatcagagaaaataaactgcttctgatttagagatctagggaggaagacttagttgatagtattgcactatcaaattggagtaactgctgtggatcaatcagagataattgctatggatcaatcaggtacacatactcaattatcatatactactattgtgttctatgttatatacaaatagatcttgggttaattgttaatttatctaacatgtggtatcagattgcctattgtatatgatttagaacctataattagtataattaatttgtatatgttaattatccataatttcatattaattttcgttattatttttatg

SEQ ID NO: 206645 - DNA, 1582 bp, Cannabis indica
atcaataggttaaaaatacaattccatatgtactagctccatctacatacgtgtgtactagtatgtcatatatacatgtgtagttaaatgattactcaacactaagtttggtaagatatagaaagattaaagagggataggagaatttgagagagggagatattttcaaataaattagaaatgcagtgccaaaatccgtccacaaaaatagtcggtgcctatgaattcttaatccttttaccttttctcccattctcacaatcctccataccaaatagaggagccataattaaagtctcctattataatttgtttctcaactcatatgttaaaatattttttttcaatttttataggggtatttattatagttaaaataatatttttataattttttaaaaaatttaaatagtttacagtaaaaaaaaaagaaaacaaaatttctaatattttaatttgtacgtcatacctgtttaaaaaattttaaatacattttcaatacggtaaattattcttaatttttcaaccacctttatttccatctccatctaattgtatctctatccttccaatcgaacttgaaatctcaaagtaaaacaaaaatagatgataattttttttttttttgaaactctaataaaagataaattagtggttgttttctctcatgataaataaaaactacccttacacgattaatattgtacaataaacaaggaattgagtcaacaaaactttatttaattagggcatgtatatattggttgtgactcatagatgatatacatactaagtcatgaaagaaactccaaaaattaatgttaattaagtcaaagtgtaatatttaagcttctattattattagtcgggttggagccatataaatatatatttatatggaaatatatatatatatatatgtatagttggaggcatgattattgttattctattcaaagtaaaaggtttcaaaacatattataaagggtaaggtgccatgtatgattatgtaccaaaaatatgaaaaatatcaaaacttatattaatcaattttatcatataatatatatatcaatactatacagacatggtatacgtaagttacaatttattcatgtactactaattaaaatacaaaatattaatttataatgatgaaaacagtatacccaacactatttttttttataaattttctaataaagcaagttctcaataaatttagggaaaaaaacagaaaaatacaaaaaaggaaaaaaaattacaaaaatactttgggccggcccattaaacatttatacagtccacatacaaatatttacaaaaataccacatgcactaagccttcagctgtacagagcgaaccatgaaggtgaaaataccgcgatcgtttcaaaaccgcaaaacaaccaaaatgaaaccaaaacgataaaaatacaactattaattctggcgaaatcaactggaaaagaagacctgcaatgatctaaacagaaaatgacgaaaaaaaatcagaaaaactgtgaagaaactgaaattacacatttgttttctgttttattcgatcaaaataactccccct

SEQ ID NO: 206646 - DNA, 580 bp, Cannabis indica
gaccatatcgcccacatgacacaaatgataagctcaaaatcagcttgacgatgtaaggtgggaaggtgaattagataatcaccattatacatttgttgatcttttggataatcaatggtgaacaatgtgtgtttccaaattgatgtagcatgtggacaatgaaaaagagcatgcccacttgatttcaatgcatgtgtacacatggaataagcagtcgagtcaataactttcctacgatgaagtgctgctgccgttgaaagagcattgttcagaactttacatgcaaatatttaagctttgatggaagatttagatcccaaaaggttttctaccaattcccgtgtaagtccgaggaagaggattgttgtcgttcttctaaactcgcaaccaaatggaaatttgacttaactgtatatatttataaggttgtgtgatgccaaattaatatatcactgaaagggaataatcttaaaggaatagtgacaattctttcaatgtccagttgtccaaaaaatcgttaagtaattccatattccactctctttcagcagtgatgagatgagcaacgggtaaggaatct

SEQ ID NO: 206647 - DNA, 765 bp, Cannabis indica
gttataaggtatatgtaagtttatttgggaagctttctcctatgaccagtcagatgattttctattggtgtagactactttttgctgttttaacttttatgtaaagaaaaaaaaaaattattcacaatttttattcttaaattttgacatatatattaaattatattttttgatttttttagaatattaaaaattctatgtggattgttaagattattgattttgaagtttttttttttcaattatatttaattttataacgagacgattgtgtatgtatcaaatcgtgctcccgaattttgaaatctattaaattatacccctaaattttatcagattgtacctcttgaactttcatccacatcagacttcggttagtaaaatcaaacaaaagtctttaaattcaataatcgtaatagttcagtgataattttttaacgacttcaaaagttcgggaggcgatttggtacatatcaaaatttaaaaggcaaacatcctaattagccccaaaaaacctctaatttctaaatatataattaggagtaaaacctaattgtttactaatagattgcgaagattatcgaaacctaataatacataatataaattaagatgaacaccacaaattacaagattcacatgcatcaaaaacacattttaggcggctagtctttgagtccttagaaaaccatgataaaataactcaaaaagattcaataataatcatacaaacatcagtttgtaaatcaaagaaacaacaacaca

SEQ ID NO: 206648 - DNA, 1370 bp, Cannabis indica
ggtaataccatttttagatcatgtagttttgtaaaagttataaattagacccttcagttttgtaattgacaaaatagactatgatttttcaaaatagtacaaataggaaccataaactaagtttttagtctaaaaaaaaaaaattataaataatccgatctaaatgtgttataacaaaatttttatatttttctgtatctattcttattaggaattgtcttcaagttggttatattaaaaaaagttgtcgaaaattaagctcaatgtcttatttttaccattttggaaaatacatgctctattttatcatttaacaaaatagaaagtctaatctataacttttgtaaaacacatagtcctatttacatgaaaataaaaaaaaaagaatatttccaaaaaaaaataatcacttaaaaaaacagtcagaaacaaccaattttgactgtcttaatgacttgtatttgtaataagaatttcaatgttttttctttttagaaaaaatagagttgtcttttcttaattgaatgatgaaaaataatgaattggcaacattactaagtagtggagtacatgttgctcattccatccatgtgctagtatattgaaaaatatgtaactcttcttaattttcatgagatctgatcattattatacttcaaatttcattctttaaaaaatatattaaatatagtatttatatatcaaatcaaattcattttgccaacctagatatttctttatctccctcaataatatttgtatagaaaatagttttaaacttaaatgactactaattagtaattaatacttatagctaatgatgataatcaacaatatatatatattattatatgtaatataatgtatgtttttgagttgagaatttagatatcaaaccttccagctgtttaatcattttgttaagatgagtacatttagacagaccttccaccacgtttttgaaacaagtgttaaaattgtacctaccttaaggaccacacaagataaattcaataatcaatattacaaattattgtgatttgtgtgtaataatacaaggtgatgagacttggtaatacttttattttttaatattttaaattataaaaaataaaaataaatttagtgtttttgaaaaataaaaatagtattctataactatttttattttttaattttaaaaactaaaaaataaaaatagcattttataacttttattttattttatttaagtcgggtctaagtctggttctgggttggggccgtggtccgagttcgggactagggatggagtcaattcgagtctcaaggtttaggttgggatcggagtcaaaaataattaattaaaaaaaattagtttaaaaaatttt

SEQ ID NO: 206649 - DNA, 637 bp, Cannabis indica
cccatccgatcgattacacagggaaacatggaacgactggccggttttgcgggacacattattactgtccaaaacgcagatatccccaagattgtgtcaaagggttattttaccttcaaagtatggcatgacattgctactcctctctgtccgggctttctatttccatgtgagggtcgaaaaatctggcttccacacaggtacgatcgcttaccctttatgtgttttaaatgtggttttgtgggacatgatactcgggtttgtgcagaaccaattaaactcattgaagatggatcgaggaagcaacaactgggatacggttcttggctcaaagttaattaacgatacgacttcactacttcattcattcaagacccgtgtggtaatacaactcaggctaaagcccctcctggatttcctgaaaaacagaatgcctctttgatgatgcggcctactggttatagttcgggtgttagtggtgaatcttcacacattttcaattcgaaaccgactcaggtgcccctggtgagttcttctctttcccttaatattaatcctgaaatattctggaagggtaaggacattgtgaaagataataagtcggacttgctctttattgatttggaagcccctaatt

SEQ ID NO: 206650 - DNA, 967 bp, Cannabis indica
acctgggatcggaagcgggccatctgtgcagtggcacttggccggaggcaattgaatgtgtcaagttgctctgccggagcttagcccttatccttcccctcgtcatctctcaccagtttcaactcaaaataaattagagttggtacatacccacctgaaagaatacccaaatcttcgtctccccttttgggattatggcaaatttctctttcaaaggcccgatttgcagaaatcccagattgaattttcacaaattcctgcaaaacaataccattgtattatcaaacccagcaagcaaaatcaaaagtagagcatcaaaattgaaatgcaaaaataaagactttcaaaaataaataaataaataacgggaaggaaaaaaaaaagagagagagaaaagaagatgaaaaaagtcgcctctttgttggagctataatctaaatgcgttgtatacccagatttctaactttttcaaaacttcagatttgagtaatgaattaaagttttagccaaatctgagaacagacaaaatttgcctagattatagatacataatataaatgaaatagagtggattgtaatcctacttacttttccatcctctctaattaaaaaaaaaaatccaaaaccaaagagaaaattatgaaagttttttaaagcttattaagaattttccaaacccaatactgcattaatccaaaaaaaaaaaaatctaagaaaatttatttagagctgtaaaagagagaaaataaaaagaagaaaaagaaaattgtacaatgtccagctcaaagagcaatcataaattcaagtccacaatcctcgtaccaaaaaaaaagccttcaaatcaattaaaacgtattcacattaaaacgaacaaaactaaatccgacccagaaaaaaaaaacaaaaaacaaaacgggttacctgaaacgaagaggctcattcatgtcaatgacaatacaaagacaaa

SEQ ID NO: 206651 - DNA, 1168 bp, Cannabis indica
aaagaacaaatgttctgtggattcagtgtgatcacaacatagtaggcatgtctgctgctctgtgattttcattttaaatagcctatctctggtttttagtttctggtgcattgcaagccacaacataaagctgtgttttggtgtatttaacctgctccacacctgcttactccaatgaatttttgttctagttggacacaacaggttatagccttgtgacacagtgtaattttgttgcagaactgttcctccattcattgcctccttgaactggtctttgagcctaaccaaacttttccaataccagctgcattagcttgtaggtttgtaggcccgctagtctgcatcatgtaagtacacactattaatctatttcagccatagattatcttctttatttgtaattgcccatacatatttacccatagcagctctattccatgcagccacactcttaaaccctatacctccagttgattttagttggcaaatagattctcaagaaatagctccatgcccttgatacatagctttcccattccataagtaattcctgcatattgcttcaatggcattcactactttttttggcaaaatcagcacttggcaccaataggcatgaatagccatcaatactgaattgataagcactactcttccagcaaaggatagattccttgagctccaaatcttgattctagctgtcattttttctgccaacacctcacaatctttccatgatatcttctttgcacctattgggacccccagataagtaagaggcagagactgctttgtgaaaccagatacttccaggattttccttaactgatcttcaggcatgtcgctggaatatatagcaaattttgtagcatttggatacaagcctgatgtcaatgagaacaatttaagcccctgtagtaaataatatacactcctaaaatctccattgcagaagagcaatacatcatcagcaaaagcaaggtaattgagcttggttgctgcacatctattatggaaataaaaatctggtttatccccaatcttccccattattcgggataagtattccatacctaacacaaataataaaggagacattggatcctcggcctctcttagactcaaaatagccatgcatactgccatcaaacattagtgaaaacct

SEQ ID NO: 206652 - DNA, 998 bp, Cannabis indica
gacttttttgaatacgactagtaaattagaatatgagcaattttatttttcgatattataaattatttaaaattttttaaaattttaaaaaataatattatctatagtaatattattattaaaaaaaatatatcacatatatattttatttgaattaatttcacatataattttagagcattgttattgggcaccagtggtgcctagtacttttaaaacgtgtccccttgcgattggctggcgatactctctaaaaattattatattaaattatatgggacctgatactaaattaaaccaatagtgatattaacacataagaagatacttgacacgacgagtgccttttaacaactttcataattttaagtgtaaagattcactaaaaaaaattaaataagcacttttcatacggaaagaaaacattttacaagaaaaaaaaaataattcagggtgaaaaatgctatttattattgggtaaacgaaagaatgagatggaaaaaaaaagagtattgaggaagcaaagtaattaacgcaggcatatcgatcgtagtgaaaacaaataagtaattaaggaagaaaaggtggaatggcgtggtaataaatagataagagagagaggtgtaatattaaaaaggcaccgaaatgcggtatggtatttggtgtatagatagaccataatgataatagtgatcacagttgggcaagaagcttggaaattgggaagcacgtgatcacatgggaagtggagccaatcaggtttccacggacagctatagtgcagctgccatccgtcaatatcaatgacagctggccactttaatctcacagctgccatttcactactggaggctaaaaaaatatcacccattgattctcttccaactcccctcttttcccctcatttctactctaatctcatatctatctctacaattcaatttaaacattacaataactaacatctaacatgtaagcatactcaaccaaaataacac

SEQ ID NO: 206653 - DNA, 610 bp, Cannabis indica
tttgctcatgttctgcttcgggtaatctgctgctggtaacattagttgctgcgggttttgtaatctcagtgttggggatatcattcatagtctcctttgccttatttttctgctctatcaccccttttttcctccaaaccactggccctttctctttattacagtgagctgtaatatgtcctaagagatcacacgccccacatttagaaggaagccattcgtactcaaccatctgttccactaactgctttctttcattaatataggctattgtttttggtggacaatcagagatctcaatatcaaccaaaactctagcatatttaatcatagtcctactcaaagtgaccttatcaaccattattggtttgcctatagtactcacaagagcactcaaagtatttttcccccaatattgcaacccaagaccattcaatctcacccatacaggaactgatttcaccatctttgttgcatccatatccgtagtccagggtcttagaattacaggttttttatcaaaatgaatgacccctgtttccaatattagatcccttgtctcttcatctctgaaagtaaccaaagtaaatcctgaattcattctagcaat

SEQ ID NO: 206654 - DNA, 1092 bp, Cannabis indica
gaccaaaccccatatctaatctagccgttacttcatcattttgcttacgtggtaataaaaattttcaaatcccaaaatcgttacgttacctaaccttgtaaagaaactatttaaaaataaatttgaccgttaacttgaatttcagcaatacacaaacctcgtcctctgtttcgtttctcacctcttattattcaaagcacaaacatttctcgaacgaagaatggctttcgattacgctttcacagacgaggaaatggagatcgacgagaccgtcggttacccaagagcatatgcaaggctctgccgcgatcgtatttctagtccgtacagtcatggacctccatttactttcatgccttactgtctccacgaacacgaggtatgacattgagttctcctcgattttccatttcaatttcaataaatttatttgggttttcgtctaattatgcttcggattcggaaagtgacaatcttttagtaattgatgtttttttcattcaatgtctacaatggaagaagcgtgggttttcttgctaatttattgttcgtataaaaactttacttggattaaagtttcttaacttatgaggagctgttttcatataatttcattgtacttgaattgaatgcataagatggtgtgattgtaattaatgttaatgaatggtttagtttagcttcttttcctgtgctttaatgtttgtttttgccttttttgtgtttttcttaggttttgagagcaatggatctagaacaactcttccctatctttgacccaaaagcaaaacacactggaaaaattaagctttttgttagtctcttgtggaagcagctcagtcatcttgggtaaggcacttgaacatttcttaccgttataatactttattgtgaccaaaacattaatgtttataacttttctttcttcaattcaggaatgctggttttgatccagctgtaattcgagttgacccatatgggaatgtcctatactttcatgctgattctgcttctcctctagcttgggatatagatcactggtttccttgctcaagttagtacactactatttaccatctctctctctctctc

SEQ ID NO: 206655 - DNA, 693 bp, Cannabis indica
tatttgtgaaataatcccaattataaatttagaagaaaaaaactttgggagaaaataaattgttttagcaaaattaagtattttgtatagaaatctaattataaaaagaagtacttattaattaaactttttagtcactattattattattaaaaataatatttacatgtactttatttcatccacccatttataccactaggctcattggataattattttttaaaataattttgttactttaactttctaagaatatttatataagttaaaattataggtcggtaaaggataacaattatgttgctgatctcttgtcacctagggtgagtgggatattgataagctaaattgtcttttcgaccatgagacgtttctgctattctcaaggatggaaaacctcctggtagtggcaaggatagttggctatggactttggagagtaatgggcgattctcttgtaaatcagcttatctagcctaagctttggatagagtgccttactgtgacgtcgctccaactctttggatcaataaactttggaatagtaacattatggagcgtcataaggttctctgggtggtgcatcctctctcaagctcttccggttcgagcagtaattggtagagaatttctgattgaggtatactagatgtcctttatgtgaagtgggggaggaaccatggaacatct

SEQ ID NO: 206656 - DNA, 687 bp, Cannabis indica
aaaatagttttggaattacttattcaaaatattaaaactgcaatttactatatcaacttaaattcttaagaagagtaaaaataataaacaaagtactcaatcaagagtcaagactagactacattattaaaggaaaatattaggtgcttaaaagacaaataaatacataatacggttcaatatgcaaatatgtaaacgttagggactaattattgtaattaccctagcttataccggaaaagcagtggggccgttgtgcaatgtgtatttctttttatcatgaaatggtgatgtgttgattgtgttcagctttgatttttctataagaaaacaacaaataaagtaaataaagaaatatatatttcttcgttttgttgttagattttgaattatcctttgcttggtgttcgattatatttttcttttatgatttgatcaaaaagtatgaacttgatgtcaaatctaagacactgttccattagtatattcttattcttttatcaataatttctgcttggtaacttggtactcttcacttggctaaacctcaatttataattataattattatatttatatagactgattatgaaattaaaaatgcaaaatgcatgaaatcaatctcaccaattatagattatttttgagtaatatgtgtcataaaataaaatatttgaaccatacttt

SEQ ID NO: 206657 - DNA, 724 bp, Cannabis indica
taagctttttggggatttatttgtatcaaaataatttttttgagacttatgttgcacttaatatcaacacgtgacattttagggaaaaattaacaaatttgttaaaaagaagaccaacggactacaagaatgtcgagcttggggactattaccgttattttttcgagtttggggacttctctgcatcaaagtgaactttttggagacttttaccacaatttttccaataaataattataataaaataatgaatttttaaacatttatattgttttaaaaaaatattttatatttattaatttatttatattttttatttttatttttatattaacatatcatagacttatacttaagtttctatttttttaacatttaataaaaatataatttaaaagtactataaattacttttatcaaatgcatataaatttatattttgaaaaaaaaataataaataaaaatataaaaataaaatttttgtataatataaacttttatatatttatgattatatgaactagataataataccattattattattatagaatcttaacaatttgcaacactttaaaatttataatttactaaatactcgactcgtattttttccatagtttagctgcaactgatttttcttgcaacatagatacaattattttttttcaaaatttgtgctaaactgatcctataaataggaacccattacggggactctctt

SEQ ID NO: 206658 - DNA, 771 bp, Cannabis indica
tatcagttctctcatacagcatgctacttaaacagaaattctgagcttacatttgatctaaatcgttattaagttttccatcagaactttttacggacaaatatctggttaatcaaaactgtattacacttgcttttatgtatgatacccaagacatctaatcccacgaactatattgtgcagctataacacaggcactatcaaatatctataaatatataaaagttcatatattttcattgctaacacacattcatattaactttttctttattaagaaatataaacgcagtgagcattagattacccatggatgaaattttgctggctccgaattccaaccttggtaagattcctcatacatgtttatcttctcctgtaaatactgaacgtactcgataagctgcatacaaagagaaacagaaaacatgaatcctgacactgaaaatgttatcatacataagccttatacatacagacaatgacctccaataggaacgatgccttgtctcttttctgatcactttgaggtatgagctctctaagtatctgaaacctgcatttaaaaacatatcatatggaaaagaagtcaaaattttcgagccagtaaaaccataacatcaaatcaagttacaccataatattacatgtgagagattagtatagtttattacataaaaagagtattattacatatataataacaaaccattatatcattaaagtacggtctttaatgctttttaatgttccaagtactaaaggtagcat

SEQ ID NO: 206659 - DNA, 571 bp, Cannabis indica
cttgttctcaaggtttataattaaattccaggaccacaaccggtacagtgctggacgaggtgctcacataaaccttaaacgtgcagaacgagcacgagttactgtaaccaaaataccaggtatattttctttgctggtaatctatcattttttgagaattttgtgcatggagctaactaagtctttctgcagccatggtggataacttgataaacagaactttgtcatgggaagatgaaaggaaaaaattatttctttatgacggggtgagtattttttccccctattcttttttccagccggagttgtcattggcaagtttgtgatttttgctaaaagttttcaataaacaacttttgtaggcaaggttggtatcaatactggaggattacaaactcagcagacaacagaaagaagaagagaagaagagatacagggtaatttatccttacctcatcgctttagtttatcgagcataagaatttaacaagtaataaatgtgcagatttaaaattacgaaaacaaagtaagaatacctctcaactattgctttgtgttttacatttttttt

SEQ ID NO: 206660 - DNA, 1105 bp, Cannabis indica
aggcgaaaatcgtaattagccttattaatatggtttaattttgataatcttttttttaatgagggtgtaaaataaagtgcaagtatttttctttttcaaaaaaaaaatgtcaaaaaaaaaaaaaagaaaattgtcaatttgaaaaatatgaagtcattgactttaggaaatgaagacttaatgagatagagtgaaagatgaggtggacggtgaggatgattgtgaagtgaaagagagaatattagaaagtctcttctcttctatacatcaaaacctcatttccttccttcatcagccgactgtgacggcttaacttttttcagatctcctctcttcccaaatcctttcatttcattctcaaggtaatctaaagcccatctcttgttttcattttctaatccactgatctcaattttattgtttaatttattatcttattcgttataatcaaagttgtgatcttttcgaactggaattgtttgtttatgttgaatgtttctgatctgtttcattttttattcgaagcggatttatacattgaaattcatggggttttatgtgttggttatgattagtttttatgtaatttggctagttatggatgatatatctgatttgaaatctagattacggatttttgtttgtatttattttattaatgtggtactgtattgctgcatttgatttggtgatatgtatttatatttttatgtaggtatcttatacccattcatttcaatttttaaaatgagcaattaaacaaaatgttgccaatcaagccctagttattttttctctcttttcaaattaggacctttgctttgtattgggggtataatactttcatggtattttgtattgggggtataatagttttatggtattcagtttttctggattaggtgtgatgaaatgtgaaatgtgaaagtttgaattgcttttattccttttaatcgaaatgggtttaatgcgatttgttttgtcaattgagaaggtataaaataaatgttcgagcatttttgttttgatgggtcctaagagctatcaagtgcccctcattgttgaatttgagacttctacacatgaaattttgttgttgttgttg

SEQ ID NO: 206661 - DNA, 684 bp, Cannabis indica
ttaaaaatagcctaatatataagataatattacaataattaaaaatgactttatgtagtagtttattttttgtaatatatattaattaacaatacaatcaaattatgtgagtatgctaatgccagctatatatatgttacatgtaaggaaaatatttttatatttatagttattatgaatccctaaatatagaattaaaacagctataattaataataataatttaaaaaattaaattttaatcacaggataattcttatgagtcagcactgagtaataatggataaaatgggaaaagtcataacaaggaaaactataaaatccaaaagcaataaacatcttttacattttcgaaacattttcaataaatgcttagataaatcaacattaaggttgatacagggtttgaattaagtttatatatatgtaaatttatttgtgtatatgtataaacttaattcaaaattttgtattgttagtgaaatattaaatcatgggagagaatgagattagtgataatggagatcatattttgagtatgaagaatggtgatcatattgatcttgatgatgatgatgatgatcattataataatactaatatcccacatgataattcaaacatgtgtgccaacatagcttttgctcaaaaggtaagtttgattatattttatattttttttat

SEQ ID NO: 206662 - DNA, 785 bp, Cannabis indica
ggtatcaatttttctaacttaaagagatgcaaaagaaataaaggtgaagattgggataagatttctcatattcaaagcttgatcttacgtccagatcccaacgaagaagaagaaaatgaggtagaaacgtcaatgtctaacgtttgcttttattttcaaataaaattaaaatcagtgcttatgatgtttttcatgatattgcagaatacaaagggatgcaacctcttcaacaagtttaggcactgcaatacaagaaatcaaggataggtaattaattattttgcaatgtgtacgagattactgtgcatgcaattacctccttctgatatgatttatagcaaaaacaattcttttttttttttataaaaaagagtaaaatttatcatggactgaagctattatatcattgttttttttaaagcaactatatatcattgttaatgcatacaatccagaaatttttccataaactgattttgctgaacaaatggaagagaagaatataaactctgatatttccatgatgatgagttcattgttgttttgaataatgtaagtactttgaattattttttgaactgggtttttcttaaagatcatgaaaaatattatctataaatttcagaaggttttactaaattagaagaggaaacaaaaagaaaaggtttagtttgagtgggattcaactactctaataactttgttttaagattttagatacttttggatttttgacttgaatggaatattgactataccacctgtaaagtctttttttagcaagt

SEQ ID NO: 206663 - DNA, 925 bp, Cannabis indica
gccgttggaaccatgtacttcgatatgtgaccagcccctaaaaagtatagcaaatcagaagtgaagctccaaaaagaaatggtaaacatcctattgctattacaagcagccttcgcgactagggaaaaattaatcgtcttcgtaaactaaaaagagtacgtggagaaaattaaaaaaaaacaacaacaaaaaatgccaggttagaagattttgctcaagacatccgctccacggtctccctgtaaatgtcatggacgaccctcataccacgtatgagacatgtctgttgagcatagtttgtttcaatagctggtttttcttctttatgccctcaatttaaggcttagccttgacagtttggaaagaagagtgtcatttgcattgtgtaggtcgcggttgtctgccttggcctgctctagctccatgaccagtacactggcctctccagcagccctctacactagcaaagccacctgttgtaataagcaaagataaacaaaaaaagctgaataccatgactaagggtaaaataaaaagagaagaaaaaaaaaaaattttaaacatttacccaaccgcctgttgctaagcagcgtgtgctaaggcaaaggcgtccacgctactggatgatgcccaaatttccatgggtatcttagaggcattctcggccacctggtccaagagtttgactgcaaatagtgtagcttcactccctgccttggggaccaaacgcttctccaaggtctctacttccatggtaggcccagttggggttaagacatgaaagccgtctgaaatttcagatttccttatggtcgagagtacggtagcgcatctatgtactatcctttctccatctccaaacactctttcaaagccctatctacttccctctccctctgcatgatgtaacgtgcgtgccaagatg

SEQ ID NO: 206664 - DNA, 1222 bp, Cannabis indica
tgtattggtcaaagtcgaaaggggtaaaaatattaatttttaactgtaaaagaaacggaaccaatcagaaaaaacataatcatgtgaaactgaatttgacatcatctttagactcaagaactttgatatattttttctgctgctaaattcacatgtttttgttacttatttttaccagagattttgcctatccaagaccattggctaaagctgtactccaagtcattatggcatttgggtttttctactatgctatgggatggccagggcaaatctatgttgtgactgttttgataggacttgggtatggttcccactgggcaatgttgcttgctgcagtttctgagctatttggattgaagagttttggggccttgtataacttcctaacactttcaaaccctgctggttcactaatattcttagaggcccgtgctagtggcttatatgactattatgcagagaaacaagcttctttcatgctcaaaaatcccatatcagtaactacaaaaactcttggagaagacaaatcactctcacttgtttgggcaccatttgctattcccttcacttgtggttgtggcatatgtacctaattgtaaagaagctcaaattctctcatttgagtttcaaattgaagctttacaagcatatgcatgtactcccagagctgaacacaaatctccaaacacatcactgaaccatgtgtaatattaatgcattaaaatggtgttactatcactgaaccatttttcccatggttcataattaatggaacaacggccattggtaaaagcggttaagacttgtgacagctgggaaaacccgttcttcttcttcctaaatacataaatatatatatatatatatattatatatactttagaaaaaaaaattaatatatttggtttatgcttatcatcttacaagtttttattttctattctatcaaacactgaaacacgtttaaatttaatacaacatttccaaggtctgtatgtttatatgtcgacaaataatcaaacaaaaatctaaattttattatattataccaaatcaaatcaatatattatcaaaaatcaaaacattacagttaaaatttccactagttttgatctcaaatgcttcattttcatgacagattgaagggttttctggacaacagatggctgttttcgtttgtttcaatgtggattcagtcctgtggcggagctgggtactt

SEQ ID NO: 206665 - DNA, 922 bp, Cannabis indica
actaatacacgattcttttttagcacttcattagagatgtttttaaagacatttgctattagatttccttcatgtgcctaatactatataggtgtggtacattataagtcattgacgatttctcatagtatttatttaagggatttttataaaattattggattttaggaaataatttaccatatataaggaaatttttacaaaaatactgtattttttataaaacaattgtaaaacactaaacgaaacaattaaaaacaacaatgaaacaactaaaaacaacagtggaacaacagatgaaactcaaccgttaacacagtacacaatataaaaaatatatttttgaaaaaaatacagtctatttaaaaaaacttcaccccacattaaaaaagaaaaaaatttaaaaatttcagtatataggataaaaatccctttatctaatcaaaaagtgtgcaactcaataataaattacaataatatatgtcatctccatcatagttaacaccttaaaagttaaaataccccctaccatttcagaatctttattcaaagaaaataatatttatatatttatattattaaaagagccgaaacaaatacttttgccacttttcttttacttttgtattttctaatatgatgattagaggaattacttttccacttgcattgcatggattatggaaagacagtgttccaaccaccgattaaaataaataaaagaattaattaattaagttatcgacttcggtcccgataatataatatatatccttcctaattaatcactgcacaaacttttcctttaactaattagtactaattaatcacgctccttaattatctctacccttccccttcaaattaattatctgatctctaccctccttatttatatatatatgtatcttgatatctatca

SEQ ID NO: 206666 - DNA, 1027 bp, Cannabis indica
aactttttattcaatggcagtgttgttatgcttataacattatccttacaaatacatgtcagaatatttgttttcaatttttttttatggtagtgttgattatgcttataatatcattcttataaatttttaaaaagattacagtatcaaaaatatgttaaatgagcgtaataaactggaatattaagaattctattttacatattgtaaattatttaaaattttttaaaaattacaaaaataaaagaacaaaaaacaaaaaaaaaaaataatttaaacatgtaattttaagtttaaaaattgtattaaaaattataattaacaatcattgttcacatataaacccaatatgaatgtacacgtgctatgaatatgcacttttagtgccgtgctttctcttcttttcattgttaatagtaaaattaataatgaattaaaatttacatataaagtttggtaaaatatataaatagaaattaaaaatatcttttaaaaggtggactgacaatgtcagtaaaagaaaaagaggacacgtggcaataatatgatggggaagaattatgaattgagaaaaaagctgtgctgttcagttatgaccgttacgttgttggacaccattactgttctgattagtgctctcatctctttattcagatattttttttctttcatggaattgaaggttttttttttttttttttttgtttggggggccaatttttgattttggtgctctatgtttctatgtatgaaaatgaatcattgtatttgtacctcagtttttttttttttatcttattctaagatgttctttccttttttgggaagaaatattttcattattattattatttattatttattattattattattattattattcacatttatgtccctgcagaaagaaaataaaaaaattattggacactttatgattttgtatatggaattttaagagttgttttggttggcaatgtgttttaatttgtttttattttttagtaagttagataaataattaatt

SEQ ID NO: 206667 - DNA, 1259 bp, Cannabis indica
tttttttttttttaaatataatagtaacaaatctataatcaaaattaaaccggacaataaattattatattatatagatatttatttgcctcttttcgtgtagcatcattattcttgaaaaaacattcatacaaaaaatataaacactaaaaaaacctcaaattaaaaacaattacaaagcctttgatcattagatttcttttctttcaataaaaaaatcagcattaaaagaaaacaccaaaagtaaatctaattaaaaaaaaaactaaaccttagttataaattaagataattttttgattcttaaagctaaaagtaaattaaaataagcttacctgtacaggtttttttttaaaaataaaaataaatagtacaggataagttatcaaaaagaaaaatttacataatttataataagttaaaaaaaaaaaaatcattctatgataataagttatacttggtaattataattaaaaaaaaagttgggttttagtattggtggaagtatgagatgttcatatggaatgtatggattaaattattatttacttatcctacatgtgattttgatcaatggtggagctaggactttcatctagtgggagcaagagtaaatgatcaaaattaacattgataactatttttgaagaataaggcatgcagttctgtggtgggaaattcaaatggaagccttattgaagttaggacttgttacaaagaagttagaactggctgaggtaattgggggtcagctcttagataataccaaaacaattggacataattattatggagactgaccacttgctattagaagtaaatgaaaatggtgtcattatttggcctacttgttaattaaagtaggttattactatcaagtttttctaatgtatcttttggtttttgttaaacaatttaccaacatggttgttcactttttgctagagaatctagtttaaattctgatcttattagtagaggggatatattgttagaaagatttattctacttaatcacaatatttttcttttttgtgtatcaatcttggacatgtgcctaatgaaattttatgatacttccattacaaagaaatagatacttatcaagtaccacaataagctatattaggacaatttgttagagttagtaaaatgttagtgttaggtttggtcagcttccaactattcataagttggtaaagtttcgagttaggtgttagttgcttttcaaattccattgtcatatgtataaaagcaca

SEQ ID NO: 206668 - DNA, 734 bp, Cannabis indica
gtcctgaaagtgaaaggggcccgaggctgagaaagatccggagcccggctctaagggctcatcctgagagaagccagtcccgcgcctacgagacctccgccccgctgtctgggcctgggggtcgccgtgcggcgggctacggctgctcagccaaccgatagcgcttccgcctggagtttgaggtctcaggcaggggcaactctcagtcactcaaacgcgcaggccctactctagccgcagctctggcccctgctccggctctggccgcggctgctccctacacgttgttgttattgtgggcggtggaggccgcgggctccagacccaggccatcgctccggccccatatttttaaaaatttatttattgagacagtgtcttactctatcatccaggctggagtgcagtggtacagtcacagctcactacagcctcgacctcctgggctcaagcaatccgtcccacgtttgccttctaagtagctgggactacaggtgcgagccaccacgtccagcttttttttatttttttgcagagacggggtctcactatgttgcccaggcgcttttagcttgttttgaaacatcatgttaattttcacctgtttggtagggatttactttgctgttttctatgcaattttgtattatatttctataaatctttttttctgtttgcttactttcacgtgaaatgcattttcctgtacttattgggtagagacacgacacgaa

SEQ ID NO: 206669 - DNA, 626 bp, Cannabis indica
ttttattttaaaatatttttatggtatttaatatctcatatatatatatatgtaaattaggttttcaaagttcatatttaatgtactttttgatatgtttttaggaagttttatttgtcattggtgctaaaaagttgccgaagtttgctgtcgacgctggaaaagttactagaatagctgtcggtgtcgaaaaattcgttagagttgctgccggtactaaaaaaatcgtcaaaattggtattgtcgccggaaaaatcaccgaaaaaatcaccaaaaaactagtttcttgatgaagaaatcaatttcttaataattttcccagtaattttaatattttttatgataatacatattttatatatatatttaatttttattttgaatgccatattatatttttatatattaagtttaattatcatatctatctaaattagttttatttttcttggaaatacttttaattttattaaagtaaaatatgtgttatccaatattaaattacacctttaatagcaatattttacatccaaatgagcctatctaaattgttgtggaatagatttatttaaggaattaaaagtaaagcagccgtgagctgacacccttttttttttttttacttt

SEQ ID NO: 206670 - DNA, 873 bp, Cannabis indica
acaaagttttgagtataaattcatatgaatttttttccttgaccttaagaatgacattctttacacccacttgtttgttgaaaatcatacccaattggcaaattatcacaaaaacatacaaattttatatattttgccaactctttaatgtatctatcaagcttgtcttttatgaattatgataaaaaaaaaatacattaaaatgtcacgaaaacgtttatgtattttttcttttttacccattctttcacaattaacaaaaatatttcatatttcaaagataaaaccaaaaaaaaaaaacttaagcatacgtacataataatgataaatcacaattttctggtttctcactgtaaatttatctcatttcagatgatattcttaagagaaaaaaaagaacaaaaaagttaagataccaattttctcatatctacaattccatcaaaaataaccctgaattttggtaattaaataaatactattttggtgtgattaaatttatcaaaaaaataaactttactaaaagaaatatatggcaaataaatatatattaattcttgttggatagtcacttctatgaagttgcatacaattgtaaataataatactgagaagccagcccagaattgcatgacaaattatatataaaacgtggttcagtcaaaaatcaaaaaaggctgaaaaataattactataattatgatcatgtgaccaaaaaatatgttaaaaatttaataatgaaaatttcccctatcctgtgatgtatccaatcccccaaagaagggattaaatacccttggctaatatatggaaactacaaaacaaggatgaaacaaatcaaagtaatggggttgttttctttttttttttttt

SEQ ID NO: 206671 - DNA, 699 bp, Cannabis indica
attttgaatctcagcagaatatcacataaaaattaggctcattaggttcaaaagccaccaaagcatggccttttgtcaatggccatggaatctttgcagcttggttgtgttgcacttgcacacttgagcttcttgattagcaaggattgtaagaaataataaattatgggttgatttggtacacccaaaattgtatataatacaatacaataggtaacaaatgagtcctatacgttgctgtaggtaaaggcataataaaagttaaaacaaaaatagaagaataaagttgtgtttcttctgtagattataatgcgacaaagaaatatgatgtaaaatgtatggaaaagatgaacttctgatatgcactatgagatgccataataatgaatgtgagatcacattcatgtgggggctttcttttcatttgtatggccagataatcagattcccccaaaatatgcttcttcttcttctactacttatttcttcttctcttttcttttcttttctataaaataaaaaaataagtgatattgggaatgtgctggatcatggcaatctggcattacactagccctttgtctaactagatttgtatagcttcattaaattctcagctggaatttggcgttttcccctaaaaaatcgaatatgttatgaatttgcctaacccattattactcaatactcaataataat

SEQ ID NO: 206672 - DNA, 1174 bp, Cannabis indica
atgaaaaaaaaaacttaaaaaaaaattcataaggtatatttttccaaaaatgttttttaaaagaagtttatctccacctaactacttattaaactctcaccaactactctcttgtttttatttacttatattattattatatcaacacaacaaaattcactagtcttacttgccgtcttgtcctcagctcagcacacctcctttccaattaatttttatttgaccaaacattaataatacaaaaaataaaataataatacaataaactaatatattaaaatctgtatcaactgctttttaacactttgtttattaaccaataagaatgtgcatgttcttcccattaattatgttattttgtttagtcctaccaaaataatattatggccaaatgtttttttcttcaaattattgatttctttacttagtctgtttcttcaatatttttgccttgtaaatatactctggaaagagttctaactattagaaatatttttatgttttctgttcaaaaaataaataagattgtaacctgatatattatgagttattaccttttttttcccctaaatttatattgaattttatgccatggcataatttcttctttatttttgtttttcttaaatgaaaagcaacaaaatttgaacagttaaaattcttatttttcaaaaaaaaaaacaatgaaaaaatcaaaaaaagaagaaaaaattctaaaaagaaaataaatgcaaaattgaaaaggcaagaaaaacaatttatcatgatacaaaagaaagtatatttacagatttatttttcatttttattgtcagaatctgaatgtatattgaaagtatcttagtgttgtttcaaatttcaatgttctaaataaacattaatactgtttttagcactttcaaataccaaaagcataaatcttgtatgaacaaaatagagaaatgctaaagggcaccagtggtgcctagcatcctcttatgtgtcagtatcgttattagtccaactaagtatcgggcctcatataatttaatataatagttttttaagagtatcgctagccaatcgcaacataacatgtcgaaaaaaatgctaatcaccactagtaccttatagcaatgctcaacaaataatatcctacaataatctatccgatcaaatatatgaaaaatgctct

SEQ ID NO: 206673 - DNA, 467 bp, Cannabis indica
tgatgtctgttactatttctcagtccacacatataatttttttactaaactctaggaatacacactattatcaatacaatacatatggaaatgatatatttttttttattttggtttagaattttttcatttgtttattttcgatcaccatcttatttatataaagagtacatatattatattaacttaatgtttgctcatattgtatatgttattaagcagtagttaggttatcggatttaaagaggatgtttgaagcaattgaaaataatagagaagcagaagtgactcgtttgattggagtgaacagaaacatagtaagaacaagacatccatttttgggggagacagctctccatcatgctgttcctattggaaatatccgaattgtaagaacattggggaacagtatggatagagaagagttggaaattaaggatagggtagatatgaatgctcttggattg

SEQ ID NO: 206674 - DNA, 935 bp, Cannabis indica
gttaagaacatttatctttttctactattttattaccttctgccagggggagaggggagctcagatcattattgtcccggaacttgttgattttcttatatcagctacttgacaaggtgagccactccctaagaaaggcttatctgctgtactaattatattaagggtgcatactgagtactttcaagatttcaaatttcgggtcgtgtttgttgtcctttcatacaacacaacaaaagtacatccaaagcaagaccgggagattaacaatctatcatgagaaaatgaaagggatttacgttctaattatttgacaacaactgcacctgataaataaataaaatgggaaaactaattatgcagtggactctatgcctatagatctattagcttttgctatgttactaatccaagtcatatcccattttggttcctgaaaaaaataattatttttgcaggttggtagagttccggtatcttgtacaaagataccattggaagctattgaatatgaaccaccaaggttacaaatcattgtattgatcaatacttaattccatataatccattttacctcagatcagcagcagtgaaaattgtcttctctttgcagtaccaagtcattcaaaaccatagaggcgtcactaaggctggatgctcttgctagtgcaggattcaaaatgtcacggtcaaaactggttgacttaatcaggtcgattctttttactcatgtataatcccttaaatactagtcatttttttgcagtgatccttgaattgattaacttaagtgtttatcatgattatggggcttgaatttttatttttccatttacctgcggccttatattttgccaactcttttatagtctcctatacacttaaatacacttaagtaggccttaattttattgcataattatattataatctat

SEQ ID NO: 206675 - DNA, 601 bp, Cannabis indica
caacaaatggaacagttaaattaagtatttgcttactaatgagaatcttgagttttgggctattactacaaattttcaaaaaaggagacttatctgcatcaaagtaatttttttgaggacttataccgcaatttaatatcaacacgtggtatttttagagcaactaacgaatctattaaaatgaggatcaatagacttacaagaatctcgagtatagagactattatcgttattttttaaagttagaaacttatctgcatcaaaataaactttttgagaatttttgctgcaattttcctaaaaaaacaaaggcatttgttactttattaagtgcaaacaatgcaccatgagttaagtgttcattggatcacatccaatatttttaggcctatccagatccgatccaattatatattggatgttagattttaccatccgatccgatccaattgatttcagtcatccaatcgatccaacatccattggatattggattggatcggttctatctattggatgtatttcatatatatttattggtttaattttagatttattgaatatattagactagtattttttgtattggatcggatccatc

SEQ ID NO: 206676 - DNA, 1101 bp, Cannabis indica
tggatgcttattctagatataatcaggtcaaaatgcatagagctgatgaagaacacaccaactctagatggataaaggtgtgtactgctataaggtcatgccatttggcctgagaaatgccagagcaacatagcagtgactggtcaataggatgttcaagaaccagttggggagaaatatggaagtttatgtcgatgacatgctggtgaagtctaagacatctagagagcacagtacaaacctcaaggaagccttctcaattttctaaagttatgggatgaagcttaatcccaagaaatgcacgttttgtttctcctcttggaagttctttggcattatcattagttctcgaggaatggaagcaaattcagagaatatcaaagcctctattgacatgcaatctcccaaaaatcacaaggatgtgcaaagtgttatgggaagaattgccgccctcagtagattaatcttgaagtccatagacaagtgcatcctattcttgaacgtgttatgaggaaataagaagtttgaatggattgaggaatgtgaagaggccttccaaaaaataaaggagcattttgccaaagctcctatcttatcaaagatggtggaaggtgaggagttgtacctatattttgtagtgtcttatcatgccataagtgcggaattaatgggagaagaaggaaaggtccaactaccagtgtacttcatgaacaaaatattactgggtgaagaatctaggtatcccttgattgaaaaattgaccttttgcttaatagtttcctccacaaagctcataccctactttcaatattaagccatcaaggtactgacaaattattctctccgtcaagtgcttcaaaagttggaggcatctggcaggatgcaaaaatgagcaatggaacttagctagtttgacatccaatactagccaagggtgtccatcaaaggtcaagccctagctgactttgtaatagattgttccagactaagtgaccacccagacggtctagtcccagagttacctacctactaaagtctacgtcgacagggcatcaaatgaaaagggattcaaagcagtaatcatattgatctctctgcaag

SEQ ID NO: 206677 - DNA, 1027 bp, Cannabis indica
ttattgattcatttgttaatttagttttttttcgctgatttacattcacatttttccttattttccaaatgtacttttaaagactccaattcatttctcattcgctcgattcgtatactccattccatttcggattccatcatgaatttctataaaaaagataaaaattatcaaaatgtgaaaaatatattttcgcataaacaaaatcgaaatattagtaatataatttcagataaagcaatgacctttccaaattctaatagtaaaaagcaaacaaaaatgagtgaatatgatcttacgtggaatactttgaaaggattaaagcttgttcaccgtacactttgaaaaaattaaactttcttcactaaactttggtgaaaataatgctacatataaaaatgatattacaaaattaaataggaaacaaaaaatcaaaatctaaaaaaatctaaataacattaaataggaatgtataaaaaattaattttaaaattcgaattatttagtcgaataattttatttacaaaaacaatattagtggtattagagaaataagagtacaattatattagaaaagttttaaaaaataaatatagtaatatgaaattataaatggtacaaattgaagagactcgttatgagaagaaaagtctctctttttttgagagttatgctctgtccctcttttgagtgtgcctgctagtttaaagttcttttttggttttactgattgtgtcccaatctgtcgtgtgtgcttcgtgtatctctgttggtggctagtattcttgtgactggttatggcttcaagcagtattaatgtggataacatagaggaaggttggaagaatatccaacttgaagaggaagaagcagaggagactttttatgaagaaaatgaagaaaatgatgaagaggatgatctggctattgactctagatggtgtcttgttgggcgtatgcttacagggaaggtttcagacttccgtatcttccagaatttgatggctgatctatggaaacctggcaa

SEQ ID NO: 206678 - DNA, 781 bp, Cannabis indica
cagatacaaaattgaacgatgtatacaaagtaaagaaagaaagaaagaaaagaaaaaagtagaaaagggaaaggaaaaaaaaaagtatgtacccacgaacatcagatagattgggaacgtggtcttggtgggcaagaataatatagtgttggtcagccttgggagaaagaaaatggaaccattaaaatgaaggataaagccaagataaaagctactaaagttgttctaccagaatgtcaaacatagatatgttgttatgaaaaggatcaaattatttgttaaaaaaaaatcggaccatacatatatttattaataattttattagcagatttaacaatgttatttaaatggaaaaaattaaatttaaaaaatacatatgaaaaattgttttgaagcatcacgatatgtgattcttaaatgaaactactataaatgttggggttggatgcatgtgtctcaatgtatgcagtgttgcccagatacgtttacttttagaaactactcagtgcgataagattgaaattacagtttgattaaatgagtttttgcgtattcaaaatattaacaaacagtgaaatggttcttgtacataaatggttatatggttattccagttatctaatagccattaattaaagcttgccaaaacttgtgatatatatgtatatatatatatatatataatgaatttggtaatgtaaacttatatattaacagcttttttcttctttgagtgcttttcatgagacaatgtggacgagtttttgatgtaaatattggt

SEQ ID NO: 206679 - DNA, 819 bp, Cannabis indica
agatgtatggtgtaatgtaaaaattttaagtataaaataataaaaaaaaattaagataatgtattttaaaggtatagactgctcttacattatttagattaatatataggccaaagtataatagagatatttattatttttttttggttacattttaagtaaataataatttaattatatatatatatatatatatattatatgacgattttcatcataattatatttaggcaattttttttaaaaaaaaaattgaataatttatgatgtcgtaaatagagttcaaatattcaattgtacacgtgtttgtttctttttacatgagtggaactaaatatttaaaatttatttttgacattgtaaattattttaattttttcgaaagctaatgaaatataactacaatttacataataattaaaaaaaatagctataatttctctaaatgataaaaataaaaataacaaggataaaagtagtgttcttatcgtaaaatttttcttaatataggtgtcgtttggtaacacttttgttttctaattttttaatcacaaaatgaaagtaaaattttatttttaaaaattttgtttttaaaaaacaaaaataacgttctgtaactacttttgtttttcaattttaaaaacagaaaataaaagtgtgttctgtaaagttcatttttatattcatttttttgattttatttacggtcgggtctagggtccgaagtcagactcgagatcaggtcagaggccgggtttagcgccagggccatgggagaatttgggtccaggtttgatcgaagtccaaaatattgattag

SEQ ID NO: 206680 - DNA, 824 bp, Cannabis indica
ttttttttttcaaaaaaaaattacaatgtaaaatttagttaaaaattaaaataaatatattttttctttttgtatatgtattagccctttataaattttttgggcttcgcttcgttatttttctttctatttattcgacatgcaaacaacactcaaccgaactcaacatacatttttaataaaaagttaaaatactatcacattacaaacttaaaaaatgaatttaaacagaaatattgacagcaaaactacatgaattatacgatttgtgacacttaaccatataaatttatttttaatggtaaaactactaaaattgttcttttgttttagtctttatctttccgtctaaaagactctattaagtatcacggtgaacatattacagtatacctcctaatgtacacgtaacaaaatttaagtggttcatattactttaaaatacaaaaataattaaagagtcttgtttcttcttactcccgaactctacttgccatctctctcttcacagtggaactcgtcggagctaaataattaaagaaatattcaatctatttcttaatcattaattgttgacaaaaactcgcatcaacaataataatagtagtgtttagaccatgtaatatgagtaattatcaagtactaattagaatagaatagggtaatttgtgatatgagtaattaacaagctctaattagaatagaatagaatagggtactttgtgatatgagtaattaacaagccctaactagaatagattagggtacttactttgtgatatgagtaatcattcaatagttgaattaatatggttattgggaca

SEQ ID NO: 206681 - DNA, 961 bp, Cannabis indica
caactgatggggatgcattggtgtgttaggagaatccgaagctaattcaacatttgggtcaataccatgtgtgcgaccatcaccacatattatgattccagaagggagtatggtacatttgagatattctcaccacttattgctaggttaagagttggcacatctattggtgcataaatcacaaatgatcccaaagcgtctacatagctctcttgaaccatcaaaatgttgttatcacttggcaggaacggctgcatccaataattaattttattatatatgtagagatcgaaaattttaggcatgacttattgatcatcataacaaattgagaactataattttcttttaattctacatagggcaagtacaacacatggatcatgctaaataagcaaaagaaaataatagagttgcatatggagggggaactttcctcacgtatatagctactacaaggaaatttatatttttaacaattgaaaaattaatgttggaaagaaaaattaataaaaaaaattatatgttctaaacctttcgagctaggtctttgagcaactttcctagctgccccactattaaccagcctccagtgatattttttggtgagggaaattttttttattttttttattttgtgagtattagtgaaaaatattatttttatggagattaaataaaaatatatgagaaaatggaaatttagcaaaataaaaaacattctgtgcaataaaaatgaatattttaaattttgtggggataatattaaaatatataaggttataaataaagataaaataaaaaatttatgagggtaaaaaataaaaaaattaaaaatttatacatataaaaattaatttatagaaagttgaggatgatctcataagaccctccaccacctggctgcgctagatgtaagtaactactaacatatcaaaaaaaaaaaaacgaacgtatgtgc

SEQ ID NO: 206682 - DNA, 646 bp, Cannabis indica
ttttttaatattacctacaagaaaatgagcaaaacatttgccttagttcatcaactttgagtttttttttttgcttgttatattaaaatgaatttattaattttgtgagtaaagggtacagcaaacaaggagacttacttcaaaatcaataagaagtgtaggttgttcaagctcttacaaacattttgcaatcaccaaaatgttgattatagagacatgcagtttctcttcaatggcaagcgcatttctccaaaacacactcctcactcagtaagttttcctttttttttaattttttttttattaattagttctttttcctattcttttattccaattgcatctttgttttaaactatttctgatataattgtacgatgaaaactgaaaagttaaaaacttatgtttgaagtctttaaagctgagattgtcattatcaaaaaggtaacttaaaagaggtatcagtataattttctaaaaataagtatattaaataatttatggataattatataaggtattatttttttttaaaaaaattacaaatttatatttaaagatatttttttaatattttttttcttcataaaaacaatacgaaaacaacaagagaactacaaaaataacatttaaatagcattaaaat

SEQ ID NO: 206683 - DNA, 866 bp, Cannabis indica
aagctacacattctgtcctttacattctaagagtatcacaatgaaaaaaaatagtagacttggcaaattaactgctgacgtgaatcatgctcaaaaacttgaaggagccgaactactttagaagcctccctttcattcgctttacaataaatgtaactatcatcaacagataacatgtgaaaaatcataagagcaccattacaaacacaacaaccatgcacatctccttcagtctcaaacttctttatgagaaaagagaaaacttttgcacatatgagaaataaataaggagataaatggtcctcttaacgaatacctctagcaagaacaataagattcgattctcaacctccacgagtaatcgtgtagctaaccatagaaatgcattgaaaaattaaatccaccaaacacctatggaagcttatttaaagcatcatagcacacacaaaaggccactataggatcataaaccttactcatataaaatttcaagaccatatatccttccttaccaatccattttctttttcaaataatgtattatcccaaaagaaaacataatattgtcataaattaattttccaaaaataaaagtgctttaattctcaaaaattacaaacacaaaaacacattttaaacgattggccaagaccttagaacacaccacatcattacacagcgccataggtcttaaatcccccatattagtcaaattcttctttttaaaaattaaaacaatatttgtatgatttaggttgttgaacatgatttaattattaattgctttttaaaaaaaactagaattagagtagtttgaaatctaactcattcaccatttgactattagccctaaatcttcaaccaaa

SEQ ID NO: 206684 - DNA, 1139 bp, Cannabis indica
ggaggcatggcgtcttttaaatacgtgtcgtcgtgcttgtttcgttagatctactgcacatcggagctaggcgattggagctgccaagagaggattgtgacggatcgagaagttttgggagctagaaaggtaacattgagtcctttgacgattgacgaccgagaatggctagcatggcctagccatcatttttgtgcattttacttctaacacagatctgtctctcttctcttattcttctattttctccacaggcgaccattgttggacgttcgtagttgtttgataggttacatcgtcggcgcatgggttcatggattcttggttcaatagggatggggtttggggtttgtgggtgtggagatcttgtaggtgattgctgttgtgatttgtggtggtaattttttttttttagtgattttaggttagttatagtgtggtggttgttgtggtggtgcatgcacctagcggtggctttggcggtagtgactgtggtggcgataatagaagaagaagaaaaagaaggagaggaagattgcttagggtggagaagtgatggctgttgtgattttcataatttttaaattatttttttataatattttaataattaatattacgcgcactactaaaaatttatcacgtatatacttgtgtacacgtaggcagtctactatagcacgtaggcagtctacttgttctttagattctgtccctatttataggagtctatgatgacaattattccattgagatttaataatttgtaattgttcatgaaacatgaacatttcccacattccatatttatgcacatgagataattatatataattgcataactgttctttgtcatagacagttatatatgctgactgtgtttcattgttctcgcaattcaaccaatactttttttaaacatctccatgaaataacatttaagtgtattgttgcagtacatctcccattcttccattaatgttgatggaggtacatggagacgcttattacagcgtgacaaaggcgaaatgaattatattgaagttattgtttttattcttttgacatactcacaggtatgtgggttgatgagctgcaaaacccattatatactcgttctaaacaattttataatgtat

SEQ ID NO: 206685 - DNA, 581 bp, Cannabis indica
aaatttataatttttattttattaattttgaagacaaggcaaaagccgtgacccttatttccctaattatttgatcgattttacatatttttatgtttttaattcagttatttctagacaagttaaggtattcaatctatattcaagtgatcatggaggagaaaattaatggtgagacaatattcagtgagatacttattctacactcaaaactcttatctatgggcaatttttttttatcttgctaacatattatttttaactatattacgtgttgacaagtgacaacaaggtcaaaatggatgattttcaaatgtatttctctagcttttcaaaaaattaagtttttttttttttttaaattgaaaattcattgatccaccacatgtgcaatcagaagtacacataaaaataataagttaatttaacgtagatttctcaagcattttttcttcttcttcttttttcttttttttttattgtaataagtatgtatgttttattactcctaatattcaatttgtacaaatctacaagcatcctcaaataaaaagagatgacttttttttaatctctatata

SEQ ID NO: 206686 - DNA, 741 bp, Cannabis indica
atacataaatgatgaccagacaaattgaattgaaacaatagaccttcaccatctctgagttcattagtttgaagatatacgtgaaggaaggaagaaagtgcattgattatcaaactttaattattatatatattttccatggcatttttgtcatttcaagataaatacacatttggtatgatatgttttatcaaaatacacatttattaataattatcttgattgccgatcttttgcgtttgatttgcctttagctttttctttatttatatttatataattttttaattaatattaattttatttaataattatacatatactattttagtatatttttaaagtaatttacatatactatttatttatatatttttaaagtaatttattaataacttttagtacaatattttatccttatatgtaattgtttttattatatacacttatagttatatttgagatattaattttattttttattttaaaagtgtatctaatttttaatttatagtttttattatattaaagagtttaatagtattttaaatacttttactttttttttgttctttaagtagaaatatttctatttataagtatggtgtatagtattttatttgttttgttatattttgtgatgttatcgtataagttttgtgataatgtactatacggagaatttctatatcacatcttaaatcatttgtagcagataagtttttcttttaaattttaaat

SEQ ID NO: 206687 - DNA, 716 bp, Cannabis indica
accatattctacttgtgtggggggaattttgctgatgtgaaagagatcctaccataaggattgattgttgttatatgccaaaatctactaaacaactatttgatgcaatttattatggtgtcctatttacagagatggctgtaatttggtattgcatcttaattatttatttaaatttaaaatattacagtgtgatacattgcaactattactaagtgtcggacaatatatattcataagaatttattgttcttctcttctattattataaataattcttgaaatattatatgttgcattccaaacagagtattctgtattaatgtcaaattgaggagccagtcactccttttagagggtacaatgaaaagtatgaatttcaggaagatgaaaacaaaaatggtaaatattaattgtataggacaaaaataaatagttataattctataatttaatttcaatttagggtgttgggttcatcttttaaatccaaaaaaaaaaaaggtaaaatttttgttttttacttttaaaaacaaaaatgtgtctcataattgattttgtaaagtttcatatattttttttatttaagtaaggagaaagaaagtgggttggaaacggggtttggggtttaggtccgggcaagaggctggggtcctgggaaggagtcaggcaatcaaggtcggggtctagggttagagctggggttgaggcttggg

SEQ ID NO: 206688 - DNA, 599 bp, Cannabis indica
ttaagaaatttaaaactaagtttatattaatttttaaatttaaaacaaataatcttactaattttttcaaaaatataaacaaaattaattaataaaaaaatcataaaatatatatatatatattttattgtcacatcatcaaaccgttgattttttagatgaaaagcacaaaagtctacaagcattataatttggaggatatttttactaaagaaaataatttagagaataaaaatctacaaatacaataatttgcagggtaaaaaaacttttttcctaatataaatgggagtacatacttagcaaaatattaaaagacgagagcagttgtcctttatgcttttgaagctaacgaaaataattttgttattatttatattatatttataataattgttgtttttttaaaaaaaaaaaactgggtgattaattatgtatgttcctccatgatcttgagatagattgtgtaaattaatttaatattttttttaatctaattggtgtttaaaaatatcgatattttcttactggcatgtggtaacctaatgatataatttacaaagacttattactattattttaggcaaatatatatatat

SEQ ID NO: 206689 - DNA, 523 bp, Cannabis indica
tatgttggaagctatttgatcattgaatctctagtttgtcctccaccccgtttgagcttgttgctcctcatggcatttctgagacatttttctaaaaaaaaaaaaataaataataataaaatatatgttagagcatcctatatatatgctaatgctagtatatggtaaataaaatagttaaactcttgattttatttttcatcaaatgagctaaacctttctctatttagctataaattttttaagtattttatagtatttgtttataccatttatttttgtctttacattacacaatcattattttattaggataatttcacaaatacacaaaaataacaaaaaaattacaaaattactgttttacggaattttaaacatttttataaattttttgattttatttacagatattatttaaatgttattttcatattacttttatgtagttttcttgttattttcatgttatttttactgaaaaccgtaaaaatatatataaaaaaattcattacatgtaaaa

SEQ ID NO: 206690 - DNA, 1113 bp, Cannabis indica
gcccagttacaatgaaaaaaaaatactaaaaaaagaccaaaacatatttgatatcattaacaatagtagcaatgactgtttttcattactagagataactttcaccaaacaaagacaatcagaaaaaattgttagtcttgtgtaacccagccggagacataagaacaacccctcgagtaaagtcgccacctctgccacatgaggatcgaagactatagttattggcgtagccgtcgagcaaagtattgaacctgattagttagaaagctgcctcaaggccatttttgcaatcatctgcatgaatactagcaccaacaaataaattgacatctcccaacactatctcatctgcatgatcacctctagaaggaccaattacgtctcttccacttgccaactcagatagagaagataacatttgtgcatcttgataacgcttaagaaatttcattggcacaccatatcatttgaaagcaatttatgatcatgaacaaaggtattctgcctatgcaaaattctccaacaaagtacatcaaattcttccatttcttgattagagaggatattaattaaaagctttttaagatttatatattcatttaaataattttttattctaaacaagatttttgcttcctgaatttatacatgtaccaaatcatgtcctctaaatttttgtggtcattaaaaattcttcctgaactattgatattatttgatttaaggacttttgtccaatttcattcaattttactaattcggtgatagttcatgtactaaatcatgctctttgaattttaatatctaccaaatcatgctccccgaactttgacatgtgtcaaattatgtcttctgaactttcatctatattagatttttttttactaaaattagagaaaagtccttgaatctaataatctcaatacttcaggggaaacttttaacgctcttcaaagtttatggggtataatttggtacatgtcaagtttggggggcaaaaatcttaaatagcctctttttttgatatatagccccaataaaaaaaattaagacaatgttgattttgggattaatgtacactttgtataatagtaaaattgtaaaatttgagtt

SEQ ID NO: 206691 - DNA, 766 bp, Cannabis indica
  modified_base (712)..(712): a, c, t, g, unknown or other
tccaaacacaacaacacacgagagaattacactagttccaatcctaagttcaatgtgaacttggtcatactctagtttgaaagcattgccatcaatctttattgataatgagaattagagatatcaatttcaggagctacaaggaaataatcatagtaagtcatccatggtgtaattcctcaacactcattaactcactagcccgagctaacataatcgacaatgtttctcaatataagtttccaatctcagctctctctctcaatttctcacttctaacttctctctctactgtgttgtgtctctcttgtcattgctctacttttttttctctactttctattctcttttcgaaatgagatgagcattcctttttatataggccataggagtcaatatgcaagctgtcctatttgacagttaagttagttaataaacactaactaacgaactagccgaatcttgattggagatttaaggaataataccacataagtttttacttcattgaatttcgtgctttgttttgcgttcttagtttctattttttttttttggtttagttgagatttcgttctctttttaatgtagttgtttttatttaaattcagttatgtgtttaaatctaatttgttttttattaattttaattcaaagatagccttttctaatacatgttatttttttggtgattgtttttttttttgttttntttttttttctttactaagtagtatttcagtattacaagccgaaattttagtga

SEQ ID NO: 206692 - DNA, 843 bp, Cannabis indica
gtaagttaattcacattaaaaaaatagctctcaataatcccattgtttattgtaattagttattataaaatagaagtttatcatattatagcatgtgatttgtttgaaatcttcttttgtttttttttttttttggggaaccaccttggttttttcgcatcgtatatttaattaggtcaaagtttataatatattccatagtaggcaaattgactaagaaagtagaggtcaacactgatgttttgagtaattatttaattgaaaatgatatgttgttggtagagattgattaattaaatgagttcaaattaacgagatatagtcacactcagtcacatctcacatgtgtgaatcacaactgcaagggctactgtcacatgtttattctttttttttttaattaaaaagtcaacattttttttagagaagaaaaatgtatagtttcaccttaattagcatgaagatgctttctttgctacacatacctttttttccccttaaataaaaataaaacaaagaaaaatgctaaataaatcattagtccaatgttattatacaatattatatccttgttaatacaattaaatattaaattacacatcttttgattttagtaactattatgaaatattcttctcattgctacactttttttgcatcaattaaaacttaaagcccaaaacggatacaacaagactttagaagcttaaatagcttttgtagttcaaagttaattattattaattatagtctactacttttgtagtctctctcatcaatatttattttatttgctctctcaatatttgtagggtcaccagtaaattttttaaaaatttaaat

SEQ ID NO: 206693 - DNA, 1191 bp, Cannabis indica
tatatataattttttaataatattttatgatatttaaaaattattaaaactattagaatttaaatatttaattataaatgctcaacttaaatattatataaataaattaaagtatagttttaattttatattttctaagaattctaattataaaattataatattcattattatatttaaattttattattattctaacttgtttataattgaaaaatacatatttaattatttattattattattattattattattattattattaaattgcagcatttttttaatgggttgtgatgtgctttagggtttgtctcgtgtcgtactttaatttgtttttcgagtttattttgtgtcgtaccttcggctagtctatccatgtcattcgtgtcgtatcatgcttaaatatatattttttatgtcaactcgtgaccatacttatattttttccagtctagtcgtgtttgtaacatgtgaaaaaatcatgcccctaagtagttagacatttttctatcctaacatatatagactaccttaacgaaaaaaaaaacatatatagactaggccaaaggttgtgtatatatatacacaacacatatacactagctaagttatattataaagaaataatattaattgagaattataataaattttttgtacatatgatccatcaatacgtgttagtgaaagtggaagctactgcactttggtgaaggtgtgatagccattagcaacattaatggagcaatacaaatctataaatatatagcattggtacaagatattagtagtcccaacaccttcaaaatcaagttttaaaattggttagcgatattttataaaaattatatagaaatggataatttctttctcacaccattaaatattttctaataaatatatatgactatggaatgttctagctccttaccagtagttgatcattgataacaacaactcacaaaattcaatattttatatatatagctctaccttcttcataaaaactcaacattagatgaacaaaaaaaaaaaaaatccattaactaaattctaatcttacactagaaaaagtacataattaacaagagaagagtagtagtagtacatggtttggcctacattatcatcataatccgaatataataaaaaccatattatctaatcaaaaatgatcaaagagttaat

SEQ ID NO: 206694 - DNA, 839 bp, Cannabis indica
cttggatttgcagcaatactcaaccttaccataatttctaatgggtttgtatcgaaatagaatgccaactcacaaccctttctcattggattaattttagtgagcatggaggacatgacaaaggctataagcaatattcttcttagctgagctaatccaaaatcagatcacaattccactcaaatccagtacacttagtagctacactaatggtctaaatttatacacaaaagatctgtcattagtaatctcaattaagccaaaacaatttattgttgaatcaaaactaaattactcctccctcactctcctctccataatgaatgaattgcataaatgtcaaaactcttctgaatgtatgaatacatatcaagtacatctacactacacatagcattttcatccatctttattatagcaaaacaacaaggctaagcaaaatttagagaaaaagaaacaagataatgtcactctttaagcaaaaatcacaaaggaaccttagtatcaatatgaataacagtgtcctaaggatatttctagatcccctatttctcctgttacttgaaacaatttttccatgtgaagaaaatgtaaagaaagaacttaaactacctatacagattccaaacaaactgacttgacattaaaaccaagattcatagaagaactatttaaaaaattcttcaattcattattactaataaatgagtaaacaaccagaccacaagtttatttcatgatctaataaactatcaacttgagaagacccaaatttcactttgcacaattagtttaaaaaaattgagcaaacttgattgatgcacacttagggttcgtac

SEQ ID NO: 206695 - DNA, 758 bp, Cannabis indica
tatcattcgagctataacattcaattaaagctaaacaattcttcatcattcgaactcattcataattagtgctgaatggaaaagcaggaattcagacatgtaatgttattataaagcaaagctagcagcaaagttcaagtatatctgagaatatttaacaaaaatttgtaacgagaaaataatgataagaagtaaaataaatttaaatgacaatacacatctaacagcagaccacgaaaacacaaataaaagacaccaacgaaaatatttctacaaatgatctcagaagagtcatgatgtttcccctgaagatgtgtggtaatattttatattttgaaaaaacccagggactaagatggtttatatcttgaatgaataagatggtacacttactcggtccattgtactgtgatgttttgggaaagccccagggactaaaatacacagctccatgaatgacctaagtctggtaccacaaaataaagggaaaaagagaaaacagtctaaatcatcaaccttgacagccatacataccacaacatactaaaagagtatctagatcaggactttaggagcaaaacttacttatatgcaagctcttttaaacctacattccaaccctggagatgttgatctaagagagctcgtgtataatcactaatctgaaaaacattaggtgatcccaaggtcaactctaagatcacaacaccaatgctccacatatcatacctgtcaatataccaagtgagcattttaag

SEQ ID NO: 206696 - DNA, 2352 bp, Cannabis indica
ttttttttttattattttctttggaataagattgattttcactaattaattattttagcaaaataaataattattgtcttaattgttttggttaaagaaaataatttaaatgggagaaatatatgtttagaagaagatttgtaataaaatccaaaaaaaaaaaaatagaaaatttacatgaaagaatacttttaaacacgtggaaggttattatttggtcaaaaaaaaaattattttcttgaatgataaagttaattttgattgattgtttttttttttttaatttggtgtcaattttttttaaaaaaataataaaattaataagctacaaacaaatacatattaaacaacgttgacttttaaaaattatatagatgaatggttaaaaaaatgtatatataatatagggacaaaaatatagtcaccactataaaattattctatacatatataaaaatttaactttttttcttttcaaattacgatttgagttgctcctagttccagtagtttttatgtagattactatataaattttagttgatatttaagttgctctattggttgctatgtggatgcccataaaaatgaaaaagaaactttgaattaaagtgtaaaaatgaaaaaaaaaatctaaaaaatatattaatgcttttaaaagggaaaaacaaataaattaatgtatatatatgaatatttttatatatattatttattaaattaaaatatgtgaaatttgatattgttgtactaatacagtgtaatattattaatgcgctttaacatttaatattggctaattaggatttttgtccatcacattttgatatttaccaaatcttgctttctaaattgttcagattgttaaaaaatggacaatttttattaatatacctaaattgtaacaaatttatgaatatattgtgaagcatttaattgtaataaatattgtttctgcccctactgaaaatgaaaagtaatatatatacctaacttgttcctgaagcattttagaaaaccactgtcttctccggttcaggaaaccagtgccttttcaatagtaattttttttttttttagaaaagtatgtatccattaaaatcagaagagcaaaatagtccaggatacaaattacaattgtaaagaataactcatccacaaagcttcctgatctaggcccaaagctttcttagctaagcaatgggaaacttcatttgcccctcttgggatgtagctaataagagcttagggaaataagatagcaagctgttaatttcagtaacaaagttgttgagatgcagattgtgagtatcattattacaaatataatccactaaaaccttacaatccgaaacaatactatccggataaagtgaatgattatgacaccaagaaagagcaaaatataaggcatgtgcttccattaacaaaggtgggtgagttcctcgccaaggcattgccaaatttaagagtacctcccctttgtttgtttgaatagtcataccgaaaccattttgtttagttgtgcatcttgagcggcatctactgaaagctgcaggttgtaactaggggcaggtggtgcgcttcctttggacagcaaagaaacatcttgaggctgtctaatagaggaagctttttatggcagctttggtattggtccatgtagtttgttaccttgtgcagcacctgagcaggaggtggagataaaccagcatgtagccaactattcctgcagttccaaatcttccacaacaaacacacaaagtaatgataatttccagcagtaaaagtggtggcagcaaggtgtaataaacccaaacaagttagagaaaaatttttagcaataaaatcgtgaaaactagttcattcccatacctcttggacagcggggcatctgaaaagagcgtgctctaaggtctcatcatgataataacatcaacaacaatgtggagaaggaaaagtttttcatttaaagaggttgtgactggtaggaaggatatcatgataagcacaccaaagaaagtgtttcagtttgggaggtaaaggaagtgtccacatctgtttccaccatgtttgagaggttttgttatccgaagatgttgggtcattttggtggatctgactatgggcttgatggtaacctgagttgacagtataggtgccatgaggtgtaagggaccaataatatgcgttaggtgtggtgatgttggtaagagggagggtcaggatggcttaataaacatcctcaggaaaggtggcttggagatgggcaaggttccattccttggtaggtgttaaaagatctgacactatcatatttgcatctgaatggtgtctaaggtaatgaagttt

SEQ ID NO: 206697 - DNA, 793 bp, Cannabis indica
tttaataaatttaaaacgaaattcgtattgacgaaatttgaaaaatattataattttataaacattgagtaataaatatatatattaaacaaatttacaactttaactctatttacctaaatttgtattaccaaacacattcacaagcacataacaacaaaaacaaaaataatcgttacacgtgtttggtaatatacatttacataattatatatatgtattaggcggcatgcatatgtgatctatatatactctactcttcgagtaaaagaaattaccttgacctcaaaaatagtttaaccaaacacgaagaggataaatatagatgagatatgtatgctataaaatctaattatttagtaatagagaggtggtgagtgcgcacaggcatatgtacatatgtgtatataaatattatatatatagatagaatatgatatatataccttacggaccagagagacattgaaggcaggaagagccttcttgcaactactgattcctgccatttgaagtttacaaattattataatatatcttcttcaacatatgtcacctatatatatacgctaccagctagtgtttgttggtcacataataaagaaggaagaaagaatgaaaagttgtggtgcatctcattattaattgtttaataatggctataacgatatgttttgaaagtataatgcgtataacaatgattttctgttgttggaagtagtaataccctataaggctcattattaaagttgtaataagacagatttgtttttggagtatattatggctacta

SEQ ID NO: 206698 - DNA, 572 bp, Cannabis indica
ttgtatttaaaatagatatatgaaaggtcaatggtgatcccttgttagttagtagtggtaccaccacaactatatatatacgtgtggtcactggttagtgacacattgtattcagtcggtatcgtattggctgcttttctatatcaactctactactacttcatacgtatattgtaattattatatgatgagaaatgttaatttttccatatattagatccaaagtaaattcttacaattatgtcatcatttgatttttaatcaggtcatgtagtcaaattaacaacagtaagtgtgattattgattttagaatacatattggttagcgattcgaccatcgaataggaccaaatggtcatataattagttaaacttggcataaaatacaaaatattgacactaaaaactgaccaacactatcttgttagattagcaaaaaaagtaataagtgaaagatagtaaataagagataccaaaatttataataatttacttcccatgtcgcgatggtaactgatcctcaccttgcccagctatttgcagcagccggggtggagcaagccaagcctct

SEQ ID NO: 206699 - DNA, 1068 bp, Cannabis indica
aaaaaaaatctaaaaaattaattattgagccacttaatttttgaattaaaaagattgaaacttctaacaattaaaataaataaataaataaataaaatctcgatagaatcaaaatacaataaatatttgtattgattatgaatattgaatgtgtgaaagaatacaataattgatacaacatatatacttaccaaaaatataacacaatcaattattaataccttgtatacaaaaaaatgaaataaaagattgttcaaatattattttcagaaaaacatgataaaatatataaataaatggtattaatatagtaagattaaagataaatgtaatataaatttcccttttttatattcttggatctaaaattcgactcctctctttttcataagtgaaactgtaaaagcaactttcccttaagcttaggtcaaactattcaactggtagtctagtactatatgaagtgcttccctacttttcacatttctgaccaaatttctttagtaaataactttattaaataaagctaattaatcgagtcctctagttacattaaataataatgtctattaaaaatattattaaattccaaagaaatcctcatacaagattgaggacttattatactaaataaattaaataaattagggcattattggtattaaaaatataaaatccaaaattttgactgtagaatgtggatacattttccttcttattgattgtacatacattttttgttggcccacttttgacaagcatagtaagcatcattccttagagaatccacaaagctagaaaggagcccaaaactttgcgaaaggagcttgctcaaacatttagcaaagttactttattaaatatttattctttgtgttttatgagattacaaggaactcctaattaatttgacatgcaaatactaattaggacagattttcttgtatatatttaatagaaataagaaaataatttacttataatcttcacccctagcagtttgcataatgataataattgccctaacttcttttaactcacataaagtctatatttagtaagaagaaa

SEQ ID NO: 206700 - DNA, 1038 bp, Cannabis indica
ataaattgtaatgaataatccgattaatcctataacaaaggggtggtgatgtttgtacgttgcaaaggcccgggcaaccagccgatgtaatggtattggatggccaactctttggtcaaattatatattgctattaaaggtgtgaaatgtcaaagcattaagtaaagatgtgcaatgaaatatagctcatgaaaattcttgttatttaaagttaaaatagagaagtggatacaaatttaagaaaaatatgacatagaaaatgctttattttacataaattttaaaacaacaaattaataatgttgttgtagagtattattattcattttctaaacatattttattaattttttaagttttaaataattttttatgtatgattatgtgtgtatatattaatattatgtatttaaattgaataagatatattaaaagataaaatagaaggaaaaaaaatagagaaattgatagattgtataatgtaaatgcttactataaaatagataaaatataatttatgtgatgtattaattaaaagaatagaacaatgctctatagataaaataaataaagtaagaaatttaaattaaaaaaattaaaaaataaaataaacaaggtgatgtgagtgctcttatgtccaaacgtgacttttccttcagaaccttatagaatgtttatgatgatgcaacaatatttaatgtgggtggcacttgatgatgttggtagtgataattaataattactttatcatcttctctcatcagatgtgtccaaataatgatggttaatttaccccactcacagacatgtttccgtataaactcccttttatatattaatctatatatatatatgtatataacgggtatatgtgataatcagtttacatgctaaacaaattaaacttaataacaccatattaatgcgaatgtatttttggtcgatcctccaaggcaacagatcagaaatatataaaatgaaactcaattaaaaatctcaaccctaccacctcatttacctcaccactcgcttacgtat

SEQ ID NO: 206701 - DNA, 586 bp, Cannabis indica
tattttaatctttatcggttacttaaaaaaaaaaaactctaaactgtaggtatttatgccaatttattttcaccctaattaatatatttaagtgtggtattgtcttttctttttttatgttaatgataattgatatccttggattcttgatgattttattttcttttacaaaaaggtaaaaatgggttactatatatatgtccaaaaggtaaaagttaaaagatatatatggtaaaatgtaataattttcctatttgttgggatggaaattaataataatttgtgcaattttagagacatgtgtagtacaattgttaattacaattgccatatatatatatttctttataattgtacgttaaaagaccccacaaaaccttatctcgaaataaacttattaaatgcttttgatgaaaaatctatatcaactccagtaaatcattcacatttctccatgcatagtaaggtatccaatgaaaagataaaattaataacccataattaattaatcagaaatttcgacccacatgcatgacctaacttatattgtgttgtgttatgatgtgtccttgccaaatgtcatgac

SEQ ID NO: 206702 - DNA, 2902 bp, Cannabis indica
ttaccaaaaagctctagatcacctaattagaccaaacaagtataatccaactgaaatatgcatcatccatcaacaatataaaaattcaccattaatgaccaagtttgagctcaaaagctcatacttagctcaaactcaaccacaatcatcaaaatagccacaaaatacataataattcaaaaataacttcaaaagataattatatataacttcaaagaaaacagcaactgaacctcacaataatgcatggaaacttaacttaactatatctaaatcacaaggaaattaaagaagaagaagaagaattaccatgaattatctgaaaaacctagctcaaatgatcccctaatccctttgaaagggataagaaaatctagtttttcttacttccttgtatgagaaacccaaagagagagataactccaaaattttatttttactaagtaataaaaggataaatatcctaattttagcatatatctatctaataaaacatgagtttaattaaaaacccactaatttaacaaaagacaaagtaaggtgaaataacaaatctaccccgtgcataaacataaagtaaccaacaaacttaggagtaaaatagtcctaaaccaaaacccaaacactgccgacatttcaaatgtttaaaaaaatattatcccgctaaaactaaaatacactaccttgtctaagtgactctttaggctaactgtcgcatcactattatcgaacttaaaatacgaaaaacataaaatttatccatgtcataatttataaacaaaaaaattcatatataattgcatacgttgaagtctggggtgtttataaaatatcaaatccagttgaatttgcacgatttgatccaaaagtgtggatcgaattgaaaattttaaaattcttacttgtgtaaatttaaaattcgtacttgtagtaaattggatgttgattgacatgtaaaaataacagatactaaaccaatccacactatattaatatttaattttttttataaattatgtaatacaatcgatattttaatgtaagaaaatagtaaatttgaaaatataatacctataataaaaatatttcaaaacttaataaaatgtacattcaattcttttatataatttattttttgctatatacaattcgaacaaaattaaaatatttctacattacaatttttttctttctgtgaatttattattttatttgttgttagagacataaaacaataataatttgtttgaaaaaaaatatttttaataaatattaaataatttaatattaaaaaataataaatttaaaataacttattcaattctcacttttgcatattgcattacattgaatttgagctattatgtaaactagattgaatccaaaatataagatcttcacctaatgcgaattggatgcactatgaacaaaataaaatagtataaattggattggataaacaccctaattataattataataaatattccacgtgttttttaaaaaaattataatgtcaaaaataaagcccttattcttttctactgtgaaggtgacgaaaactaagacttacataaagagagcgtctcgagtctctgaacttgaaaagagactcattcaaaagctttgtttttctgtaacaaaattcaatagatttgctttgctgcaatcgaagctaccttcttgctttaacgcctgtaagtttttgttattcgcctcacgtgtgtattactcagatctgttcattgtccttacagcaaattgaatttcgaccataatattgatttgtcattgtgatcgattcgagtgttgggccattttcttcaccagcttattcatcaaatttagtgtgtattatcaattaatttttctttacattgtttttcttgtagctaatcatagttgcatattcttaaggtgaccagttatccaaatccaaaatgatttgacaggaaaatgtgtgtatgtgtgtgtgtttttattatcaataaagagttggttgcaattgaaattttattatatatttcattaatttttgttgggttaaatttttcttcttctttttcttttatggtttcaagtgtttgaaattggttttgcttaagttgactgtgatggatggaccttggttatttaccttttgcagagcattgcagggagcaaaagagaatttttttttttgggtctgttatccatgaaggcactcattcttgttggagggtttgggacccggttgcggccattaactctcagtgtaccaaagccactggttgattttgccaacaagcccatgatattgcatcaggttttactttaaattatgtattttcctctcgttttttttggttgggggtgttagattatggcagttttgtagttactttcaaagtagggggggaccatctttagcttacgttgtttcttatccaaattatatgcggttatgttgaaaagtctgtgtctttataataatggagtcattcaatttacaaatatgagacacattttctttgtcgtctcctttttataaatatgagatgcgagtgtgtgatgcaggggtcaattgctgatgtttgcttgcttgtattcacttcccttgtgacacataaactcatttatcatctttctgaatttgtgtaacaagattgaagctctcaaagctattggagtaactgaagttgttctggccatcaattatcaaccagaggtacaatgagcaaaatatatatagaattagttttttctgctacaattatggatgcttatgaaggataaatatacattctttttacactgtgtttcaggttatgcttaattttttgaaagattttagagtaaaaagctcgatatcaggtatacttgctcacaagaaaactgaaccacttggcacagctggtccgtt

SEQ ID NO: 206703 - DNA, 812 bp, Cannabis indica
aactctaattatactattttgtttgactctggggctacacgctcttatgtagcatcgagggtacttagtcagttgagtaggcctagtgacacctttgaggtggggtttggaaccctgctacctaatggagagctgatcatctccagcaaatgggttagatccgagccaattaaaattgaggacagagaactaagtgtcaagttagtggagttatctttggtcgagtttgacattatactcggaatggattttctgtctaaatactcggctagtattgattgcaaatgaaaaatggtgacttttcaactagagggtgaggaaccatttgtttatgtcgggacagtttaaggttctcgcgtcccaagaattacagctctgaaggctagagatttactacgcggtggatgtgtgggatttctagcggttgtgcttgattctgataggcccaagacacttgggctcgaggaggtcagttatttgtttatggggtttgatcctttgagtaataacttaagagataatgataagattaattcaacttaaaactaattaattaacatgggatttactacaaaatccactcaccactaaaaattaaactaaggcaaaattactatttcgtcatttttcttcaccataaagtaacttaaaacttaggggtattatggtccaaattcataactccgaatactctcgacattttaaaatatctaactatattgtcctgccaaaaccaagatactaaatcttatctaaatctctataggccaaccactgcattatactgttacctggcataagaatatgaaaaa

SEQ ID NO: 206704 - DNA, 537 bp, Cannabis indica
aaaataatagtcaaacttaaggacatttttccctttagaaatacaaccatgattagaattagaaaaacgagttaagtaatcagctgcctaagtcccgaatcgtttgacaaaataaactcagataaagttagatgaaaaagattgtagcatcagagtttaccttaagaacacctatatttagtttcctccactactcagaagactcacttaaccgtaaatttatcgcagcagttcattcaattcattagcttgaatactcaactattgtacaagatacgtaactgcactagtactagccacaaataacttattgttcacaaccacataacaacaatttgacggcaatgcattgaataacaaagaagacgaaccaataataaaataaaattatgtcatagagacaagactaattgcagtaacttaaataaaagacactcaaaactatgttacagaaaaaattaattacattagcaaactcacatatccgggccaagccacgcctaagtctaaggagaacagggacggacccactttgat

SEQ ID NO: 206705 - DNA, 857 bp, Cannabis indica
ccttcattgggctactctcaatgaggtttcgccttccctatgtaataagctctagaacagtaaaatcttggagcgtcacaagatcttgtggtggagtatcctctctggtgcgctcccagttcgatcaatcctcagcaagagaattcctattgacaatcccctttgtcctatatgtggaaatgaggatggatctagggaacatctttttctttagtgcaacttggcttttcatttatggcagttctccccgtggaatatcttccctatgttagatagtggtattcgtatgtgggactgggttaagtccataagagtttaaaacacaaggctattgatgtgaatggagtctttttgtatgcgcccattgcggtatatactatctggcaggctcaaaatgataaggttcacaataacaacctgggtagtattaaattttatattgactccatctctttttgttattaagattatagagcttcatttggtccatctcaaccatcaacccgaggcaatgtctggcgctccctccgctgggttagatcaaactgaattgtgatgttcgtgtggggttagagcacatgtgcatttctgttgtcgctagagatcatcagggtttggtgtgttgggtggttacgtctagacttaacttcacaaatgttgtgtggagaggcggttgcttgttgtttggctttacaagcgacgatcaagaagggtgcaaattttgttattgttgaaagtgattctaaggtggtgattaacactctcaatggggtagattttagatgggagattaaaaactactcgagtcattatcttagcatctcttctattttcgtggatgtaaaggccatacctac

SEQ ID NO: 206706 - DNA, 745 bp, Cannabis indica
gaaattttactcaatttggtaaaattaccaaactcggaaacagagatatattttacttataacttcaaaagtatatctactcactatctcaatctctccacccaaatccaatacatactttgattttttctcactcttaccacactacaaactcacactcacactcacactcatttttctttcacaactcactaattttccacatcttctttctcacacacaaaacacatatataggaaaaaataaacttttgcatacattctaaagcttttttttaaaaagattcttcaaaattagctgacaaaaatattttacacatattaattatctaaaattagtaaagtaaaactaatctaagtcaaactattcactatatttttttagatgtgtggcttttttagcagtgtctgaccagtatgagtgtggtctattttatcaataaaaattattttcccttaagaaaaaccaattttattataatcaaagataagatatcactgaacatgtcaaatttttcaatagaagatatatgatttttcttaaagtatttagatttgtaggacattattattactttttattgttttttttttaccacttaccacatcaacatacaaaaataataataaaaaaacacaaaatatcagtaataaaacaagctgattaggattttcccttctaaacttttgtacatgtatcaaatcaatgtcctctaaactttttagtccgttaaaaattccccatg

SEQ ID NO: 206707 - DNA, 589 bp, Cannabis indica
gatttaataagagaaaccctagcagacgatttgatatttgaagagagtaaaaaaaaatagattagatgaatcattgtgtgatttatttttatttataaataataatacactaaatcataataaaaatatataaaaataaaaataattaaggtgtatttggatatggagaaatttgattttggtgtaattagaggtaattaaataatttgacatgtttatcagatcatataattacagtattgtaattatgtaattagaattttaatataattgagaaatttcaattagctaaaaacttttaattttaaatattaaccatgaaaaaatattattttataactgttttagacattagaaatctatatataattatcactttatattaaaaaaaaatacattttattttaaaatacaatataattactaatctcgtaattactaccttactaattacatgacttattaattacacactaacttcaaaatacgttcttatacattgttcgtaactaattaattatcattcattcatgcatgtaagtgatgttaattatatatatatcatctcataataatgattctaataaca

SEQ ID NO: 206708 - DNA, 573 bp, Cannabis indica
aaagaaatggaaataatggttcaggaaaaaggtttgtaattaaggcctctatggtaaagtgtaagttatggtatctatattaatatttcttacaagtgtagttatattgatttgtgtcttttcaaaataccagggataaactctttcaagttttttctcgcttacaagggatctttcatgattagtgacgagcttctattacaagcatttaagaagtgcaaatctcttggtgctttagctatggtccatgcagaaaatggagatgctgtgtatgaaggacataaaagaatgatagaacttggtattactggtcccgagggacatgctctttcaaggcccccagtggtaattatgaaatatgttctttatgcaaactaatcttggctgataactttgctttccttaggggccatgtttatggtcagatgtattaaatacattattgatgtcctattgatcttgcataagttgagctcatgtaaatccattgctcacagttgcagcactttactgtttttcctgtatagtaagtattaatattgaacggagaagtgttcatcaataaaaaagtag

SEQ ID NO: 206709 - DNA, 664 bp, Cannabis indica
ctggcattgagtcctgagaagcagcagatacactgttagaagacaaaaaacaatggtaatcatttaagtaagaaggcttattgagttttctaacaggtcgagtatgcaaaggattaggagaaggtgtaataggatgagcatgtctactgtgggacaaaggcaaaacagagtcagcattttggctgagagagtcatctgaggaaggctcagtaaaaacagcagagggtggtgtaggatgagaaaaaaaatgttcatactgaggtggtaaaattgcagcagcaacaaatgggaaaatagtttcatgaaactctacatccctggaatagaaaactttgtttgtgttcaaatcaagtaacctatatgctttcatcccagtagggtaccccaggaaaacacatgatgcagccctaggtgtgaatttggatctagcatgaggtaaggtagatgcataagctaaacacctgaatgctcttagatggtcatgaacaggtggtttgtttcgaagcctttcaaaaggtgttttgttttgaagaagtggagtaggagttctgttaataaggtaagtggcagtagtgatgcaagtgtcccagtattccaaaggaatgtgagactgaaataacaaggctcttgccacatttaataagtgttggtgtttcctctccac

SEQ ID NO: 206710 - DNA, 993 bp, Cannabis indica
ttagtaatgtgtaataaaaaatgtagttttcaacttattctttgttttatatttaggtgggcttgggtatactacatttctgcaaaatgtatacatgtttatatgaatttttgggccctaagtttgagttgggcttaggcactacaccaatttaatccggcttaacttgagattagacttgatacacggtgcaagtgcaagtaattataatataagattcatatatcatttattaaccaaaaaatctgtaaaacctaatattaataggaaatttacataaattattaattttggtaaatttaatacatttttatattttcaaagtattcaaaaaaataacacaaaaatacataaaaaaatagaaaaacaatatcaaaataatatataaaaaaataatatgtaaataacaaaaaactaacaataaaataataagagtacaatataaacatacattaaaatactgtatattatgcaaataaaatcttaaaaaccataaaaactatttacaatttcacacaaccgaatttttatatatttttcttgttagttttgtattattttttgaaataatcactatattaaattgcactaataacgttatattagtatgtatagtacttgacaccttaagattattatcaaagaaatttaaacaacaccaaatttgtgagtgtattcaagggttgcctaaatacacaaaaatagatatgcgaatacttacttaaaatagtgagtactcgaagaatacagtgtataatacacacgagtattgtaaataatataaaatagatacaaaaattatagtagttttgtaggaggtttgagctcaatcaacctgattcactgttgaaaaagagtactctaattctgtatttttattcttcaaatcaaccctcctttgaatggaaaaggaaatccctacttataagtagtggacactggttacaaataatagtaataataataggactgttacataataataataataat

SEQ ID NO: 206711 - DNA, 1405 bp, Cannabis indica
gtatttaattcgtcaaaaaaaaaaattgacatataagtgtatgaaactaaaagataagctatttaaactatcttttttaaaaaataaaaagatgttgcaactttttatcaatgtaatatgtgattttgtaatactctaaagattagtaactgaattagcaaccctaactaaattaattaagtgttaatgataaattatattattatatgatttaatatgtagaattattatgatttatcttttgtaattttgacccgagaagggtaaaattataattttataatatattgtgtttatagactgcattattatatagtatgtgtattctgtctttctgcgggtgattcctgacaagtcggtacggtagagtcacaattggatattttggagccgaaccgggttcggggcccaaaatacattttcgggattttgttatggccttaatgtgttaaatgagaaaattttaattatgtgatataaaaaatatttgttaattaatttgataacgattacttagtcgatatcagtggagaggacatgttctataaattttctcacgatttagaaaattaatttttacaatttaatttttcatactggtaaatccctctaataaatatgaacgagaataattgccaatgtatacatttatatacatgtgatactaaaaccttgaaccaacgaaaacatgtcgtgtatatataagtgtacacagtaataatctaattaattttaacaataatatatatttaagtactttaaatttacaaatataaataaagttaatggccatgggatattaccaacaaaaaaaaaaaaatagaaagttaacagtataaaattaaaacataaaaagttttcattgccaagtttgaaagcataaaagtaaaaaaaaaaaaatgcattgacacttagagcatgtttggtattgttttctgttttttgttttcaaaaaattgtttttagaaatgagaacaaaaaatagtttttgaagtttttaaaaacaagtcatgtttggttagtgttttttaaaaacaatattgaccaaaagtgaattggtttttaaaacagaaaacaacattttgttgttttcaaaattcttgttttttgtaactttgttttctgaaaactgttttcaaaaaacaaggccaaacaagccaaattgtttttaaaaacaattttcagttttaaaacaaaaaacaatttttagttatgatgctaaacatgcacttattctttaagagtgaaacaatgatatttccttaaattatttattagtttgtgcatgaatgaaacacttgaagtgtatgaaatttgtaaatacttgatgaaaataaaatgtatatgttttgccatcatctataagataggcagcaataaaatttttaaaaatttagtttcaaag

SEQ ID NO: 206712 - DNA, 813 bp, Cannabis indica
aaaaacaaatatatatttccatttggtatgaagcattattagaataggaaagaataaaaaaatatatatatattactaggttttgtcaaaaacaaaaataataaataaataaaatattactaagtggcaaaacaaaacacgtgtaaaatgtaaggctgttcttgtttgacacgaagcacacaaatgagtatatacgtgcctatgcaacatcgttgacttgtaagttttcattattacctcgtgtaatcctaaattaataaaataatcaaactactcataatttgcactcattaatttaatttgaatttttaaaaatatttttttgactttcttaaatgttttatttactatttacagcataaaatttttatttgtaaaaatataattataaagtttaaaaatgataaaaatgtatttaatttagaaaaagtgagaataactgaaaaaaaaaaaaaattaaactcaagaaaattataaatcaataataaataaactataaaattacaaaatataattagaaaaataacttcattttaattataatgcatatttaaataaattataaaacaataaaaaaaatattattttcactaaaaatattgtgttaataaataaaaaaaaaggctaaatagtaattttactcttcgaattttgacatgtactaaattgtgccccctaaacttttttaagccgttagaaattcccctaaaatattgaaattgttaaatttaaggacttttgtctaatttcattcaatttactgtttcagtaattgtttatgtagtaaatcatgctccctaaactttaatatct

SEQ ID NO: 206713 - DNA, 610 bp, Cannabis indica
tttttcttcttctttcttcttcagaaccctctcgcttctaacgcttccacctagctttcccttatatgcaaaccccaaccccactccagtgcttcccgggccggaactctcctccgatctcgatctgtcctccgatgaaggcgacgacgatgatgctgaattgaaactctccatcctcttcagctccaaagcttccttccttctcttgtaacgaaaccacgccgcttgtacgaagaaagccgcccatgttcgccattgaggggagtgaaacctgaacgtttgtcgtatctgtttgctgtgcagtcgccaaaatttagccgccacgaattttagatcccggagattagagtaaaggcctcgacttgcgcaatggctttgaccgtacgtgttgacgacggtagcaccacaccaggtcaaggatcaagcgcccaagttagtagctcctcgccgcagaactcgccgggaccgatccggcaagagttgaagaacccagtacggccaccgtttgtggttcatgaatccaaatggcctcggataatgaagagcattgcgttgacacgaatccaccgtctaaagaggttaggggttgaattgcagttgacacgaagaa

SEQ ID NO: 206714 - DNA, 1422 bp, Cannabis indica
ctaatattcaatagcaatactcttctaatcggtgatcatcaccacgcacaataatattgttattatatcttattcttcttctttatgagtttcaacataactaatagttacttttatgagcttaatttatcttttacatataggacaaaataatcatgattattaaacaagtattgtattaatttatagctagctggttggatctagtgctgtgaatatgtggttgtcataaatattcgtcgtatcttaacgtgccaaagaaaaaaatacaatttattttgtaccatgctataaaaaattataggttagatcacaacatgtcatgccattaaaattcgagatatgttatactcaaattcgtatcatgttcaagtttgtattgtgctttatataagttaatttattttcttatacagactcaaattcgtattctatttatttttaccaattacttttacaattaagatgataattactaaaattatgtgtttttatatcttctatttatttttttttaatttttttaacaattttcacataaaattatataaaaaaataaaataattaaaatttaaatatttacgaataaatattcaaattattattatcaaataaaatatttgtaacatgttgagcttcaaagaacactaatatatggtgtcctaccatttttataagatgtaatattattattagtacaatttaatatcgggttccagccacttattttaatttaataatatttataaagaaccacaaactaattataagacgtcatgtcatagaggcgttaaacactacgctaagtactttggtgcctcatagtgtcgtgccatttatagtatcgtattgaatcacgtccaaacccatatttattcgtgcctaatcgagactcatatcaatttcaagctatttcaaaaaagaaaaaaaaaaaaaacaagcccttatttagagcacgaccacttgaatctcccatttgttattaattaactaaggtgtcgtttgataacatttttattttctaaattttttaaatcacaaattgaaagtaaaattttttaatttttaaaatttttgtttttgtaaaaacgaaaataacgttctgtaactacttttgttttttcaatttttaaaaacaaaaaacaaaagtagtgttcgataaacttcatttctatttttattttttttattttaattacgtcgggtctaggtccggggtcggattcaggttcagatcagaggccgggctcagcgccagggttgtgggggattttgggtccgatctgattgaatctaaagtattgattaagaaaaaaaaattgtttaaaaaaataatgttaagatttttttttttttaattatttttgatttctctataaaaattagaaagtaaaaacagttttacagatatgtttttgaaaa

SEQ ID NO: 206715 - DNA, 808 bp, Cannabis indica
attaaaaaaaattaaattagctgcgggaaaagcgactacattttctaatttattaatatatcactaaatattagttaatattttttaaaaattaattatggcttttttatagtcacccgcatgaaaaattgaaaataaattgactaatatacgttaaaaaaaaataatcaatgctgatctaattagcaaaggaatttctctctctctctctatttatcttccttacatcatcaaaaccctaatttattttccagacatttccatctgatctctgtataccacaaccaccattatatcataaaaaccatattttatttttgacacttttccatctctctctctctctcaaaccttcctgttagtttggaaaatgggaaggaactttagatctcgacttaaaacaccttcttagtcatgtaatggtcatagatgttaaaaagaaaatttctcagctaaatatgtctctgtgcaggtggacgtcgttgaaatttgtcgtggatctttggattcatggttaccggagggttgatacttggtgttggacgggcaaaagggatctgaacttttttttttatcttttaaagtatagaaggttagagtgatagattttgtttgatttcttttttggtctaaacttatttattctaaattattgttttagaaatgaaattaataaagaaatatttaacattgtttattttctaattatgacgattaatgaaaatttatagggcttttttcagttttaattaaaaaaaaaagtaacaatatgacaaaaatacagtcaaataaacaaatataaagccca

SEQ ID NO: 206716 - DNA, 554 bp, Cannabis indica
ttgtatatatattttctaaaatatatataaatatatgaggattgaatttaatcagttatttttacatatcaatcaacatttaatctgcacaagtacgaatgattgcactttacgaattggattgtgttattcacgtttccagattagtgacatgtgcatttttcaaaaccaaatctcagccaaagctagcccattcctgggcccaatcaagttaataagtcaacccacctacagattcaagctatggctctggatctaggttgtaaatccagcttacaaacatgacaaggtcggaccatttcggttcgagaaaatgatgtttggcccagaaggtgaaaggtccatcatgatctatctagatgccctcatgggataatctggatacaggcaattgaagagacatttcgagacctccggatattatcctatgtggcatcctccagacataggaccccaccactgtcaggggtttatcccttgcatcagacccagggagtgtgtgcaccaccaaagggcaactatatttggttcaacgccatgttctctgacattct

SEQ ID NO: 206717 - DNA, 1085 bp, Cannabis indica
ttttattcatttgtatatataattttagtaactattattatcaatattgtatatatatatatatatatgaaattttcttatataatataatgtttgtatatatgaatcttaacaactggcgttcgtacggaaattctttttattattgttattgttataacatttatgatagggcttggttttgggtttttataaaaatattaaattttaaataaaaatttacaattttactgttatacgaaattttttacaaaaatattgtatttttatagggtaaatagcgcataaatacccaaaatcttatatttataagcggcataaattcaatgtttatttttagcagcataagtactcaatgtttgtaaaactgtaattttattccagtttcgtcagtacagactctgttttaaatttattaaaagaacatttagaagtaactgatactacatatttctatctagacccaatgatcaagaatttaggccttatatgtgccctgttaaaattagaaaaaaattacagttttacaaacattgggtacttatgccactaaaaataaacattgggtttatgccgcttacaaacataaaactttgggtacttataccgctattttacacagtatttttgaaaaaaaatttccatcctacagtaaaaaacgtaaaaaagttaaaaagttaaaaaattacagtatatggtgtgaaattacattacatactaatatttattgattgtctttgccgttctctaacatttattatcataaacgaatgcgaagaatcttccctctctcttatgaagcttctatctaataattgtgattatattattatgtgttttatagtttaactagtaaacgtaaccacattttgcgcaattatatagtagaataaatataaattttggttatatatcaagataagttttgtaatgagttggttagttaggaagttagttagtttggtgtccttaattcatttggatgtatgctggttttggctactggtataagtagcagatattgtattgttgtaactaattcaattcattcaatacacaattctgttttggttctctctctctct

SEQ ID NO: 206718 - DNA, 1082 bp, Cannabis indica
cttttttcttttaaattttcttttctttatcaatgatcagatcagatgagcgaattttcattcatttattgtgatataaattatgataagaaactcataaagaatcccaactgaatagaaagcgattcaagaaaacttctgtctcaccaatttctcacaactaagagagctttttccacattgagaaaaaccatataattttaaagcaatttcaccattagttgtttaattattgtttaaagtaaattaaatgaaaaaagactaaagggttactaaagaacaccataatttgtgtattaaatttccttccttttgcttgaagatttccagtgatttgagtctctttttatctcaaagaatcatcgttttttttttttttttggctttttgtcctttcaagcaactcaacaattatgttctctcactatattaactccccccaacccacccaccccaattgagagatcccttaaaaggaaaatcaatctgactttgccatcatcttggggctaagcttatatgataaattatatatataattgaatatactacgtacaaaagctcattttacttatttgcaatatcttattgtactgcaaatattaactactagaggttgtcatagcccaaagataatattaattaaaatggacagcttatttaactaattataataagcttatggtaatttgtaacgaattcattgttattgatataaaatagtgccaaaaggtgaaagacaacttgcccctatgtaatttaatcatcccacgaggcagcaaacacatttttttttctaatattaaaaaagaaaaaaaaatcccatgatgaggaagtaattgtcatcacagaaaataaatacacttaataataaaacaaaatttaaaacataccatgttcgaattatgactatacccacttccatatctgtctcaaagtccactttcacaagtaaaccattgaagaatttattatttttgcctcttagaatatgaatagttccaatctaaaaaattaagtgggctatatggctggatccacagtacaatagccttcgcgtgacataatacataataaaatga

SEQ ID NO: 206719 - DNA, 726 bp, Cannabis indica
gctcaccacccttgccaagttgtgcatgtacaatgggtttacaaattatgttagtgtcttaaacaaaacacatgtaagacttatattctaaatcaattaatatggacaaaaacataattcatcaattactttgcatcttctttcaacaaattcaaaaactaattctggttacaaatttaagacacaaaatgagagtctgtacttacataatcatactaaaattacaattttcttaacattagatacttgtccatacttataaacttaaaactttgaatacttataccacaaatactgtattattgtttaaaattatatgttacatttattttaaattattcaattttgtttcaattagaaggagatgacgagtcacaaacgagcattccaattagtatctactgctgaatctagtgcttcttgtaaaggtaatgatgaagcaattggtgaaaaaagagttactgatttatcaggtcaaaaagatttcataaaagatttaaaaggttctcgtaattcatatcgcgatcttcgtgagagatctaaagccatgtactcattcactctaactatgtatcaacatatgcaacaacttactaagtttgtaccaggatttaagtttgaacttcctcctcctccaccagtacccgattcacctgataatacagcaaaaagaaaaaactccattcaccttattcaagtgatgcttcttctgatgaagatgatgaa

SEQ ID NO: 206720 - DNA, 666 bp, Cannabis indica
tggcttctatttataataatttgtataggaataaaaaagaaagatagagagagtttcaagggttgttgcccttaaaggattggttggcattgaaatggtctaattaattaattttgattttttaaataaataaataaatatctttccatattcaatgtatgattgattatatataaactaacaagttattatttagagaattatttcatatattattttttatttttttaaaaaaatttacgatttggattgttttgatggtttttatgtgagttgctgtgtagattttgattgtaatttaagttgctctgttaattgctatataaaaatctatatagatttccataaaaaatataaaaaaaaaaaactatttcgaaaaaaataaaaaaaaaaaaaatcctttaattattattagttgatattattaattttgagaactaaaaataagatattgtcaatattagtggaacccaactcaatcaaaaccatatatatgtatgttgaatttaattttattaataataaatatagaataagatataaatgaaaaataatatcttttgagactattctttactatgttatattgttcttgccactacttttggtttggaaagtttgtgcctttggtatataatagtactaatctacagctattgtttgcta

SEQ ID NO: 206721 - DNA, 945 bp, Cannabis indica
gtttaatttgtttatgatgtgtgacgaaactctctagactctaaatttttaagtttaagaattgttatagtattgaaaataaattttaaaacttttgttgcatgtacacatggctggccctgagttgaaataggtcatagataaaaaaatttggggcccttattataaagataaatgatactttaaaaattattaaaaaaaatatacatattttttaaaagatatttttttatttgtgctcttaaaataagtgggccctaagcgcgggtctaacccacctatacttaaagccgaccttgtatgtacatgttaagtaattgtttgaacttttacttcgatttttaaaaacttaaatgtgatttgattataatttaaaaaaaaaaataaactctccaagctgaaagtgtaccgaactttacaggggtatattacaaatttttataatattatttttgaacaagcacaataaatcacttaaagatgaccaataagactagctttgaatttttttaattcatcaaattaaaatatatagaacactagataattataccaatagtaatataattcttatatttattattaaggtgggcaccttaggttaaattgacttgtcattgaaaaattgtagtttcaagaagggtctaaatttaataactaaaacctatttatgaaaactaaatttatgatcaataaataatctatatgtgattggtttaataaattttgtcttaatatatatattgtaaattaaaaacatatttatatatatatataaatggatatgctcttaaggggtattacccatgtatgggtattttattcttgaccattggatcaaatatctaatggttgatatttataatcattaattaaatattaaaaaattaatatttcctattttgttattctctatattcctaaaatagataaaactattaatag

SEQ ID NO: 206722 - DNA, 1097 bp, Cannabis indica
cagtgcacaacaccaactgttactgtcaacagtacctattgggtcacacctacctaactcaatagcttaagagaatactaaaacaatctattttaccccatctgtgagattttttttcacacaaaaaccctaaatgtggcctgaatctgtgcggctcaataagcatggctgtctataaatatggcattttctcttccattgaaagggttgacaagctgaaaaataacactcaagctgtaaaaatcccatagctaaaagcttataaaactgtatcatgaaataaagcttgttgatgcttacgtaaaaattgtatgttgttttctctttattcttattttcttttaacttaatctcttttattattattttaccaaaatctcgataaacatcattaacgataacaaataatgtgagtgaaaactcaattcaaaatcaagttcttcagatattaaaaggtacaacaaagtacactcagaaaaattaaaaaaataaaataaaaaaaattcatagaaagtgagtttttattcttttctttttttagtagttttgtcaatttaaaacccaattaatacatttacaatataatggctacatttttatccatggtgtaattttttggctaacaagtaattgaaactaggttgagtaagtgatcctttaagaaacatatcagagaccactttatacatgccttcagtaagatgaactccatcccaattcacatactgagatgggtttcgacatgctctaacagaaggtgtcccacaaacagaaaacacatcaagattataaggttcgcccatcccacaacacgctttaaatgtctccttcataccaaacttagctggactttgcatgacggttttgtaggcagtccaataatcagcatatattattacagcttggggaaattgtgttcgaagagatttgaccaactttaaaatggctaggttgtgagtgtaactttgattgttcacactcttgacacaacctatgttgtccctatcatcttgggaagctaaagtcatagccaaaggtaagcatcctgacattggaaagccttgaactacaacatactttgcacctttctttaacaa

SEQ ID NO: 206723 - DNA, 531 bp, Cannabis indica
acttgtcaatcaagaaattaacagaaagaaaggtaatgggaacaaacctgtgtggttccatgtggcagacagcagaaaacagcatcaaccccagaaaaatcagcatccttgacagcaatcaagttcggtaaaccctgcaaattcgtatatgttaggaaagcaagtcacaatatgatcaaacaatttagagccaaaatcattaaattgacatccatttgaccacttgataccaatctaaggataaaagatacaggccaggcaacaaagtcaaccagataggaagtatcctaaatggaaattgatgatcagatcaatgtttgcattgaaaggctactttcaatttataaacttcttacttacttgtgtgattagatgaggaaacacagaactgagtggttggccagcttttctgtcagcagttaaaaaggaaatgccaaagtgtggatggtttactagaagccgaacaatctgccaaaataaaaatgcaatatgatcctttaggctataaaatcacaaacagagacctcaact

SEQ ID NO: 206724 - DNA, 1427 bp, Cannabis indica
tgctaatctgatgtaatttttatgaagaagatataatctaataaataaaccttttattcttctcaatctcaacccctatgttatctatcatgaatttccctaaatgttgaatacgagatataaagttgttgagcattgttgttaggcaccatatgatgccaaataccatactgacataatgcattacaattggttaacagtttcttatattatttatttaattaaattatatgggaatcgatattaatttacacaaataatgatatatcagtgcttggtaccataacatgacccttgcatttctcaaacttgtatttgattaaaagattaaaggaacatttacattttaaaacgtaaagaagaaatctctacagccatatgatattgtccaaacatttttgtcacttaaaaaacaacataagagacctcaatgtctcagactatttttggcattaagaaaaagtttgctcctttggggcatcagttatcgaaaaaaaaaaagaaagttcatacaaagtaacttcattttctctttagccaaagaaaaacaaaaagtaacttcatttccttgtctactataggctatatagctttacagaaaaccatcaaattctttcatttcttggaacaagatcagaaatggtatgaaaaacaccacggctgacttttttgcccctgcaacttcagtgtctatcttgtgtatatatccatggaattatgtttcagacagcagctgttcaagctccaggtcaaagttatcgccattttgaagcaatagttgttgctcctgttcatcatggtcttccggatgttgttgaagtatccctgtttgctggcgaaattgttccttctggacatcccattctccagtaattttctcaactatatttccaactgacttttcatcttctgcaatgtgctctatgttgcgaatgtccacgacctcactggcctctgataatatcatatcaattccaaaaaaaaaaaaaagagccagtgagcaagacagggtcagcaggacaggataaattatgaaagaactccatgaaacaggtagcaggcactgaacgtgcagcatacgttcggtttattcaatatgccattaaagaaattcaagaaatactttggttgttgtatagctgctaaatcactagaggaaaacataccgctaatagctagcttcttagcttctgcgtattctgtagacattttattcagcacatttacatcaacttccttaccctgtcaaaatagatagttgccacaagagtgaatatcataagcaagtcaatcaaagatgttatcataacaattaatttcagatattctaggtttacatccaaatcctataaactctctcaaactccctgaatcaacattggtcacttgaaagaaaaaaaaaaaagaaaaaaaatggtcactagaat

SEQ ID NO: 206725 - DNA, 1116 bp, Cannabis indica
aaaatacattgttagatatataaaaaaatgaagtgattagtaaataacatttttgtatgtgtttttttttccttttagtcaaaataaccttccaaacgttgcgacaaaattagggctagtcctatgttaagcagagctgaccctaagtaaaatcgagcctcaggaaaaaaaaattgggcatttttttaaaaaataaacaatatttttaaaaattattaaaaaatatatatttattaatttcttttttagttgggcccctaataggagtgggccttaggcgggggcttagctcgtccctaatgttaaggcagatttggctaggcacgcactcaagcctggccctgggtataagcaggttaggcctgtgcctagggtccacctaactcgagcccaaaaaaaatttgttccaatttaaaattatacattttttttttatcaattttaaaaaatactacatttttttttaaataaaggctcaagaatattagaggccacttatcttagaggccaaataaaaatatcatttttaaaaatactatttattaaattttaaaaaaaaaattcttaagatttatttcaacttagagccaactctaataataataataataataataataataataataataataataataataatgtattcgaacgaatattaataagatgttatttagaaaaagaaaatacaaaattttcaaaataattttttttcttttgaaataatttttcaaaatttttaactaagcaaaagtttattattaataataatttaattaaaaattaggattttaaacttacgataatgcaacggtcttattaagagtagccgaggagaaaaagagggccccacttaagtaaaacaactctccatcgattctttctttgattctttggtcaatttcttcagcgttgaccgaaaatggttgatccgatgcctacaaaatgacgtcgttttattattattaaatctaaaaccaacaaaatctaatctaatttaatttagtttaatttaatgattaattaccataacccatccccaagtatcagcaaaagatggtatatgagctgtgtatgctattacatctacaaaccaaaaaaaaaattaaaaaa

SEQ ID NO: 206726 - DNA, 508 bp, Cannabis indica
aagcatttcatgatcaaagagacccaacaactgtcaaaccccatctttagcatcacaacctcaagatatgcccattcgactttatcaaaagccttgctcatgtctaatttgagagttgagtaactgttcctaccctgtgttttgtgccttagatggtggacaagctcaaacgctactagaatgttatatgtgatgagacaatttgagagaaaaatagactgttagaacttatttgaatctgagaacaaccacttttgatatgagtttgtaaatgacgttgcacacactggacgatagtcacccataccagttggtgttttgaccttagggatgagcgttttaattaacttgttgagcaatgtcatatcatgaccatcattaagaaccctaagaaccacatttgtcactgttagaccaacaatgtgtcaataagtttgataaaatatggcaaacataccattacttcttcgacttttgtctggacccatagtttgaagtgcttcaaaaa

SEQ ID NO: 206727 - DNA, 876 bp, Cannabis indica
atctgatgtcaagagtcttgttgagaactttgtccctcacaaagtgaacatcaagttctatgtgtttagttcttgcatggtagacagggtttgcagccagagcacttgctcccatattatcgcaccatgtgatgggagtagtgtgaagtgggaagttaatctccttcaataatgcttgtatccaggagatttcagcagatacttgggcaagagccttatattctgactcagtacttgagcgagagacaacagcttgctttttagatgaccaagaaaccaaggtagctccgagataaacacaataaccagctacacttcttcgatcatctgggcaacatgcccaatcggcatcagaaaaacctgtaatggttaatcgttctgagtacttgatgtgaagtccatgatgtatagtccctttcaagtaccaaaggactcttttagctgctgtccagtgtgttgtcgtaggggcttgtaggaattgactcaatttgtttacagcgaaagcaagatccggtcttgtgtgagttagatactgtaggcctcctattatgcttatgtattccgtgggattgctgagaagttccccatcagttttggataatggttttcccacggtcataggtgttgagcaaggttttaaatgagtcattcctgttctagccagcagctcacgggtgtatttactctgattcaaataaaggccagtgtcatctcgatgcacctcaattccaagaaaaaaattagcagaggtccgagatctttcagagcaaaaatatcgttaagtttggtggtaaactgtctcaatttctcccggttgttgccagttactataatgtcatccacgtagatcaaaagcatgataatggtgctggtggt

SEQ ID NO: 206728 - DNA, 767 bp, Cannabis indica
ataataataataataatacttgtgaacgtatacaatagcttttaattagctacatataggcatataaagttaatgaagaaacaaatgaatattaaatattagagaaatattaaaagatatcagtgatgtttttacgtgttaatattgttattagtgcaattaagtatcaggtcttatataatttaatgtaagtaatagtttttaaagaatatcactaaccaatcgtaaggtgacatgtctaaaagtactagataccactagtgcccaataacaatactcttaaatattatatatagcctcttatataatatatgtagttggcatgcatttgactatatacaaattaataataaattacatgtgtattgatttcataaaatagttaaaattaatgttataggtttagctactcatcactcaggcataaatacaaacacgtacataatgtatttaattataaacaccatgtgtatcttgattatttagggccaaaatgttgactatataacaaataatttataggtttattttacgaatacacataaatattaaaaaaaaaattataaaaatacgattatacggaattttaaatttttttagatttttatgattttatttacagaaaatataattttttaatgtatttttatattgtactcttgttaatttgttgttattttgatattgttttagtgttattttcctgttactttatgtaattttcttattgtttttataaactactgtaaaaatataaaaagaaatcc

SEQ ID NO: 206729 - DNA, 1249 bp, Cannabis indica
gtgtcggccgatattggcccccttactatctaattctggctaccgccctgacttagggccttcaaaattatcaactactacacaaatttataaacactaataaaatgagaaaaatcctatttattccatcttatatattatccttatattatttttaattttaattaccccatagaaagagagatcaaaagtgagtaaaagtattatctttaaaaaaagtgactaaaaaagtaaagatcaaagtgtcaaaattgaaaagaaaaaggataaaaagagtcctaatttagtttagtatatatttcatcctcctatttattttttcaaaagtcatttcctttctaaaaaaactcttttaatttattaatttatttttatcttctttttttttttgacgcgtattttttatctttttaaaaaagagtaaagtagaaataaaaaaagtattttttattttatatttttaacaaaaaagatgtgtgaaaattgcagtgaagtgagttctgttccactagagtttgatggtggtgagctaagctaagaacacacacaaagcctctctcattcattcaccacttcgatgaaaaatccaaccaaaatcacagaagaaactcactttcatcatcattatcattttcactctcaacccttttgatctttcttctttctatttctctttccattttctagagtttaaatttataaagagagagaaagaaagctatgagaagttcccttttcttgttggctctcacaacacttgtttttgcttacactcttcactttcaatctcttgttgatgctgctccagctggtaagctttttataacatttttcatattccaaagtttgaatctttgatctctttttcttaatgggtatgttgggttttgtagtataataatacccatttgagggtttcacttgaatcttgcttaatttgttattctcattatgtttttaatcatcaaaaggacaaacccttttaatttcagccttttctgatctgttttcgtaatgggtatattctatatttatgtatttatataacaatttcagggccattgataaagcatttgtctactcttgttaaatggaccaggtcatcctctaaaacacccaatcaggtaaatttgagttgagctaattactgttcattcatttcactttgtttggaaattttcataaagttttagacatttttttacagatgggaattttcttcagtttgaagatgggtacttagttgaaa

SEQ ID NO: 206730 - DNA, 1461 bp, Cannabis indica
atactagtggctgttggatccaacacattataatctatttgcatgattcctaaatacaatatataaaacatataatagaaagcataatacatatatacatagttaaggattcctttaaaccaaaatgtagatttattttacttacaaatacatagcggaaataatgactccaccttttgtctttgatgaaagctagatattcaaagagaaagcgagagatgataaagatagtggctagcttaatataattctttttttttgtgccttagtcacaaaaccttaggttttctcttcataaatcacttaataaatatatatataggaaaatactaggtgataaaataagtgtagttacgtttttcattaatatcaataccaattattaacaaaattgacccaatttactatattactctctttgagactttgcaattaagtcttcaaaatttctcttatttcttttctcagtgtaatatcaaataaataatttagcattatatatttctatgatatttttataattaataattaaattaattatttaagattgttaagttcattttgatccatgaactcaagctccagtaagttacgtgagtttatttttaaacaatctcattagtttattaattttttgtgactctactatagaatcgaaaatgcactctttaattcatagaaccttttacgccaagggttcgtttgacacacatgattagactggattagattggataattaacgagtccaatgtttggccatgttggaggcttgaataactaatccagctaattctatttgtgtaggattatttatcgcatccaacagtgggataatccctgttagcaggatttcttttttttattttgtaaatacattttatatttaaaaaaaattaaagggaagaatgaaaaaattatttatagatttattatcaaatatatagttatcatagataagctattaaaattttaagacattacttataaaataaatatttttattctaatgaatctaatatagtactatacaatatatttctttaaattattataaatatttatatcaaaattttattaaagtaatacttatattgaattaataaaataattaggttaaaatattacttgacatatatatttttttattattaaaatattaaattaaagcatgatgcattatttatttaattgttatatatattgtatattatatatgatgcattggtgatttttttttattttttttttttttgattttgtgattcaaatttttattatgttaaattcatgttataattatttattattaaaatatgttttaaatttaattgattttatttttttaaactaacaaagggaaatgatcccatgtactatttttaactttttttttttttattttacttaagtttcgggtttggttcggtcggtttcgttctgtgtgtgttagttcaagttt

SEQ ID NO: 206731 - DNA, 858 bp, Cannabis indica
ttttgttaccaaagtaggatcttctctaatagttcctacttctactattctcttcttgattaagaggtcacctaggtctcttggtcatccaggtcaatcttttactctagtcaacctaggccttgtacttgtctcttgaccacggagtcaacaagacaacactagtgaggcttccagaatgaactctagatcgtctcaagacgaccagctgtgggagtttccattcagagcattggagtggctactttcctcaaagtagtctccaaccagattacaagtgtgaagataattgaattagttgatcatgttcaattcctccccatgtatgtgagggaagtactcataatattggccattggggccataggcaaagtaatggcacaattcacccctttcatctcgaaagggcttttgagtaaaaagtggttcattagtctttactcatcaaatctcgtagcctccattttcaaagtagtttctcctactacctccttcagtctcgaggcctggtttcatgagaatgttgagaaggactcagtggaggagtcctattggttatgtcattgttgcgaggtcatttaacactaggtgtagggcccattagttggcccccacgagcttgagtcctctcaggctattgctcgaaggtaattttcctctgaaaggtctccatgctaggtgtttgtttatttcctacttggttaccaggtgtaatggtggcattccgagcattaagagttttgccttgggcactagttcccacatgactagttggtcaacagggagtctctctcaccagctcagaaatacctctacgggaagtagttttgcaattagagagataagcttctctaatct

SEQ ID NO: 206732 - DNA, 536 bp, Cannabis indica
ttaatttttttcattttattttcctcgccaaaatataacattcaaacatagccttaatattgatttctaaagatttgattctacacttctattatcacaacattatcaaataaaattacagattctaaaatacgcaaatctttttaaaaatacccagaaaaaagtttaaaaattgaatgagacagagaataagagacttacagtagcaaaacgaaggctgtacagagcgagacaatggagcttggaggcgtcaccgagagattccttgctactccttaggtctaagctttgttgccccgcctgtcgccgtcgtcggcgttgggtcttgtgtgggagctgtcggaggctggggttggagctgagagagactgtagggagggtctagagacagagagagaagtccttatgaaggtttttggaaagaaaaaaagaagttaataaatcccaaaacaaccaatgttgtgtagggtgtacgaggtgccggtggtacggtttttgactatttttataaattaatccgcacatgcagttttttt

SEQ ID NO: 206733 - DNA, 801 bp, Cannabis indica
gcaatgttcttaattaccaacttccacaccaagtgtggccctaccattttaatggtccacttggtcacaagcccacaacaatgcacaatccccagcacctacccctttgccaaccacaaccccatcaacacaacctcaccatcccctaaagtagcacccaacacttccccccaccacaaacccccgaaaggcaccaccaacacctccagttgaaggcccatcacctaccccaattccccacaaacataaaccagcacccagggacgaaaactcgggtcagcaataaaaaaagagcaaaaatggaggtttgcatcgtggagagagaggcttaagtgattcgtattagaatgcaatcaccctactcggttgagttgggttcatcgaactcggttgagtgctctgtgggagaggcttaagtgattggttattagatggaatcaccctactctgttgagttgggttcatcgaactctgtcgagtgctctcagcccacgccatggcatgcatccacaccattttattgccccgcttggtcacaggcccacgctacttgacccggcgataactccttaaactcacacgtatttatacacttactaatatatgatactcccacgatgtgggataaaatattggttgtgtttcacacactatatcactaattaaaatcattatgacacgtgtcactcttataattattcttattagattttattcattttatctagatattttatattattattttcaaatcttattatattaatgcacgattttgttgatgacactacgttgactttt

SEQ ID NO: 206734 - DNA, 1397 bp, Cannabis indica
aattaatttcatagtatatttattataaaaaagctaatattttttgttaatgaaaatctacattaatagtagtctttcattgagagcctttgtaataaaatcttaaaaaataagctcctgatagacgcaactaaaaatttatatctatggcggataatacccaacgtaatgaagaaattcatccagaggagacaacccatcgccctggaaaggagcctcaaagatcacaaagagcaaacgcaactgagactccctattctgaaaggaacgatggagatttcaacccaactggtgaacgaatcccagaaaagcaaagttaagacgcctatgatccaactagatatgtcgcactggtggaactagaaaataggcaacttcaataatgcctggttaagtcaaactagagaaatatcgagttagaacaagaagcagcgacaaccagggctgtataaggaataactcctcaaactcaacctaatgcatctgcaaggtaaccatggggaaggccccaaggttccagggtgagtaaataagaaaataatcaaggaaatcccataaatactcaggaagagcaacatgggaatgcaagggatatcccaatggttagagaaaatccaccaaatactggaaatacaagaaattaagagcatcaacgtgacattctagggacttcctatggattaacaaactaggggaatgaattgtctgatatatcggaatcattttgcatgaatacaaatgcacgccaatcgcgaccagaaaaccaaaaaatttcaccacatgatggaaaatatgttgaaaatcaacatgggataggtcgcccccaaggcatccacaaaggccttctccaacgacagagaaaatacacacacatacttgagtagaggttgtgtgtcaaatctcttttgaaaaagaaggtcgaagagagatgagtcctgtgaaaatggctcaagtacgatcaaattttggagaatcaagttcaaggactgacaggcacagtaggtcaatcggagctcataagcaaacacaagacagggatagatcacaacattattttattaatcaagaaagtatgagtaactcgcgtagttaccaatctaaaagttactcaaggactagatccgtgagtaattacgaccaaagacatcgcgaacctgatctctatgagtaattaaatcaaaggcagccaaacctacatgcgcatttaaaccgtaatgtaccagatttacgtaaccaactaaatcaaaatacagatcagcagcttatggatccaatacagttgggagtaatacaattagaagacaagttcaggaaataccaggatggagaatatagaaaattactagggtattactcagacaaagagtcaaaactattccaccctgatattttgaatt

SEQ ID NO: 206735 - DNA, 543 bp, Cannabis indica
ttttttattttttaaaaaactatgtatatattatattatgtctaattatgtgtcctgatttttgcaatgggatatacaaatatgaataattgaagaatgaaagaataaaatggttcaaaatcacgtgagtcataaccaaaatataaaaataaataatcaatgctcttttttactattttaaacatttaacactattctataaaagtaattaattatatgagtatttatctttttaataagtatcataaataagtatctactattgtagccttgtccctagctagtttagtttctattaaaaagaaatgctaaaagttattattagtgttagtattttttagggtcatattattagtagtgcagataaatataagattttatataatttaatgtaataatttttagagaatattaaattatttttataaatgaatgatttgtcagtacaagatttagaatcgttttctaggcagaggcttaagcaagtcgtttctattacttagggtgtgtgtgatgatgtaatttatctgtttattgattttt

SEQ ID NO: 206736 - DNA, 539 bp, Cannabis indica
atctctattactagttgtactgacgatctatctcaatatggtgctttgattgcccaaataaaaatggtactatctctctttccgaccattattcatcgtcatattagtggacagccaattgatgggttgcccgtaattaacttggccaagtttactactggattagatagtgtttttgtttggatcggtgattatcctattccttttgatcttgtaattgttattttggattaatcaaaaggaatcattttgttttcttttttttttttaaaaaaaaagaatcatacactaaaatattagacaccaatattgtatttgctctgtattgggctcgtggagccgttgaaagcgaattattgggccttaagtttgtttcttacattttttttttttttgaaaaaaggaaactttattcaaaaaaactagcaagatacaaacaaacaaggcacaagctaacaacagacaaacgcggcagccactaaaccagcagctaccaagacaagcatgatttttgcaactatgagagggtttgcaaatct

SEQ ID NO: 206737 - DNA, 1069 bp, Cannabis indica
tttttttttttttttcagaaaggggatatgattttgagacctatgtaaaacgattagtacaaatatgttatgtttatgaatctatgaccactttttttttaccttcacttttcctataaaattgtaaacaacgtgtacaattgaaaaagcaaatacaataattgtcaaaaataaaaaatacagtaaatattttctcattaaattttgttacaccattttatttctctaacatttttctttgaatttttgagatggagaggaagaatatttcctggctaaaaaagtttcaatcgttttttgaatttgcaaaacgtttctggattttattttaccagtaaaaaattcaatctttagtatgagttatttttgtatgaacaagcaaaggtttgtttttttatgaataaaaaaaataatcttcttttgattttaaagagtaaaattaaactccttggacagttgggaccttaccataaggattaaaggctttatgtgcctccaacgacaaaaccaaaccattctttctcccccactccttatccttttcccctctctctcttctttctctctctaaacatgccttctgcaaccaatgcattatccatggccgaaagctgtttagcttcagttcccaccctctttaccccaaaaaaccaatacccatttcacccaattccctcaaaatccataaagctctcatctttaccttctctcccttcatgggcatctctaaaacacaagtctttaccttccagactagtcccactgcttgtggctcagacctcagactgggctcaaggagaggagaaagaaagtgaagaaggcgaagatggtgccacttgggaaaatcaaggtgatttgccttggactggtcaagatagtgagacagagcaggaagaaagctctggtgtgcaagccttttctgatggtgttgatgaggttaaagatggaggagaggaagaagcttctctggggatgacagcttgtggtggtggtggtgtgaattctaccctgacccactgaagaggccaagctttatgtaggtaatttgccttttgatgttgatagtgag

SEQ ID NO: 206738 - DNA, 869 bp, Cannabis indica
tttaaatttaaaataacatatgataactataagggttatatactactataaataaatataaaataacaaactaaataatttattattttttctaaaaaaatattttataaataaaaagttaccgaataaaaataaaaaaatttcatgtgaaggttttttttttaatttttttggttaaaatttttcaaaataataagtctctcagactcacactcaagagctatatagatatgtatccaaaacgacattgtaatagctaaaaacgacgtcgtttttaacaggagacctaggccaaacggaatggaccgcatcgactctgaaacacatagatagcaaaaactacgacgttttgttactcccaggagatctctcctacgccgacacacaccagccactatgggattccttcggccgattagtggagccctacgccagccgccgcccatggatggtcacccaaggcaatcacgaggtggagaccatcccaatcatcttcccccatccattcaaggcctacaatgccaggtggcccatgccctacctacagagtgcctccacctcaaacctttactactccttcgagatcgccggttctcacgttattatgctcggttcctacaccgatttcgactccgattccgatcagttcaagtggctagccgccgatctggccggaatcgatagagcgaagacaccgtgggtgttcgcgttggtacacgcgccgtggtataacacgaatttggctcatcgtggtgaaggggagagtatgaggaaagctttggaagagttgctttataaggctcgggttgatgtcgttttcgctggtcatgttcatgcctatgaacgttttgtaagtttttctttttatt

SEQ ID NO: 206739 - DNA, 1613 bp, Cannabis indica
tgcttcatgaccaaacataattatagatacgcttttagtatcgtcatttatttgagtatatattcttgcactgaaaatatagtacgatttatatatatatatatatattaaaattatattttaaaatatgtttgcttatatttatatttattagattatagatagcaaccgtggtgtagatgttgattcatatccacataaataaagaaatctttcgttgtagttttttttgagctcctttattacattcaggacatgacatatagtagaatgattgtgataaatttgtaataacaatctttccttgaatctagaatttcgcaacctaaattagattatatataatagttaggaatatttttttagataaaattaatttatgtaaagtaataaaattgagtttaccttaaatatttttgaaaattaaaatgcaaaaatttacctctgttagttgtaatgatgtcattaaatattgaatattttttatccttacaatttctctaattccaagagataatgaagaggcagatggatatgtacaactttttacaattatattttttattttgaatttatttttctctgccttaagaaatattataataatatattattataacgaatgaatgattaaattattatctataaaatctattgattatgacgttagtcatttttgtcgttgataaagttaagccttatataaaattaaaaaaagaataaattattatctataaaatctattggcatatatatatatatatcttttatatagtggattgtagtaattacctttgaatggttttacagatatatttgttgcaagtatgattggtttttcatagatcatgtctgatactttttggactttatcattgacaaagcgaccccacatggttaaacaaattggcttgaaactaaacattagaaatatttgttaagtttatataatataatttaattaagaaaatttaatttattttaataggaattgaaatttggtttagttaagtttgtttttacctcttatcaacaaaatatatttattggattctttttattccataagttgttacatctttcggttgcttgacttgtattgcgacgactaatatatctgtattttgattgttaattttgtttagatttaataagaaatttacatagaaagaaaatatattaaagtatattaatatatatttaccaatttcttctttagaagatatgtaggggtctatgtcattaaaattgactattttgtacaaggttgttggtttttgtcttcattttttgtcgattcttctaattttgttgtacaggtgattatctattgatatggataatctttgtatttaaaatagtcatgtgctttaataacacgtgcattactgatgtaataacattgatacatatttaatgtttctttcaaagtgtcgatatcaaattcaaaaattgtagcttctacttttatttcttgtagtaaagtaagtatacaattttaattaaatttaagaaataaaataaataatattttatgtttaattgaatataaataaatcgatttacctttgtatcaataagagttaacttttgatattttttacgtcttgtat

SEQ ID NO: 206740 - DNA, 1425 bp, Cannabis indica
taaaaatacattcctctaaacttaaattttaggtccacacatatatgtacactacaacaaaatttcatttttagtcacaataaaatttatgactaaaagtgaaaaaattgtagctaattataaatattaatttttatgttgtgattaaaaagttcgcggctaaatgtattagtcaaaaaaatcataatttggtgtgactaaatgtgtttttagtcacaatacttgttgtgattaaaactaaattagtgacaacttgtatcaaaatactatgttttagttacaagtaacttttttttttactaaaaattacatttaattacaaaaattatatattgtaactaaaaagttatcactaaaaataatttcttttagtggtaatataatgtaatatcataaaatgaaattaattagtcaacaaaactaattataatagttgagcattattataaaggggcgcctattggtccacaaactagcttcatttcattatgatccattgattacacaaactatagagatctctctctttttctttttcctattaaaaaataaaacaaaaactaagagatctcttcaagatatgaattccatttaagaattagagctagaagttgtggatcaagtactatatatctatatgtatttaatattattaaataataataataataataataataataataataataataataataataatagatttttcatacagataataataacagattagtacaggcaaatcacgacagagtgaggtcaaagaaattcctaattaactctacaatgtgcataaaaaagtcaactgtttcacttggtgctctcaaaatatataatgtatataatgtttttgtttcagtaaacaaaaccattaacgaaattgtggggatgttaattgtttaatatacatgtgaagtactacaaatttattatgatatatgacattcttttttggtactagaaagatcattaaaaaaataaacaagttttttaaagaatagatgtatatatggtgatataatattacattatcaatataatttatatgtatggatcaatcaaatggtagcttcacatgacagtttccacagatcaagtcatccagaccctacaatttaattaattaattattaataataagaaatgtaatggaaagcaaacatggtataattttaattataatcgcataactgtggcattaattaccttataatcaaattatataatataataattatatccagctttgtacgtagggtctcttttttgatgatcagaaggatgaatgtgtgtggatcaatgtttatgtctctcttacatattatattatgttataccttattatatatgtacgtaatatatagtcaaatattggtaaaatggtaaaatatttcaagtaaatattattttaaaatttat

SEQ ID NO: 206741 - DNA, 641 bp, Cannabis indica
gaaaaagaaaaagaaaagaaaagtgtgaaccttgcgagagtaagtatcagcaagagcagcaccccagccaccaggtctgaaggactgttcagtgattgaatcaccaaagagtaggatctgaggcctcattctttggtgtgtctcgaaacaaaacacaccgaagcactacacaagccaccactcagaagtgagatgcacaacacaaccaactgaaattggttagaatacgacaattccaaaagtgcgtgagatgcacgtaccacacagtaatcactaattaatcactgtggtttttactactagtattacatatcattttccttaaacgactgagatattaaaaacaagaattaaataggatttttgagtaattatgattcttgtagtgttgattcttgaatttttctccattgcaaaaatattcttagaattatacaaatggttccaaatatattcaattgtattatttttatttttataacaatttgtttatttgtctatgaattatatgtataattgtagtataagagtttatttaataactttaaactacttaaaattcaatttattcacattaaagtataaatagtagctctaaaaatgcacatgtacactctcataatttattattagactgttaa

SEQ ID NO: 206742 - DNA, 692 bp, Cannabis indica
ataaataatgaaatatagatgtgaccacacctatggttgccaacaaacattttgtaatgtgtgacattgtttttagtagtatacatcaatattacacatcatgaaaacatatggtatagtcatgtgattaaattttaaaatattattttagaaaaaaaaatgggaatttatagaaatgaatttttatgaattaaattgggtttcgtagctctatataggttgatgttaatttatgtggatggtgttcaaaggtggctataagggcctacctaactgtattttttttcaaaaattaattaattaattaattaattcttgtattatttcatgtcatatttaattaacaacaacaaagaaacaaaccaatctttgtggaattggaaactatgtgaggacatcacgtggtactacttatttttttaataaataattaatagaatttttaaaataaaattaactaaaataataacttgtaatctactcagaacattttctcacgattaaaattaaaattaaaaaatgaatcaataaatcagttacttaatgcttacatcgtttgataaaaaaataaaataaaatgagatgaaaaagattgcaacattacaattaaccttaagaatgttaggtgatgcgtagttaagaggaataaaaatattggaataggaagaggaatgagaataaaaataagaatg

SEQ ID NO: 206743 - DNA, 700 bp, Cannabis indica
tttctcatcattacgtattgtgtaggatattgcttctctttctaaatttgacttttggtaaaattccgtatacaataaaagatatttcatcattgtagatgctttatgcatgtcctgtccttccacactgcacgctatatatatttatatatttatatatttcttctcccaatccaaaaagaaaaaaataaaaacaagaaaacaaaaaagaacatatatagtatctatctacgccattattaatttttctgtatactctctctagctgttgggatttcaattcggtgcacctcatcaacaccacaacaagattgtacgtactttgctgtagtttcttagattccaaggaatttgctggtacacgccttgttcaaattaagctcattattaattataagctattattggatcaacaatcctttcatttttctttaagcttttcaattcaatcacgaatcaatttttctttttttattgtcaacctcacttagattttcttatggttaaatttaaatgtttgtacccattagatgtatgtgtgaggaaatgtcatatgaagaagaggcgtcatgaagatctagccaagaggtgtgtgtccttgggtatacccgagccgcgatgtgatctcgggtataccctgagtctgagagatcaaggtgtgtgtctccaatctccatcatatatatgtggagggatgtgt

SEQ ID NO: 206744 - DNA, 719 bp, Cannabis indica
aaaagaaaaaagaaaaaaattgttcaactactacacatatttattacttattttaattattgaaatgaaagaaataaaggtttgctttttctttttgtttcttctaatgtaaatgtatatatatagtggaaatcttatttcattagcaactacctattgatcaagtcattaacttagactaattcctatatatatagactatatggctattttcttttcgtgtagaaaaaatcccttcttccacagttcaacaacacgaacaaaacaaaattgaaacagtaattaataatttttttttcctctagctaaaaaacgggcatagtaaaaactaaaaagtcaaagtcaatctgtagtgaaccttagtcaaagtctttttctctctcacaaaatattccatattcgtaaatcttatactacacaccaaagaaaattattgccaatatggttagaaaatgaggtaacaaataataattaacgttagcttacctcaatgtagccaagtctttcagggtctaattcttccatgatcaaagctgcatattcttctgcctgttctttcaatctcgctaacttgtttgcagaagcacttaccataataatctattcatatacaaaaataccaaattataacttataaatgagagaaaaaaaaaagaatttgatttattttttattttttaaaaaaaaaaaaaaaaaaaagaaaaaataaaagaagatag

SEQ ID NO: 206745 - DNA, 930 bp, Cannabis indica
taatttaaaaataaaaaaaaaaaatttctttattctttttggtagatatgaataatcacagcattgaaatgggatacaaatccttgaatccaaccattttataaaaaatttaatggcctacaaattttgggacataatttagtacaacattttaggcaactaattttaaaatacaaaatgctggaaaatattagtaataaggcctaatacaaaagtccataacatataaatactcatctcatttcatctagcagctctcttttcgaaccctagagttagggttatactaacatcctcgcagagtagctgcctcccagaggcattgtctgcacacatctttctctgcgatttcgcagcaatcaaacacccattaccaagatgacgaagaagacagaaaggaaagttagcatttccgggaagccgaagcactctaatgacgcgaatcgaattgataagaaaaatggttctcgtactgccgccacggttcgccgacttaatatgtacaacacgagacccaagcgtgatcgcaaaggaaaggttttaaggaatgaatttcagtctgacgagctgccatgtacccgaatccaacccgaccgccgatggtttggtacgcaattctcatacttttgtatatttataaacatggcgcactaacaattttcgggcattggctttcccgttgtagaatacagtattgggcttagatagagtgagaaattgggtctgggtacatacagaaattgttggttgtgctttgtggaagtacttactctggctgtgaagagtttctaatatttgtataccagttatggtgtgcaggaattatggtttttaatttttattttgcattctataggaaatacccgtgttgtaaatcagaaggagctcgagtttttccgtgaagaacttcaaagccgaatgtcgaataac

SEQ ID NO: 206746 - DNA, 1115 bp, Cannabis indica
ggggggtaacaattattactatgtatagagtacgggtgtttatcggttagtttggttaaattatatatagtgaatatttactaacttaatataaatattagggttataaattaatatctaattataatttatttatcgtactaataaaaaaaataaaaaaaaattaacctgtctaataattttattgatttggttagattaactcgatatttatttatttgtttttttttattattattgtttgattttagtgttcaaataattggtttgaaaaaatagatgtatagtatgcatatattaaaattaaaagagttatagtttaaattaaaagtaaatactattttgaacgctatgtattgtaaaagttatagattgggctatctgttttgttaaataaaaaaatagatcctatattttttaaaatgatacaaatatgatcttaataattacccgacctaaaggtgttatgacaaaattagcactaaagcttaggcactagtgcttaatattctccttagtatcatattattatggtgtaataattaagtattagatcttatataacttaaaaaaatatttttttaaaaaaatatcactaaataatcgtaaatcaccacttatagaagatgttgagcattagtgtatccaatagcaatgcttaatttgaacattactattaggcattagtggtgcttagtacctttagacatgttaccttacgattagctagcgatattctttaaaagttattatattaaaatatatacttaattggaccaataacgatattaacatgtataggcatcagagataccttttagcatttttggtctcaaatatattattattggagagaggtaggtatctaacataggcttgagttaggcttcattgggttgcgttctatctatgagttctcatcactattaaactccacctagtactatactctgcaatgcaattctctgatctctcttttctttagttatatatatatattattcatataaattaaataattaataatggaatctttgtcctttacctatttcatggtctaccaaagcctgcaactgcacgtacttacatatgtatttaattattatatatatata

SEQ ID NO: 206747 - DNA, 875 bp, Cannabis indica
aatattaattatatataatttttgtactaaataagtaatagttatcgtgctaatcatgtaggtgcctcatggtccaatcatggcagttgtttgatgagaccttcataccttctctactaaaaaggattattcaaagttcaaacctttatttaattgaagtggggttggatttcattgccctcaattgatagaccacctgctttcttatttttgtttttataatatttaattttattattattatttttcttctttgtctgtttggttaaagacattaggattggtttaatatggtctgtacttgtcctgtgtctggtttggtttggtctcacttcttaatgagtcagccgaagcctataaccacaccattgactatgtgaggctatgactttagtagggattgggattttggaccatcaatcacatgtattattcattcaggggtagaatcgtaattccactgctcctcttaattggccattaacctgccaccaaatgtcactcataaaaatattacaactcattcatttgtcaatttctttaacccatttttctttgtggaggaaattatttaagctggatgttaatcatcttatagtctccctttcaaaataaataaataaaagaaatcatgttatatatattccaaaatttatttatttatttttccctaaagttgggattggactaattgttaatgttacatttcatgtttatcatcaccaaagaaaaaagagtaatactattactaaatatatatgtatattttttggttgtgttgtggtagaggtatgttttcgggtatttttatagtgcactctttaaaagggtgaggtatagggctgtacatttgtcggtttgggcggtttatctta

SEQ ID NO: 206748 - DNA, 1652 bp, Cannabis indica
taataataaatgaaagacacttttctttgttgtctctttggtgcatgcactgaaaaaactcagaatggatttgaatttagtatcacattgtaaattcaatgttatcaatgttacaatatttgacctgttcacttatgtgagctatatatacttctaattaatctcattttactcatgcatgtctatggcaaactattcatgtttgaatttataacattaacagcttacactcgatacactgtatcaaactctcgtgtgttacattgagtaacttattaaacgaatataatatttatatttatataatttataaggtgcttcacaaaggacccccaatacaatcccgttttaacatctgcaaccaataatttattaatacaattttttttatagtggttcaccttataattatttaaaaaaattaaatttttatgataaattacaatataaaatttaatattcaaacagtcttatttcacatcacttataaaaatatcaagcataaaatactctttaaactttatttacaacatattaattattaaatattttcagattttgcagaattaaaaaaaaaaattaacctaatttttctatttaaataccgaaagtggatagaattttcctaatttatatattaaaacaaacaggtccgaatctttagatgaataattaccgttacttttctgtcacttatttgataataatcaaaaataaatatttatatattatataatatgtacatgcaaaaatagtaggtttctgaggtggcgacatcatcttgctcatcacaaaaatcaacagaaacggcaccatcagagtacagacaggcaggctcacaactcactttcatttatttatttatctaaaatgaaattgattaataaataaaaaaaaattgtaagaaacagacaagagagagccacgaatacttttgggcaatcacaagaaatatatttcatccaatagaaatttcaaaagtcatagaacaaaaagagacaggagaaaagttgaaataatatcaaaaggctactgcatatatatatatatatatttatatatataaatctaacatctatttaaagtgtgccctctctctttttttttttttttgttccttttttttaatctttctacttctgtaaaactcgcaatattacaccgccaacaccatacataccatcatgacagtgaaaaccactaacccctagagtcaactaaaagatataatggcatttcctaaccctccaaaattgacaaacacttggaagagtgtatgaacttgctttacttacatacaacatatttagaggtcgggtaagaaaggagggaaaaacagctatgtacaccgtagaatttgtgtcgacaatgcaaggtggaccacaacaccttgctccaaccgtatatataattacgtatgaaacaggacactccaaaataccaactccagacatgtcaatagtgatatatatatatatattcttcatatttatatatattttgtcacttgcgccatccatttttgactttatattagacgagaatttgtattccaaaagagcctcacatcaatcttgtttagtccacacattcaaacaagaatggctctagacattggtccctaatacgatgaccctgaaataaaaagttac

SEQ ID NO: 206749 - DNA, 702 bp, Cannabis indica
ggccagtcaaccatcatttatctcaaataaaaatacgtttttctttaatttgctatataatttaaattttaaaaatatataaaaaaaattgtgctaatataatttaatttggtatgcttttcatgtccaacatacttggactagaaagcggtttctattgtattagaaaaacaccattttatgtccctaatactatgtccaacaccaaaatagactagaaagatttatctagtagtgaggcttggacatccctttgaaaggattgtcaaatctgtacttcattcatgtaatatacaaatcagcaataaaacaccttctttcagtttgctcagcctgttgtttaggcaaaattcacaaatttccatttcccaaatcttctctcactgtctacacagatcccctgcaacttgtggttattgatttatggggtcatgctataactccatctgttaatgggtacaaatactacattcgttttgttgattccttctctagattcacttggatatacatgcttaaaaataaatgtgatgctttaaaaacattcacccaattcaaggctgaatctgaactacaattaggtaaacaaatcaaatgtcttcaaatgattggggaggtgagttcagaccattttctgaccttctcaaacagtttgacattgttcatagacatccttgccccatgtcatgattatgattcctt

SEQ ID NO: 206750 - DNA, 620 bp, Cannabis indica
ttataattataatcagcctcatcctaattttcctataatttctcataattattatactcatacaccttatcataatcaagatgccaacatctgttccatcatgtgatcattcatatatataattataattattattaataattaacataggtttatgatcataatcattatcatatataatatatagttattcaagattgggatttattagaggccatggattgagggagttttgtttattttattttgttagacaaattataaaaataataatatgtaataaaaaaatctgccatgagttttatttgtccattttcttattgggtaatattttttcgatttcaattgaatgttaaattaattaattatattattgttttgggatgcttttgatatagttgctcatttaattatttctattaattagtatgtgaaaatatgctcgtctcaagccaattagcaatctttggtcaaaaaatttaattaattgagcattttatataattttttctataatccttttttttttttattatatatatatagtagtaaaaatctaatatatagagtattttgaaaatataattacacaaaattatacaaatattgtattagtgacc

SEQ ID NO: 206751 - DNA, 1767 bp, Cannabis indica
cctccctacaaaaccaaagaaaatattataattagaacgtattataccaatgataataataataataagaagttattagtagtatagttatgtaccttgcacaaaagtaaaatgctcaagcttacgaggttgaatgaacctattgtaacataatctattgttgtatcttcggagcagtagatgaatccgataggtgtttttaagattatatgcgatgttgtaatctttttcatctgactttattttagtttcttttgtcaaatgatccaggaatcaggtggtcaataattttagcttgtttttcttattctaatcctagtcgtgtctttaacagtagagatatcccgattggattgcaatttattattttaactgattgatattaataaaatctcatgatttattaaaataaataaataaataaagacatgaaatttattttgttttaattaggagagtaatttatggcataaacacttaagtttaactctcggttgtaaataaatgcttaagtttaattttttgcggtaataatatctaatttataattctagaatttttatagatacttgtcaagtaaattgctacgtaacaatttctgattggcccacatcattaaatttgtattttttttatttaaaaaataatttaagtatacaaataaaaaaataacacgtgaataatgacttgacatttaacacctatgtacctacggaagttcttactgccaaaaattaaacttacgtttttatttgcaactgaaagttaaacttaagtatttataccgtaaattacttattttaacttttaattgcaaataaatacataaatttaatttttagcaaaaataatacctaaattatatttttaaaacttaaaaaaatagtttaaatatactaataagaaaatgacacgtgaataatgacttaaattaagtacctacaaatttctaaaattattactgttaaaattaatttaaatatttatttataatcgagaattaaatttaaatatttatatcgtgaattattctaaaattaaatattttatgacacaaatttctttttctcattagagtgtaatagtttcttctaatgatcatccataaccttagaaccccaacccccaatattttcactcacaaaaacccccccaaaagactcgattttgatttttccaaaaccctagaattgacaagaccaattttgggtttactcacaatgcctcaggtgaagatcatagccaagaatttcatggacatggtggcctccttacccgccatgaaactcgattctctctacgccaatgcattcatctgtgaagccattctcaggtcagctttcattttctcatttcccccaattttattgccatttatttggggattttatatatgtttatgtataatataggtctttgccacctctggccaagaaatatgctttgcaaatgttatgtattgaaggtcctgtaagtgctaaatcaatggaggaatgggtacttcctgatggagcttctaagcataaagttgccattgatcgtttacttcagttgagagtatttactgaaacttctgacaggtattatataaagttaattacagaacaaaaagcaatgatcttgatcaaaattcaactgaattacagttaagtttaggctaatatatttcttacaggaaaagggaaataacttatagattaaatccagtgtttcagagtaatctccagaagcttttaatcaatgggtaagttttttttttttaattta

SEQ ID NO: 206752 - DNA, 1177 bp, Cannabis indica
cggcggaacactgattgtggtcccccagtattaatgtgtttgcgtgtaaaagtgcagacattaataccggcggaccccaccgctattaatctgccggtattaatattgttatcggcggaagaccattttggccgctaatagtcatttatagcgaccaattaataccggcggataagtaccggcggtctgggcaattagtactggcaaatgtctcctccagtactacaaaaaattgttatagtgcgagaaaaggtccaacaaggtttcctctaactgatgcatgttctctctcaaaacaacctagctgacatcttcaccaaggctcttctcccttctcaattcaacaatattgtatccaaaatgagtgtcatcaatatttacactccatgggtgtcatcaacatttattaagtctgttagttagttagaggttaacatcgttaaatatgctaggttcctatcttaaccgactctatttgcctatatatgttcaagcatttgtatcagtttaatcaattcagtaatatagattgaaacattattttcgctctgtttctcttatatagtattctccttctattgtcacgtttcaaaaatgatgtccacgtcattaggttaaattttccgataaacaatatcaattaatgcaacaatcaatttagcatcaatttcttagacaaatgtcatttaatgctataagtattttaaaatatcatgatataattaattattattgatataattcaatattatatatttttctaaaaaatagttaactttataagttataaatagtattcagcatcactataattaatatccttttagaaccagccaagagtcaagattgaaggtggcatggacgaacccaattgttttaatgtgggggttataacccccactaacaaaaatattgctttttaaaaaattaaattattttttttaatttgataattatagactaaaatagtagaaaagtccctacaaaattaaataaatctagtaaaaatgattataatatatatataaatattttttaataataaaaagcccccacaaataaaaatttctgagtcggtcactgagaaggtggaagggtttgtttaagcaaaattgactatccagctacacatccatgtgagaatactacttcccatatttatatatattttttaaat

SEQ ID NO: 206753 - DNA, 1040 bp, Cannabis indica
tacatttatcttataaatgtatttcatatattctctaacatagtatctatttgattattttacgttttagggtataaaatctcaatagaaggacggtgcaccacaaccatcccaaccaatagatgatcgacctcatgagagtgaatatgaagatgtgttcccagaagattagaaataagatgatgaacggggcaccgtctacctattatcacggccattagtcaaatacaatcacaaaacgttatcctaatcctgaatggaccccagaagaggtaccatttatgagaaaaaggaagtcgcattattattttctagactacactaaggaaaaaaaaagcggcttctttaggagaacacaggtctagaaagaccagcagaccgtagattgctacgtacgttcaagaggtgggtgcttggggacatcccaaataactgtcctaggactccacactagcgtcagtgatgccaatttctttacgaagttgttggtggttgaacaatggttggaagaatgtaagtatttttttataacgtgtttcaatatttttattgttgtaccttacgatatctaagccaaatatgataaaaaaattctgtagcaatttgcatcgacattgttagtgattgttgtcgatatctaaaccaaatataatagaaattcagttttagcaacttttgttgacattgttagcgatatctaaaccaaacatttaggaattcaaatttagcgactttggcaacattgtttgcgactcctatcaatatggaagccaaatatcataggaattatgttttagcgatatgtatcgatattgtttgctacattttatcgatatctaagccaatcaattttgatagaggctgaagccttcccataacaaagaaagtatagtttaggaattctattgtttcgatattgttgacattgttgggaacgtcttttgacatgttgcaatatgttgcaattttatttacgatattcagtgattttttttacaaacatggttcatttggtttaattggtggttttctttaatttt

SEQ ID NO: 206754 - DNA, 945 bp, Cannabis indica
ccatgccaacctagataggtctgttttagatgaggggaacccagactgtattactgcttttgtaaggggcacttgtatcccatttggtccttctactattccccaggtcctaaaagtcaagtctgtgaataattcaacctatggaaaaaagtttaatccagatcaaattgtgatgggtagagtcttaactggaagggatgattacctataggaaaggaaggatattttggctactcatttaacaccattttgtagggttcttcatctggtttctttgtataattggtttcctaattcacgtgtgtcatatgttactcttgaatttgggaagttcctatatacttcgtagtataaatagttgctactattttcagtgttaactaactttttgatcggagagtctttaggtcaagcttcgttgttttgtattctatctttctctgttttataggttaaagctcagaactttgtggatgaagatccaatgttgctgatcaagatttgaagatgatgagttcagactgaagggatttcaattgcatcctcaccatgagatttgaaggagttcagatcgagactttcataagggagttcaatgatttgaagcaaggggatcttgcttgagctgactttggctatttggggtaattacttctgtaaggatcttgcaagattgtacaaactagaaattgtaaatttgcaaatcattttagtggagttatttaccctggttcacagaacccaagcactacccaatcgaattgtattttcgatacagggaagcttataaatcttctgtctctatctgtttgaaattgatcaattgattcttgaattggttaaatgaattgataatcggattaaattgaaaacttggtaatcagtcgtagtaattaggtaaatttgtaaaacttctagtctgataagaaattacaaagagaaatc

SEQ ID NO: 206755 - DNA, 1092 bp, Cannabis indica
ggattaattaactacctatataaaaataaaataattaaaaatccaaagctatattagtatttttagatttaattaagttggttttagataaaaacaacactacaacaaaatctattatataggtatttatgttatcaaagttttcacatagagaaagtttctgcaataaataaaatgagagtagttgctagtgctacttaatttttttagttaactgcaataattaaaactacaaacactacaaaatttcactttaagtacgataaaatttgtgattaaaagtaaaaaatttcaatgataatattttaatattttaaaatgcaactatatatagatagaaacataatgaaaattaattcatttcaattcgatttcattatcccaaccgaacgcgcactcttccatttgtactaacctcttaataattattattttttatgtatttatttttattttaatgtcaaagatgagaggaagtagttgaagaaaaacaagaagatcattcacacattattcaaagtacaattaattgttgaactagttgtttatatataatgagaggtcatgaatctattatttataatattaattgagattattataaaacaatccttattgtaagcttaatatataatatgatcgctaggaatattgttttgtcaattttattgatgaatcttaattaatcacatactcatcataccaattaataactacataacacataataaacattttgaaaattttattttcactataaaaaaaacatctatttttagtaataattttttagtcataataaaaagtttttgtaactaaaaataatttttagtcacaacaaaaagttacttgtcactaaaacataatatttggatacaagttgtcactaatttagttttaatcacaacaagtattgtgactaaaatcatatctagttacaacaaaattgtaatttttgtaactaatacctttagccacgaacattttagtcacaatataggaatgataatttataattagtcacaactatttttttttgttatagtcacatgtgttgttatacatggtaaagaattatataagccataggaa

SEQ ID NO: 206756 - DNA, 532 bp, Cannabis indica
aacaatcatctagtatatatatacatgaagaaaaaaatgagatgcaattaattggattatatatatgaaagacaccaagtataataaggacatagttttatatataagcaaaaactactgtagcagttgtcatagtttggatacgatatttcttgtgtcatataatttctagttttgatgtaattctgtctcattctcattttggtccaattaataattctattttattattatgttatataattaataccaccataaattaattattataatatgttggtttgggaatctaatcaaatcgatgtatatttttgtaatcaacttaaatttaatcattgaaaatgtggatattatattttataataatcaaattaaatatatgatcagcggtaggtataataatattatcataatgtattgtttatttcgataaaacaaaaaatgcatggatttcctaaaacacacatatatatatatacatatatatataaacacacatatataatgctaatcatcatgattatatgtgtag

SEQ ID NO: 206757 - DNA, 592 bp, Cannabis indica
attttaattataaataatcctaagtgtattcaaattagtccgaactttttaagctataaatataaacagaacaataattaattttatatcttcaacctataatctttgtctttatcttacttattttatttattttttattatataagttgataaatcgttttctctaatatttcttcaactctctcttttttttactctttttacacatctataaaataagtcaaataacataacataatataatgtgtttaggctatgtcaaacttaaccataaaatcttatatataatatgatttaatagtgagccttgtagaatacgaaattttgtttttaccttttggattgaaagtagaaaaaatttagtgctaaagtaattaaataaaataatataataaaaaatattttttagtataatacagaattaaaaagaataatattaaaatagtattttttttttgtgattattattattattattattattatttgttattgtgtctttaatagtgaatcaagtaaaattatttttattggctatttttcttatttgggatttcaaatcttatcacaacatttttttattttatttt

SEQ ID NO: 206758 - DNA, 1326 bp, Cannabis indica
aaatatgcaaagaaagatatttgtaatgataagtacctgtttcatctctccagcaaatctttcctcctaaggtgtttaaccatatgtactcgaactgattttctggctgtcttctcatacaagttgttaatgtatcaaaaactttattatgcatttcttaagggaaagatcttctattataaatcaaatcatgaaccttcatttacaataacaaagtatatgggagaggaagaagagcttgttttgacaggccaagactagtcttattggaaagccttctaacatgagaaacatatataaatacatatttctacacatcattagatcgttcagtacgccttatattgtattgtataatatttatgttgaattatattttatgtaaaactgtatgtgatattgatttttatattgtaaattaaaataatataatacaacttaatacagcgtaccaaacgagccttaaagttactatacatgacatcaatgttaattataaagacttctatatcaagtgagaagtaaacccaatttcaaccaaatacgcatccagttcttataacttcatctcttttcaagagttttctcatttcatcatatacacagcattgcctaaaccaaaaaaaaatgcaagaaagtgtattcaacatagaatagaatggcaaacaattaagatagtgaccaaagaaagttgttaaagaaatctagaacagaacaaatacttgtaagcctcttaagaaaccatcgttatacttgttggacttttgagttctgtgatgtgtacatgaccaggtactctgcatgaaaacatatttaaatagacagaaaactaataatgattttgaaaaccaaaaaagttgaaaatgttaatctgttgaactagattattgttgtatctaaattcattcttggaaaactctggaatgaagtaaaatatcagtttctttctttttttttttttttgtaaaaagaagcgttatattaaaccaacgaactagttagaccgtaaggtcattacaaattagatttaaaagaatgtcattagtatccaggcaaccataacgattctgtgtaaaagcccacttcgttttattatgggcacaaatattacaaatacgagctacattagaaaaattacaacccgcaaataaagaagaaatgcttaaacattgagaaatatcagtttctttcagtatgataaaaattatttcagctgttctggagcaatgaatgcaaaaatacagaagctattatcaagatcccacataatagatacatttaaaaatacttccagaagcaaaaaaacaaaaaacagcagaataaatg

SEQ ID NO: 206759 - DNA, 1225 bp, Cannabis indica
atttgataggtatattttttaagaatttgaatggaaagaaaaaagttaaaaaaaattttgtacaattaaaaatataaattttatataaaataaaaattattaaaatggggtgtctttaaaacattttggggtgtaaataaaatttctcttaattaaaatacataaattgacaaattacccctatactaagattcttaattactgatgaaactaaacaaggaagcctttttattgtaagcccctccccttgttcttatctctttgagcataagtatattttaatgcgggtctatcatatgtgagctaagagtacaatgtgggatatgtgtatgtaatttccctcttctgaaagtatgttaaaattatgtatacgaactttgcagcttgaatattaacttaaactagcatccagtggcttttgcatgcatgatgaataattaatttaggtcttattttttttattcttgtgtacagggtgttgactcaaagcattggccttctctcatacacattcttgagaaaagaaaactatgacaggatagttgttcccatggtgagtttttttttgtgtgtgttttgcttttatgggtaattgttcatctaatgcctgctatgctactttgttttggaaaaaggcagcaatcgtgtaaagaaattttaatgttcttttatcttgtgaatgtggtagtgtgctgcttgactgtgtatcaattttattgcaggttcattatgagtttaatacatcgacgggtacattggatttcttgcatggtaaagagcattttatgtcaaatctattgatgctgttgcagtggtctccttttgcgacagaagcagagcttctaaagcaagtaagcttttacatgatcattatattaatttcttgcttttacatgatcgttatattattttccggtaatttgctcgctacttttgaggcacaacgtattggtattattgctaatatttccacactcaaaaatcttgaggcaactgggaggtctcctgggcaaggcaaaaaaactaacaaaataataatagtcatcttgtgtatattaatagaaagaaatagcgatggattgatgtggcccattttttcgtgattttagagaaattagaaaactacagctggtcatggaaaagctgtgagggatcccgttcactatatggggtaggatttttagggtaaaaaaaggggggatttactcgacatgtgatgtgagta

SEQ ID NO: 206760 - DNA, 581 bp, Cannabis indica
acatttagtcaacaaaaaaattacaatatcgctgaaaaaaattatttttttaatttattgatttataagattgatattgaattatcgatatgatgttatagaaatatagaaagagtatatattattattgtttattataatggaaagaactaaatcatgtaatcatatatgaattgcttgttaatttagtaaattattgtagaagttttttcaattaatacatgaatgttcattatttatatatatatatatatatatatatataaattgtgaaactatttgtgttgcatacgtacgtagtttggttaaaagtttcaatttataataacttggaaaataaatgtatgagatatttagtggagaaagcttaattaatgctatctactttaacatagacacattttatatataataatatttaacatataaaaaaaataatgatatttaatatgtgaaggtttcaatttgtgtttgctacttaaaatgaaaatatacgaggatatatattatataataggacattgtccttcaaatataaatgtatatttatataataggaaagtgaagatgtatgaaatcat

SEQ ID NO: 206761 - DNA, 1125 bp, Cannabis indica
gttcgggttcgggtcctgggtccggtccgagtcttggtctcggttctgggtccgagtcctggtcccaggtctggggtcgggtccggattccaggttccgagtctgggttcgggtcctaggcctaggtacgaattcgggtcctggtcccgggtctaggtctcgggtcttgggtacgggtgctggttccgagtctgaatctcaggtctgggtccgggtccaggtctgggtctaagtccgggtctgagttcgagtcccgggtacgggtcctgggttttggtcctgagtcccaagttcaggtcccaagttcgggtctcgggtctgagtccaggttcgagtttggtccaggcccgggtccgggtcccgggtctggttcgggttcaaatcctgggtatatgggtccgggttcgggtccaagtcagagagttggattaacttcagatcctttgtaaatattacaatacaagctaatacagactatttattatgtattaaataatacaacttacatgatataaaaaattttagtcgtaataattaatacaatacattgttttatccaaacatagtgttatttattattcaatacaatatatccctccttatacgacataccaaacaagtcctaaaaaattgtctttaatgttttaataacaattgaaaattatcttgacatattcttaacaacatttttatcatgtcatttttaaaaatttatacgacatttattatttaaatgttattaattattttaatgacatttaagagaatattatgtcatcttacatgaatttttagaacatttgaaagaaattgtcgtcaatattttgttgtggaaagtacattttgttgtagtaagttaaacattttaacccagtgttggatttcttttcgaattagggttttagaatgagtaaccttctctctaatttggtgaaaagataaacgctaaactatagtagaagactactaaatacagtgtcagtactcgcctgatttcgtttcctgccacataataattcgtttcatcttttatcacttagtcaaagtttcttcatattttcagagtgtatttttatcttgtaaacctctggatgatgaatattatttatcacacacttatatttt

SEQ ID NO: 206762 - DNA, 737 bp, Cannabis indica
ttaattttacaatgattatttttatcatttattggagttcaaaattatgaataaaaatttttaattttaattttaggatataatattaggttaaattatttttttttctttttagaaaaacaattttagaccatttttaagattggaaaaatagataatgtcataccacgtgttttttgaaccatactttgggaggaccttttattttattttattttttctttttgagataagaaagagaacaaaagaatgtatatgttgatgagtttcgttaattttcaaatatgtataaaagtaaaactattgacttccaatttcatcatattgatcatagaatagaatcatgacgaggttctagaaccaaatacattttcctttttttaaaaaaaaaaatgaatcaattatacattttacttttcatattcaaaagtatataatttaataattttactttttttaaaaaaaaaatatcaaaattactgtttctcctctaataaaataaaaatagtcataactggccaactaaaaagatttacattatagtgtattttcttattaagtgttttttattaatttatgaagaaaaaattttatttgcacccaaaagatactttattttacacaaaatatttatctttaatttatatactttttttaaattttttttctttacttctcatattttaagagaatatacatataaaacagtggcgaaaccagatgaggaaataaggagg

SEQ ID NO: 206763 - DNA, 516 bp, Cannabis indica
gagagagagagagaagagtggttcccacaaatcacgtggaaagattgcagggaagcaacggtccaaatttcatctacataagatcacagtaagcagtgtagagtggaggttaattccaaagccaaagctagtcatgtagactcaactttatgctgttgactgttgagtagccgttgtatttgtcttctgtttttatgtacgagagactgagaacatagtccatgtttctttctattattattattattatttttttgctcaagttctttctattattttgcttttaagtctttatttatttatgttacaaccccctcatgacacattatttccagtctacaaactgtactactaaccaagacacttttttcttttagggaaatttcactatttgcccctaattaaatcgctcatatcaaaatttataccatctattaatttgtacaaaacaattccacaattactcatttcaacctaaaatacctctcaaatttaattttcctactctctctctct

SEQ ID NO: 206764 - DNA, 1034 bp, Cannabis indica
ttttttccctaaaaaataatataatatttgtttttcaaaagaaaaaataatatatatttaaaaggttcccaaatttagaaaaataccattttatattgagtcttgccaaactattggttttgggagaaaattattttattaataacgtaaaatcaatggagcatatattctaatatttgttttctttgaaaaaatatatatataatatattaattaaatattttgtttttaataagattcattgcttaatactaatactaaaaagtgtcactttcaacttttctttactcattattttgactaaataaataatgttattagaaaccatgaccaagaattttcatgaatggagggtttataataaaaattatgtgtattaattgacattaataaacataatagaaaaaattatattagtctacttcatgtcaaaattatggcatttttaaaaatttatattttgtggggagttgaataatataaaacaaatttacaagggctttttattactaattaataaattatgaaatatataatatgcatttttagttatcttttttagtggggcttaacactttggttttgcaattttttttattattataatataatttatagaatattattattagacatcagtaatacttaatacttatataaaatggtagcttgcaaatgattggtagttttttataataataattattaaattaaattttatggtattgatatttaaatacactaataacaatataatacattgtagtgttatgtacctagttatatcacatgcattattttataaaaatattaaagaacactaatgatgtctaacactaccataacgtgtcatatcactatttgtttaagtatcgagtttgttttcaaaaataaataaaaattaagtatcgaatttcgtatgttttaatagataaacagtagagtattcaaaattttgagtttgtaagcgacataaacttaataattttcttttgcggcataagtactctattaaagaaataacattatccttt

SEQ ID NO: 206765 - DNA, 1124 bp, Cannabis indica
atgatgtagtttttttttctcttctctcagatttcttttctctgtttctgctcttacgtatcaattgccaaaaatatttttttcaaaacccttttttctttttcttaaccgtcccccaccctctctctctttatagccaatttttttattttttgtttgttgataaaatccacttaatcgtgaaaagtggtggaggtggagaaaatatctccttaattttctctccattttgactgacccattcctattattattttttatataataataatagtaataataataataatcatcattattaatttttttttcaacaaggaggattgagattgataaatgcattggtcatctctactttttggtgcttgatttccccactgtccaaaataaaactgtttgtaatatttcttgtaatagtacacattcatggcatgctagacttggacatccatctatgtacactacaagttttatcaataaattgttacatttttaaggattctattgtttcttctccttgttctatatgccatttagcaaaacaaaagaaattgccctttaattccaataacaattttgctgtttctacatttgatctcatccacatggatatttggtgtcctttccatattcaaactgttgaaggattttgatattttctcactattgtggatgaccacagtagattctgctgggtctacatgttaaaaacaaaagttgagatacaacaatatatccctcagttttatatctttgtacacagacaatatgctacaagcattaaagttattatgtgataatgcaaaagaactaaacatgacatcattttatactaaaaaaggtatccaaatcaataactcttgtgttgaaacacctaaacaaaattcagtagttgagcgaaaataccaacatatcttaaatgttgcttgggcatttactttccaatcctctcatcccctagtatattggcctcacctcattaacattgttgtttatctcataaacagggcccctacccccttattacaccacaaaactgtgtttgaactcttgcacaacaagtaacccacctataatcacgtaagaacatttggctgtttggcatatgctttctctctaactag

SEQ ID NO: 206766 - DNA, 1102 bp, Cannabis indica
ctaatatatatatatttgaatatctaacatataatttttttaatgaaagaaaaaaacttgtttgtactactttcggcttttaggtcaattatttcccaattatataagtttctttcaccaattaattcatttcgtatataatatataatataagtcaacctagctaattatatataggtccctatctaagttatcatatataatgttttatttaatgaacctaactaagttatagttagtaatcatgaaataaagagaatatattattaagtaaccgggttcttcatcaagaaattagttttttggtaattttttcggcaacaataacaatttgaacgactttttcggcatcggcagtaactccaacgacttttctgacatcgacaactacttcggtgattttctgacgccgacagacaacttcgataattttttctagcctcagtgacaaataaaaaacattaaatatggaatttgcgaaaacctaagttacatatatatgacatataaataccataaaaaatacttaaaaataataataaaaaaaatatcatataaatgttaaactcaaaagtgtcatatttaaataaacaacttttaaaatctcacaaggagtataatttcctcctatgatttcttcttcttctcaaaaaataataacaataataataataataattgattaaaaatttctcacatttttttatgtattacgcgatttaatgagttagattacaaattttcatttacttttattaaaattaataaagatttttattagtggaaatatacatgtaacttaaaaagattttattgataggtaatttttatttttatggttttaaggtacaatttgtaaatatatcatttttcttaaaaaaaaaaatatatctattttatggaatttttttaagaaaaatttaaaagataaggttactagttaccatcatttttgccatatgtttttgacaattggacttttagacactaagcccacatatcatttataatgtagtagttttgcaaaccctttcattaagtaggtttgggcttcacttataagctcatgtgtcataaatactcaaaaatgattaaaaaaaac

SEQ ID NO: 206767 - DNA, 1089 bp, Cannabis indica
cgacaacaataaaattggcaaaaaaaaaattaaagaaaatcgatgcacaatattaaaaaggtagtaaaattataaattattgtgtggcacaataaaaacataataaaattaaaaaggtcagtatacaatgtaaatttccagaaatattaactttttcccactatatattttttgagaacttttataaaaaatagcaaaaaaagaataaagtaatataaagcaagtgaagttgtttgtatgattagatttttggtgcacctctcttttaaaaatatatatatatatataataaaaataaaaaaataattgttgcacctaataaatatttttattttttattctctgtgtttaacatagtttaactaatttgcaatatattttaaatgtattatagcaaattattaataactaattgtatattattcattatttaagtttttaggttttctaaaaaaaaaaacatactattacaaaaaatagtcatttttacctagcataatttgctatattgcgctagtattagtcatttttaccggtagtatcctgcaaactagcacttgtaaaaatgtcaaagttttaccagaacaaatttgtgctagcaaaacatatttttatcagcacaactagtatttgtgtcgacatagtaagccttctaaacatcattcccttgatacttaaaattacactggtaaaaatctagtttgccaatgcaacaatacaatgcactgataaaagtaagttttaccagtgcaaaaacataatgcgctagtaaaagtaagtttaacaagattagataaataattttaatatttttttggatttttttttatttttgaaacttttacaattatttattattataattaacattctaatatcttcataacattaataaaatataaaattttggtttattattaaattaatgatgattaatatttaaatgattctttataattagtgtcttttaaattaggttcattattcattttcataaatatatatataatcaataatttattaattgtggggttttttatttttacatttcaaatcggtttatttttacactagggaactaagccgcgc

SEQ ID NO: 206768 - DNA, 1582 bp, Cannabis indica
aaagattttaaggcttttggtgattatctcatgcaaggtaaagtaagttttttttttttttttttttctatttaattagctaagagtttacaggttatacgcttataatggagtgattatatgtgttttttttttctcaaagggagattatgactgttcatcatgttttggattatttagagctgttgctgcttttaattaatatattataaaaaatgaaattaggaatattgatttggtaatttttttttcgtcttaatctcttattataactcttttcaattaaattatatgagaatatagtgtttgttttcttaccagaatttcgatctccacttcataattctaagatctgggctatatatatatagtagcatatgtacgcttgtctttggtaaatatatttctgttggttttttttttttattattattattctatatattttgatataaatatgtatgtgcacatatatagtactctgaaattgaatgtacatgcatatgaactagctaccttctttaattcatgatttgctacgtgcataaaggaagagttgaatatatataatattttatatttatatgtaagtacctgaactatatattaaaagttcagtacctactacacaatgttcttattttatgaaaattttaatttctaatctaattttgtgcatgttttgaggagcattaaaacttgttagcttgaaattgtgatttatattgtatatctatatatgtatgttcgtgtatctttttctttttgatatatctacaaaccacaagtcaagcatatttctgtcatgaacccattaacttctatatcacatatcaaatagtgtgtaacttggtgttcatcttctcgtctcgacagtaggctataatatttatattcttaatgtgcaaatcgatctctctgacatgtttttgctggcagttctactgttctttatttggtacgtaccttttgctttattatcattttgtgttatatgtacatgtatataaatgtgtgtgtgtaataatacatatatataaatgtgtgtatatataacagatcaatgttgctatgaaattgtactattctttttataaaattgataaaactagaattagggttttggtgcttcgtgcttcaaaactcatttaatatagataggtaagtatgtatatatggttactataagagtatctgatattgaaatcgtccttatattcataagatgttttggtgcttggcagcgctgccccgtattattttccaaactatatataatggccatgaagtgtcactaaagcgatgaaggttgaaatttacttttgtggttagtccaacaattgaatatgaacagtttttcacaatttctgatttttgttctattttgcttattttagtttgttcttgtcttccatatatggctacgttttaaaaaatcaacttaatgagcggctcttcgatacctattttgcttatttaagctgtttatatatgcaattaattcttactgtcttatagtaaatgcattaaatttatcatcataattcataaacaagataaagtattaaaattaaataagtaa

SEQ ID NO: 206769 - DNA, 528 bp, Cannabis indica
gattcgatgggcagatggagcggtggctcggtcacggaggaggacgaggcgctactggaacgagagagaaggtcgatttgaaatgagagaaatgtttgaaatgagatctgagcgagattggagttatataatatgtcccatttagcttacatttcttaaccgtcagcaatttcaaactatgtaatggtgtacaaccgtcggtaatacatagtaatatttataaattgtcgtcaattccaaactattaacgataatttcacacactaacttaattttattagcgacggtctaaaaaaaatttcaacacggaggttaaataatagttttatggtagtgtctttttatttatttatttttcggcaagggccttgtcgcctttcattgactcaaaataaagacactaaggttagcttagtggtgagggagggatgagaaaaagaaagagataataagttcgaacccagcacctttaaaagctattaattgaatgtaaaataccactacgatacaactaaaaaaaaaaaaaaa

SEQ ID NO: 206770 - DNA, 857 bp, Cannabis indica
caatatgaacatttaccttttgataattattgaaacaccatcatagctgccagtgttccatagtaatgatttgcaacctttaaattcaaagtccacattcttaagaaggcatagaaggtataaaatattaaatatttatttttaaaacaagactaagtaatagttattgacaaatatatataaatttagacgaagaatcaacttagaacaaacttaacggaggtttccaaagcatgccaatgtctattggtatgaaattaagtacaattagtgtgtacaatattaatattcaaaacggtatgtgctctataatttgtttcatcattctcaagttctctttgaaatcaatctaatattataataaaagaaaattatcatatgggtcctgatcattgagcattgtaagagaaacaagaaaaaaatagaaaagtcaataatagaaaataaccattagtacgtgacagatctaatcttgctgcatccattcaatactatcaaaccagtttatcaatgatagagaaaatagaatgaattgaaaatagtcatacatataacagtgacactaagacttacaatatagtactaaaatagtctttcgacaataaatagaataatcaataattatattctaagtacatacaaaatattataatttaaagttttgttctaagaaattagggagatcttggtgactcaaaagaccgtaccttactactattgtatgagataagaaatgattaatacactgaataaagtggtggaaaagtgatttatgtgtataccattccgattctaaatgcaagtttgacatatgaactcatttctttaaaaaaataaaaaggtccttaattatttgt

SEQ ID NO: 206771 - DNA, 941 bp, Cannabis indica
cttgtacatatgttacaattgacacatacactagattgaggactcgaacttggagaggcagtggcaagattagtgcatagttggtgagaaaattgagaagcaggagtcgatttgggtgaagcagacaactgaagttggttggagtcaaaagtatataggccattgtggtgtttcccagtcagaaggacagctttgctcacttgatccttaacataacacacatcaggataaaacacaaaatacacattgttgtcagctgcaaatttcgaaacacttagcagattcttggtgagatcaggtacatgtaacaatttattgagaatcaaaggtttagtgcaagagttgggaataagataagtgttaccaatttgtgaaatgggaaggccagctccattaccaacatacagctgctcagggccatcataatccattgctgtcatgacattttgtccatttggtgtgcaatgatttgttgcacccgagtcggggtaccagttatcatcagcattaggagttgtttgggccacattagcctgtaactgagattgatcactgccaggaaatactccagtgaagctcttgtcaaagcggtaaaagcagtctatgactgtgtggccaagcttgtgacaaagctggcattggacacgattttgtgtagctggaaaccgtccacccctgcctctgccttgtgtagtgccattaggtactcgaggaggtacttgatttctaacatgacctctgaaattggggaaggaagaggagttaaaaaaattgaaatggttgggagagaactgacctcgagaataggcagcgggtctgaagtttcgatttgtttgagctatagaaggcttcaagggcagaatcttgatcaaccatggccatattgatgctcgattcagtttctggtcctccttctcaattcgagattcagacgcaagagt

SEQ ID NO: 206772 - DNA, 1238 bp, Cannabis indica
agttcacttaaattctagtatatttgtaaatttttttattaaaatgagcaaagataaacacttttatatcttaaaatttttttatattttaatttttatacacttcatttttttatttttttattttttttttgtaaaactcgtttaaatttatttttccttacaaatttaaaatttcagttagatatcattattaatcattattaaatactaacttgattaatactgtatcagagaatgtttcaccaaaatactttgtgtctctctataattttactatttcaaaacttatttcaaaaagaaagtgtcctctcacaagaaagagctttttgtaaaacttgaataagataagctgacttggaccagaatagaccattatgctccattaagatagattgacttgaataagcttgaataagagattgagagttggaaaattttatttgcattctataaacctataaattctagctaaaatagctaaaaacttataatagagagggaaattgtaataaataaccttaaatctcacaatgatgaaagctaatgtctattttttaaaaaaatgaagtaaatggcgttttataaatgttaatacctaaaatgcccttagttatatagatgaggcttaacaccattttttttaaatttgttctattatttacgcagtgaaaaaaaaaataatataccaccagtatagtgaaaaaaaaaaattaaacaaaaaacttttaatttaattatgtagagaagaatataaagaaattgatgtgtggtttaatgtaaaaatgtgttgaaaaaagataaaataaaattttagtgatgtattttaaagaatagaataaaaaaactattaggagtgctcctatccatcaaaacccctttttctctataatacattagagaagcatgaaaaatactcttacatcatatgcataaaagtatatgtaaaataaaaatcttctaaaatttctataaatgtagagaatagagttgaatatctggatccaaaaatccacccacttggcaaatccatcctacccaaaacccgaaaaatgggttttaaaaattagagtctgaattcaggctcaattaatcaaaaactagaaaaaatcaagttacacctgaacccactcaaaattcgtacgtaattatataattttttttaaatttttatacattttttttaatgttaaacttaaaacaaaaagaaaaaaaaaaaaaaccctaattctaaagaa

SEQ ID NO: 206773 - DNA, 817 bp, Cannabis indica
agagttgactacgattttattccgtgatatactttcacagaatgtattccgtgatgtacgacagccgttagatgggagagttatttgatctgagggctgagattgatctaagggtaattagggttaaaaatgttaacgtaccctgagacccatctaatgtataccctaagacccatttaatgtaccacagaatacattccgtaaaaatacatcataggacaaaatcgtgccctatattttgtattataatatttcttatattttattatatctctcagattgtgattggctctatcacaagttgttgccattttatatttcttatatatgtaattgattgtctattcttcacacattcacaaacacttttttagccttcaaattgtaactctcctttgtgacatccagcaatcgttaatatcttcttcttctttttttcttttaattatattattgccttttgatctcatcatatagttgatcatggaataatattatagtggccacaaattaagtagtatatatactagtgaacatatatgattatatttatataactaaaaaaaacagtcagttttagtaataatttttaatcacaatatttttttttaattaaatataattttagttacaacaaaatattacttgtgactaaacataatatttaaatacatgttattactaatgtagttttaattagtcacaataagtataatgacgtattgtgactaaaatatatttaaatacaataaattataattttttggactaatacttttaattacggtacctttagttcacaatataattaagaata

SEQ ID NO: 206774 - DNA, 1528 bp, Cannabis indica
attacaataaattaaaaatattttcacaactaattaatattaccaaaaaagacataatataaaagtgatgaaaactaaatataaattttcatgcacacattttttttaaattatacacacacatattaatttatttacatataaaatattaatcaatatattatattattcattacaaataatatgacactgtgtcgtccaatatcctagcctcatttagacaaaatattactgaaaaaaatttaaaataatagtgccaattaaccatttttctttataatacaagtctatataaaataaacacaaagcaatatagaacattaatttccaaagatgctctattctttttatggagatgacaccaatgaattgtgtctaaaaaggggctaacatcctcaaaattatgcaaatcacaaatcacaatgctatatacagctaatcataacatcattttcttctaataatagccttaagaccactataaagaaattattctataacttccatccagaggccagcttaaagctaagaaaaaagaacatttatttcttgatttgcaaggcagatcttgaaaactaagcacacatcacataacattcacaatggagcttaagaagatgtccattgctgtcattgttgcagctgcttctctcagctcggtcctggccgtcgatgaggacctagcccctagccccggccctggatcgttaagtgctgcctcatctactttgcctgtagttgggtccttggttggagctttcccgttctttcgtttattggctatattacattcattaagctcaaaactacacaccatcataaaataaaataagcaattctataagacactctattgtatccaaccccgttatggcgcctcatatattattattgatgtaattaaataataaatattacatatttaatatttaattgtattgctaatagtatggtatgttattagggtgtttggcattatagagtggtccttagcaattctcaaaactaaaaattgaaaaattaatgtaaggagttgtaaagataagataatggattctcttgtgctttaatttagttattattttatattaccattaatgtattctaaattatgcaatgtattaagaaaaagaaataaaaagtacatcattatgagttgtgtgtggatccacaccataatgtcatttttagttcataactttcttaaagcattgccattattacaaatgagggtctcttattaatttaaagagcaataaacataattattttcataaagttaagataataataaaagtagtagtgagtgttgtccatgaatgatgcttttttttttttttttgacaaagacaaattctcaagacgtgcttatcttatctaatatgataatatcatgcaatttggaacttccacgaccaaaaaaatttctttggaacttacttttcttggatccaattcatgcaatcatttctatatcaccaaaaatgtgtcattgaatagagtgtaatagaaaaagaaaagaaaaata

SEQ ID NO: 206775 - DNA, 892 bp, Cannabis indica
taatatttatatttcaatttattagtaatatatacccattaaaaagtgttctatatatataaaaaagaaaccttaatatgtcacttttaaaatctctctcattaatctttatttattcactacttaattttttcattttttttttaaaaaatttatttgaataattccctaactagtaggtaggtatatacacgtatagaataactgtgtaccacatttaaaataacaacaatagagttaaacaataacaatggtgttatgaatgaaaatgaaaaaaaaaaaaatacgttttgattgagagacccaaatataaaaattagattttggataactattatatgaatttaagttgtgttttagtggtttaaaaattaaaatatgtaattgtgttcgcttcaatcaaaattcgaacattctgtttttttttttctttcttaaaaacatattctaaggttggaatacacattactctaatctataatttatttactaaatttaataaatattaaaataaactacactagtgagcgtgtgcctacttttatttttttttttcccttttctctcttaattaataattagttcctttttttaatttttttttttaaaaaaaaaattaaatgaaagtaattaaagaaattaatgtcgatttcagcaaaaaaaaaaaaatttaaaaacaatcaagctcatattcaaataaattaatttagggagtaaattgctaataacaattatatatatgggtatgctcttaatgggtattacccatgtatgagtattttattcttgaccattggatcaaatatctaatggttgatatttatcatcattaattaaatattaaaaaattaatatttcctattttgttattctctatattcctaaaatagat

SEQ ID NO: 206776 - DNA, 654 bp, Cannabis indica
aaaaaaaaaaaaaaaagagtaataccttgggcactttcttaatctcaaaatcagaatctaagtccaaatctttaatgacacttttagaacgttttgtttttctcttgtccactgagtcaaccactaatttccttttcgtacttactggagaggtagggctaaggggatgatctttcaaatttttcttagcgaggcttttcttactcaatgccgatcttatttggattttttgggagttttttgacgagatgagaagttgaagatgaacgagtaacaaccataaaaacaatctaacactattaagggaaaaacccacgaacaaaggagggaatatgatttaaaaaaaaaatatatatcatggatcaaaccatcctcaaccgactaacaattgtaacaatgtaaatcaaatttttaacaactgaaaaagaaaatgtaaattaaagaaagaagataacaaagaaatgaggaaggaagaataaaataagagaggaagatgatgattatgagaaccgtctttgatgagagaataatagggagttgagaaggaagggggaggtaagtgtgctaataattttatttaaaaaaaatgacaaaatatgattgacatggtaaacatcaattaaaaagtatgaaaataataacaaaaatacaatt

SEQ ID NO: 206777 - DNA, 774 bp, Cannabis indica
aatattattaattacagaataaaactagtggtagagatgggagtgcaaatggaggctgcgccagcttcaagttaaagaatacatattttattgtttagaaaattagcatatggcgtataaattaaaaatgtgcatgtcaataattacgttaattaatctaatttagcggataatatatataaagagaagatacgtaccgtgaaaaagaaaagaaaaaaaaaacactgataatattaagcatgtaaaggtacacgtacgatgacgcaatttgaaagttgcggctcctgtcaatggatcgatcttctcctttattaagattctatatatatggaattattatttttttttgaaaaaatatatggaattatttaaaccctaattaatattactacgtacttcttctctccgtaaattttggtacgtaaaaattagatgtaaattacattaattattacatatttatgtacatacgtatataacaattcatttttttttttaaaaaaaaaactatatggattgaatttaaatagtccgactttagttggattgaataggtttccccatgattaagtcaaaatttaatttaaaattgattcaatataataattacatatacttcatatataaaatataattatttgttgatttaacagaatatttttaagaatttaagaatattctgtttaatttaacggtattagtagggttattagttttataaatatatataaatattaatattatttattttaaattaatttaatatatataata

SEQ ID NO: 206778 - DNA, 916 bp, Cannabis indica
cgtgtaacatactttaagctcagtttcatatatttgggcttgaagctgtaaatcaacggtatattgcatactcagaattaaattcactcccactattaatatatttatatatacttgtattttttattttattttttttcatttctaatactcatccacaaaacaatcacattgccgcgcaaacaaaagttgatgattatttatttgaaaagcatcgatcaacaacgactatagtagccacatatagattttgtagcaagcaaagatttaaaatcaatgtattattagaaaaagaagttttgtgcataaatatattcagagtaatattaaatatgtaagattgaaaaaatgaaagaataaattggagtaccttccttctcaacgttttgttagcttcaagtaggaattgttcctgttaaaatgataataaccacagaaaataagaagcataaaaatagttatattacatgctatatatattgtatcttatggaatgtgaattgatgtgatcgtaaaatacacataccctgtgttgaagatcattaagctgatcaagcaggcactgggtctgaaatatattttatatataaaaaagtcggtattagcaaatctccgtgtttcttcttatatttaaatcattgaaaggtaggccactcactccaagaataacccataattatcattacttttttatgaatacttttagtgcggtgactaataaaaaaaaatgttaaaaatacttagtggtatcaatttattggtgtaattaagtatgagtctcgtatactttaatataataatttttaaaaaatattactcataaatcattaaaccatatttctaaaagtgttaagtactgataccaataagaatcctctaatcaaaccaaaaatatgttagcataatatgtgcttta

SEQ ID NO: 206779 - DNA, 538 bp, Cannabis indica
aagatgctataatgtttcaattaagactattctcatggtccgggaaggaaatatagcagaagccaaaacatcatctcaacaaacactgggggtggttcgtgaagaggatgaattggatccatgggaaggcgtggaacgcaaaattgatcctatggaaaaggtagaatgtaatgaccgttatacttagacatgggattagtgggacacttagcactaattaaggtgaagatttttgcttggcgagtcattcatgacactctgccagtagcaacatctttggtcaggcgaacgatcatcaccgattctacttgtttggtttgtaaaatagcttggaagtccattggtcatgcgctttttggatctaaatatgcccgattagtgtggcgaaatacacagatgaattttgattggagtaacgcttctgctaataaaggtgattatttggtgtatctctcaactatctacagcaaggaagagatggagcaaatcactacactctttgagcaaatcacttgtacaccctggtctatttggacat

SEQ ID NO: 206780 - DNA, 1053 bp, Cannabis indica
atcgggtaccgagctccggaggctatcgaaacccgaaaactcacccaaaaatccgatgtttacagctacggagtcctcctactggaaatgctaactgggaaaatcccaatccgatatccgggtcacgacgaggtggtggacttgcccagatgggttcgatcggtggttcgtgaggaatggacagcagaagtgtttgatgtggagctttctgagacagagccatgtagaggaggaaatggttcaaatgcttcaaattgctctggcttgcgtgtccaaggtgccggagaaccgacccaccatggaacaagtcgtgaaaatgatcgaagatcttcggcagccacagatcaaaacttgggcttcttctgaatctgattactctaatgtccaaaccccaaccccatgagttcatgaccctctttgcctttttttttttttttggatttaaatgtgttagagattctcactctatccatttttgttttctctgaataatataaagttcttttttaactaaattctactacgattgtatttgcatgtcatgcatggttaggcttgtatttttagctacagtgtcaataatataaggaatgaattaagaaaaaatcatataaattactatattatatatgtcttatcaacataataaagtattaaaaaatttaagagcatctaggtattactttctgttttttattttcaaaaaattattttaaaaaataagaataaaaaatagtttttgaaggttttaaaacacaaattatatttagttactattttttaaaaactatattgactaaaattgaattagtttttaaaacaaaaaattcaaaattcttgttttttgtaattttattttgtgaaaactgttttcaaaaaacaaatttttagttatgatgccaaacatatcctaagattcattttccatggctgagctccaatacaatttttgctatcccacttagccatcttaacaattaatgaatatacattccatatttggcataagagattcaagaacaattgggagtgaaagtcctaattactacagat

SEQ ID NO: 206781 - DNA, 996 bp, Cannabis indica
aatatataaagtaattcccctaaatttattaaatttatttagtaaacatctatctagtaaaaaaagattccaaatatatataatagatgcagtattgtcaaccctttgatcaaattttgatttgcttcatcaaaacaattttgatgatgatgatgaggttttattattatttatttattaattaatttgaccagtcaattaaagacaaataagtaaacatctttggtcatcatatgtggcccctaaataatttatagagaaggaattctcttcaagagcaggtgaaatataatatttccatacaatactcgacaatatataagacaatatattttttcaaataacttttctagtataattatcattatttttttttcttttgggtcaataaaaatgagatatttttgttaattaatcaattgggtcaatagtccaaatcaatgaagccctaatatttaagcaacacaaacaaatattttacttatctatacatatgtaaatatataaaagacaactattgttttattttatatatatggatttttttaatttaattaaaaaaaaaaagttaaagaatgatgaacacgtgtaaacgacaatttgattataccattttaacacttcactcaaaataaaatgaaaaaaataatggttgttaaagtcccttaggtgtgctagtactttcgtacacatattattaatttttatatttatgataattagaatgtttatcaattttaaaatgtactaaattatatcttttaaatttttttggggtaaaatttttcctgaattattgaatttattagattttaagaattttttgttcaattttattcaatttcactaatttggtgattattttatgtattaaattatacttcccagactttaatatctactaaattatgcttctggaattttgatatatgccaaatcatgccccctaaattttaaaagttcttaaatctaataatcactacaaattttttttac

SEQ ID NO: 206782 - DNA, 1156 bp, Cannabis indica
ccaattcagggatgaatcgtgtgagggttcgcacgtgcggagtcaactcgttttggtaacaaactaatatctattataagagttgtgtaagctttttgtggtaatgatgagaatgaaagattttgacattttattttaaaaaatatctattaaataaatttattttctctaattttaaaaaaataataataattgtggatggggattttttctttaatttgtttcatgtttatcttcatttttcattgaatctaaattaaaagagaatgatttttttatcacattctatttaacaaggataatatgttttattacattctaaataaaatgaatattattatattaaattaaataaatttagtaagaaacatcacatttttaggtacttttataattttttctctcacttttgttatttatcctttattacttattgtgattttttatatattaattttttttaagaaaaaatcagcaaactttattagttattgataaaaattctccaagaacaccattccaactaaaataatgatataaaaaaagaatatgaagctcaagctatactataaattaccttgttagcataataaacaaaaattaatactaaaaggataaaacatagaaaaacttaaataaattacatctacaataagttggtaatctaattcaaattgaaaatcattatcgtgttttgatccaacttaacgcctctcgaatactaatagcttcagttacaccgagagcaatcattccctcaaaacaaaatgagtgaccctccaccaccctctcctcatggtccctaacaacccataacaaccctaaaattgaaaaattggatcttggcttgacttgaaatgattgaagcttaacccaagactccacacctgaaacccaactagtagtaagtaaaagaatgtgattgttatctctcatatgggctttctcccattcagcaagacacaccaacacaaatagcacaatatcttccatctaacaacttgagtctcacccaacttcctaatactcacccaaccactcagttaaatcaaccaattcgagaaatcaaatagttttcattttgtgttttataattaaactttagttttcattcttactaaaatatttataaatctaactcttatactttttcaat

SEQ ID NO: 206783 - DNA, 509 bp, Cannabis indica
atatctttacatacttacgctttggtaattatcctacatatatacctttacatgaaattaatgaatatatatataccacatatgaactaataattaagaatactaaaattaatattaaaattatgttgctgaaataaaaactagtacttgtaaacttttttatgagtacatatacacgtacgttaattaattatatgtaatatcaacatcgaaggtgttattttcacataaaagtatttttctcaactgtaaagagaaaataagagagccataattgcattaataattaatgctgaagtagtaggtggtgactgatatatatatatatacaaaatatatatttaattattatgaaataattatatgggattttcaatttggaaggatttggtttgaatttttgttttcttttgtagtctttattggacttaaacaaattacaagtttttgtcaattaattttagcaaaaccatgtgaataatttttgacattttgcttctatatatata

SEQ ID NO: 206784 - DNA, 878 bp, Cannabis indica
gtaaaggaagaaagcaacttactctttgaagttagggctttggacaatgaatgattactcaatctgtaaatcttcgaatgtcgtaaggatcgcttcgagaagatgaagttggaagaaactcgtagaaaaaatgtcaaggacagggatggcatgcaaatcctcaggcaaactcaatcgttattcatagcaaaaaatcttaagagtttctcagactttctaaaatggaggaaataatgcaaaggtggttccttatttcttactttatactcatgatattggcttcatcaaatcaggaaaatatttgatcctacaggtagaattgaaagtggaagtggaacaaatggtcatttaatactaatgtacctagaaaccgcacaaccgtcgaaattagaggacatgcgtcttttcaaaagggatcatgacaaaaataccctttgtaatcattaaaaagaactttttatcaaaaaaagaactttttaaggggaaattgttatacccgaaattcgacgagcacatcagagaaagacacgtgtcaagctgggaagaataaagaactcaaacacataatcataattacacttgcaacgaaataactcgttaaaggagtaattaacatagtatggttacaactcggctgactaaacagtcttatgcgagataaaaatgtacaaattgttgccttgtgcttcgatgagaaaccatgtaactttaggtgtacaagacgatgcactaacctcgttacgtggaagagatatgacgataatggaaatacttagcgtatagagtttggtatacaaactaagtacaacaaatgggtgaacagaagtgagagataaacgagacttccacctcactgtaagagggcatgcacgcaaaaa

SEQ ID NO: 206785 - DNA, 1007 bp, Cannabis indica
taaactgattttttatcaaaatattagtaaatagtactatcttgatctagaattgttatgaagaaatctggtacattttctatatcgtcgtaaaaattatcttcaagttagttatttaaaaaaaaaaaaacaaaaattgagttcagagtactattttgtaacatttagaaaatacaaggtaaaaattgtcttcattaattatattaaaaaaaaaaatatcgaaaactaaattcaaggtactattttgtatcatttaaaaaatatagggttcaatttattattttacaaaatagaaaatttaatcgataacttttataaaacacagtgtccaaaataacattaatactcaaaaaaaaatgtatttatatataaatatatattttttttggttttattatacaaaagaaaagttggtcttttaataaacaataatattaattctcgttcaaaataaataaataaataataatatgaacaatattttgtggtcaagtgaagtgaaacacgcacagtctctctaattaattaattaaccaaaatactttcaattcaattaataataattagtaaatacaagtaccatatacgtttagtttaacaaatcaagctcatcttttataccaaaattttaaataaataaataaaaataaaaaaaacaagtatagtaagaaattcaaagtcaagatcctacatatataaaatgacttttattttttcaaaaggaaaaaaagtatatatactagtacttaattttggaaaattattcaggtatactaaatgtttttatatataaaaatatatatattgggaaaataataaaggaaattaagtttggcttaaaaagtttatacctttgggtgaaaaaaaaaacaaagtatatagaaaaaaaattatatatatatatttgattaatgaatgtaaaagaaataatagaataatttcttttctttttatcattttgattaatttcttaaaatagttcttaaaatcctaattatatatggatc

SEQ ID NO: 206786 - DNA, 1138 bp, Cannabis indica
ggtggtgtcttttcattttatgaaatgttatttaattatttattttcttttcatgaatatttaatctttctattttaacattaattcatgaaattgagcatttaaaaaaaagtaacaaaaattaaagcaaataatataataattatttataattgatatatctaataatatcatgtggaagactatattttgcctccactctagggtcaaatataaacgtttgtttttattaattatttatatatttatttttaaaaataaataataaatatgttaggttatgtttaaaatttaaaatgtataatatttttaaggcaaaatatataaatttaaatgatcataaaattatattatttttaatattcagagaaaattatgtcattatcaaaatataaacttttgatttagtttgaaaagttgacaaaaaatggttcacttggttgctgataattagtttcataccattatttatcttattaatttatataaaaaaaatattgaatttgtaaaatgattaataaaattgttaatgtaataattttgtaaggtaaaatataacttttaataattataaaatgacatttttaattatttaaaagtaagttattattaatatttagcttattacaaaaatcatatttgtaatatatttttcaagtgtaaaacaagaaaaaataaaggtttatttaattattatgtataacttaatgaaagatgtattttttttattattataaattatttttgttaatcgtaatttttatatataattaaaaagaattaaaaaaaatttatattttaaattttatttataataaaaaaaattatttattttaatataaaattaaaaaaatatttaaaacagtgcgaagcgcggcctatttcctagtaacactaatacaacaagatttttttttaacattgaatcattctaatgaattctaatgaaaagaacaattagagagtagatgagaaaaaaccattcaaataatatacatttatgatttaaatgttaatttaaattcaaactatattaattaaaattcattaaaattattataatcaatggcataaacaaaacttattttacctttaggtgaaatatatgcttaaagaatttcctttcctttcttccttc

SEQ ID NO: 206787 - DNA, 1736 bp, Cannabis indica
acatatgatttgatataattattgtgtgctatatataagtttgatttttttttagataataaaaagtaattgtgggtgacatgataaagccgtgttacgtgtacgtacagctagctaggtagcaaggtaaagtcatggttgattttatgaaaagattaaccttgttaattttataaatatgcctttcggcaaaagaacagaagtatggattgagacttaagagcttattcgccaggataagatttacaacttctttctcatttgtctccaaatcattttaattacttccatacactactatatgtctattggactagtggttggttaccattcattacaggaaaaaaatttcaaccaccacgaaaagaatttaatatcatatcacgtctacattcctagccaatattggtatatgtacaacaacatattgagaatacctttgtatttttcaaatatatgtaatggaatgggtcagcatattgtgaataccttttgtgttttttatttgtatttatttgttcatttattgtaagggccagtatattgagaataccatttataactccatgcacggtaattatttttacgaatatatcaagaaagtcatattgtttagtcttcttttatcctcatgtcactagctacaacaggtagtagttgtgtaagtttgtgtgtgtcatgttagtccgattcatatttatttatatatttttcaaaaaattggtcgtattgtaccgtgccacaaaaaaaaatataggtcgtactgtaccgtgtcaatatttttaaagagtaaatcaattacaataaaagagtttatctatatatatatacagtgaaagaggcccagtgtgccagtattgggcaagtaacaataaagcattctaactacctcccccccccccccctttccaacgataaactgtataagtttcttaagttcatcttggttacaagtgtatatatatgtaagaatttattactgttttgcctacaccacagcaaagtaaacaaatcaaaaagcaaggtcaaattagaactttaaacccagtcaaagattccctttgactcctgatttaaactccccaacgacaactctcttctatgagctacaagtcgtttcacttatattcagaaaatcctaatttaacacatatatatatattcctttttaaacctcaaacacataaactcagcaaccatcaaaaaaccctagcagcatcctttgttcttcactgttcttctctgaagaacatgaagacagctgttattacagcctagaaaataaccttagccagagaataaacccaacccgattgcaccctagttcaaatctatccccagaaaattaactcccttcaaccgagcctttcccaaaccgattcaaacccaaaaaatcatatacacaaacaacaatcaaacaaccacatcaatgaaaaataagaaaagaaaaaagagaagaagacaccggttttatagaggttccccaaaaatattctgatgggtacgtcctcttcgagcttgcctcgttccactatgaatcttcaaatatcagagtttacaagaatatgattccaatacacacaggtacgaattggtaatccctaatatttacagtgttaaaatcctctcttcttctttctgtttctctcagatttctgtaccagcagttgtgattcttttcttctttgttgcatgaacaacacccttggctattggatatccgaaccaccaccttg

SEQ ID NO: 206788 - DNA, 1843 bp, Cannabis indica
taataacattcttcatctgccgtcaccttctcctctgtgctctggtttttgctattttactaagaatctgtctgctgggaaggaatttttgctacttatggctaatcaagaacaaggctcgatcgacgaactggtggaggagactgagaatttcagccttgatgattttgcgatacaggtggcccctgataatgccacggctcaggatacagtagcccgaacggtggtgggccgattcgtggccaagcagagtgtttcgattggaacgatgagaagggcgttatcgggtatgtggcgtgtttctcctgggtggcgtctacaagaaccagttcccaaaacgttcatatgtcgtctgaacagccccaaagaagctaagtttgttttggaaaatggcccttggaatccttgtgggggcttttgctggtggcgactctaccctgaagatggtgactggaaatctgcagacttatcttcactcgacatctgggtgaaagcttcgggggttcctatgccgtttatgacagaggaatgtatagctaatatggctaaacggatggggtctctcctccaggcgaacaaggtgagtcgtaatggtatcattttgaatcattatttacgttttcaagttcgcattaatattgctattcctctcttggcgggggtgtctctcactgatgagaggaaaaagagatggtggtgccactttaagtatgaacgccttcccctgttttgtttcaaatgtggggtgatcggtcatgaggaggaagcttgttccggtaggaagagaactgtgacggttcatgatggtcgcaccatccctctatatggcccgtggcttagggaaggttcaaaactggaaaatggctttgctttgttagaggttgatgatattcatgacattaatagattggaaaaggaagacccggttggtgtgggtgttgggggagggtcggctagtaatatttgcacgaatgttaacccaccagtggaggcgaatgtctcggttggtaccactagagtagaaagggaaggtatggaaggtgttgtatctcaaaaatcggaccaagcttttgccgtggcttacaatgattatgtggatgtgtctaaattccctacccctcatgtaatgcatgtggccaatattttcaaggaaaagttgggcccgataagatttggggctgaccgtgaggatgggaaggtgatggctaagttgggaggtgctcttgcccttagtaaacccaaggtagttggtcctaaaggagtgcctaggccaccggttttcggtcggagtttcgacaagttgagtggctccaagaggaagcatggtatcgggaggacaacccgaacgaatgactttgttgcagaaagtcaaggacaaacctgcatccttgtggtggataaaacaggggtcccgaatgcttttggcgcagctagtggaatcaatcaaagtgatagttctgcaagaggggaagagagtgaagactatggtaaaagacatcgcattgacttgagcaatctgagatcggtcgagggttctttcgggtcaggaattgggggacaagagcctcggttggtgggtgacaagaatgtggatacagaggataggcaggggagggtgacggagtcggctcctgctcggttggtagtcactggaggagagacggagtctcttatgtctgatgctcgaatttttgaaaaaggagttgggtacccatgctgggatcggcccggttgtgcgggatttttctttggccgaggaggcgggccgtatcatgccccccaaatccccactgaaaaactgttatcatggaactgtcggggcttgggacgaggctcggggcca

SEQ ID NO: 206789 - DNA, 734 bp, Cannabis indica
cctaagtgagaactgatcaacactagttttttccttgttgcatgactagcaggcccgacctgggctaaggcgagctaggtccgtgcttacgacgcacccaaacttagggcttagaatttttatatagtatacttttatgcattaaaaaaaatgtatttttttgtaaaattttattaaaagaggtccaataatactcacactccactttagatataatagacacaataaaatgtcttgggcccattattactcagaatcgaccctgatgactagacatagatgagacaaaaaaaaaatcattgaataatgtaaccttaccctatcaagttgtgcaatcagagcctcaaaaggcaccactctttaggtcctagacttaaacacgagttaccaccccaaccaggacccagaacttggaacctagaccaagacccggatcctagattttgaaccccgggccctaaacgcagatgcgaacctagaccagatcctaacctcgaccctgaactcggaccccgaacacaatgttggacctagaaacttgacccaaactctagacatggatttggatcccgaacccgaccccagccccagacattgaaccctgaacacgaacccgagtatgtgagaaaaaatgtaaaaaaatgtgtttttaaagtagaaagcaacattttgatattttctatttttttttgttttttatttaactcggtgtttcataaaattatttttgaaaa

SEQ ID NO: 206790 - DNA, 1367 bp, Cannabis indica
caatataacataattatatatgtatatgcatatgtgtcactctcattctctctcaacataaatagattttcattaaaattcataaaagaaagtacaataaatagattaataatgatttttttttacaacaaaaaaaaagcacacaaaataatattcataatgacacaaacaaacaaacatagccattaaacacacacatatataggagaaatatttcaggctatttttaaacaacaattttttatttttttaaagaaaaaagaaataataatagtaataataattaattaattaaggtggtgtcttgacaagaagtgtggggaaatcaaggaccacaatgttgtctattgcaagtgagaaagttgatgagaattcaacatgtttgggatgcccttgaaatgatgtgaagtcttctttcttctcaaatgtcattaagaaggcatgagtgaacccttgtcttagcatttctaagctctcaacatcttctcccctataatataacacaaataattcattactaaaaaaaacaatggttctaaaatatttgatcttaggttaaattcaaaagtagttcgaaatttttgattggatattgtaaaggatcgatcgattctatgctaataattatttttaataagtagtgaataaatatattacatgttacttattcagacgttaattttatgatttatatgagacatcaggacatcagggcacactaacaatagtatgggagctaaactcctcagtaaaaaaattagtgttaataaaaattaaatatatcatatttattttaataattatacaataaaatagtaaaacgtccctacaaaataattataattcttatgtaaagtaaatataaatatttttataacaattaagctcttataaattaaaaattctgggtccattactgtatgcagtcaatgtttaagtaaaaaaagtacgctataatttagtacttaagcaacaatttaaaatcgatatttaattttttttttatatcatacaaagccaatagataaaaatgaaaaagaaactttagaatcaacatagaatattcaaaagtagatcatgaagttgaatttttttgatctaataatctcatccttctttagggtttttttctaacatggattgaagattatttaaagactatataaatatttgtatatatatatatatatattattaccattcgaaggacttgacaaaatcaacctcagaaaccaaagtctccattcctttgacaacttcatcaacttttacatcatttttgaacttgactatcaccaagtgtttaaactcacccatatttgtatatataaaaatagctttgatttttttttcttagagatgtttat

SEQ ID NO: 206791 - DNA, 1498 bp, Cannabis indica
aaaaaatatatataaaaaaaacttatagaaagccacctatagaattttatgtgttttttttatattaatatatagatatagatataactttgtggcatatatttatttatatatatatattaaaaaaaaatatatatgtacatagttttatatgtaaaatatatttttggtctttacatcttttattattaataatacacttatatgcattaaataaaaaaaaaattataatttattggagaaaattcagattaaagaaacaccaaattgatttgtttggtgttacaacacaccttgttatttttcaataactttatttgttttggtatgtattttagacatgttgtgtaggcttgttagctttttaggttaaggaaatttttttttcttaacaaaaaataaatatttattcaaattggagcattaacaataattaaaactaataactaattcttttacctcaaaaaaaaaattaataactaattttttaaactatatatgtattaaccaacagttttacagttagtattttttaataaaaaaaatattttgtagcttaaaaagaactcgaaggtaaaatataaataataataattaaattccaaaccttaatgataattgattgatttaatttttttgtcattttttttttggaaagtcacgtaaaccatatgtttattgttgttctattatttttttttattccatttatacttgagtgttttcactatttatatatatttccttattaattttctttattattaatttgtcatatttttttttaataatgattaaattttattaaatcaaatcattcaaaactaaggatgcataggtaacacattcctaggataattacaattagcctcaaaaaaagaagaccgcgcaagagcgtgcacaaccttattagcagattgttttacaaaattaaaagaaacatcaccaataaccataattttataatctataaactttgtgtaattaaattattgtgaaaaaatctgttcatataacttgtccctttgatatgatgtggtggaccaccaaaaaacaaaattataaagaacaaaaaaacaataaaaaaaaaataatctttttaatacatttaatttaattaattctacttaaaaaacaattaattaacttttctatacctcataaaaaaaaactttactataagaaaatatagaatttgatttttggagtgcctctaagaccaacaaagtggagacgagaagattgtgatgctatcattaataagattaaaatgtggctggttacttaggctactaggcatctttcttatgctggctgaattcaactcattcattcagtgttgctacgacttcgcaactattggatgaacatattcattcttcctcaaagtgttattaaggatgtagagaggctttgtaggggcttcttaataccaactaacatcccccttcaactcttactcccaaaaatcagctcctttcatataaatgtttatcca

SEQ ID NO: 206792 - DNA, 1782 bp, Cannabis indica
atttgcatgattttaagtattgctcttttctttccaatttaataagattataagctctacaataaatgagatgctctagttcatgaattttggtgtgctcattcttgaatatactattaattgtccaaaatattggaaacataaattttgttctcttttgatttagatttggacttataacgttcttgttaatcgtctcactgtcaagaacaccatcaaaaaatttcttcatgttggccatattctaaatttagttcttgagtcacatacttcaacaataatgagaggcttcttttgattcaaagttagcactgatattggtaaaattttcggtcttgatatacacattcgtgtgaataattacaaacaatgaataccttttaatatgtttaagagattatagttttatcatctgccctatttaatatatttgttcgattgatgtggactcacatgtctaccaccagtgctgaatgtagattcataagtaacagtgttaataggcacataaaatacatctttggcaatcatattcaacaaaggatatttaaggctgttacctttcaataattgcatgcatcaaaaaactcttcaaacctatgtaacaaattatcctctaaatataaatccaattcagacttcacattttttacttgatagacagctctaataaatatgtcaaagtgagaaaggtcatccattcgtcgaaaaagatgttgatacattttctacccaaacccttatttctctcaaaaaaagaaacttatactcgtactcctccaatagcttataacaaagctcatggacattttcactttcagtttcatattgtccgtcaccataaattgcagtgaaataatattcgagcaacataaacttatacctggggtctaaaacaaccgccacacacataaacctataatttcttttttcaatatttttggaacttaaacatcattttaattgtcatatccttaataaaaggcacatcttatgacatctataatttattttttttttcttaatttgacatattttgggcaaaaaaaatgttagcaatatgatactttgctctaaaaaataattctgccacttcataaatacttctaacttctcacataattgttgagaattttggcaaacaacttctaaatggacacacctcaatcgcaactcacgtagtcttacacattcaacattgtgctaagcattaaaaatgtagaactccacctagtcacacaatcaaagaatagaagagactaaacaatgaataccttttatatgtttaagagattatagttttatcatctcccatatttgatatatttgttctttattgtgtctttttttttgctttctttcttttaattgctgcaataagtttgttcatttgattatttctatgaccttcaaacatatataatttatcttagtgttggtttatatttttttccttctggttagtagatgcagctgtagcttcttttgtgtaattttttttggtaatttgaataaattttttccttaaaaaaacaaaaaaaaattataataattttgtaattttatataaaatttattattttataaagatttgcatgatattaagcattgtatttttctttataagatgaggtataccctcgttcatgaatttttgtgggattatttttaaatttactattaattgtccaaaatcttgtgaacataaatatggttttcttttctttcttaatttggacttatgacatttctattaatcgcctcactgccaagaacactctc

SEQ ID NO: 206793 - DNA, 872 bp, Cannabis indica
cttacatcaaactcaggattgccatctccctcatcttccagtatctcttcactctcttcttcttcttcaagacatattgtatcccatctatgttctagttcttccatcactcgactacttgacgccatctcaggaaacgaaaataacaaaacttttactgatcaaatcaacactctacagcagagagaaaaaacatgtcaaaagacatgactccacaccaacatgttctctacttattttatgttgttattgagaagtgtaagactaatttaacgtattttttttttttaattttatatagttatataatttagtggttttaaatttttcttcttcaaatccttctcttccaatgtaaaaaaaaagatttttttttataattaaccaaaaaaataatataaaaatgcgaatgcacagttttttaaaatatttttaggagttagatttttttttaacaaaaatacggatggatttaggaaaaattcaaaccgcgaatgcactacaaagaatttttaactgtatttttttacggagtggtgcgatgcggacagtttgagcggtttgatgaacacccctacccactaccttcggtctcgcacctacatagacccatttttttaagtatggggcaacacataccaagtgtagtgtggctcctggataggtgaaaatagaggctccaaaatcaactgtgagccactctcggaacaaaagaagggacaagggcaaataactataacgactcttcaaagaagctgagaaaagagtatgatccaaaatactttaagtagggctgtacagaaattttcgtaaaccgcccaacccgaataacccgactaaaccaaaccgacaaaaccgaaaaaaaatacaaa

SEQ ID NO: 206794 - DNA, 601 bp, Cannabis indica
acatgctctaagaagacttgatcaataataagaaaaataatagctgattatattgaaaaagaaaaataaattttaataaaaagtgtaattacaaagataaaaataaaacaaaacaaataaaatgtaactcaaatattgttcaattcaattccttcgttcaccgagacaagagcaaaaactttcctctcacttaaagaaaagtatcgctagttattaactgaaattcctaaattaccctcactaatcttccatatcaacatacaaaaactattttttcaggtataaaattataatttccaaataaacatgtcatgaaaaagagccacggctagtggtagtaggctacggctgttattatacttacatacgacactgcgttttgggtcccaaaagggtcggcagtccacgctggagttattcctctttactttttttttttaatttccaattttgaccctctcatcgttttgagacccaaacccaaaccctctgttcttttccttttcgttaattgaaaggaagatttctttttcatttttttggttcattacttgattttgatctgtataataattctgtaaatatatataaatatataaaa

SEQ ID NO: 206795 - DNA, 863 bp, Cannabis indica
cttcaaaagctcaaacctagttcttacttgctacagctcaccaaacaagcataaaatatgtaaaacaaccttataaactcaattccaacaacaacaaaacttaaaattagcttaaacccaaaactacatataaaaacctaatttttcttttgaaattctaagagagcttagggttagaacttaccttagaagtccttgaaaactacttgaacaccttagaagaattctctcttaaagaccaaaagctagtggaaaaaccctaggtcttccttgggcttgtcttggctgaacacaaaaaggaaagggagaaagaggtttgtcttggttctttaatatttggataagagataactatgaaattaacttatcttttattcaacttaaacttaattaatctaactaaggaattatacaaattcccacaaataaattaagccaaaaggtaactccccactactgaccaaataattaaataaaaaaatgtccaaatcataaccccaaaataaccttacattccaaacatctaactaaaatgcccagctattactaagatactaaaccatatctaagtgattctataggccaaatgttgcattacgctattaccgatataaaaatatgaaaatcataaaatttcatacatatcataattgatacactcagaattcaagtaaatatccataattgtaaaaataattattaaaaacctacttttgaagataagtcttaattatctgctaattctcataataaagctaagcgttcattacaattatcctcccgttaaaaggattttgtctttaaaatcaaacccgaataactctggatactaagccttcatatcggactccaatccctaggtg

SEQ ID NO: 206796 - DNA, 1012 bp, Cannabis indica
ctctctctctttgtaaattgacaatatataatcaaatatttctgatctgtatgtttttttaattagtatgttttgttagagtggtggaattaaactaattataggattagagaattggctcaggctgacttgacttgactatgcgcgttggttaattattttttgttatttttatgaagaatgatttatgcttaattatgttaattgtgaatgtttttcagttattaagatataacttaacccaaatgtgatcaagtgttgtcgtttcgatacatataatatacatatatatatatagtactgtaaaattggagagattgaattgcgtcgtttcatttgcatattaatttgtgaatgcaagaaccacgctttatagctaattaattaccaattatattatatatctttattatattttgtaactaaaatcatgtatatcatttcctcttcacaaaaaaaaacatatgatgacaattgaagctacaacaattatataatgtgtattattagttttatgttataaattattaatttaaaaattggtggcaagctcaacctacctaacccagtttaatttagcatgtatttttctaaaaggcaaacattagtagatcttttttatttattcttgaaatataatgaattgatatataattatagtagatgattcatgaaataaacatggcacacagcccttttacttctaattttactagatgtaacaatgacaatggtgcagattggtaacggtttttaaattaccatttctatttatgtaggtcaattatatataattaattatatccgcttcaataaccatcagtacgtgatgatacaggtattaattaatagtgatcattttctaaaaaataattataacaacttaatttaatttggataaatttaataaaacaacattctaaatactttttaaacacaaaatcaaacattattattattccaaatacactaagtaataaatacctcaaaacataataataaaaataaaaaa

SEQ ID NO: 206797 - DNA, 647 bp, Cannabis indica
ctattttttctcaaaaaacaaaaaaaacaatcaaactattaaaatttaaatgaatgtttttttttttaaaaaaagtgaaaattgtctgaatatcgtatcaatagtgtaattaaaaattaaattgatatgtgtaatttaagaacacacaagaatatatatcccttgttcaaaaaaaaaaaaaaagaaaaaaaaaaaaacaacacatgaattattataaatacaaaaacaaaaggagatcatttttataatgtattattaaaatattataggcaagttaatataaccatatatgtatgtatatataattaacacttatctcattgtcttattaactttccaatgtataataaaacatgaattatgtaacaacttattatgtcttcaaatatttataatgtagccaagttaatatcaaatactgacccttgcccctaaagaaagagaacttaaaatgcccccttttttttattttttatttccttatcttaaaatgcatgtcaaattttttgacacaaaacaaaattggtacgaacctgaaaagtatgagtagtgtacaactcaacacaaaaaaaatatatatataaatttaaacacgataaaataaaaatgttgcaaactgacatgacgttatacaaaaaaaaaaaaaa

SEQ ID NO: 206798 - DNA, 991 bp, Cannabis indica
aattaatggggaaaaatattaatttttaacggcaaaagaaatataacctaacagaagggacttgattatgtaactgttatattttagggagaatttttaacaagacgtatattttaggagacagaattatgaggttgtatcaaaagtttaggacgcaaaaaatactaattcttctttttatacgacatcattaattcatcattggacatactatttcttttttaagaaaattttaaataagattttaaatatctagttacattacatgcatatttttttattttgaacataattttttacatcatgaattattaaaaaaaaatcaaaaacatataaaatatctattatatcaagtcatatatataatgaaaatatatataatatcttttaagtgcttaaaattaaaacactatgataaaagtgattttcctacctaaaattctgcatatatatagatatatgttatgtatacacaactttttgtataagctccaaagttggatgcttttgtaagtaagatcaaagtgacatatcatatgaaataattaaaaggatttatacttctctcttatcttttttcttcttgaagcttttggctcatcacttcatcctgtggaatatactcataataagtttgagtttggtttaatttggttagaatttcatttttctttgggcattttttttagatttttattccttgtggagtgagtttgtggaaagtgatgggcatcaaatcttagtgaagaatccatattattattaagaataataactgttttttttaattaagtattaatttgtttaggttagccactcactagtgtggcttaattaaaattaaaaatttgtatttatttttaagtaattaaatagtggatgttgggaaacaaatggttgtgttttgagggggacaaaacctggttacaggattcaccaactcttgtcagggtgttttggtttttgaaccctttgaaaatggatcacattt

SEQ ID NO: 206799 - DNA, 928 bp, Cannabis indica
aaaaaaaaataaaataatatatactacttaataactctataaaaattcctatgaaacgtcttcttcttcaaaaggaacaagaatgatagagagtttcagtccattatacactaatttgtatgaatattcaccggctagagtgcttaataagatggactcgtgaactaaggatagttaacacctaaaccacgtaaaaatctcgcatttattatttaatctattatttcttttctaagctctaaatatttggtttctgaaaaatcacggtaaaaacctataaaataaaaacataacatattttaaatattacgatagaagaaattgtatgaaattttactagaaaaaatagtaaaaaaaattacacatgatttttttaaaaaagaatatatgaaaataaatttatacttttacgaagtctatgaaagcattataaaaacaatatgagctgttacgagtatttggcggttaaaccttttgaactattatttcacttgcacttaacttttaagcttaaattttaatggtaaaatcctccgaactattgaactgttagtaaatttaaggtgttgttcaattattacaattaattgccaaaatagactacctatgtgtatattcttatacacgtgtaatgtttatattagtcatcctaatatttttatttaaaatttataaaaaatgatttcaaaattctatttaaaatttaaaaataatataaaattaataaaataaataaataaataatttttattttttaataacatgtgtgaataaataaaatgtgagaaatgtccacgtgtcatcagcagttgtaaatgaatcaatctcaataaaaataactgccaacctatattcttataaataggggtagaatccatgaaaaaagagacgacaaaaatagagtaaaattctattatttcaaatattg

SEQ ID NO: 206800 - DNA, 754 bp, Cannabis indica
aaataacacctgaggagattgcttaaaaataagcaatcgaagacgacggaacgcacttgggctccccaaaccccctccaacttaagagtttcatgatgaagagcgggattgcatagcaatcaccgctgcattgtcaatgatctcatcagaatttcaagaagcatctgaaactcaatggagagagtccacttcaactgacaaaggagaagcttgaggaacatgattacctcgacatcgtttaagtgtttatctcaaagattttgagtcatattatcgtttaaattgacggtttgggcggaaattttcctggtctaaaaaagtctgggaaatggagatgtgacctgtggtggaattaacaataggttgggatgtggaatatatagtagtggagagaggcaaggtcaaagaaggatgtttagatggatatgtggtagaggtcatcgggggataagtagcaatgggatgattaagtggtgaccctgaactaggaacaaagttattgccaatatcaggtgtgtatacatccgatagatgtgcaaccgaattacatgatgtaggaggattgaccattggagaattcataacacatgtgaaggaagataaattgtgtttctgaagtgtgaaaccaaaccagaagaaatcaaagaagattgacccagtaaagcaggtgagaaaaaagattgaatccttgaagttggagcagttgtggagacataaccaacaacagtagcagagggaagtgcttgagaattag

SEQ ID NO: 206801 - DNA, 534 bp, Cannabis indica
atcatgatattaacattcattggaagtattgatcaaagtaattctcctaagagtatttatgaaatactgggaaggacactgaatgacatggtcaaagaggtaatatatgtattcttagatttatttatttattaatttaaattaatatcttattaaaaaaaattaaaatatataggaaaaattgttaatagtaacctgttacattttatgaaaatcggtttactttatactatttttcacatatatttttttgttataattttattcataacacaactgttttagaaaaaaaaaaaactatgtttttacacacataaatactcactataagaaataagatttttgctagaacaatatttttatgttggcaaaagttggttattgtgctggcaaaacaaattttacttttgccagtatatttctgcactgacaaaaagagttggcaaatctgtattggtattgaaacttttgctaacacaaaacgaagtgctgaaagtaacatttcttgtaataacatataaaatgaatatacat

SEQ ID NO: 206802 - DNA, 1114 bp, Cannabis indica
ttgagtgttttggttgaagtagctccgtatagttgtagcatctgggtgcgacgatctttggcgtcttggcgcctcctcatttcacaagcataatcttccaactagattgaaattctctcctttggttagcaagactttcgattaaggacactcgagcttgagtgtgctcttagtgcacagtctagaattggccttgcatttggcctatcgcatctcgtagccgatccatcttggggtcaatttctttgatatcaacatggggttcactcagcggtctaaagatgccagggccttggccagtttgagcatggcccgtgccgtcattaggtgggccaaaatttccagtactaccccttccggtggctctgttagtagtgctgcctcctgcaacagtggtgttcgtggtacgcccaacagttgtctgcccagtggcagcagtttggctagttgctctatggccagtagtctaagcagtgctggctgcaccgtcgtttctcagacgcgggggttgttctccattattttcagtgggattacttgttgatggacctttctaagcattatccatttcctcctcaggtctctcttgagatcttcaggttaacaccattttttctggtgaaaaacttcaagattttggctaaagctctcaatgaaagcaccaaaatattgactggatttttaggcaaccgacgcgaattcgtaataaatgagatttaaatcaaatttgtaacaataaatgtcattaatgatactagaatatgcaataattataaagaaagacaccgaaatttaaagaggttcaggcccaaatgtcggtaatatcctactccccttgtgttttattgatctgagttgtaaatgttaagaacatactcttaattgaaaagaatgataagtgtttatttttccaagtgttcaaaatcgtagatccccctcccaggttatggatgaccccttgtataggggagtgggtcggtgcctttcgcttcaggacacgcaaccaatgcggagctacctcaaccgtctccttgatttttgaaggcagtttaagtctaatttttatgataatattctgctattttggtggtttgacaactatctttgagccttt

SEQ ID NO: 206803 - DNA, 728 bp, Cannabis indica
gatatttattatagttataacatatataaatatatattttaaaaatctaaataatttagtgtataaacactacttagtctaacaaattgtttaagactatcgttttacgctataaagtattcatttccaaatcgtataaaatgtttgctataactataataaacgctacaaaaaaacgatcaccataatatttctgcgcataaaagtggacgtgaggtaccagtagaacatcaatagcacatcaacacaggtataacatttttacatgatgtacatatgcattataccattcttaaaaattaagggaaaaataatgagttaataagttgaaaaccaatcccctatcttgcccaccattcatcctaataataataagtttttttttgatgtatagataaatagattgaacgtggggcgtttaaaaaggaaatgatgatggtaaggttttgaaaacttttaaataatttataaaatcgaaaatagaatttaaatagcttgttcttagcttaatttctatatgcatgtaaaaataaattttgagttttatttttgacacgataatctgttattaaaattgggaatttgtaagaattacctataactacaataaaaattattattgaaaggagaaaaaaaaagttaacgaccccacataaggatgtattacagaactcataataataatgctttttaaaaattgttaattattagtttttctgattagtcat

SEQ ID NO: 206804 - DNA, 694 bp, Cannabis indica
aaattagattttgatgtataaaattttaactatttttacgtttgcccctataaaattatttttattcattttagtcctatataatcgtatttttatccctataatgtttgtcatttttttattttatccttacaaaatttacaattttttttctctctaataaatattatattcttttttatcaatgttggctttttttacaattttttttgtccataagaaaaatttattggctttactattggatgttaaattaaaatatataaaatttaatattaaattacaacaataatatatcacctcttgaaataattaccatcttaaaatatatggccatgtgggtatgggaatatatgggtgtgcctatgtagttgtattgggcctgtccgatattattctttcattcccattaaatccaattaattaacgctttgacatatcaaagccaagccacgtatatattgcatctctctctatacctttgagtattgttagtggaatagaggcaataattacatatattaatatgtaatatatatacatattttcttagtggaaattaagtgaatgaagaagaagacatgcatattctctggcttagcgtttgaccagatcaaactaattaaatctgtcttgctatacatatatataaaatattatgttcagagcgaattgctttttcattatattaaaa

SEQ ID NO: 206805 - DNA, 1159 bp, Cannabis indica
gaaaaatatatatagattgaattctaagttaaaattgaccattataaaaaaatatatattaatttactttatattttttaaatagtcatataaattatatgataaatattaaataatatataataaaaacatataaatatattaaaaaaaaaatatcttaatcggattggtcgggttagttcacgttgattgggtgggttagtattattttcaatctacccaatataaagattggacagattatattttcgtcgggtttttcagtttgtattttttatcgggttatttcagtttgatttgggcgatttacaaaaatttatgtacaaccctaactcgtagtgtttagtattctcttgttaaaattattaattaaatatcaaatctcataaatttaatataataatttttataaaatatcactaattatttttaaatgatatatttaaaaatattagacaccattaatattcaatcacaatttaaatttttgatagtactattcagatatcttaaaggggcaaagtgagacaaacgcacatgcgagcgggggaaacgtagacaccacatgacttaaacctcaacatgtgcaattcttccttctttctttttttttcttttctttttttttttaaaagtgaaataaaaaaaaagttctatttcaaataaagttactcattttatttttataaattattgtcacgaaaataatttggctcatgtgagtatatgcaaattgatttgcctgccttatctgtcgttgattggattggaataagaacatttaatctgtactatttaacttctaatatatttgatttgcactaagtttaaatttgatacattagattcaatctaatttgcataatagtttaaatttaatttaattcaatctgcaaaaatacgaattaaattagttattttaaattagttaattttcaatattaatttaatatttataaaaaatattttttttttcacataattagtaataaaataaataaattattattattttatgtctctaataataaattaaaataaataaaataataaataacaaatttaaaagaagaacaaattaaaaattattgttattttatgtttccaataacaaattattcaaattaattgagcggtttagaataatttataaactacg

SEQ ID NO: 206806 - DNA, 1200 bp, Cannabis indica
agttcataatgttttaaatagtagtagtgggtaatattgtaattttatctataactggaaattataatgtgatagtcgcaccatagaataagaattatggaaataaccacctcaaatattggaatttgcaaaatgactattttctttatttttatatttcttatattaaatttggctatctaacataaattattagttttaacggtcttcttttgttaaaagttaacggtcaccgaggccactttgcggataaacaagtgataatttacaatgaatagtaatgtcaaaagtatttttaattataatgaaagataaaaattagactaaatgaatcatatgtttcattaatttaatacttaaattaagttatctccatagaatttaatatttttctcatgttaaatagattacatgtttcacaaatttattccatggtataaagatttaattattgagtgttttgctttgattaattgtaatagagagattgaaataattaaatgcttcaacattttctataggattaatagtttaataaggaaattagaataatatttattgattattgatcttgaatgattgttgatgatagagattaactcttaactgtttcttaatatcataatatttatctttatttattttttaatttatgttatttaagtgagtttgaaatcaaaagccccttcttaagttttagtgttaattattgaataataaactgaacagagttttcgtggactcgactactatttatttaccgctatactcatatagttgaaaattgtaaaaaaaaatatttagtaaatttagtacggcttactacaaacatcactctcctcttaatttgttctatttttgttttttgtttttttaatgataaaggaatttaaatttaatgtcaattgggttcattaaattaattattaagttaattttgaaaggtgattgaaaaattgttttgctaataaaagtatacataattattattttgccaaatgactctcttactgattcttatttaattattttaagcacttttcaagaattggttatcaataaagtaatttgatacatacccggaaactagctagtgttactcataatggggcgtaaacctttatctatattctatgacaaatattacgtttttttcttttttttttttttttttttatttgttttgttgtgtaataatgt

SEQ ID NO: 206807 - DNA, 934 bp, Cannabis indica
gttgcagtctgcattcacgtagttcgtcggactcgccgtggagaatggccttgtggatcttaaattggtttctaagaaccgggtcatgaccaagctgcttttggagagtccaatcttggaaccatttggctagtggggaggtgaatgtggatttttctttggcttcatgtttcagccaagtgtcaaacattgggtagaagttacccttatcatctttaatcaccgtaggggctttgaagcagatactctgatcatgggttaacatcccatatttaaagcaaagtttgggtagcctctcgtacctgtattggatccacaggtctttaagcttctgcctacggaggaagaagcctgagaagattggtttattgaggtcgattgtagctcggaatctcagggtactaaggcctacgacatcttcaatgcccaagggcagttcatgaacaggggaggctttggaggccaactctttcaggtttgatcgattccaatagaagggaggaatactttctacattcacccacagcggagtttgtcaaatctaacttcagatggggtgagccaggcaggccacgacattatgataaggagatatccacatacaaaccatggacgacgagaaaggacgttcaatgcatcattacggtttgcgaacgtgaactggatgatacctccttctatttccttccatttccagcctttaatggcgttccaggacaacttgagagacccttgtaacggctcagaattttccccaacagaatctggtttgcttcttcaagttcatcaacctcccccggattgagcgtgagggtgatatcctcctgggctatttggacggagtctttgaatagatcacttacagtagctggatccatgttaaacgtttgcgaataagtgcactagagcaattgtattcaattctccggttact

SEQ ID NO: 206808 - DNA, 1611 bp, Cannabis indica
agtacacatcgacctaagcggaaagaaaggagattacaactttctcccctggtagacccaaccccatggtctagcttggcttgaatatgtacaatgcaccgcaaaagctctcgacctcatggctggtcaacaactgacttatcctttcctgtacatagagcaccctgagctaaggcccaacaagacagtataaacaacaataagaatatcaattaaaatcacttaacattgatgtcactgcatctattgtctatttgacatagagctactagtaacgctcacacatctatttataataaggccttagactggtttatctcggttctgattaccgagtttaacctaattatgccttaatcgcataattctgtatatcaacatttacaatacaatattgcattcataatcacttaaattctagagtaataaccctaaatcacataaccgctaagtttttgggtaataaccctaatctcagtttcccgtttagcatatacaaaataaaatacatgggcaccacaatgttaatttctatgtgctagtttactgtcttacatggtaatccaagtatatggagattccaaatccccgggtgttcctgagcaagcgctggtaatcctagtcacacattcttaagatttcacaaataggttaatcccaaattcatgttcatatatacataatttgaactcccattatagatcaacatatagaactcaaaatgagttttccagcgatatcaagaacatccaaaatggagttcgaaatcaaaagttatggcaaaaacaagaaaaatgcaaaaattgggaaaacagggtcctcgccgcagtggctctaacctattggagctcgccgcgacaagccttgctgtggcctcaacaaccacccctgaaaccccaaaaacttcaatttttcatgcctttgattttacccaaaactcaaaccaaatctcaaccaaaatcatgcacaaactaaacttttaatcaaaaccaacccaatttaacattagtatggaattgagcacaacagaaagctcaagatcaaaacctaaaatacacataaggcatgctacacaaaaattaatattgtacaaaaatccacaagctttaaaaaatcaaagcttcaaagcacaaacccagaaaattcaaggtaaaacccagaattcaaacatcaaaaactaccctaaacatcaagaagattctagcatgaacctaataacaaaatcatactataagcaccaaaaattctctcaattgcaataacatgcaacattaaatattcaagcgaaaaaaaggagatcaagatagtacataatgctctccaagtttcaagcaagagaacccacacaattctacaccgaaattcaagctttcttccacaaaataaatttgaaatcacaaatggagaaggtgtaagagagagagatggtttggggtttcaaaaaccaagaaatgaaatactattttgttaaaatcttgttttttttttttttatttttttgtaaaaatggattatttaggtcaaatgtacctaaattttccctaaagcacacatataggcataaatacgataaaaggggtaatttgtcaattcaactcatacacatatatc

SEQ ID NO: 206809 - DNA, 575 bp, Cannabis indica
tgtgtttactttggtggaaatcttgtagcttggaagccacgaatatatgtcacattatctcgatccttaaccgaagttgaatttcgaagttcaactagtgttatatctgaagtggtctagattcaatctcttcttcagtagcttcacattaaaacaccagctcttccatgtatatggtgtgatgttcaaagtactgttttattagctactaatattgttctacaagcttgtactaagcatataaaaattgacttgtactttgtgttactgtagcaaattcaagtgaagtatgttctagtcattgcgcaactttgtaaattttttcacaaagccaatcagcagtaagtaaccggtttagtgatctgagattcaaagtcaatgttgcttctctagctaccttgagtttgagagaggttgtcaaagaagaaagttaatttattcgattgtgcactgttgctcttgttaggtacacggttagttagaaagtgattagattgttagaggttattttgtatctacatcttgtataataagactgaataagactcttctcttactaaacctcatagtgtaat

SEQ ID NO: 206810 - DNA, 1066 bp, Cannabis indica
ggacccgaaccggacctagaccagactcgggatccgaaccggacctaggacccgaaccgaactcgggacccaaacccgaactcagacttggacccaaactcagacccgggactcgcacccgggacccaggacccggacctagattcagactcggacccggacttggaccccaatcctgaccctgacccgggacttgggacccaaacaggacctggacccggactcgggactcagacccaaacccggactcgaatccggacctagaccgagattgggacccaaacccggaccccgacccgactcggttaccgggactaggacccaaactcgagacttgggaccggaacctagactcgacccgtagttagtgttgggatcgaatttattaaaaatacattataactttacacaatctattaacacaggtcaatattaaatattgtattgtattaaataatactaatgcaaaattgaaatggatataaaattataagcttagatgtaaaaaaaaaaaagtcgggtcggattagatccgatccgaataagttaggtcgaatctgatccgatccgagtatctaatctaatggggcgaggggaggtgaatccttacataatctagatcaggttggatcatagccggataaaatccgaccaaattcatttacactcgtgtttacttggctcagatctaatctaaattgagattgattgtacttcaagattcgacaaagcctgagatcaattcactatgtggaaaaatattacaccctcaaatcttactaatgaacactcttgattcactcgagccaaactctaacaatcctctcatatacaagcacacacaagattaggtgatcatggtagtagaatatttataggaaaagatgtactcaatgttttataagacattagttagttgtaacaataaactgaaataacaaacttgtggctacctgtccaaatgaatcctaacttctaactaatgttatcattttgtttgttacttgtaataaaacttcacagaatgattaatttataatatgtgaataatttaagaatatttttt

SEQ ID NO: 206811 - DNA, 694 bp, Cannabis indica
ttatgagataaaaacgttatttacagtttagctaataatttatcatattatttcagacctactggaaaaatggatgatcacatcatatatttttccaacccagatatttaaaaaaaataaattaagtactttttttttatttaagaaaaaaaaacttcctttccaacctttttacccctttcaaaaaaaaaaaattaataattgaagtttttcaatccaaataagcatgaaacttgtcgagatgcacaatactttttggagcatctgcattactcggatagcgccacctaataatttcgtttgtttttcttttttacgtgttattattattattattattattattattatttagctaaataattatgattataataatcaaaggattgtgttgtgttgtgttccattgaataattgagatttgagatattgtgtaaaaccacgagtgtctccctcactcatgataatgcatgcattcatgtggtttttattattggaaaaacaatgataatattgttaagaggctaatatctaggcacgaaagccactaaatgaggccatgcaaattattatttctattttatctaaaaagcctataaaaatatatatttagggtacgttaacataaattagttagtaattaatatatgcattatgccagacagcttattactatatttttaagctttttctt

SEQ ID NO: 206812 - DNA, 1181 bp, Cannabis indica
gggtcgcacttgtaaagactccaataaaatgaccttggagctggaggccgaaattcagaaaagagatgaggagaagcaagaccaagaggttaggacatgagaagacattaaagcaatcttttttattattctctatatatcatatagaaactcgacaattctttgaagatagagaacaggtgatccctcaagtccttcaactagcgagagtagaagaagccaagagggtaacaaaggtggtcaatcttggaacatccccctgagggtgagaactgcgaagacccactcccttccagctgttgacgatccttttgttgattaaatctgcgatcccaaaggtctccaatgatgttcagccagataattctcaaccactaaaggatctagccatgcctttcccaagtttatccaactcttacatattttttttttcttattaacatctttaatatttgagggataccggacccccccccccccttttgcatatgcagagataatttttatgcccttaccgcggggcttttaagtatgtgatatttgtgattttatctatttttttaagttttaatctcatttctagctccctgaagttcttgatccaaagacctgaacctttggtcttttgatgaaattctttgattcggatttttatttttaataagtcgtttgtattccttggaacatggttctattggcttgaacctcagtattttaaggacttatttagaaaaaatttagtaagcattttttactttagaaatttgaaacttaaatatttaattaacatgagttaattatttactcaagaataaaatcttttcagaaagtgttacttacttcctggacatttcaaacttaaatacttaattaatcgaaaataattagttacttaagaaacctgaacataaattaactgtgaagcttgtgttgggattgtatgccctaaataaaacctattttaatataatcagatttactaactaataaaagatcaaaaattaatttatgttgcatggttcacatgattacattcatgattataggtttgatgtataaattcttttaaatcccaaacatatggttattcatgatcatagtgttgtctatacagtggaaaatcatcttgagtatatatatttcaaaattaagtcccaagatttatcagtaaactaaattta

SEQ ID NO: 206813 - DNA, 1672 bp, Cannabis indica
tgaataaaaagaaataaaataaattcactttcccaataaatatgtacaatgctatttctcatcgtttgggatagagagaaaaatattagatttcttctgaaatttttatttcaaagtttgataatcaaatataaattaataagttaatgtttattttgtggtacaattctttttaattgtttttttctatttttttatttgttttaattaaatatgctaattagatattacattaaattataaatgtgttgttttcaaaattttattttcggtgtatataatgattatccaattagcatttagcaatatttaaatgaaatttataaagaaaaacaaatttaaataaattagtaaaaaaaaaaaaaaattaagtgtaataaaaattaaaagagaagatttcaccctcaattaatctatcttaaattcttaacaaactttattcccatcacagcctaagaagaaaaatatggtggtacccacctaaattatctacactcacttttcgcctgtttttaattttatctcatgccaaaacacaattatagataattagaaggattttatcaagaaaaaataataattttttagtttcaaagaatcctccaattattcattgataatatcagcttaaatatacttccacatcttcataaaaataaaaataaaaaaaacttcgacataatagacgttaacacttctataaatattgatatgtttttacattaatgaaaaacataatatattattgcaaatatttttaaaattgatttttttttatcaaaaatctaaacgtttttttttctttctaattaacacactagctctgaggttgtacgtgtttaattacttcctatacattattacaatttttctttttttgtaaaatattaaaatttattattttttaaatataaatttttttattagtcgtaaatttaattttacaaggcatgaatagggtaaacatgcataaaggataaataaaataaactttcttcattaaaagagttatctcctcctcctattgtaatggtactttttaacttttttaatataagtgattgattttttttttccctttttttatattttcttaaacaaatctttagcaactcgaattgatttgatcaattaaacatgtttgcgttattgagttgaaaccaaattaatcaaaggtgaatgattttgcatttcttcatttgacctctaaaatgccattaatgccaaatttaaagcgtggacatagcggatcctttagtaccaatgttactattattaaaaaagcaatagaatctatctcgagggcaatatcacttgttgctaatattacctcatagattgaaaatgataggaaaatattgttattattgttattcctataatcatatgatatgcgtactttttcaatcatatttatttaaattgttaaagaacaaaaaaaactatatataaaagcaatgctattacatttcaaaaaagaaaaaagaaaaaagaaagcaatactatattgtgtcaatgaacgttacatgcgttcaatattattaacggtattaactaaataaccgaccaaacttagtgtgctacttttaaaatttactaacaaacttagatatttctagatcaaataaccttacctgactccatccttactaatctagttggaagtgctaca

SEQ ID NO: 206814 - DNA, 739 bp, Cannabis indica
atttgcttaatctacttttaaaaaagatttgtgattataattttattaggataggatcactcatttatatcggtgagataaagtttttattacattaattacatttaatccaaatgcaaatatttaaaaaataaataataaaacaattttgaccgttcttatttaatattcaaacatgtgtgactattgaactcatacattgaccgttcatatttagagtaacatgaacttaggggttctatgatgttactctcatatgaggggtttgtaaacctctcaggattctttacgaaacagaatgcagcgactttccccaatcacgtattagtcattcagactagacgctcgtaaatatgtggtcttctcattgggcgcagggaaaatattttgtggtcgcatataattagtatatgtgcaacttatgttaacttctctttgtcttgcttttaccatattatgctatgcacaatgtgcggttagatattgtcacagttgtaccttttcatgaatttcaattatatgagaatagctctactggagctgttatagacatgtcattcttttttaattgaaaaaccaaatccgcatatcaattatatatgagattgtgttcatatttttaagtaaaaaattcatctataacactaacaaaaaattgtattactagaattatactttcaaatttataattttaatattaaatacttttttctttttaactaatttctatattcatttc

SEQ ID NO: 206815 - DNA, 1375 bp, Cannabis indica
  modified_base (38)..(38): a, c, t, g, unknown or other
gaaagcttaatcttcggttttgagcaagtgcaccctanacctttcttgagtaaacatccacaatactcaaaaagtaattgatatcccaaacttgacacttttgagggaccctacaatttgaatgtatgtagccaagtgggtctatggtggtgtattttccaatgctgaatttctgctacaacattttccataaacatattcttcattaaaatgaagcctacaatcaatttttcccttaaggattccctatttttctaactcaaacagacccctttggctcacatgaccaagccttaggtgcctcatttttagtttggtcctgatcatggcttgatgaaacaatattgagacaatcagcaactatttcaccaatcatgatatatagatcattcctaaattctcctttaataaccattttggaatcctttaagaccttaagacacttataatcaattttaactttacaagccctttcagttaacaccctaatggatcatagttttttttctttttgaggttctagtacatacctgacattctgaatctttctcttcagtccatcatgcattttgagcacaattgaaccaatttcatggatttgacaggccttgttgtcacctagaagtactgatcctccctttctttcttttaagatcattgaacagttctttgattagacacatatataaaatgagcatcctgaatcaagaacccattcatgataagaatctgcatttaaggccactaacacatctgcagattcatagctatatgctacaacaccagcttctcctttctccctatttttcttactatctctcttaagtttggctttcaaagccaagcattcatcacaaaaatgaccttcctttttacagtaaaatcacttcttctgtaattccccttgagtcatcctttgaccctggttatcggtttcccttcttatccattgtcacattgattgtcctctgttttcttctgaatttcctttaaattcagagcagccttgactttagacattgtgaaagtttctttgccatagatcattgtatcaacaaagtgctcataagatcttggcaaagaactcagctaaataatggcttgatcttcttcttctaatttcactctaatgttgctgagatcaagagtgattttattgaattcatccaagtgattcctcaagtctttcccttcatccattctaagagtatacattctcttcttcaagtacagtttgttagcaaaggacttcttcatgtatatagaactaagcttgttcctcattcctaaagccttatcttcactagacacttttcttcgaacttcatcacctaaactgagacaaatggcactgtgtgccttagttttgatctcc

SEQ ID NO: 206816 - DNA, 771 bp, Cannabis indica
ataaaactgtaaacgacaactacaaaacaaatatcttgttgtcgtttttttttattttacttttctttttccattccataattgccacaatcctgttaacaattactgaattttatgttcaaaatacttttatttttcttaaaaaaaatggtataaaataggatttaaatttagttaattaaaatttaataataatttaatttaaaagtattatgataatatttgttatatttttttttttacatctattcgttctaaaaaataacttctagttagttatatattaaaaattaaaaaaaaattgagttcaaaatttattttgttctattttaaaaaatacaaaagttaaattaccattttaaaagggatcaaattaataatttttgtaaaatacactattcaaaataatatttataatttaaattattctttaggataaaaaagaaaaaagatatcaattttaattagcatttgattttttttcttttttatgacgcattggcatttgaacttgaaacattatagccaatcacaaatgtgaaacgaccatttgatattatctcattgtctattatttttaagtgatagatattcagctagctagtgataattttctagttttggttacaaaacagttgggctttagtttttctcttggattgtgtataagcccactttgtataaggctcaactctctcttttgtacacttgtgaaaactcagagtgaaataaagaaatattgttcccgagccaaaataataataataataa

SEQ ID NO: 206817 - DNA, 968 bp, Cannabis indica
aaaagaccatcataccttcgtgattttgaatgttactcatctattcaagacaaaaattctactccccatcatcttgataagtatatttcttatgctagattaactggatcctataaagcgtttattcttgcagtaacatctctcaaagaaccgcaaacatacaaacaagctatccaattcaaggaatggctggatgcaatggatttggaattcacagctttaaaaaataacaaaacctggatagtagttccataaccaccaaataaaagagccattggatgtagatgggtatacaaaattaaatttaatagtgacggatctgttgaaaggctcaaagtcaggctcacccatgttactaacatttttcttctttgggataagaataatattagtgcgatttagattactgggtaacacacctgaatcaaagaagctcttgacttggtccaccacatcatgcccaaccacatcccaacatttttggtagaaccccggggtcataccatcaggcctcggtgacttatccgggtgcatttggaacaatgcattctttatctcctcttcaagaactgtacgcaataagtccctattttgagcatcagaaaccgaaggagagataccagcaacaaccacatcagtaggtgaactagttgaagtgaataaatcggagaagtaagaataaatgacatcttctaaccctgaattccaatccacccaattgcccaagtggttctgaagccttgtaatagcattatttttcttccgtgatgtagccttggcatggaaaaatttactattcgaatctccttcacgaagccaaagttgctttgaccgttgtttccaaaatacctctcgctgagtaagaacctctgtcagactttttcagcctttttgaaatccgccacagaagcatcatctcttagcctcttcaacctcttaatatcacttttgcacttcttaatacggtc

SEQ ID NO: 206818 - DNA, 549 bp, Cannabis indica
agttgatgtgtcaaattttgataagtttaatacgatatgagacaccaatttttaacaaataatcttgattctccctggatgaggtgttcaaaataaatgttgacaccgacgttaagactagctaaataccaatgtacaaactacaaagtattgcccctacttatatattctccaataattatttttttgaacatagtttaaatagccatacttctagtatacttttttgtaggaattttagtctttttctaactttgccctacaccaacattaaagtaatcagttttaaacaaggtcagtttcgacctttcccagtccctgacttttcaaagtcagcagacagtcaaaacaactccattttgccttagacaaaaccaaacactcgagaagcttcctaatcacaatcactctgccttaggtttaacttcgaaaccctagtagagagtttctctcagagaaactcgaagctaatcccagaaacaacccataaatcccagatcaaacacaaacagaagatcagatctatctagatctgatctatccccaaac

SEQ ID NO: 206819 - DNA, 1037 bp, Cannabis indica
atttattaattgaatattgtattatgttaaatgacaatacatacattgtacattttaaaatagtataaaataggttataaacttaatttttgccgaattaaaatttaataataacttcacctggaagtatcttcactacacttattaaatttttatttatctgtttgtgctagaaaatgattttatattagttaatattaaaaaaaaaaaaatagacgaaaattaaattcagaatctattttgtattattacaaaaaacaaattttaaattgttatttaataaaacataaattaaattttatattagttatattaaaaaaaatagacgaaaattaaatttagagtctattttgtattattaaaaaaaaacaaattttaaattgttaattaacattttacgaaatagtatttagtatttatccaattttatttatttattttttgcattgaaggattgcgctttgagtatacaaacaattgtcgtttttcacaaatattgttgtccatttccttaattcttgcttacatttgatgattgatgaagtagcactgcaagtttgcaactggacattccttcaaaccgaagcaaaagaaacttgtgaaaatagtataaaccttatccttacaaaaaaaaataaaaaagtatataataacttatcaagtatcattcgaagaattagattccttcttccaattaaaaaacaaaatatgtttaattagtactaactcaacccctggcctgaaaaacattgaaaggaggatctttggtccttgaccttgagacttgagcttgttttgaatccaaaaatgaagcaacaactttggggttagaactcctataataatgactaaaactaatcatacatgatatggtacccaaaaaaattaaacacttgattgaaaatccaaaaggttttggccaatagtacttattccaccatctgttgttattggcttcttcttcaccactcttttaaagctgtgtaagaactatattttgattaccaaaacattcatttaactctcttaacacattt

SEQ ID NO: 206820 - DNA, 483 bp, Cannabis indica
atattaaatatgaatttgttttgattatgaatgtgcaagatgtattgattgatattacataccttttttgttcaatttctttttttttttccagatttttcgttcttcacaacttcttggttatcctctattcttgtatattcttgttgctagatattctctcttgttgatatcagtgattgcagtgatgcactaacagttgctatttcgtgcaagctctaaggtttgaatatttttcatcaagggaggtttttgacaaaggagtttctctgcgattagtcgacggaaaatcgcagatagttgtatgatattttttttgttgtttgattatgttctgattgaggtaatgaaccaatggttgctattttgttgaaggtttaagctcagaagatctcatcaatggaagttatcgataatggagttttttgtaattgacgatggagttttgcgactcttggagatttttttaggtttttttttttt

SEQ ID NO: 206821 - DNA, 1141 bp, Cannabis indica
gccacgattagtaatcatgcatccattgatacacagtatgtttcttcaattattattatatattaacctaattaaaaacttattaactttattatataattttaatatttattatttaaggttatttgtttctatttattttaattgttaagaagagagtactcgagttatccagaattaatggtggtatattgagaaaatggctaataatatattgtgaattagctagctaaaagcctaatattaattttatttgtcgttatatatataatcagcagcttctttcttttttcttgataattaggtactaattatattgcgttgtaagtgatgctcctgcatttcctttcattatatgtgtatatgatcaacaataatattgggcagaattaatattctcagaatcgatcatgtatttttgttacctcatgtatgtgtactatagtaatgtgtacatgacatctatataaatatatatatatatatatatatatctccatgttttgagctttttaattctttttcctctaattttacaattaaattagtcttttctccaaagaaaaatgttaccacttttataataaatagtatatatacgttagcgactaattatacactctatgataaagtagttgatccgtactgctatatatacattaattaattacccatatatcatatatatatatatatgcatgttgtatacatatagttctttagttgacgagtgaaaataattatctgagtgcagttgtatctacttctacgtacggaatatatacatgtacatacatgttattataggtagcttgatgaagaaattataagcgtgaaactatacatatgcgtgaataaataggatttattttcctaattataatccttgtataattttgctctccaaatttttccctattacaaaagtttatgctgaatttataaaatcgctgcaaaatattattaatatagcactaatatgacgtcaatttagcccaaaacaaaaaataaatgcttaataaagtatacaattaacttcccctaaaaaaacggaaataaaaaatatatattttaattaattacataatatatttaggatttaaacccaacattgaagctaacatttttattattttctttt

SEQ ID NO: 206822 - DNA, 694 bp, Cannabis indica
agagagagaagcttgctaaagggtatgtttgatttgatgtttggtatgtacttccttgagaaattttgagtctttaaatgatagaacaaaaaaatagttgggaatgccctaaatatatatatatatatatatatatataatgggtgacctaaaaataaagtgtggacaaaaatatacatgattgtgatgaaattggtgtgagtagctagctagtgacgctaatttgacttttgcacatgaaaaagcttagtctcaagtctcatcgaaaaatctatggcttgaataaaaatactcttttgaaaagcaataataattatgatatcatattaattatatagaaaaatattattattattaactatatatactctctagtatctattatatattatccacggaagtaatattaatattcaacctataatattctaaggggaaaaatacgcccctaggtagtctcagtattttgttaaaagattggccgaactatgtattttgcaaatataatattgatactatatcagtattggcatcaccaacctaacactataatgttatatatagtgtgatttttttcacttttcactccaaccgaattctattatttaacctatttttacgaggatctacagtgtcccattaataatagtggacactatagtccacgacaatttttttttttgttatatatata

SEQ ID NO: 206823 - DNA, 941 bp, Cannabis indica
cgtgcctttcaaaaaagggtattattaaatcatcttttatgaacattccgtatatatcttaagctacaataatgttcaatttcttttctactaccatttatagctgtattgacaaagactgatttaaatatacaaattcataatgataaaatatcatgatctgcagctcaactgaaatataaatatatatatatatttatatataagtaccaattttttttgaccaacttcatttacgtgacatgggtttttaattttttttttctgccctaattgaatgaaatgctaattaatactataacttatagagataagagtatagaagctatgaataatggagttaaaaattattctttatacatactatatttgaatgttttggttggacaactttccaattataattatctatttcggttgatgggttatttgttttatagattctttcatgggcccttttcatggaaaattttggaatgaagctaacagaacgaaacagtgaaataccattatcatgaatactgtcaactactaaattataaatacacacatacaaaattcttatatagaatatatataaatttatatcactattattttagtcaaacgcctaattccctactcctttttatctactctatttctagctctcttaactgtaatttttaaaaagttaattaagatttttttactttaaatatatattaaattatgtttggaaatttcttaaggtcgttaaaaatctttcttaaactattaaaattattgtatttaaggactattttctaattttaataaaaaaaagtaagtttgaggaacataatttaatagatattaaaatttaagaaacaatttattacataagcaaattgtaaatttttaacagttcacagaaaatttttaaccacttataaagttcaaaaatcataatttgatatata

SEQ ID NO: 206824 - DNA, 1354 bp, Cannabis indica
tgagtatctttcgtgggaaacagctattagcagtagccagttattatataatccttttcactttcaaaaattaattttaattggagtatctttatcattacaagcttgctcaaacgaaaattaattaatagtttatttgaaaatacttacaattttgattcattcccatattatactaaaacaaagtcaagagcaaaaccatacaatgaatttagtaacaatatgccttggttcgtgtaatcactagaagatcatatagtggcattttcttaatcatatcagattttgatcagaataagattaattaatatatagttttagatgtacactcttaaaaaagatgtactgatttacctattatttgtttcgatatttaaaaaaaaataatttaatttgtttataatcacgtacgtcataattatttaagatattatttgaaattttaaaaaattcaaaataatttataatatataaagcagtgttcacacaatttattactttattttcacacgtttataaaataacaaattcacacgttgaataaattattttaactttattttaggcgtgttaattatttctctaaaaagcttaaaattttacaatatatcttagataactgcaacatacataactatgaaaatcttccaaataatattctaaatcaatatattattattttttccttctctcagaagtaggaagtagaattagcctattggttgccaattattggatccgtaaataaattcctaagtaagatttaatgtaagtttttttttttttttttttccatatattcattaatttgaggtaaattacaaaagagaaatatccttattaacgtccaaaaatgcatataaacttttaaaaatattacatatacaaaaatacaaaaatataattaactatatagtattaataagttgcccctctaaaattagttttttttttaaatcttattcccccaactaattatagtatcctccctcgatccgttagtatataagttaattttatttttacaaactgtagttctggagacaattttatcaaggataaagtagtccttaatattatatgcattactctataattaatttatcatgagcctataaaggtgagatatatatatatatatatatgatatataaaactaaatttaattgaagttggttttatgtaaaagaaaaaaaaaaaacaagttcaattacagccttaattatccgaagcaattatgctgaaattgctttcattccatggaaaaataactgaaagtacttttgcagttgaatatcataaaaggctcttaattaaataaaagtatcccaaactttatttattattttttttt

SEQ ID NO: 206825 - DNA, 854 bp, Cannabis indica
gttttttttccctctctaaagttcaagtgtattacacaactaattatttcatatgactcagaattagaaatatgctgattaccacatgttacatgtatcactagtaaatcgccatacgtacgatgagtttattgaacagaataaacagtttattagatgataccaacatagttttattgaacagaatcaataaatttgtggtaaagctgtttggacaaaattgatgataattttttgttaaaaaaaaaaaaaattgatgataattttttctttaatagactataatttttactattaatttaactaagtaggaggaaatcgttggatatgtagctataaattcaccatgcaaaaacagagcatgcaccacgatgttattagtagatatataggcagtatagtttgaaatgcatatacataaaggtgttttttattaactatacaatacaagaataataataacaactaattattattataataaaggtagccgacataatgtactccatctcatttaaagtaatttttaatggagagtacaaagagaggcaaatatgtgtaattgtccctcaatttttggtccatgttaccatttattggaagtataagaaaaaggcttatattatattatataaacagaaatgataagtatcacaagagctagatatcgctattaatacaaattaatattgatataaaaattgttaaccactcgtaatatatgtcacatcgttatagtattgagtactgtaaaatacgcaatgcacctatataaactatagggatatttatggtttattatggtaggagtgtaggactaggaggagcttaggtctcttaaacactcaagatgt

SEQ ID NO: 206826 - DNA, 820 bp, Cannabis indica
aatacctactataattataattatgtttaaagttagatgttccccatgacaaaaaaaaaaagtaaacaccctttaaagtttatttattttactctttttcaataatggacaccactatattactccctctacacatttattttttttacttcttttttttttcaaaaggaaaaaaaaagatcaaatatcatttgtgcttttactgaaacgttttcaaactatgtagaattatacagatttaagtttaactgtataatttaaacttcttttcacaaaaattacaaaaaatatatataaatatataaacttcttttgataggctcaatgtttaattatatatttgtcttcactttctttcaggtaccttgccatttgattgatttttcttcatcactaaacaactaaaatagtatataatacttgtgatggcatggcactatttatttaatatttatttttgtttttttgcttagggtattttgtttttgtcattagaatacaagacatccttcccccatataacaactatgaatatattttaggtaattatagccatcttgtaggggcactcttagcttcaaaaaaaaacagtgtactatatacaaatagttttcaaggaatatacacctaaatttataccatgataatgtcatcttattttcattttcaactttattaaattaatgacaatttaaaagtgtctatatacattaatacatatatgtaaaacccattataaaattgaagtagctaaggtaaatcaaaatacataaaatacaacattttagcaatttttaagtgatcttcaagtattattttg

SEQ ID NO: 206827 - DNA, 1107 bp, Cannabis indica
aaccttgaatacttgactagcaatgtcatcatcataatagagtacggttgcatatgtacttctgccgattatattttatatcgatttcccttcattatatgagcggtttgttgtcttgtacattcaattttcggctgagactatgcttttgttggtgttttttctttcacttgattttgtgttccaaagcctcgaaattgccagtcgatttaattgaagatataagaaacaacgaaactccgcccaggtggctagttgagtttattttttgtgagcaagagatttggagttcgaacttttatccaggtcaactctttcttattaaataaaaaggctatgtgaagctcccattaatgttcttggactagacttttgtttaactatttcaaatttctattgcatttcaccatatttctatgcaacattttccattttcccctcatccaaaataaatgctgctctgttaaattcgcgtggggttaaaatattcacttgttttcttgcatttctccaaacaaaacgtaaacgttacttcgagagcctcgtgactcgtgagttttcttctattgacacgcccgttcatgttcggcctttgcgcgaccgcacacacaccgacactcgagaaacctaatgttatattgttttcatttatccttctctcgtgcttagtttttctatttagcttcgcttagtttttctgtttttccttgatttgtatgaacaaaaattaatttccatattcgagtttagataaacaaaataaaccatgactatataacctgctatattgtcgtttaatctgatcttcgtaatcatgggccaagtccaccatttcggccttatttgtatcacctattagtaatttgtttgttgctacgctatatgccataaatcggtgtcaagaggtgacacgtttctttcatgccccactctttttgttatatagttatttttttatttttgcttctatattatatagttatataggtcctgttctgtgagatatcaactctcttttttttcttttttggtaaggagtagaggtcaattctttgaaatggtatttctattacgcttttttttttttggacttttattatacaaaag

SEQ ID NO: 206828 - DNA, 749 bp, Cannabis indica
acagatatgggcaggaacatccatatctaggtggatctgtgctacagtggaggcagcagggggtactatggaaggctagagcaggaaagtgctgactgcctagggaagggtgggggaactgagccgggtcttaaaggctgtgtgagacactaccacatggaaaaggggcagggaattccagcagagggcccaacctgagcaaaggaagctgctggaaagtacagaatcaacttttactactaggccaaagggagtatttgttatctagagaaatgacagaagatggtgcaaagagggtagaagccagaacacacaggaaggctgaaaaacctggaatttattctataagcaataggggttcccagaagagtacaaacaggaaagacagcatgcgagctttcctttaaaaaagatcgcctgggagccaccatgggacagggaggccaaaacaaaggaaggccagctttcctgccatgggggtgaccaatcaacacagagcgaccttcaactcgcctcggccacaaaggaaggccaatttttctgcctttgggtgtgaccgattaggacagagcgaccttcaactcacctcagccatggccaactggggttcagtagcctcttttaagctcctcctccttcccctccgtgttcccggctggcagggctgtggaagcacaagggcgctgtgagaaagcctccttccacccatggctgactcgctgtccatgctgacgagcccccaaaaatgt

SEQ ID NO: 206829 - DNA, 513 bp, Cannabis indica
tctgatctaggcaagttaacacagaaaactcgaagaaaagcatgtttcatgttgtaacaagctggacatgaatatctggtccggttatgtctgcatttttttcccactcccttttcattgttttttcttctatttgttttggttgagtatctgttgttggcttctttgatatggttgatatttggtccacttctgtgtacatttgatggagtgttgggcctgttatgtcccaaacacatgcaggttcatacatggtgtgatttctttggagctttgtgagatttcattttggcagagtttgatttttgtgtgatgtaaatgaaaggtatgcagtaacagatttaatagttttgcaaggagagcatgtgattatgctactgataagtaaatgtccaaggactaggttatgggggggtgttgttgtattgtcttttcaaatgcatattagtaagtatgttgatagatgctgtaccttactcaatccgccatatctttttttttttctttttcttt

SEQ ID NO: 206830 - DNA, 910 bp, Cannabis indica
tttaagtttaaatccttacaaccgagtcaaatgtaacgtgaagtgactgcccccactttaattgtggcttcgcccatgatagtatatattattataatctatttaaataattttttaataataaaattaacacttccatctctagatagcctaccgttattgttattagatcttctatgcattctctaatatgtaatatgtgtagtatagaaccacaatatgtcgtatatagcattaaccaaaacatgatggaaatttctttgagaaaaaaaaacataatcgatagagttttttttggctaactatcgatagtgaaaatgttgatatatgcatataagacaagtcagggtgtgggggtctgctggtgaactggtaagtaaaatgaaaaaaaatttgaaaatggacatattagtgtttctacaaaaagataattaagtaattaaattttattttaaaaatgggatgtatttataaaagtttgggcctttttaattaaactcaattagcaaggcagagcctgacttttcagtcgtccctttcacttggttaccaatatctttgacctgaaatgaatccaaaaaaagaaagggatggccttagcctatatatatatagactctggactagtgggcaccaaaaacaatttgctttttgtttttttgtttttttttttatttatttattttatgaactttggtttatttcttattgcttcctaaaataattctataatttaaagttggagattgaaattccttttatactttaaagcggtggaaatgtttaatgtgctctcaatatccagaagaatgtaattctctcatttgaggataacagatggtagaatattaattaattccaaaatatttttcatgactttatatgatgatgtatcttgtagtggcctttt

SEQ ID NO: 206831 - DNA, 871 bp, Cannabis indica
acatagaaaccattctcacgaccacagagttagtagttccgtacaagaggcccccgccaaagaagaaggatgcaagaaaaatggatcattcgaagtaatgccgtttccataaaaattttagccaggataccaatgagtgtaaaaatctaaaagaagagattgaatttctgatcaaaaagaacaattcacacataaaaaggtatgtgaaggccgaccaagaataaagggccacccaaccagatgataatcaataccctttgatgccaccacatgtggatggacatttacaagtgattatttggggcccacatattgctggagattctaaaaatgcaagggagaaatattccccagtacgagtaagatgagaaagtgttggccgcagaagagagaaatcctaagcaaccgcataggaaagatagaactataacttttagtgataaagactctaatcatgtaatttactcacagaacgatcctcttgtagtggatgtctaaattgtaaacaaatagtggcatccaatatctgttcaaaactagttatgaaaaaaatgtcgtgtctcgcatgtgtcccagtgtaattgctaagcatattgcacataggagttggtttagaattgaaactaatccaagtgaaggcacaacatgtcaagggcaaccaatacttatatacttatattgggccaatggtgagctccgggatgtccaagtgacatcctcaacttcatagttctatcttttttaggattagttattatttatttttatcgaacttgttatttttgtaagctaaaaaagttttcatctttttctttcagttttttaaacaaaaggttttttaattttaatattatatttgtttgtattttta

SEQ ID NO: 206832 - DNA, 670 bp, Cannabis indica
gtgtatttatgaaataatacttaaataaaatccatcacaattgttatgatggttctaaggttttgtgggcctaatgacgttttcatgagtctttttcaaaaagaaaaaacttctctacgagaatgataaaataagcatcatattttcttctccttagtcattactcccccactttctctttatcacctttctaactggtaaatcatgccttttaactttcacaccattattatttatctatgtatgaggtcatgttaatatttactcttaaaacataaactcattttaacactcctaattacttagagagcaaccaatttactctatgccaaatgttaggccaggcctgggttgggacatgggaaatgggccccttgattgcagttttggacagtaataatggaccaagtggtatggtctagactctagtctctatactagacctagactagacttgagctactccaatccaaataaaggcttcttttgctaattaacctccattattaaaccccaatccaataaacaaattaaaattaccacaaatcattgtactactagttattgttttcacgtggctacaatttttttttattccaatcttaccttctttttactttttggtgtgcaatgttaaactattggatctctcaacaatgtcacacactaa

SEQ ID NO: 206833 - DNA, 937 bp, Cannabis indica
gacttttttcatcaatttttttttttcaagaaatagatttttttcgttaagaaactagttttaattatatattagtaaatttatattacaatatataagatgaatagattactcctaattatagttaattagttttagagatggaaccccatgcactttagtcacttcattctgaattctaacattgtattagagtcgttagtgatccgttgtgagcccaaaatattactggtccaaaaaggtgagccataaaaggaactacttgtcatctgttgtgagcctaaagtatcgtcgttctaaaaagatgagccaaacttaaaacttatgttgtctctcttttaacctccatttaggatatttcggtcaatgtgtgtcagattctagtattagggtctttgacatgtttcaaaatttacaaatttctaaatttcttgatttcgccttgtgtgattctttcaaatgtcatgttccgctttgtgttctctcaaaggtcgttcgttaacccacactttccaagcccaaaagtgaggatgttgtattaccatatataagatgaatgtgaaactcttcccatagccaattagttttgagatagaaccgcatgcaccttagtcactttcattctaaattctaacaatttataaatgagtttttaagttttctacccatccggtgacgatcagtcagagcgaaactcaccaaaaatcctttataaagaaattggtttcttcatcaagaaactggtttttttataaagaaacttattcttcatgaaactgattttgattatatagaagtaaaatttatatatgagtttataagttttttatagtattacttcttatctatgatgatttatctcgtattttaaagggataaatcatcatatttagtgtaattaagttttgggtttagttgactcaaaaaaaaaaaaaaa

SEQ ID NO: 206834 - DNA, 1025 bp, Cannabis indica
ataatttattaataactaaaatattttcactaaaaataattttttttcgtactttattttctttaagtgagatcctatcacttttaattgattaattatacgtgtaagaagtatatataatttgagggtgttgtcccaatcatttcattcatatataaatatatatatatatatatatttaatacatatcctacttctttaaatctaacttcaaatattttgggttcaagatttgtcatatatatatatatataaaatattgcttcttatatataatgcatgatcttatttttctatgctaaaaaaggggtctttgcttttattattcatagtctaaaccctcctctaaaaacacaaaagcatcaataataataacaaattctctcatttcacatattacaatacactgtctcccattttcatgccaattaatatataccattgtttttgtaataatctccaagctaatcatgccatttaaaaataaaacttatttaatatgccaaccttcattatcatatactaacacaaatttaaagaagagggactctataatatagttatgaattcttacttagtttagcttgtaattgatcaattaccaaataccaacacaatcaaattaagacattgactatatatccccttcattatatctagtgacatatggttcacatatatatgacaagataataacataattttgactatatataaatttaaaataagtcatctgattactcaatttacaatgatagaaagtagtggaaattataaagcttttttcaaagctctttcctctggctaagctatagctcacccaacatttctgtagagaccaggatattgtgtttgattttgtactattcatagtgggtggaagaagtactataatttgctttaaggattcagaaacatgaagcacttgagattgtcttctgtcatccactacctagcttattatattatatatatataatcatgatcaaatgtatgtattcttttttttttgtgtatatatatat

SEQ ID NO: 206835 - DNA, 1313 bp, Cannabis indica
cgtccgttctttacccgcttccaatcaaagggtcctcccggcggcagcctgagccttgatataggctaactcctattctttcctgaagagatacttttgataccggtcctccgccgaggctataatgtccgctcggagcaccttttcagcgtccgggatacgaatgtttgggcagaggactttaaagtgtactagtcaacttattcaccttgacgtgtcaacagtggataataaagcgcacttttatgttacattcatctatgctttcaatgacgaagagggaaggaagaaactatggctagatcttcatgagttggctacaaatgaggcttggattgtcatgggcgacttcaatgacatcctagccaaagatgataggattgggaagcgagtgaggtatgtcccttccactaattttattgattgtgtggctaattgtcggctggacgatgtaaaattcagtgggaactattatacttggaacaataaacagtatggagatgaccgaatcttctgtaagattgattgggtgcttgctaatcaagagtggttggccaagtttccttagtcgaagtagtgttcatgaatgaggggatttttgatcactcttcggctgtcttaagggtgcgcaacaaagtggtgactggtaggaagccgttcaaatactataggatgtgggaaaaccagtcctacctactcggaattagtgaggaaaatatggcagcaagggcactttgcaggaaaatgaaggctttgaagaaggctttcaaggagttaaattcctaacatttttgtgatatccaagcctaagagattcaagcaaggaacacacttgatgagcgtcaagacaagctacaccaacaaccttttgacactgatttatagatgttagaacaagaagccaaggatgattttgtctctaaacacaaaagctatctatcttttttacaccaaaaggcaaagctatcatgggcaaaagatggtgatgagaattctgcattattccacaccagtatacgtgaaagaaggagacacaaccaggtcttatctatcactaatgctgatgggaaaagggtggatgaaccaaatgaagtcaaagatgcttttattaattactatataggcctccttggcccctgtatgcataatagattgaaagtagagtagggcattattaaagagggaagtatcttgacaggagctcaaattaatctactcatggccacggtcacaagagatgaggtcaagaaaatggtgctagcaattccaggtgttaaagctcttggtccggatggctttggaagctatttttt

SEQ ID NO: 206836 - DNA, 1349 bp, Cannabis indica
tttaggccataaaacccaaacaattaagggcaatcaagtaaattttctgtacattctaaattattaataaaaaattaatatacaaataatctattgaaagtgtgcctattttttggttcatttgtgcaataatttgttcaaatactaattcgttaccttaaatacttcaatttttttaggataaaagaacttaccatatgtcctaaatgattatgaaaggatttaccagacaattttcatatacggtgagttatgtaacacatttttattttattttttttctaattggaaaagttaaaaaacatgttttataaaattgtttcacttttaattttaaaaatgagaatcaaaattttcgaaattaaaaaaaaagtctcttttaacaaaattttaaatagagttttttttttcttgattatagtctatttgtatttttattcatcaatattttcgattcaaccctaaacctagaccctgacaaagacccaaacctagaaccccagactctggcctcggctccaaaccccgacctggattccagacccgaacatgaaccccgatcctaaaccccaagcccggatcttggctcgaggctgaaacccgaatcccagattgagccttggccaaggtttgggtccgagtttgaagttcaagtctttgtcagggcccaaagcccgagtccgacttaaatgaaaccgataaaagaaatataaaaattaaagttacaaaatacactatatttgcttttaaaattagcaaaaaaaaacataaatagttagagaatacatttttgtttttcaaaaacaaaaactctactttaacttttgtgatttaaaatattaaaaaatataagtattacctaagttattaataaaatttctacacaacaagattcactaacactgattgtgacctgtataagttttgggatttttttaataatatacttaaaatataaattatttacaaaaataccttaataaatctcaattacaataacaccttgccacgtcaattaaaaaataccttaattctaaaataatatgcctaaaataaaattaatcctaaactttgattttttattattttttttggattttcaaaagtaaaattttgattacttatgatgttgataataaactattagttacttttacaataaaaaaaaaaaaattattagtaaattatataatttgagatacaatttggttacctctaaaatcttatttataaacatcttaataatcaattagctatttttaagttatattatgctatctcattatttaaaatacatttaggtaatcttaatatttattttcgaaactaattgattgtcatataataat

SEQ ID NO: 206837 - DNA, 967 bp, Cannabis indica
ttttcccaggcattgttgtttctaatgttaggagaaaagctagccaagctgctcatggtttagccaaatatgctcttgggttggatgtggacacttgttggagaggagaaattccttctcttattttctctgttgttgtaaacgatggttgattataataacagtgaaactttctaacaaaaaaaaaaaaactaatatattcatttttagtttatattatattgattaagatgtacttttatgttattattttttcttttgtgtaacaatatttatgttaccttccatactatttaagaatgaatgttaagaaagatttaaaaaatgacaaaacagtaattaatcactatattagtaaccaaatagtttattttgtagaaatagtagaaaaaaaaaaaaaaaaacatatgttttctacatcttaaaatgtttacattgaagaatagatcacgatagtaatttttttgagatttttacacgtagcaccttattatatatctaaatttcaaaaataatgttaacatcaaatttaagttttctacctgaccaagtattattgtctgtcattttttttccttttcttttaagtcttaattatttgtttcttcattatattctctcttttctatttctcaaccttttttttttacttttaaaaataatttatgaccaccttgttattaccttgtatttaattaattaataagttaataattataaaaaacgaaattttaaatgtgcatccattatatatttgcaaataaatcctaataaaaatctaagcaaggcaacctaagcatagagtccccatgcaatgtggtttcattttagttcatctaagagaagaaaagcatttcatcatcaaacatggatcaacgacgtcgtttagcttttttcttgtcatcaggcaacatgaacacatcgctgagaactgtattcgatatgaaggaagcctccaataacttca

SEQ ID NO: 206838 - DNA, 639 bp, Cannabis indica
tatttttatttataacatgcaccccacaaattaaattgaaaaaaaaaaaattactcaattcaaataatctattacatatatatgtgatttctttttataagtatgtaattaaaattttataactgttgatacttaaattaattttgagaaatctaaaactaatataagtataatttaactttattagataagaaactaattttaattacatagtaagtaagttgggtttttaatttattgtacttaataaaattactattaactgtttttttattaaaaaaattgtttttttcatcaaaaaactgatgttgattgtatcgaagtaaaatttatatgaatttttttaataatatttttaaatatttatgatgatttattctatatttttaaggatttttttttaatttcatatttagtacaattaagtttgtatgttatatactttattttagaagaagatagtcttaccagctggcatgtgtgcgatttttttctctccaggttcgtaggtttcatcgttttgacggctccgaagtttcagcgtggacggcttcttgcggctagattttttcacgttccgttcactgtgttttcactggtggagcttgcattcgaacgtatagtttcttttctcgtacg

SEQ ID NO: 206839 - DNA, 617 bp, Cannabis indica
aaaaataatttatttagttatttatttcttctctataagagtatacgataattagactctgaagaaggttgatcaatttattaagttataaagatatatatatatatagacaataatgatagtgatcataatgatgatgatgatgtagttgaagtaagacaataaattaacataaattaagaagaagaaaaaaagcttgaaagcagtatgcctaactaagtttttttttcttttcggttgtgaatatatatatgtaatgaaattaaataaatatgaaagagattatattttttattattattattattatttttttacaaaagagattagagttatttaatttacccataactatagaaaaatttaaataattcaaatacgaaaacaaaatacaattttggatcacagaattaataattatatatgatagtactgaggaatcaatatcgatgacttttgacaagtcaaacaaatccatacaaatcgttgatttgtttgaatacgcattttatatggtatataataagttcatatgcattttatatggtatataataagttgatattatatatatatatatttttgaaagagggataagaatgacgctatgacaatct

SEQ ID NO: 206840 - DNA, 690 bp, Cannabis indica
gactaagtttaaaaatttcatttaataatatcgtttctatttaaaaattcctaagaagcataagagattttattgccactcactgaaggaagccaataatttttgtacactgacacagaagtaccaccaataagctagcgactaccattttggaattattctttacccccaaagaatgtacctccaaataaagggcttctagaaacaccatggtgcatcgttaatcatatcatatgaaaactctgtaaactgtaaaattcaaagcgaagtttgattttcagttcattcatcttttctcttcaaggtatatggtcttatgatgatgatgatgttattactactaggatgtgctgaattagtcaattttcatattaggtttaatgttaatgaaatttgtggcgttgtacgttaagaattgaattgttgcaagcgagaatgagaataagatagtatgcgagattcaaatttgagatctgacaaagattaggcgtggctcctatgatcgagaggttgagccttgttgattattttgtactttacgtgttttttaagttttcttgtttatttattatgactttctctctctagttggtatggttagtcaattattttcgttttgttaattttcaatttcgaaatcgaaacaaaacaaatcagtttgttgagcccatttttttctttttttttttt

SEQ ID NO: 206841 - DNA, 785 bp, Cannabis indica
acaaaaaacttaacttttagtcataataaaacatgttgctttctgattgaattagttgattttgtggctgggaaaagaagtctttggcatgacaagcaacttctacttcaacttctgcttccaacataatgtctgatccttttatattattctctgaattcacattcaccaacttaattaacatgcatgtataagaatcaacaaatttacagcattacaaaattcaattaagataaatacaagatgaaatgaatttatttgtgtacttcatactaaatttaactatttacttatgcttttaaaattttgttggttgaataactctaaaatgagctaaaagtagaagcagaaaaggtagacaaactataactaaatgagaaatttcttcaataaaaacaaaagcaagcatatgaaaacaatgtcattgtttcaaaacaaaaaccaaaatgtatttctaactatagaaatttcaaagtaatatgtcctatccttctccatacaaaagttgaaatttacccttaacaaaacaagtggtgcaaaaacattaaagaatttctgttaaataataaaggcttatagacttttaattccttaaaaaggcaaaaggactccgctaaaattgaaaccacaagaacaaagatgataacaataaaatttaagctttattagtcagcaaaataagaatgactcttaaaaaatcttttcaagcattttagttataacaatatctagtgactatcccaaatagaaaaataacattatttgacctaaaacttatggaattg

SEQ ID NO: 206842 - DNA, 794 bp, Cannabis indica
gttaaaaatactttaatctaaaatgttgtagcataaaatataatttttaacttttattgttttagggttcgtttggaacatcgtattaggttgtattgtattgtattatatttttttttttgaaagattgtattgtattatattaaattagattatacattatatttttatataatactatattaaactttaattgattatacaaaaatattatatatttaggtgtccataaaagttaatactacatataattttacataaaatacaattcaatataatactatataatacaatacagtgtaatacgacgtaccaaacgaactcttaatgtaaaaaaaaaaagtgtacgttcaatattttattttatcttagagcatctaagattctaaatggttaaattttggggatgtttgcttatgtgaaatatttatttggttaaatacaaggatattatactgttagagataaaatggtgctatcataaaaaaaattgtattgatgtcactgtacgacattgatactatcgcttttttaaaaaaaaaaaataaataaataaatagtgtgacaatatctataattaaaataaataataatgtgggagattataattatagcattttttataattatagtaataaattatgtccactggccactagtgttcaaggaattacccataactaagctgtgatgattggagttacatttgtacataatagttattaccattatttgatttccaacttcctaatattcacaaaatatttgggatttgtatttttattattattatt

SEQ ID NO: 206843 - DNA, 705 bp, Cannabis indica
attgttttctgtatatgcatatgtagatttccatccactttgtatttcaatctatgcattctttataaacctctgcttttacttttttcgatctctaaaatatgtatcattgtatttgtgattaggtttacatcatagattttggtcttgcaaaaagataccgggatcccacctcaaacaggcacaatccttacaagttaatatttatgtaacccaattagaagctatattcacttttgaatttggcattcgtgctgctcttttcttgagagagttttatttgtactcatatcaatttaatatttggagtcacgaaactttaaatattatgtagtttcacaactattaagggtcagttttggaaaggaatacaatagattagtatatataggatactaaagagaattggagagtatgcaatgtattgagtgaaaggaatctctgtttgcctagggtcagttttgtactttcttgtcactgagttcatattaaaaaagtagttaaataattatactaatattatttttttgaaaaaaattactattatgttttttattttataaaattttaatctgtttcttttattctttttttaaattatatatttcttcatataataaacatttttttaaatagtatatttttaaataaattatatataatgttttcatcaaaaataaatattcaaaattataaaatattatt

SEQ ID NO: 206844 - DNA, 1564 bp, Cannabis indica
gtgcgtttactgattagttgatacgttaaaaattcttatacaatggaaggttcaaacgaaaacacacttggtcaaaattatttgttggtctttctatgtgtgtcattttcattaaatgtgaaaataaaatctgcgaaaatgaaatatagtcccacattgctttttaaagagttttttaccttaattaactgttataaatattcctcggtaaatttagttttaaacgcacacaaatatctaagagttacataacttctatttagaatattttttctaaattactcatagaggtatttataattttctagttcaagaatacattattcgcagctcggtggtgcgcctcgcttatagaaatcctccagcactgagaagaggatgcaaaagttattttaaggaaatcaggtgctacacaggcttactgaaaaattatcagttgggaatacatccacggtcaatttctctcttctctctctttttttaatatatttattattataattatgtcttaagtttaattagattatttctttttttttttcttcattctagtcttttacttttttagttaaaaaaaagaaaaaaatattatattatattacttagactagagaaggaagaaagaagaaaaaaagataagccaattacggtgcagaagcagcagatgacttctttaagtttgtttttggttctcatataaccaaaaaagcattgctagcatctctaatgtggatgctttaaaaaatgtttgatgatataaatatattttgacattatttaacggatgcttaccattagagtgaaaaagaacgctaagaaagaaagtcatacaataacatactttatatcttttatttcttattattttattattattttgtcgtaaaatctaattatttaatatattaaataataatataatattattttaataattttagagatgctttctattagaacattttagaacaaaacatggtaaaattgatgtgaaaaagaaataaaataaaatagtattgaggtgatgtggatgtttttgaaactcttaaaagaatacaaccattggagatgttcttaagcaccttaaggtgtccaactgatatgtcgagttgtgagtggttagtgattttctatattatttgtaataccagattgatattaaattgtgccaacaataacaatataacatcgtttatagtgtttgccaaattaacttgctcttaacatttctctaaccaaaatatgtagtaaataatacaaagcaaataacaatataataacattttaacacataatttgaaataagaaaattatttgttgttgtataactgaaaaaatcttcattcacgtgaatttctcaaccgtgtggttcataggacacagtgaaaaactcttaatttttttcaagcctttgtcaactttccgtttcatcacttactgtcacacactaacgttcacttaaccagctttgatagaattagtatcagaggatctttttaataaccaaaacaattggtagtatatttaatgtcccaacttgctccaacaaagcaaacaaaaacca

SEQ ID NO: 206845 - DNA, 681 bp, Cannabis indica
aaagaatttcaaaccgcatttttttttttgcggtgcgatgcggtgcgtacggtttgagcggtttgatgtacacccctaaggtgaggcgaaaagatgagaagaacaatacgggttttcttctggtcataattcgttgccatctgtcatgtacgtcgtggctttagaattgcaaacaagagaattgcatctctaactagacaacatttataaatgtcgaaactaaatatattatcctataaatttacataaaatttaatacattttactataaaaaatattttcaaagttgatcaccctaaattttattaactataatcttacatcacattaaataagataactagtagtacaagtacctattcaaatatcaatatttatttttagaaatataaatatcaacattagtaaaattataattttcctctcattttatcaatacactatttattaaacaaaactaaaagtaattaattttacatatttatatttagacccaataatttaaaatttaggtatatatacctttaaaaaatatgtactccacgttttgtgaacaaacataaatatatattatcctatagcatatctaattttttttttaacaaagtgattagaatcacttatgaatttacgatgtagacatccgccaccgatgctagaacctcctcgaatcaggatagc

SEQ ID NO: 206846 - DNA, 1215 bp, Cannabis indica
aacaaattaaagtccttagtaagaaaaaaaaaataaaaaaaaaaatggatgagtgatgaaactaatataaattggtgacaataaaaatatgcttaaaataaagcaacaaatactaataaattaattgcgagaaaaaatatctatggaatgatagacttgaatagctaattctccctatgtcaaatcagcctacttgttacgacatccattcaacaaagttgcacagagttaacataatctttcatatgtttgtgagatttttcctaaaactacacagattaagttctacaacttagtttaatatattcttatatcaaatcaggttgcagaacaacaattaaacatcattatcaagttatgcaaggtaatgaaatatccatattccatttattaagaaaaacgtaaacctaggaattcacttgcatcatccaagttgtaactactaggtctagcctttccagaattggatttagcttggaaaattgttactcatggaaaaataataacaattaataaatagtaggcttacttgaatgaacaaagaaaaaattgttaaaatcatgcactcaaattacttagttcaaatcatagggggttaatagccattcaagtctcaagaaccttagctcatgttcaaaccagtaattacaatcccaaaaaaaaaaaatttcatccatggttgctacttagtctttaaaaaattatcaaactccaaatatataaagaaaggaagaaaacagaacaagaaaaatagaaagccaaactaatgaagcttgtgtcctcttccttctatcctccgttgatttcctctttaaggtacttgattttcaatacttttctttctacaatattttttctctctttttgtagctcatgtgtgtgtgtaatgaatgtcaatggaggctggtacttatttttcttctattcccttagtgtacaccttatttactctaattagaaagctcaacaactctctgtggcccacaggttctctttgtttcctattctcacatcgtcaactagtataaatttaagtgactaccacatgggtgatgatgtggatggattcaattctctttgtaacttgaccacgtcactgcttagaatgttgaattcttatagcaatatgttcatcaattcctcccagtttcaacttcaataacccttttaatcttgcatcattttcattcccttggcactttaactttcattcgt

SEQ ID NO: 206847 - DNA, 625 bp, Cannabis indica
ttttacagaactttaaattcgattaaaattgaggatgctatgatttttttgaaaatttttgaaaaatattatcctaagattacactcccctgcgcacgtggacgtaggtgaacctcgatcgagagtacatgctttaggacaaagcgtgtttgaggttcctcagacaagctcattgttagaacccccctacacgcgcatcccatgctgcatgcatcctcctcccttgatcacgcaattcagtgtccagcttgtctatgtcagacgagttctaattgttgatcataaaggatacaacaaattggttgtactcatgagataaactatagagaaaaaattaaattctttgttctattgataacaaaattcccatcatggttgcttttttagaattttaagttcatcataagcaagtgtgaagtgatactctgaccaagagtgatcttcgcactttcgagttcatttgcaaatgcgttgagtaaatgagaattggggtgaggattgttaaacatcattttgatagctacaaatatcaatgaatagaaatcaattacttggttcaatataaattcatacacatactcagaaaataacaaggatttaagatatgtttataaaaataccaaaa

SEQ ID NO: 206848 - DNA, 1302 bp, Cannabis indica
aatcaaaactaacaaaagcccttaaacttattgtcccccatgtagtgagcaagacaatccaacaacttatcctctaatgctttgaattgtgcaatttgtgtttgcaattctaatttctccttcattagatttttgttctcctcggccataagttgtaaccgattgtgtttttgggtggtggttgtggtgttctcctcgaacgaggccttaagaaaggctggaaaaacgctaggttcgcatttttttcgagtgatctccaccaacaagtgcttgcaccctttttggaacttttcatgcttgaattcccatctcttggatgaagttttcttgaatccctatagcttgaaatgatttagagagttactatttttaagcatactttgtatgcaattattataattttatcatttattttttagtgtttcaatttacacttgtgaacacacataaattaagttaatgttgcacatgatgtattaatgttacactttgctagttttgaccattttggtttgttttatatataataaatatatatatctaaatataatacagaaaattctatatatagcttgttaattaacttaataatttggtagatggtctttttgtctagctagcataaaagaattaaaggtcattgagttttatcattgacattcctaacttcatacactcacccaaaaaaaaattatattattatttagttatatattaatttacatgatctatgtatattactattctcttaacttgtcaaatagtgcacttttcaaaaaggaaaaaaaaaaacctaagtcaaatagtggctatattaatattcaaaattgggtgaggtaaaaatattcctatatatatatatatagataatatattaagcagtacaaactttttcatgtgatgagcacaacaatattgaccaccgactattattaattcttaattccttccatagttttttttgaaaatatatttttttatatctttttcagaaatgatcatgtttttattgttttgacaattatttatataaaataaaaccctatataatttcatactgaatatactattaatttcaaatttattttatcaaattaggagaaacaacacgttattgaaatgtaatattatttattttgattaaaaaaaatagagttaatttaattatgttaattaattattttttccttttgtatataagaagaaaacttcatacatttttttttttgtaaaggaaaaaaactccatcttcttaattttgtaacaacttactcaaccgaacatatatatactaaatatata

SEQ ID NO: 206849 - DNA, 912 bp, Cannabis indica
cacaatccatattcgatgatatacgaaaccaatctatacagaaccaaataaattcataaaatagagcaatatcaatacaagcagtccaaaaacataaccaacaataatactcatatcaataactctctgtaaatgcacatgactactttttctgaatgaaattcttcatttctcaaatccctgtctacatttgctcaaaagatgttgtgatctaaaagttcaaataatttaatcaaataaattaaaatccatcaagaatccatataacctacatcatacaacaatttattaaattgctttttcatgtaccttttagaatacgaagaggttttttcaaagcatattcacatagcttcccaatcttacggtcattgggttcttcatcctgcaaatattttttatatttatatatgtaagaatgttcagaggttatataccttaaatcttattatttttcaaagtagattagaaagaaattaattttttccaattactcaaatatgtgtatatgttgagataaacaagatatgagagaggtaaaattaacctgagaggaagggaatataccaaagattaatttcttatagaatttaacatgatgtctagatttggcgtgtaattaaggacaccgaaaattgagactttcacagagaggaaaaacctaccttgaaatcacacccatttctgccctagaaagtcattgataattacaattcctctcttaaattgattaaattggaatcaaaaccttgatatggaagattataaagggccaggaacgtggagatgttcgtagagtggagaaggagcaatagaaaatatgtgagcttataccaagatgtcaaaaactaaatatctgaccttttaatatgaaggtctaccattatagcaaacaaaagcagtaccacttgc

SEQ ID NO: 206850 - DNA, 980 bp, Cannabis indica
gtaagggaataaagcgattgagaagacatgggccaagaataaaagagtatacagcgatggatttggctcccaaatggagctctcaataaccacgaccattgattctctccactgaacctcttttgtctggaaaatcatccccaattgtttattaaatttacgattcacgtacctaaacatcaataacaaaaatagattatcaaaaaaatccttcaagtaacaaaatttaagcagggaggtatatgatctaggtttaaagaaagtactgattcatcagcgatgtcttcccaaccctggcaaaagaattatacaaaccatatttcaatacaatgatcaacccttcattatttcaaatcaaaacgcaaaattcattctaatcaatacatataataataataaaaaaaattacgcgctgtcgccaaggatgatcacctttaggaacatacgcctacgagaagccattgatggaattaaggttttatgaaaatcgaaataaagaatgagagaaagaggggtttgaacaatgccaaaaagttacatttaaattttaataggttttaacggagcaggatggttctttcggggttaaatttaacagaatattcttttatttgtaaagtatattctgttaaaccaaaaaataccgttaaataggcacttttagtatataaagatacaagtgcattggcaaatatgttttactcgtttgccatattggaatgtatgatttggtataaaaccaattcgtatatatattattggccctccacgtggactgcaatatatggtgaaagatatctcaccaaataagaaaagtgaagaaaaaaaataaaaaatagtatacatgacaattttcctaaaataaatactacttggggcaaggtacctagctaataataagctaataaatgtaccgataaatttttttaatctacatttgtactaactgagagacttttgttatttatttattattatta

SEQ ID NO: 206851 - DNA, 783 bp, Cannabis indica
atccttaaaatacttagacttaccataaatgatattcggtaaactatatatactgaagtgagatctcaatcatatatctctatttagccaagctcgaaggaatcatcatttcactactatgtctcaagatgtaaatatctgccagaatcattggttagcattcacgaacacctctaagaacataaataatacaaccaagctgaatctaaccatgttagatatttttactaaaattagataaaaatctttaaatttaacaatttcaatggttcatgaggcatttatgatttgatatatgttaaagtttaggggataaaaattctaattagtcttataaaaaataagatggaaacatatgggagtacaataatttgggagtacaataagtattaaatatagtcttcagtctaaaacgactgaaaagaaagtaaaaaaaaaagtgcatgctttttaataatgcttgcttgctcggctattctattctattctataatatgaggaaataaatacgagtataaatattatttgataatttttccatttttattagaaaagtaaaaaaaaaaagccaaagaaatgcgttatcgatttagacatggatccttcacattcaagccaatcatatcgcatttctcaaagccatgtccttctcattcactttctcaattctcatttctcatataaaatattatatatatatatataaactaactgtagtttggtcacggtttaataatcattcccaagtttctctgatgttactctcgtcatgatgaataattt

SEQ ID NO: 206852 - DNA, 1014 bp, Cannabis indica
gccactaatctatcacccttagaatcaatcacatgtcaataatggagatgttttaaaaagtgcttgatgatattgatatatttttagcatttttaataaatgttaccattgaattgaaaaaaatactaaaacagaatgctatgcaataactttttttattctctttttttttgttttttacgattatttcgtcataaagtaaaaaaatttaattgtttaatatatattaagtaaaatataatattattttaataatttttagagttgcttatcattggaacattttaaaacaaaaaatataaaaaataatgtggaaaaaaaataaaataaaatatgatatatttaagtaatatgaaagttttcaacactcttttaaaatgtcatcgttggtgatatctaaggattcaatatataattttaaatgaaacttcattaaagagttcatataaaatcttatgtacttgttttgttatattttgattattttactttcacctcattgcaaacacatggctatttattcattagtatggatcctcttctcttcttagtctgtattcttttaatttttatctttattaatttttatattgtaaaattttctattttacgaacactattaaaacaaaaaaagaaaaaagaaaacaaaaattgtgttttatgtatcaactacatgaaatattctaacttttgactttgaaatcttcaaacacatacatacataaatatgttttatatcatacaactaatctattttattttttttggagagcacataaaactactctaattaatatataatgttatacatgtacacaattaattctctaatatatatatatatatatttatatatatataatatacacacaaaaatatgtcacacgcacgattttatagcacgtctatatattagctatccaactatatcataataaagcaccaaaatttgttattcttaatttatgatataatgtcgtgcaaagtgcaaactatgtaattaattacacaact

SEQ ID NO: 206853 - DNA, 1748 bp, Cannabis indica
ttacgtatacgtgcattttgcacataacttttgcctagtatatatataaaagacttaatttaaaaccaccaattaaaaatgtgggtttgaaataagtgagctcactattttagacacattttgtaaggggaagtcattccaattaaccctaggttttattttattcaatatttgggcgagacaatccatatagagagcccttaatgtaaaggacaaagccacatgcatgaatgggttacatcatttttaaactctttttagttttattatcttacttttagttaacttaagtggaattatattaatttacaacatgcttgatatcctattgcacatttttgtctatacaaatccaatccaatataatgtcccttcattgcaattatcgcctacaatgacaaaattccaattatgcctacgtaagatttagattttaactttataccatacacataaataattttatctattcacacacgaatagatccaactcaaagccaaatgatactatgaataaaagacttttaaattaattaacgtggaagataagcatctcaacttctaacgttcaatcttaaaactaagctactttcaacccaatttttctaggttgcttatgtactaagataatattattatatttttatatatcaatatcaccacttcaatttcatatctacattcccttattattaatttggaccaaacttattaagtcataaaaagcttaattttgaaatctaaaaagaaaagcaacccaacgcacaagtacaagtattcgtgtgtgataggaatagtgtaaaaatgagatgaaataaagtaatttaatttactaattagataaattttattagaagagaagtgttaattatataaccttatattacaactctttcttaatttttatgtttgaaaatatatgctgatttttttaattagtgtttattataaaatatatgtttaatataattacaacatcgataattgttgtaaatttttaaaaaattataaataatttacagtatcgataaataaaagttcttgatattcaagtttgttatgcgtgttcaaacttcaaatttatttttgacacaataaattatttgattttttttttaaatttacaaatataatattataactgtaacgaatatcatcacatttatgcatatatatatttttaaaaaactattactaatatatatgttttaaagaatttaaattaaaaaatataaaaatatatatgttgtaattagcactccctcctctaaatatagagaggataatgattgttatcactcatttaacttacatatatgttttataaataataatgtatatttatttttaattaaatttgactccctacttaaaattatttaaaatatatattatttggctttttttacaatgcaatgcacccctaaaaatgattgttgataaactctatctatttcgatattagaagaatattttagtttaattttttttataatcgtgtacgttataattaattaagacattttacaaaattttgaaaaatttataaaaagacagtacttaaacattttatattacattcacgtaaaataaaagagtcacgtatatttgactgtttcaaccctgttatcgacatgttaattttttttttttaaatctcacaaatttataaattgtcttaaataattacagcatgcacaaccatgaaaaaaaatttaaagtctaaaaacaattactctacaaaattt

SEQ ID NO: 206854 - DNA, 1008 bp, Cannabis indica
agtaacaattcataggtaagaagtgttccatatatagataaaatattaatacttttatctttaaccatggtgtgtgattagttatctttatgggtcctattacttactttttttctttcttttaatggctgaagaaaccatgtctgttgctttacaacccaaccagaattcaaccacttgatttcatatatattgacaataattcaagttgaaaaaaaatattttaaataaataaaataacgtttgtgttgttattgtttgaatttggcattttctaatctacactagattattattattattattattattttccaaattgatattgatatttttagaaaattataagctaacagtactaaacaatctgtgtggaaaaaaacattatttgaaatattactacaaaaattattttaataatctcaaattctgatcactatttgaatatattgtgttttttacatgtgtgtggttgaatctcaaaatattagtagatggtttccattgaattaatgacaaaaaaaaaaaagtgatattattataagagagaaatgttacatacactttattgatgtaattaattggattaaaatcttatgggcaaacatatatctataatgtatttatctacaaaattaattagctaatatattatgttttacgtattaaatagtattaaattatcataaaaataatatatagttacaataaattaatttataatttaatgatgggtcaaattataaataccaaaaattaattctataatcaatctataaataagtagtgcatatggttcctaaatttattatgaaaattcacctcaagaggaacaacaatgcaaaacaatgacaagataagaatcaatgcataaaatattatgaattgaataaaatacacaaataaataaaaacacacaatagtaataatagaagagatattacgtggtttgaacaagaataacaatatattatcttgcttactcgacgaccaaaaacaacctttaag

SEQ ID NO: 206855 - DNA, 887 bp, Cannabis indica
ccgcgaagacgaaggtaatcctgcaactcctcatagcttgaaccattactcttgagcaaatctggtgtcaaatcatccaaaagatagcaatacctgagaagaggataaagtaaaattaatgggaatatccgttcagaaactaatactttgcagcaacatcttggactagagatggatgatatgttttcatttatcaagcagaacattgcattactctaaactaagcatagacaacagaaatgcagcttactgctgaagtttggcaatgagcttctcaagatcccagctttcctttggagtatccggaccaatatttgcctattcattaacatgaccaagtttagagaaatctagtttttatttattataaaaaagttttgaagaatgtaaaatgtataaacatcatagcactgccactgcttttccaagcatttacctctatgatgtcatccattgtcaattcagcatattccatgataagagattggagatcatcagattcaagggctctccttctttcagtatataagcggtctctttggctattcaatacttcatcaaattcaaataattgctttcgaatatcaaaaaagtaattttctacttttcgctgagcttcatcgagtgatttggttagcattttggactcaattggcagatcttcaactctgaaaggctctcattaaaccctgcgagtaacagtacaatagataagttctaactatcccttagcacttttaaatttcaaaatttgtacctgaattcgatctccaccaaatacacgaaacaggttgtcttcaagactcaagaagaagcgtgaactcctggatctccttgccggccacttcgaccccgcaactggactaatacaagttaaggtaaaaact

SEQ ID NO: 206856 - DNA, 1254 bp, Cannabis indica
acatgttcttattggggaaaaaaacacttacttgttacccttgatcttgaaccaagcctccgcacactgcttatgagcagcagccaaatcctccttacaagaacatcctaactcgatgggaattccagactcatgattggtagtgtccatactaagatgacaaatcctacagtccctttctactttggccaaatgtgccttaacttcaggttcaataaccccaacaccacattccagatccaactccaccgaatgctcagaaacaggggatcccttctccacaatctcagctcttgactcactctggctcctacgttcctcttctgacctttccactccattaccagaatacccatttccgccaccaccttcatcggagctccggcaacccccttctggttccacatcaacaactacaacatgggttttgtctaaagttgccattgcttagagttagacgcacagagggaatcctcatgtaataataataatagctctgtaaagctgagatcatgaatgcccactaaaggttgaagaacctctctcacgagttctctcagccttcccttaaccacaaaacaaacaaataacgtgatttgtacaatatatataaatataaatatataatctgacgagttaaacacagtggtgtggtaggtgatctttctctcttgtgtgtctgtccttagacagcaaccagaagagagagaaggatctgatatgggaaagagaatactgtatttatatatgttgcagagcataatagtaagagagaagcttaaagcttgtatctttttcttttcctttttttttcccactctctatttgagttacataaacgcttctgtttatgtcattattctttttttgtattttgggttttatgaaattatgatgagtaagatttgatcatcattgccattttctttttattggattatttttggttttctggttttttaccactaggagtaagtaagaaaagaaggagaaaaaaaatatctgtggcaataataagaaaagaacacataataatttaaaagattaaaagagatttgagactacaagaaagaaacatagtaagcttacattaataatagtaagtccttttattattttctttctccatttagcagacagactagataaagaaatgtgccaaaagcagatttcttcttgtcttcttttactgccattagtattatattgctaatgtactgttctaaatgtgtcaatgatttgattttgagatac

SEQ ID NO: 206857 - DNA, 1244 bp, Cannabis indica
atatatttgacacgtggcacacagtaagagtcctacagcaaaagttttctcctccccaaatccaaaaaaataaaagtacatgtcacaacaatcttaccgcgtactttactgcacccgattattatagtaaacgttactcgctctttgggcgcgtaacctttcttttattagttgtacagttaatatgacacgtcagatatggcccacttcattgcccgcccgaggcctttttttttcttccttttatagttgaaaactgctttaaaaagaaaaaataaattagttgatgaaaaactaataaaatcgaccgaccttttatgtatggccaagaaattgagtttaataaaataaaaataaaaaagtaaatagaggcagggagagggcacgttttgcgaattttggattttcttctatttcttatcttagtattataaatgcccaaattaatatatatttgatttgttatatgtttttttatgacgtgggagttatggtcctattaattttcgtttttaataatataaatattttgtatttggtgaataaggtaagggcgtgtttggtgaattgaagattctcagttgaatggttgaggagtcatttaaggtcatgccaaacaatatttttgaatgaggaataagacagtagtggtagtgaggttttcctaaaataaaaaacaaataaacgaataagaaaatgggagccaatatgatattgaagctaatatgaatggaagagaaaatatatctattcataaatatgaagttttttttttggtgggaaaagaaaaacatttatttttaaagaaaaaactcttaaaatatatgtattatatatggagagaagagaaaagagacataataatacgtgttgtgcaaaataaaatattagttgaataatatgtatatgctttataacttgtgatgtggagatcagagctcataataaatttttatatttggataaaatgtggttatcatatggccttgagaaagttgatgaatattaattaattatagctacttttatctttttatatataaataataattatgtagtggattatcctaccaacaatttgtcgcttcctttttttttatgtccgccaactttaatcatataactatagttttgtatgtatagcttcttccatttaataattaatacacatataatttgagaaatctttttgagtttgcaaaaaacaattcaacaaacaaatatatattacgtctgcacaaccg

SEQ ID NO: 206858 - DNA, 636 bp, Cannabis indica
gctattgaggacatgatcaataaacgtctagctaagtttatcatatgctttcaccagatcaattttgattgcgaataggccttctttacccttcttgcgtttgaatgagtgaatgatttcctggaccaaaacattattgtcattgatgctacggcctggcaaaaacgccgcttgagtggggcatatcaatctaggaagcaccggccggattctgttagccaagatttcgattaggtacaagtaaacatgcacatataaatttataggaaattttttgtaagtaggagtatcatttttgccattacgagacttttcttgttttaagaatatagaaaatctataaagtgaaaattttataaggcggaatatagtataattatagtagacatcttcaatttttgagaaattttaaataattcaatatattaaaaataaaattcaaataattggttgcagtgtgttttttttaataattattttataagcatgcaataatgactattatttatgtcgtaaattattcaaaatatttcgaaaacgatccgaatataactatatatactgttatatgaaaaaattaatagcacttctacaacctttacggtagaggtataagtaatatacatatattatata

SEQ ID NO: 206859 - DNA, 956 bp, Cannabis indica
aagaagaagtactacaacaaaaactcacaagagggtaagcttatattgatcattggaataatgagtttttctcaggtgagttttttttatatataaatatataatttctatattcattaagcttaattatttgttatgataaaactgcacttaaatttgctttcttttttattattttatttctgggaataatttgtcttttcaatatataagctttgttagaatagtattaattaaatttatagctccattaattataaaattattatgattattactaatttacttgtttaatttattaacttcttaattacattacattacatgcatgtatatattatttgatatagaaacacactcataaattgatttttttctctctctcttgctaattagcttctcatttttatattcattagactaattctatgaacaaaaagtgtataaatatattatatagatatagttatgatatatatatatatatatatattctcttctttgtgagacattgtttaatttgcatgcaagaacaagatttagaaaaactagtaaatgataactttggttagatcaagattatatggcttaagatcaaagctatgctatatccataattttttcatattaatatattttaataactttaagtggaataaatttttgtgggaagaaataattaattagaataaagtttgcggattataacttaagtatcactactgccaaaaattaaacttaattatttatttacaatcgagagttaaataagtatttatgccacaaaatactctaaataaattaataaaaagttgatatttattaagctcaaaataattaagaaaaattaacactttacaatatcaaagttatttttattaatgacaaaaaaaaatttaataaaatagttactcacattattataaaatattatataaaatatataaaaatttgaa

SEQ ID NO: 206860 - DNA, 975 bp, Cannabis indica
ctgatgaagaggatgaaggtttttttttcatgaagaggatgtaggtttttttggggaagaatggtgtgaaaaatgggaaaatgaaaatgagaagaagggggctcgagcattttccttatatcagccaataaatccccaatgacattcaatgaggacatgccgttgggggttgactgacacaacaaatttatcaaatttgaagaatcacataaaacatactctctccaaaattctctctctttcgaccaccatagaacccagctagggttctgatttttattcatcaattccagtaatttccaacaagctttaagtgtacccaagtcaaggtaaagtccctagcaactccttctttagtttaaaggttttaattttagaattatgcttgattttgattatttagggttctgagttgtggagtaagtttggtatgtgtttctgaagtttaattatggtgaaatatgctgtcttgaattgattttggtggctgtcattaggtttgagcaagctttgagttttggaactcaagtttggctctttaacggtagattttgattcagagcttgtttagtagcttatttaatcaatacataatcacacatttccaggcttcataaagcaatgtaatcttacattcctataacacgtattcttacatcccgtgagtcactgagactctgcaaaaaagagactaacttcataagcaatataaaattcattcagtcacattataacaaagacgtatccgattacagctcatctcataaaaacatgcttaattaatttcacatcatcgtaatcacacaatcccgatacttcataataaagtacacttaccactcgttaaccacgagctacatatgtcactatcattgcccgatacagccaacaataagtaagaaacctatccgcagtttcaggagtaattattcataatggtaatgaccatttccaaacctcaccactcgttatcca

SEQ ID NO: 206861 - DNA, 582 bp, Cannabis indica
taaatatataaagatagtttgcataaaggcaatcttttgcatctccaggctataattaacaatattcttttttgcatctaaaaaattcacacgtacgtaatattttaaatcaaattaatgtgaaaaatacaaaaccattattttcacgttattagacaaccttacggaactatatatatatatacataaatattaattattttctttagtgattaagatggatcgttgctttacttgagaaaaggagaggttgatatggaaaggcatacatactacacatgaagttctacaatatattgtatttatatgtatatgtatatataaataaggacctttatatatataaatatatatatagttgagggcattacttttgcttaagggtgttttctatttttcgtacccaatttcttttatataatgttgtatattataattgtaagaatttttttttcattttttgaaaatttttgaatgttgtatggtatcaaaaataaagtttaaacgggcatgtaaattttcaaaataaatagatatcacaaaataatgaattggtttcttatttatgttactctattttta

SEQ ID NO: 206862 - DNA, 706 bp, Cannabis indica
gtttgtaagggcaccaagtcaaatcaataaatgaatttaacgacaaggacacttatatatgttagaaaagaagaagctcggtactgaaataaaagtattaaaagatggctcggggaataaacccagctcaagaaatgcagaattggatgttgcaaacacaagcaagagccatgagccacatgggaaaaggaaagatgagtccaaggaatcatccaaagacaaaaagaaacagaaaaaaaaaaatgagaagtatgtccaaatttaaattctgtatatcgagctgaatgaaacacgagaagaacaggatcgcattttgcaaaccagaacctatgaggaatggaaagaataaacaggatcataataaaaaatttccctttcgcaaggatattggtcacacgactgaagagtgttggcaactcaaatatgagatttaaaattataattggtttctaaattaggtgttatttatttttattcgtggaatcgattctatttaatttatgtcttagtgttatggggaacgttttttttttttttaattagaaccgatttctaagttatttttgttatttgtttttactcattttgttatggaactagttctgttttaagttatgtattagtatttttggaatttgatttcccacttattttatttcttctaattataattggtgtctaagtcatagtgtgttatttgtttata

SEQ ID NO: 206863 - DNA, 491 bp, Cannabis indica
aaaaaaaaaaaaaaattggaatcaagccaaaatggtagcaatgttatatgcatgcccatttatttatttatatataaaacaatgttatgcatatctggattttttttttttaaaaaaaaaaaaaaatttatattattattttagtggtgtaacttaaaaatttaatgctaaaagtggagagaaagataagaagtaaagtaagtaatagccaaatttgattagatatacagtcatatatattaaatgcctctcaattaatttaacgttacataaattaacttcattcttttacctttttaacatattaatttaacatattaatatatataacgttaggtatatatatatataatatatatagattagtagataaatatgtaacctcttttgttattaaaataaataattaccccaacttggaaactacatttccacgaatgtgaacatcaaatataaaaaaaatcatgtcactataatttactttatatttt

SEQ ID NO: 206864 - DNA, 1158 bp, Cannabis indica
aatgctaatttaccagttgtctcagctaattataaatggaagaaatggtcatatttggtccctcttgttgttgcccttgctgttatgtcagacatggccttcgtggatcgtctccacttcttctctcagcctccacctgccaatcaagtacatgtttatatttacttctctttttatcttcacatgcatatattaataattattcttgtttgtaccatcaaatagtgttatgcattaaattttgatatataagatgaatggactacttcttttattgtcaattggttttgagatggaacctcatttatcttatctctaaattttaacttggtatcagacccgaatgtaaagatagttcgttatacccacactttttcaaatgtgtggaaaatattagagttagttgctaatgtgtgaaaataaattgtgatatataagatgaatggactatttctcctattaccatttgtttttaaaataggacctcattctattatgttaattattatttttttttttgtaaactttgcctcacgtattgtgtatatatattttaactaactaaatttttctcgttcatacttataataggaattacgaccaacaatacaacagcttgtgcaacttagtaagaatgaactgaacaccatgccattttttgtcaatttttgggatcaaattcaaaataatgaagagatttcactgcgtcttgaaaatcttgttaactctaccgatgatagtaagatcgatatggtgatatattgtattgggaggatcaaagagagtgaacactcaaggttacagctaagtctggcacttttgctaaaggaaaaagtggattggattaataatgataacataaaaatatttgatccaagactgagtgatgaagagaatgaagctttgagtgaaatgggttttcaagtgttggagaataatgagggaggtaggcgaaaggcgaatgaaccaacattgttctacatgcctcattgtccagtgactatgtatctgggtctaatggaagaaaacttggaagacacattgaataacgtagtgatattagggaatagcttcgagaaatataaaactgatatgatgatagtaataatgtcgactcgttgagtggaaatttttcccgtgagttccaacttgattctt

SEQ ID NO: 206865 - DNA, 600 bp, Cannabis indica
atataagagaaatcattatgcagaagatgcatatagataaatatatataccttgttaagacaatgaagacccccatcaatagcaaaagatacaaagaagaaaaataaagcaaatatagaaatagcccatgttggggtatgttcaagggatccactattgttatcacccatatttctctctctttttctcaattgatctattaatctgagtctttgatcttattatcgttttggataatattacatatgtgtattgtatttataaatgcttgcccactaattaattttatttttcaaacacacatcactttcttctttatagttgttacttttcacatgtttgtactatagtgctacggatagaggttttatttaaattttattgcagaaagagagatttggaagctacgtattgatcaatagtacatcatcacgactaatttggtagtccaacatgcaactccgtacaaacaagagattacaaattaaataaacaataaaggaaacgtaatcaacataattgtcctactaattcttgattaattacttgatacatggctatgcatttgaagatatgataatattgctagaatattatcaa

SEQ ID NO: 206866 - DNA, 719 bp, Cannabis indica
aaaaaaaaaaacgattattgtgtatttagtcttacaatattttatacctatatctacatctaacaaaagtttatataatattgtgtattgtcataaaagttttttgaataatttaatgtaacaaggaaatataattcatatatttattaagagtgtatttaaaaataattgtataattattaggtagtgtaattattagagcactaattacacaatgtaataaaatacaatatgtatttgaataaacaatgataattatttatgaattcataatttcttgtttttttttttttgtaaaataattaacaattatacagaaaaataataatttttagtacataatatttaaaatgaaatttttttagtaattgcacactgtaatatttagactcaattctcatgggagcatgagaattagagagagtaattgaagcctctcaattatttctaattacacagttaaaatgtaattatgtagtcagacaaataaataaaactgtataattaacttcaatttatattcaattccaattcactcttgcctttccaaatgcacctactataagttttttttacttttagttcacaataaaacttgtgactaaaaggtttgtggcttaaagtattagtccacaaaaattacaatttattagttgactaaatactatttttaagtctacaatacttgttctgactaaactaaattagtaacagtttgt

SEQ ID NO: 206867 - DNA, 788 bp, Cannabis indica
atatatatatatatatcatatatatatatcaagtattattccaaaatcttgagagaatatgaatccataaattaaagaatttgaatatatacacatttatatagtgatatttttatctttttagaattaatttgatattgactttcgttattctatatatatgcattactattcatttggtctatatatatatattcatcatataaatatatattccatagttaggccaagttatctaccaagttgaaattctgaaattcgatcatataatcaaaggaatcataatattggatatccaatactatatatacatatgatttataattttatataatttatttttgtggcaaaaattttctccacggatatagctataaaatatagaatttttatatgtcacaattgtatataattccttcttttaggaaaatataattaatttatttaaatttaatggtgtcttaaaaaaagtgtatatatgtaaaaaaaaattaatgtaaacataaattaaatgtaaaaatattgaattatatataacaacatgaattagtccactcatcgtaagttaattttgagattgaaatcctataattcttgtcagtatataatatgtacataatttattcataataagatatctattaggtatcctatcaatggtgatgcaaataatctgaacttttttagttgcaacagttaaattgtgactattaaaaatgtaaagatttgtaattaaaagttcatcattactcttattatgttatcacttacatttagttaaaaatatt

SEQ ID NO: 206868 - DNA, 1465 bp, Cannabis indica
aaaaaaaaatggtgtatcaatgtatctttatcttgtttgtaatttaaaaaattgtcttaaatttttttcagtcatatatattgtagttatttaagattattttgagaaatttataaaatttaagacgctaaaaataaagtttgaagagtctgttgcacgcattaattttttttattttatatgcgtgtgaaatagatggtttgaacattaatttgtatattgtaaataattcttaatgtcaaaaaattttataggatgtcataaataactgtaacatacacaattatgaaaaaatttagactaaaaaattcttatagatattgaaacagttagaggttgcatcaatacacctattttaatggggtggactatagaagcgctctataaattactaattaactagaagatattacatcgcttataatattttttttctcttctttccaaatttataagcatattaaacatagagatttttacaaaaagactatattaatgaaaagagtaagaaaaatattgtaagtcgatatttttttttaatttacaactcaagtttttttttttaactttgtatagtttgttaagcgatagcggtaaataaaaaaataatataaaataaagaccacactaaaatttatagtagttcactctccatattacgatagttttagagctacgtcttcttagaggttttattatcacaaaaaattaagtgtcttacaagagaactcaagaaaaatgactaagtctagcttcatttcataatttttagagaaagaatctttgaacttatagagatgatggaaagtgtgcataatgagctaagggagtttctttttttttttttttttttatgggaaaggaggtctaataaaattataatcaaataataggaaatatcatagaaaattcgctgagaaatctaactttatcttgtgagtcaatgttgggacccaaaacttttgaattgcagcgagattgtgacatacacttagatccaccttgaccctagctttaattggccacttgaaagattattaggataaaaattgagagagttatgacaattttaaagagcagtgtgcactgttaaaactggctgggagatcaggctgattttttgggcatcgaggttaacgtaggtcaacctgggcaccgagaacttggtttcttaagctttaggcgtattttgagatgcttgaataatgtgatagctatccttagttcattatttgacattggctaagttctcttctggcaattttactttgatatgcaagggtgattcccaatgattcgttagtgacccgataggtgacaattgggtgatcactagtgcacatgggtgtcgtggacttgcgcgtgacatatgtacatgagatattcacttgtgaaatcatttaaatcttattttggggacaaaataagaccgatgctttgagcaaaactaatgttcaaatgacta

SEQ ID NO: 206869 - DNA, 579 bp, Cannabis indica
acaatgtgggtccgcccctgttagggccattcttaataagagattccatgtggatgatgtaaattgctcatatgtgggatggaggagaaatcagcagaacatttgttcttaaagtgtaactttgtgttccacctttggagatcatctccgtggggtatctatcctttgtctgactcacgtatctgaaagtgggattgggtcaagttcatttgggatataaagaataagggcatcaatgctgatgaagtcttcatctatgcttctgtggtagtggatatgatttggcgagtgccgaatgataatgtgcacaataactttttaaataatgtgaactattgtgttgaatatatccactatttttatgcagatctgagaggtaatctccaccctgttattacttcaatccagaaggaggattggctaaaattgaactgtgatgttaaagtgggattggaaagttcttgtatcgttgtggtcgctagaaaccactctgctgaggttggatttcttggacgcttgctgtggtgaggcgactgcgtgctgcttagcatttgagacggcaaagatcaaagggcacaa

SEQ ID NO: 206870 - DNA, 974 bp, Cannabis indica
tgaaaagaaacttaaagtgcttaggatagattatggtttagaatttatcaacactggatttggcttgttgtgttctgagtttagaattgttaggcataggactgttaagcacttgaataaagtaaggtgtttgctaattagttctggtctagggaaaatctattgggggaggctctcattactacttgctatttgataaataggagtcctagtagagtcattgatctgaaaaccccatatgagaaattgcatggcactacacctaaattgaatcacttaaaaatctttggctgcactgcatatgcacacccaaaaacttgataagttagaacctagggccattaaatgcttctttcttggatatcctaagggtgttaaaggatataggttatgtaaaattgaaaatggaaagcctaagatcattatattcagagatgtagtctttaatgagcatgatttcatgcacttgacagccaagaaaagcaaagatctgatgttgcaggcgctgatagagatgacatggctgaattggagataaattttgacagagtagaagtctcaactgaattatctcatacaccaacagtagggacagaaactaagatggaaacacaggtaactatggaagaacatgatgctgacacatctgaggtggaaactctgggaactagtcaagataatcaacctgatttgaccaactaccaattggcaagggacaggacaaggagagagataaaacccccaagcaggtatgctgaggctgatttgatagcttatgccttagctgtggtacagactaaaagtgctcccgagccaactacctataaagaagccattgctagtaaatcaaggaagaagtggcttgctgctatgggagaagagatgcaatctttgaagaagaacaaaacctggatattggttcccgggccataagacaagaaagttgtcccctgcagatggttgtttaaggagaa

SEQ ID NO: 206871 - DNA, 809 bp, Cannabis indica
gtgtacatgatcaacaagcttcccacacttgttcttgatcataggtcactttttcaagccttatatagcaagaaaccagattatgccttcctaaaaacttttggtgttgcctgcttcacttgcattagatcataccatgcacactagttttaattcgctaacttaaatgtattaatttgggctatagtgagtctcataaggttataaatatcaaacacctactagaaaaatttacatctctagaaatattattttcaatgaatttgagttccttgtaaacttggttttcttaacaattttcaatcaaaaactagttgtcattcaaagttcagcctgatttattttgccatcttttaatctttccacaggtactccttctactgctctttctttttcatccttaagcatgcctagaaaagcaccttccacaccatcacactctcaaactaattcttctaccctaactttttttggtctctcacctggtgctccatctggtctctcaaattcaggtagtgagagaggaaaggactcagttggctaaactaacacattgtcccaactatcagaacatgagattgttgacatcatggaagccatgatttctcgtgctgatcttgcttttggtttccaatctcctcaagcacctcctgctgccactggtcaacccatgactacttaagctaaagcaaacattttcaagccttgagttttcatgggataggctttggaaccgtattttagataagccttgtagtgttaagggggctctttctcatcttggctcgaataaggctatgcaagatgag

SEQ ID NO: 206872 - DNA, 550 bp, Cannabis indica
aattaaatatttatagttaaattgttcagtaaccattaatgggtaataactattgagaagtgttccatgtatagatttatgtataatctatatatgtatatatctatgtatgtaaacttagacataaggcggtgacatgatagcctaaaattgctttaaatacttttatttattttgttctttaattttctcattttttttaattctaattttaaattatctccttaattctcttatttttctatttttatacaactttatttatttagagataattagttaattattcttattattctattttatttaatttaaaaatcatgaatttgtttcagaaaaaaaaatcattaattttgtcaaaaaaaaagtaggttattaatttttttttaaaaaaaacattataactatatatgataactaatgattcaattaattaatttataacaataaattcacttacatattcaaataagtacttaaccgcaaattgtttgtattaatttttatgttacaaaaacaaaaactgatattacgaatgactaaaaaactg

SEQ ID NO: 206873 - DNA, 724 bp, Cannabis indica
gagaggcccatatgaaaactagaccatcaaacaatattagtagaaactgaaagagcatatttagcttaaacatatacaaccacatataaatatcgactctaaaaaactcatgtgaagtaaataatatatcattaagaataaaacctaaataagaatccagcatagtaaatttgttgagtttgagaaccacactctaatctatcaagagcctttgcaatttctgggtcgcaaaaaatatatcgcgaaaatacagtgtggtgtggtacggtttgaacgatttacagtatcatcattatcaaaaattatactgaaaacttaaaaatcaatctaaaaaagttttaacgataaatttttttttattacaatcttaacatcataacatatatattaatcattaaatattatattggattgtctacttaatatacacatatataatatatatatatttgttattatatggaaaaagaataaaattatattgaaaaaattaataattttgtaatatatagtgcggtgcgatttgaataattgttaagtttaaaactacaaatcgtattgcaagatttgataaaaaaatacaaactacaaccgtactgtttgaaattatattttttttttttatgcggtgtagtgcggtagtaaccgtgtgtgtgtgatgtggaaggtttgataaacacccttagtgagcatatatatatatattccatatggatgtgtaaaa

SEQ ID NO: 206874 - DNA, 1297 bp, Cannabis indica
cttgaaagaaaattcttcactctatgttaaggagctttagtaagtctatagcaagaatacttgtcaagtgtgcatatacaccaatatgagagatttttttactgtcaattattggcaactcagaggctcgaattttgacttgaaaaaaatacaaggcaaaccagttcttgaatcttgatgaaagaaggacatcaggctgaattttgacaatgtatcggttttgcttttttttttttcttcttcattgtttccttcttcctttttctacaataaaaccacattatatgagttggtttaagttactgtaaagaagaagaagaataaaaagaaagattatatgttgtttgtaacatctccatatccatagttatatggataagatgttaaattcctttgtagattttgtattcaagtcctaacaagtatttttcttattttctgggactaaaatgcaacttcagaaggaattttattaccattatcaattaaaacctatacttaacctgattgatcattttcttaattattattaatatttttcctaattaaataatttctatttcttcttacttattcagtttcaaccttggtaagggaatattgcttttgatttataaaacaattggtaaatagataagatgcaaacccggcatggcatgcattggcacctacttcatcaacttttcttttcattcattttaattagtcattataatcataatctaatctaggccggtgttattcaatgttttccactcaagaaactgtccaatatttgagctacaaatcatttattaaaaataataaaagttgatatagtaacaacgattaacactgttatatatattaacttattgttgcagctgaccaaacaatctacattttttatatgattgtatgaaataatgcatactataaagaaccttactataaattaataattatataagaaattaacaccccatgttatgggacttcgtttgcataatatatggaattgaaatagctttatataacatgcataatttagattagttgatcagtaactcaaatgcttttttaaccaaagaaccaaaatattttgtttttgtaaaacgtcctctaaataaattgttcagaattttaacgaggatatcaaattaaatgtgattacaaatttattttttcagaattaacgactctttattagttagaagtataccttgcaaaagttactaataatctataatcgaattattattatactccatttcggtaattatgtttgccaacacttttttattttttttaaagaaca

SEQ ID NO: 206875 - DNA, 575 bp, Cannabis indica
tttacaaaaaaaaaaaacattacacataagaccttaatagaaaaagaagcattacacataagaaataattcccaaataaacaagaaataaagaattgaaaaaattgcaaatttgactaactaatatatcttagttcttagaagtctttttcactaaaaagtaacctatattattcaatctaaggagattacgtttcccatttatatttttaaaataaataaacccttatatctttcaataaaataaaataaataaatcctaataaaaaaaattcttttatttacatttttacatagcaacacacgtagcaattaacagatcaacttaaattgtaacaaaaatttacataataaaacttacctagaaacttctaaccataaattttaaaaaaaaagtaaaaaaaaataatatatggaataatttcttaaaaaaaattatactatttttttttaaaaaaaaaaattatgctttgtattgctccggggttaatttctttgtagattgttatatagattttagttataatttaacttgctccgttgattactatatagattgctatgaaattgttttaa

SEQ ID NO: 206876 - DNA, 894 bp, Cannabis indica
attacatggacttccccaatctatagtttctgatagagaccggatcttcctcagcttattttggagtcatctttttaaattgcaaggaacgatcttaaaaaaaaagtactgcttaccaccctcaaacggatggacaatccgaggtgttgaatcgctgccttgagacatatttacggtgtttttcatgccagcaacaaaaacaatggtccaaatggcttgcttgggctgagtactcctacaataccccctaccattcgtcactaaagagtactcctttccgagcattatatgggcgtgaccccccacctctcctaccttaccaaaaaggtactgccatagtatcatcattcgatgagttacttgaatctcgtgatgccatcctcgacgatctccgcatgcatctccttcgagctcagcacagaatgaagctacaagctgatttaaagcgtcgaccagatgagtttgatgttggggagcaagtatatctcaagttaagaccttaccgtcagcgatctcttgcccaacgttcaaatgaaaaactttcagcaaggtactatggacctttccctatcattcagcgagttggtcttgttgcttacaagctccagcttccagaccaggctcaccttcatctcgtcttccacatctctcagcttcgtcgagccatagggtcatcaccattcgcacatactatcccccctcaattaacaactgatttggagcttaaagtgcaacccgaacctattttggacgtccgcttccctactgctgctgctactactccctctgaatcctcattaaatggcagcacctaccagcctttgaagctacatgggagccgattgccaccatccaagatcaattcccttcatttcactttgaggacaaggtgaa

SEQ ID NO: 206877 - DNA, 602 bp, Cannabis indica
aacatccctcacagtaacctttttagtagttccatgcataaaaaaaatatcctccttgaaaccaagtaacttctttgatttgaaaagatcaacatcataagatttcttacaattcaaaccagtcattaatgaaaactcttcaataccaaatctaacagccttgtttcccaatttaaaccacacctcaacaccatccctttcaatgtgaatttgacgtaaaagaacaagatgaatgagttgtatctgataattgaagttactgacatcaagaaagtgaccaaaaggagacttctgaaacaattccttatgttccgctgaaagattttcattgagatctttgatgacactataaggattgtaaagttgaggtttccctacaaacatcttcttaacatcaactttgaaataatattcccgcaagaaaaaaagaacacaaacaaaaaatataaaattagataaaaaaaaaacaaaatatttaaaaactggttacacaaaacaaaacaaacttaaaactaaacaactaataaaatatagattaaagaaaccagtttcaaataatttaaaaatagcctaataaaaaacaataaaagatacaaaagaac

SEQ ID NO: 206878 - DNA, 813 bp, Cannabis indica
atataaaatcaaaattcccttaacatattaaaagtatattattgcctagttggtttttttgttgtttaaattatatattatctattatattatatacttcattttgaaattataaaattttattatttctattattaatataatcattcatttaatttctaaaaaataaattatcattttagttatcactaactaaaaaaaagttgaaattatgaaattataacaaataaattttatgaaaaaagaaatagcgtagttgtacaaaaaatttatcaaattatcaaaacttactaaaaaaagaacttcgtaataaaaaaaaacatacttcagagttgatattgtttcgcatattgcaacaagattgatatcttgttatttttctatcgctttatagttgtcttttaattattttcatgttatttatgtgttctattgttgtttttttaattttactgaactacagtatttttacaattttacaactttaaaatagcattttcaaaaacttaatacaatattaatgtaaaaataagataaatatctttctagaaaatcccaaacttttaggtgtattattcaatttgtcataatagaaaattgctatttagaaagaaacaaaaaaaaaacacacgtttttgctgaaaacttatgtttcactccttcgaacgtagaaaaatgttaaaaatgttaatatgaagtaatctgttatgcattcacatagattagagctatccaaacacacattaaacattattgctcataatcattaaatccaaaaccaatactttacttagagcatcacaaaataagaaa

SEQ ID NO: 206879 - DNA, 883 bp, Cannabis indica
tttacattttctctcacatacccgtacctggacttagatctagaccaacacttagattcggactaggacctagccctaagacctagacctggaccccaggaccgagacacagaatcgaacccagaccctaaacttgaacccgaatagggacccgagaccgatgcccgatctcagacccagacctggacttgacaatgagactcggcccaagacttggacccacacccagacctacctagacttgaacccgaacccaatcccggcctcgcgctcgggtgcagactgagacctagacctaggacttggcctggtttgggtcttggtctcaatatgggtttggttccctgtttgacactacaaaaatttttacttttagtcacaacaaaacttgtgactagctaaaagtgaaaaaattgtgactaattataaatcatgattcttatgttgtgactaaaaagtccgtagataaaagtattagtcacaaaaattacaatttgttgtgactaaatgtatttttagtcacaatacttgttgtgactaaaactaaattagtgataacttgtaactaaatactatgttttagtcacaagtaacattttgttgtgactaaaagtcacatttagtcacaaaaaaagtatatcgtgactaaaaagttgtcactaaaagtagcagttttttgtagtgtgaatttagttcaagtcttgaagcctggtccaagtcccaggtcacggtctaggttcgggccccgagactggatttgggtcctgggtcacgatttaggttcagtgtcaagtttagttaaggtctagtccgaggtggggctgggttcatgtcgtagtatggtgtagaatattgaatttttttcttttgggaaaaaaaaatc

SEQ ID NO: 206880 - DNA, 955 bp, Cannabis indica
aattacaataatttattactttttatacgatattaatattaatattaattataaatatatttaaatatatgagtcacatggatcagagagagagagatttttgcattagaaaacttggcaaaattacattaattagtactagttttaatgcttgtacaaggatagctacaacacaatgtacaaggcccttcgggccaagaaaaaagttagaagacattttcttttccccttttcttgtccccttcacccccactctatctattcttaattatcctgaacaagaaattacatatagaccgatatcgattacacccttaaaacatttttggaaaagggtgaacaagatagatacaataatatattctacatattatatatatatacaattttacagcgtggcctgcctcctaattgactgtcgtttccattccaccaatttttgaaggaagttcataacctggtaaataaaaagagaaacatgaaaaaggaaaatcaattaatatttaaaatatatggcctggaatctatgcttaataatgccaataaaaaataaagagtttgtatatgggcacttaatttacctcagtcggctcttgcaaagaataagaagcattggtgtcctttggaattttggacacaagaatgccaaatccttgtcctctttctcttagagtctaagtatacacagtttgcaaaaaacattcattagtctttatttaaacaaatatgaaagaagttatatttatatttattataaaacataggataccttgaatgcatcttcatctgttcgatcatccccaatataaacaggaaaaacatcggcacaatttgcgaatcctatttaaaagatttcagaatattagttagtgtgatgttaaagatagataattataagtactattcattattttgtctattgtcactactttatagtaaaaaaaataaaataaat

SEQ ID NO: 206881 - DNA, 1294 bp, Cannabis indica
atttagttttgaaagtggaccactaattaattgacatttgttaatttagtgagatttaacataacttaatagaattaaaattaacaattgtaacaaaaacatagcgttaaaaaattgatatataagtatataaaatatttatgttgcaagtattatttattattacttatgatagtggttctgcaaatatttgaaataatttttaatttcaattattttatatgatataatttagttatttaagatttttttttaatattttaatttaaaattttgaaataatttaccatttacaatatatgattcaaactttgattaattttttatatgtatattttttttaaaattttgcatgatgtcttgaatgtatatttaattgataattttgtgttcaggcttatacggtggaactagaagttgaacttaatcatctcaaagaggagaatgaaagattgaagcaaaacttagtatgtacaattaattcaaataaatattattattaaaattatctaaatattaactagtactaaatactttcatattaatgttgtattttataaaggttattgaataaaatttttgttttattaaataataaattgaatcttgtattttcttaaataaaaattaatataaaagtgttataacaaaatttattattattttttttttatatttattcgtgttaaaaattattttaatttagtcttatttatgtctgagcaggctgaatctgatcttaagagaaaaagagaggtaattacaaatttataatatcctataatatttatattcgtatgatttaaaacatatattttttgtaaattttataaatttgttattattgtgtatgtatcattaattaattttatgatttttattgttgatatatataggtactgatgaaaagaaaacaatcaataaaatcatcacaaaaattgattgaaaaattgagaaccataaggagggcagtgagtctagcttggtgatgataaagaaggaagatgaatagttttgaagaagttttacatatataattaaatttataagtaataataattaaatattttgtcatgtggtaattaaaataataataataattataactgttgtgtgttttgtaatgttttaaattaatgtagctaccttacctcttatctttgtaataatatgtaaattataggtagtaaaatataaatcttaattttagttacaataaaatttgtgactaaaattaaaaaaaattgtgattaaaatatctgtgttaaaatgtattaattataaaaattacaat

SEQ ID NO: 206882 - DNA, 1103 bp, Cannabis indica
tactaatttttgatgttgcttgtgagagaatgagccccatacacaacataaatatttgatttttcaataaatacatgagtattgtaagttatttttaaattagtaaaaaaataagtcagtgtgctaaggcagacagtagagtttgaattggagatggacaaaaaatattatattattattgatgtattttaatattaaattttatatattttaatttaataaataaaataatgtataatactcaattctttattatttatttatttatttttttttgaaatctattattattattatgattattgtgtgtagttaaaatatgtgatcaaatgagcgagttctttgtttcgtgttcacacctttgaaaagagtgtcagagtgttagatttcataatttaatgcacaaagcacccttgggctccaaaaataaaagtcctgaagaagaagaattcaatcaccatgaaaagtaaaagttttgtactaaaggttgccagtgaagagaagaaaacttttttttttattgtaatggagccttggattcttgcctaacaaggtaaaactattaacgcaagcaaaggtcttattttttttgatgaattggccatgaactgtggacttgatgctttgtgggctcgatcaaaatgctttttctcaatcaaaaggtgttttctttaaactttctttagcatctttctcctattttctgtgatgggtttttgtttttcagcgtaaagtttcaaaattgttactgttttttttttaattcccctgcactatgatctggtttgtattgtattgacttgaaattgaactgaattttcatctggggtttactgttttttgccctggaacctctcttttcatcatatcatgtgaaaattcaccgtttggagtattgtgattggtgaattggtgggagttttggagttcaccaatcagaatagttggtgggatttccagtttccaccacaagtgaaatagaactcaagttgtatgacataatgattgaaagagaaaaacacagttgttttggaactttgaattcagtggttaattctttggacacagctggatagcatagcagatttctctctctctctctc

SEQ ID NO: 206883 - DNA, 708 bp, Cannabis indica
gacaattagacttgtattccccaatctgaggcccaaatactccattggtaaattagtgaaatggttgagcaaagaaaagtaaaaaatgcagggtaatactaacactaacaagtgaagaaaaaaaaactaaccaaaactcaattttaatcatcagtcagcctcctatttgttgttatgacttagtgactcttatcaaaagaatgattctatcactggtctcctagtggctagtaaaatgtttgatgtgtactatacaaaatcaacctcatatgtttcacaatctataattttaaaaaaataattataataatggaaaagagaccaataattttaccaaccatagtactggaggcacattatacaactctaaaagaaggggaaaaaaatcagccaaatttcccaatttccatcttcttcctcattgctttttgaccatgatatacaaaggaatctattattccagcaatagtgaagatacctaaacatattcaagagaagcatcaatatagttagttgcatcataggtaacatacagaaagaatatcaaagaattgctgtgaaaaataacaacgccagaagttatggataagtagcatgcaaagttttcagacatttcaaataaaccagtaatatatatacatatatttatatatatatatatatatatatatagagagagagagagagagagagagagagagagtacgt

SEQ ID NO: 206884 - DNA, 1186 bp, Cannabis indica
agaaaactacatccatttcattcatgtagtaactattgcagtactaatacaataatggcagctgcaaggcatatcctagtccgagaataatattagcagtagttctaacaaaatagtttcaatatgtaatgtaatttatttctatattacacacaaataataacaatgtgtccaataagggtgaatgtatgtagattgaagcgagattgtcacacttagatcattagctacaagaatctcagttatgggatttttcttactttgtattagtaaatgaacaagcaactatgagtcattaatgtatgtccagtcattgaagaatcttcttccaaagaaagcaataatacaaattttgggtttatactacaaatctttgaaagaaagaacattaaaaaccataacaaaatcaggttagattatctaaaaggaaaatctcaagttattgttggatcaaaggtgatgaaaatctaatttacatacaaaagttaatttgtttacttgccagaaatcggcattcttaccaatatctttatgaatttagtaagattataattataacaacatagatgacaattagaaaataaggagctactttttcagctgaggcattcttttccttattaggaggcaagaacgacaagcaatgaagtagccccgaaagaataatcttaagctttcccttttcttgaaaataaaacttgttcatctgcaacatagccccgtagttgtgaaaaatctctcctgaaccaaacaataaaaagtcttaaaagaactggcaaatggaaaataggctagttggtgagataaataatggagttagctgatgatctaacaaaaagaacatgatcccttgcctaataatataatgaatgcaattgaatcaaagaaacataaaaagacaagtcaacaaacatttggggtacgggaatattgtccgctaagaaccgggtaatcttctgacagtatatcaatgtttgaaataagagttttgaggcggaaaaaaatcgaacaaggcatagccttgatatgcaggaaggaggtgtataccttacacgatggtgaagcattatgagaatgtgcagtccagatgtagctcgaataataatggattacatattaacgggcaacgatgaacagcttcaacagataaaaagatctgatataagacaaccttgttgttggaagc

SEQ ID NO: 206885 - DNA, 1161 bp, Cannabis indica
aaattgtggagagaataaaactagtactttcaccatcaccatcgatcaataacagaactagcataggggttatatatgggagctgtagccccactagaaaaaaaaatcagataaaaattaaatatttttattaatttaataattatatactaaatttataaaatagtccccacaaataattttttataacaattaaaccctttaaaattaaataaacttattagaaataatagctttttttttaagcacaaatatactttataataattaataagcctaaatttctaggtcctgccatcgatcttttgataaaattagtctcatacttaattttcagttctacttttgtatatattatttggtagaggtgacttaatttagagtacaactttatatttctttacttgtaattactcaacacaacatcgatgtgtgactttacaatccgttagcacacaatttttatattatttattaaattaaaatatgtggaatttgatattagaatgcaacaataacgatttactacctcttgtgttcttgataatttaaggtaccggcatttctctaaagtatggtggcgttgggttggaggtattgaaataaaatggaatagaaaagaaaaacaaatcatttcattcatttctttggttgcattttaaagtattggaatatgattctattggaaaagtatttttaccattttagtggaatgaatattctattttgaagtaaaaagaaaggtcattcactacaaaaaagcataatttagtaacaataaaatttgtgataaaaaataaaaaagtagtattactaattataaatcatcattcttatgttgtgactaaaaagtccctgacaaaatatatttttcacaaaaatcacaatttattatgactaaaagtaacaaattaatgacaacttgtatctaaatactatgttttaatcacaagtaatcttttatcacatcacaaaaaatttatgttgtgactaaaaggttgtcaacttgtcactaaaggtagttatttttgttgtgaatgcaagataaaaaattaaataattttttatcaatcttttttgtacatttttaaatttgattccatttctattgtcatatgttttcattcttccccaccaaacaccactaaggtggcgtttggt

SEQ ID NO: 206886 - DNA, 1062 bp, Cannabis indica
ttatggtgatggaggagctcatgatgtgtttgagtattggaagagctatttccttagtattatttctttaatttattatagagattagtgcgtgccaagcatgacttatcatattatatttttattaaaataattatatatcgagacagatgtaatttaatgtaataattattatagaatactattaattatttataatgtatcacttagagtatttctaatagaaattgctcaataatttatttttgtcacatatataatgtggtcatttatttttaatataattttattaccattatttacatttgacaacacgtgacattactttattttttttctttgccaaaaaaattacttcatgatattattttatagtatttaataaaattcaatcatttaaatggtatgtaagattatggtagataatttttagagttgtcgattattaaagtgatttttgtatgaaaaattattaaatttatgtaaatgagagaaaaaataaaaaaaataatattttatgataatatgtgtacttttgataactataaatattgtctccattagagatgttcccagttcccaccactgataattgacaccttatatcagtgatctttattaattatatgctcacaacaatgaagattctattgtgttagtaataacatctactagagaattggtcgttcaaattcaagagaagttgtaaagtatggtttacataccaatattaagagtaatgacatatatggggatggtggtgctattctgtattcgttttataaaaggttgtcttttgtaagagtttaattatttaattattttaagtcttgtctatattatcattaggccggctctgtgctaaaacgggttaggcgcgagcttagcgcccacccaacttaagggcttaaaaacaaaaattattatttcaaaaatacatatatatttttttagtaatttttgaaaataacacgtacacattttcttttaaaatggttcaatattttggtaatacttaaaacttaattaatcttaggacttaattaccatagtttataggag

SEQ ID NO: 206887 - DNA, 637 bp, Cannabis indica
tcacattggggacaatgtgaatcattagtttgggggaggaacttaaaattgtttaatttcttttagttagttagttatttgtttttgttgtttattttagtttgtaagccattatttttgcctatattatattactttgcctgtgaaaaaaaaattactaataaccgtgagcttgatttaactattttggagtttaatttaaaaagttctgtaggaaatttttaaatgtttcacaattgttatatattttagattttattttatatgcttgactaggattggtagtgtgatagtttgaatttgatagaacttgcattgtttggcatttaaggcaaaattcttgatgacttatactttgaaaaatgatttaagcaatttttttggaacgtttgtgcctctcaaactaacatatttgcgattatccctagtttaccccttttgagtctcaaactgatttttttaatgcactatttttgaactaaaaaataaaaggaaatttgcggcataaatacttattttattcattttgttgctaataagtacccaatttttaaaaattgcgccacaaatactcaaaacactattttaaacatttgttgttagtacccactaatagaagttagtgtagtaaacacgt

SEQ ID NO: 206888 - DNA, 1692 bp, Cannabis indica
gtcagtagtgtattaaagtaagaaaactttaatatgaaactactaaatgcggtttactatacattatactatagtgtgtgtgattttgattcggatcacatgtgtggatactgttatacctgaaatttggctctgtaccagaaactgacacgtgtcttacaagaagaatatgaatcaacttaaggaatataataatggtgttgcatcattaaatgaaatttaaataactcgttccaattaaatacaagtttgatagaaatattcaaactcgttgactgtttagtctcatgcgagataagaataaaaactattaaacaagaattggcgagacatgtgtttgcctcaggatagacaaagataaaatgtacaagacgagaaatcctaaggcctcgtgaatcattgactctctcgtgaaaacaaagtaaaatttatgacactcaaccgcctcgtattttacacaataaagaagtcatctcgcaacatcaacacaaataaaggagtatagtgagatgaattacttcaacacttaaatgtttttcttctcaagatggataagaaggatcactcatatttgttgagatacaaccttccaagtcagcataaccgtctaaaaataaaaatacaagaagcggttgggtagttattagatattattctatgtgtaaataaatgaaacgtggggaatgtccacgtttcatcagtagtggtacgagatgattaccgttcgatcaaaagaaaattgatcaaacagatggtaactgtacgagaaaagaacagtcagagtattaaatgaagaaatgatttacctcaaagttttgatccaccaaaatcgaagaatgcaaattttaaaagggaaaaatacaataataccctcaaagacatttaaaaagtcatttaaaaaaaacactttttaggaggcaattgttataccctaatttcagctaataaccagaagctgacacatgcacaagagaaggaatatgaatcagcttaagcattgcatcatgaaatgcatattaaataactcgcctcaagagttacggttgatagaaatattcaaactcgctgccacttagacaaatgcgagataagaataataactattaacgagtaagattggggagataacaagtccatctcgaaataaatataatacataatgaaaattattcaagacgagtacacaaagagcttgcaactcattgacctacatactcgaaaataagagcttgcaaattattgacccacatactcttgagtaaagagtttgtagctaattgacccacatacttgtacgaagaaagaataactacattcatccatctcgctctttatacgttaaagtaaccacctcgttgataccttccaaaatggtaaaagagaactgggagaagaattgtatctctatacttagcatttttcctacaaagacgataaagaaggacaactcatacttagcaagaaacaaccggtatagttagcataacaagaataataacaaaagagtggttaggcagttatttaatagtatcccatgtgcataaaaatgaaacgtggagaatattcacgtttcataaacagttacgaattattagatcccaagagaataactgtcaccctgtgaatctataaataggggcagaacccaagaaaaaagggacggagaatctagagagaaaaaaggccaaatat

SEQ ID NO: 206889 - DNA, 973 bp, Cannabis indica
tttgtgtccagatttttgagtcaagaggttcaatagacaaaatattttaaatatggtcaacattatttagttaccaattcaatttgatttagttgcccaaattacattttctcattaattgtcaaaatattctgacaatcaattgtggcagaaactttgatggaagatctcacctatataaatatagggtaccggtctccgaactcactactcattatgtgaaacactagtaaatccatctaaagagagcagagagagcttgaaaactcgattatccacactaatcagttttttttttcttttgttgatccaaaacttgtgtggaagtgaagctcaaaaaatcaatggttggaggtattttgatcctttagttacatcatgtatatattcgattaattccgtattttatatataatatcatatgtttcatataattcatataaagttttaacagttttagtactcaatttcgtgttaaaaaattaaaatactagatcagctgtcactaggtgattcgcctttttggtttgtttaactgatatctcctctgaaaaaaaacaacaataacaaacaacaactttggttgccttttattatttaattattttaaaatgaaaccgtaaatttttgtaagcaagtttgttaattgtatttataattgtaaatttatgacatttttagttgtggtgttgttgtttgtttctttcttttttttttttgttacaaaagttgttgtgtcttagtatcaaacatcattaacattaagacagaccaacattattgcatatgcatatataaatataaattatcaaaatatatatattttcgataaagtgtgactaattacctttctcgacattatttttgatcggtggaatgtgcattttgaacaacccattatcattcgttcgagtggtcacatcttaggtcaattttgatacaaacatagaaatatggtgctataatatggtat

SEQ ID NO: 206890 - DNA, 603 bp, Cannabis indica
tttagccaaggaccttttagtcacaacctaggaataataatttatatttagtcacaattttttcacttttagtcacaagtattgttgtgactaaaagtaagattttttgtagtggtaatcaacaagttaaaattgtaaacatatatgtttatttgtaaatattcataaaattgtatagaaagatgtaattatgcttttattgcacatttttttgtaatattatacatttacttgtatataaatgaaaattaccctatgttttaatttgaacatttttgcatgaaatttatagacacacctgtcaaataattaactttcacacaattatttttttttttgaagaaaactttcacacaatattaatttctaatccaacaagttttgttttatttataattaataagataggactatgcatggaagaacattgggaatggccgatattaaaaagcaagtgtttttggttcaagggagcaaggatctttaagccattttaagctaaagtaatattttcaaaggcattttgggagacaaaatcagagaagctatcacttagaatatgttatataatatattttatgtatacatataatcacatagtat

SEQ ID NO: 206891 - DNA, 965 bp, Cannabis indica
gatttgtgtaatgcttaggacgagtaaagaagaaaggctgtccttgtctgcagtgcattaattattattaattaagtatatagctttatataatttaatataacaattttttaaaaaatatcaatgaaatggtaaagtgacacatctgctaagcaatagataccactagttctcaatatcaatattcaattatttacatcatttttccttcacgcgttttctctttgttcagtcagtgaaccatgtttgttagctttcttatttgtaggggtaatttgttttgttttggagtattgttacgaagcatttatagtatctcgtactataattaattaatgagttttgtatgatgctctaagatgacccactcattaatgagacataaattcccaactaactacctaaaattattttaaagaattgtattttccaacaccacatgagagctaaagaaagcttaaattgagtgttctgtttttctttttctttttgttcacgtatgttacttccttttccactgaaattgggggtctaatttcatattgtcatttaatattatttagtattccactcaaataaaaattaatattatttagtactatgtttttatatatatatatatcatattagtgtatatgtaacatgtatttgagtatatcgtaatatattagcaaaatataatatatttgaatatgtatctggttaatatgtggagatatataatattatttaacatgtatatgagttttataaatattggattcttcctcaatgtattgtgtaatgtttgggaaaagtcaaaaagaaaggttgtatagttgtgtgcggtgcataaattatttacatatttttccttcacgatttttctctttgttcagtcactgtccaatttccaaatgtttgttagctttttggtctgtaagggtaatttgttttggagaccttgtattttttgtaaaaaaaac

SEQ ID NO: 206892 - DNA, 637 bp, Cannabis indica
ttctaattattttctattttaaatttaaactattcatttttctattgattattcatatttcaattactaaatatgttattgttattattattatttggtatacaattaagtattaactaacattgttcacatgtctaaattttattttaaattaaaatattatattacttgtttatagaatcaattttcttattcttcaagatattattagcaattttataaaatcaagttgcccatttttttcttttgactgataagaacttctttcaatataagaaataaaataatatagtttcctaccccatctcctctaatgaaataatatagtatcatttggataaattaatactagattaatttataacattgatttttattcaaatttaagaaaaataatgtaaattaatacttaattgattaatagcatagataaatttttacttttatactcgatcaaacgaatgtcatgtatcttagggttattttcaccatgtatttgctgatttctacacgcttttattatttttgaaaatgtaattttgataattttttctaaaatgaaagtctaaacacttcttgacgttgatacgttttctaattatcttttttttttctatataaataaataataataata

SEQ ID NO: 206893 - DNA, 1015 bp, Cannabis indica
attttatataatttaatttttacttttatttttatattttttaaaatatacttatttttatagatgatctctctattatatcctttaagttaatgtaaattatgtattagacttaagtggaaggtaaagatatattggacaatttcctcacaaaggtgtgtatattgaaatataatttgagggtgttttcgataaatggttataaaaacaagtattcttaaacttattccaataaaaattggaggaaattacattgtatacccactttactttacttgttttaatttttactttcattttcatatttttttagatatacccacttttatagattatgtctctattagaccccttagattatgtaaattatatgctaaacttaagtagagagtgagggtatattaggtattccacttaaaaaaaagtggatatattttaataaaaaaaataatataagggtatttttgattaatgaatacagaaaaaggtatttttcaacttatctctaaaaattgggtggaggagaaatgaaaaattcaggctgaagggattccctcaacaagctctatctccgttttgggtgcttatacttggcttaggcccaaattaaattggaatgggcctgggcccatattaatgtggaaagttgtttagtttggtgtttactttctaaacactccaaagcaacaactctgactttgacaagtcttctttcttcttatatatcaaacaaacaaaatacacgtcataaacataaacacatatttgtatttggtcaaacaaaacgaaatataaaattcaaccagacttaaccttaaattaatttatgaattttcaatatcagtaattcagtatcataaatccaaattcttttctatcttacacaccattgttttaggtaacaattttcttaatttttttttttaaaaaaaatacttttatgagttattctgttatggtttggagtatatatgcaaattatgccattatagaatattaagtagttattatttat

SEQ ID NO: 206894 - DNA, 1645 bp, Cannabis indica
ccatcgatcacatcaatcaagaacacaaaataattgacgctcacacaaaccatcctcgatcaaaagccaaatttatgtattttttcttgagaaaacatttcaagaaacgagatcatcagtactgtacttctccaatgcacacaatcgatctctcagtatgtagtttataacttggaagtattttactggagatcttctaatatgtgattgcgaaaatcaatccccgcgaattacttgcatgcaaagccaaagttgtatatatttatatataaatttgaagaataaaattgaatgtaataataaaaaaccctgtagttgtatttgtagaagatgatcgaggccgatgaagagacccaaggatcttcaatcaaagcctctgaaatcaaaaccaagaggatcgccgtagtcccaaatactcggtggacattccacgtcattcatgagtggccacatcataggtgaaacgggtcccaccgccccaccgatcggatccatacccggggctaccatcgcctgagtgcatagactcaagctcgaatccaccgctccaaccagtgtattgatatcctcgtaagacgcgcaattaatcggagccgtcggattacgagaatcaagatgctggtactgttgctgatgatgatgatgataattatccctattacaattagggtttgtgtacgaatttagtacggctgtagtggggtcaccaccacaaaatccacccacgctaagatcattcaccgggtactgatattgtacttgtaacggattattattattattgttattattattagtacctataagtacggacgcatgattattattattattattagtagtagtagtagtagtagtagaaggaggagggataccgtacggtgcaaaacccgtagacggtggtgggttcataaacggcaccgtttggagctgagcggcggctgaggtgtaactcaagccgaagccggaagggcgagggagcaaaggacgaagcgtctgagtagaagaagaagaagttgacgaagaggttgaagaagaagaagatcctttattcgaagacgacgattgagaagatgagccagagggctggagattaagctgtgcgcgtgagccgtaaagaatgatagcagctctgtcgtaggcacgtgcggcatcttcggcggtagcgaacgtgcctagccatttcctggttcgtttccttggctcacggatctcggctacccattttccccagcttcgttgcctcactcctctgtaacggaatttattattgtctgggccacctttgcctttgcttttggtgggttcttttttggcagtagtatcgccggtgggcacagcttttgcaggagaagtagtagtagtggtgtggagatggggaccggattgggatgagggtgaggaagaagaggagtccataagggttaagattggggtgaattttaaaggtgagagaagtagtaaggcagtgtgtgtgtgggtgtgggaactgggaaaggattgagtgagaccgcgtgggcgcttcgttcagtgctgtttgattagtcgaaatacagcaactctagaggttgattttgaataacattgctgttaatggtgcaaatgggcggtgcttctctgataatatttgttttatttttttatt

SEQ ID NO: 206895 - DNA, 1214 bp, Cannabis indica
actattatctcgaaataagactattgttgtagaaataactcaaaatattgaaaatgttgtcacttcaattttttcatactggttttctatgctcatatataacattatcctattcttaatataatatatgaaactgaagtggattatatatataaatatatatatatatctaatattaaatgtgacaatataacagaaaatatttgtttaatattattttacattaaagttaacggttaaaactatcacaattaaattaattaattaattattatatttttttgaaaaaaattaactttaaatatttaaatttaatttaaaattatcaacaaaattagataattattttttttttaaaaaaataagtcttaatttaaatttaaatttcaccttaattcaataattaatcataatttataacaaaatttattagctagttatattatttaaaatatctaaatttatttatttattttattgtttaataaattagttatatatatttttttataaataaatttaaaactaaattatatattatatatttacaaaatataattaaattgtattaaatttaattttattattatttaaattaataattaagtaattgcaactctaaacaaacatacattacattgctactgatacctagcatatatgtatttatataaaacacatgcattattcttgatatacatgcagatacatgtttggaggaggagcaggaactatgaatcttgatgaactccaaattcttgaaaagaatctggaattgtggatttatcatattcgttcggcaaaggtaattaatatatatatatatatatatatttatatatataaaccaataaaatgagattacttataattaatttaattttctgatctcctactcttttaatggctgatagacatttatatttatattagatggacatcatgtctcaagagatccaattgttaaaaaataaggttagtgttcaaaatactttgtattttttttaattatataatgtttagattactgtttaaaatttgttaaactattgtttatcttatatatactttgtaggatgaaattatattgtatattactgcatccctttaaaaatatatatcatattatctgaacttattaagtttttagttttcacagagtttttttattatttgataacacagataataatagtatggctttttttttttag

SEQ ID NO: 206896 - DNA, 793 bp, Cannabis indica
ctagaaaaataaaaattattgttaaaaaagttcaaaatgactacgaaatacaaactatggttttgaaccaaactaatctgtttttgagtagattggtttagtttggtttgatcatttaattggtttggtttggttttaaatttttaggaaatcataatgctaatttagtttgaaaaaattaaaaattcggaccaaactaatgtatgacacccctaaatcccacgaagccagatgcatattactggtattatcctttccaccccaaagaaagttcctacaaatcccgtcaatctctttacatatcttttgtggaagcataaatatattctttcaatagcttctaatgccaattaagacagagttgattaagagagttcaatctccaaatgaaaggtgtcaacttgcccaagtatgtagtttagcttggagtttttcacaattggtctaaggttcacctccaaatatttgatagggaaggaacttttttgaaatgacagcagctcaagcatggtgtgttttgagctactctgcatccccgcaaagtcaactatagagaaccaaaatagttctatctaaaaaggcatagggtagaggttttggcttcgacaacaatacatatgaaaaagctttttttgtctatttctcttgtgttgttaaaaccataaacaatgattatatttcagaacttgattcgggaaggtaaatatccttctatatttattacattacatatatatatttataaatcatatactcatttaagttgttttatatgattttgtatgtttttttt

SEQ ID NO: 206897 - DNA, 954 bp, Cannabis indica
  modified_base (19)..(19): a, c, t, g, unknown or other
catttgttcatcttggatncatgatgagtgggaagctttgtataattccttcgattgcgattgcgatgaggaagatgagataattgaagcggatcttgtattaggggttgccaaaagtggttcagatagtgtagcaaaaaccttggagaaagatgattgcaaccaaggtgttcaattgtgagaataatatgattgatgcgatcaatggtttctggaagatcaagggacaattaaaattgagaatgttggaaaccattactttcttttttttttttttttttagtattttggtcaatggacgtaattaaagtctttggtggtggtccgtggcttataaaaaacaattgctggctttggaagttccaatgagtatcatcgactacacgaaactcagtttcgatttgagttaaattatggtttcagtttcatctgctacgcatatgttgtatgacgaaagatatgggtagagaactaggcagtttaatcgagccagtaactgagatcgataccaattcttcgagtgattgtttagggaagtttctacgtagcatcgacatcaccaaaccattaccaaagcttttgaaagtgggatttatcaagggtgacccaaaatcgcaaatctcgaaaaaatataaaagtttcctagaactatgttattattgtaaaattattagtgagtgtgtcttcttcctcctattgttttacttttggaaatgagaagcagatagtgaaaggaatgaaatcaatttttattgattcgaggagttcagtataatatgagctttatatacgattcagacaaccaaaactaacacaacaaactctaactaacttcctaactaactaacagtatgcactacacctctttgttggaagtatgaactgttttaataactccctgttggacctattttctcaccaagtgacaataaatttttatgtgcttggtcctct

SEQ ID NO: 206898 - DNA, 576 bp, Cannabis indica
ttacgttgtggagtgtaattttctcaaatattatccatgcttatatccatactagtgtgggtagcacataaggtatgtgctgcaattttttattttttaattatttattatattttttatatactaattaagaaaaagtttaattgaaaacatattaaatattttgacaaactgctaagttataaatgatacaacgccagcacaaaatatgcataatacaacttaattgacccaaaaaaaaatatttatattctaaatcatatcatttttagtatattttccttcttaaaaaatgtagtaaaacaaaattttaatatcaataataataaatttgcaaatttggtgaaataaattaatataacaataataagagtagatatactgtaataatatttgtatttgatataaaatgatattattgtatattattattattatttggcacattgatgaattttaccaaataaaatgtgatatttttttacaatattacttggcccaattacaaaataatgaaacaaaactgccactaaaaaacaagatatataaacttagaatacatagaaatgtgaattc

SEQ ID NO: 206899 - DNA, 698 bp, Cannabis indica
agttttaagcgtgtgaaagtgggagtaacataagagaacaaatgaaggtgtgtgaaagttcacttgaacacaatactaccggtcatatcaattaaggacttggagattcaatccataggaataccgactagcccgataaggctttgtagggtcttcactaaggcactattcaactcgaaagatacattattttatgcaccaacattgtttatttaaagatgagaaaggcataagtatttaaccaagtggaggattgttagaattggttaaatacttaaggttaatacatgaagatttgtaaacatcaatcaatgagatatgattaggttaacctaatagttcaagttaaaagccaaaacacattaagaagtttacatttaaacttgaacttgtaggatataatgtaacatgttattgggtcttaaaatttgttttgagtaaattaagtcacccaaaaagttctgagtcaatcagaagtgtcaaatgcatatattagagaaaattgtacagaaacaggcaaaatgtcgcctagcattgggtgacatgtcgcctacaacatttttcgagcaacaaataaaaaatactgtcaaagtctcgggagacatattggctggaggcaacatgtcagctagagcatgacagaagtttgtattttgtaatttatttcttgagcaggtgacatgtcgcccaatgattgg

SEQ ID NO: 206900 - DNA, 1314 bp, Cannabis indica
ttttttttgttctctggaaataagccaaagtttcgtaaaacatttgagccatatgatattggtattcttccaaaaaagaaatgtttatgctatttttttaaaatgatttgttgatgtggtataacagtagaagttgaccaaatcatatgcatatattttgtgtttgacttttgaataacgtgacattgtaaaaagttatattgagaaaaagaattacattaaatgtgtttcttttaatacaagtttggtacatatatgattttcaacttctttcttacttgtctttttttttttttattatgttttttttttttcaaaaagaaaagagaaatttgaataatattcgtgcatttgggtaaaattggtacacttaagtatatcaaaaatcaaaattagttagatagatcattttttttactaaactaaaaaatatccttctcataactcacccctctctctctcttcctcaattctctctgtccttcttcttttcatgcacacgaaaccctaacaacccatggctgccaaccattgtgcctccaactaaagaccaccaacccaatgacgactaccaacctaagacatagaatctccgaaccagcaccatgaatgtatgtttttcattttatttaattgtattcggtgtgatttagggttgaaatgtattgttttatttataggtttattgatttaggaataaattgtatgattaatgtttgctatttgtgagttaatgttagatttagggtcaaaacggtcagatctgagttttggataaaaaactagtttttttgccaggcccaatggtagtctgatggtggtccgatgtcttcctgctgttaaaatgagtaaatgttgaagatgaaggtctaatggtggtccaatagtggttcaatggtgacctgatgctacctataaatgtaggatatggttcaatagtagtcagatagtggtctgatgccttcccgacgagcttagtgaatggagcttaacatctataaatgtataatatggtccgatggtagcctgatgctactattttttttatatacaaagataaaaaaaatggggaacatcaggctactatcggaccactatgaccactattggactctcagtatagatgaaaatggagagtatggatggcgaaattagaagagaagaaaaaggaggagggtattatgggtattaaaataaaccgtgcctattttttttttattttagtaagcttatgtttaaataatttaatatacacttaatgtatgcatataaattcaaatttttcaaaaacaaatattaatactagtattaggt

SEQ ID NO: 206901 - DNA, 1216 bp, Cannabis indica
ttttgttatccaatgtttgactaatgcctagcacaaggcttgattggtgaggaatattttatataagctatgattagtgttgtaaatacagattaaacttttttatacggtacgagttcagaaagtgcgagtataattagatacgaaaaataatataaatttgagcacgatacaacacgatattaataattagcacaatacaatacgaaaaatatatcattaaatacgatacgacacgagaagcagaaaaagtacaaataaactagaccgaaaagcacgacacgtgacaaagctaaaaaacacaagacgacatattaaaaaaccatataatttattattaataataataaaatatgaattttatcaattaaaactaaattaaaataataatacaacttaaaaataatattgaatattataattttataattaaaactattaaaatataaaaaaaaaaattatgtcaatttatttatagggtgtgatataaaaatttaagtatttataaataaatatttaaattctaatgatcttaataatttttttatatgattatctgtaaaatattataaaaattatataaatataactaaatttttgaaatatattaatattagtaattgtaaaaaaatgaaattttttttacttttacatttcaaagcgaattttttttttatattttttacggaaatacacatagcaatcaacggagcaacttaaattgcaaccaaaattcacataacaactcacatagaaactacttgagcaacacaaactgtaatttttttaaaacaaaaaagttaaaattagtatatagggtaatttacctaaaaaataagaaaaagtaaatcacaaatttaaactcagatatgataagagactgacctatttaagaaatacggaccgacaagaacaaagcatgacacgaatccgagcacaacacaaaaaataccaagcctacagatcgtgttgggcctaccctttaagaatattggcacgactcatatttttttgtggcacggcacgacacgacctgttttttaaaaagcactattaaatatgggtcgagccaacacaacacacacgaacttacaatactattttataaatagtgatattgtaacttgaaaaggtgtagtaccactggtagcttttagcatttctcgtagttatatgtccactgaaagtaagggtagatggattccttgataggaaa

SEQ ID NO: 206902 - DNA, 702 bp, Cannabis indica
gtattttataaaagttagcgataggtcttgctaaataacaatttgaactctctatattattaaattataaacataataataaaccgtaagtctaattcggatcaaattattttagggttataattattagagattgagccacaattaaggagagaaagttagggctataaagagtaaattttagggtttgagttaaaaatatttgacctaaattatgtaggggaatccctaaggttatgattttttaaatatcaattctattattacgatttttacttttgtttcttatttttatagtttattttatctatttttaggttaaaactcaaatgatcaactgtttacttttaggttttcttaatccaatccaccgtctctttctctctctcttctttttttcttctccaattttggctattcctagttttttagaacctcgaaacttaggcgtttacattcctcaccgacactggccctcctaccggtatgagtctcactaacttttattatcttccacattctgggtgagtgagctttcttcttttcttttctctacttgctaaggaatattcttttgagtacatatccaaattacaacgcaaaataccatctttgtcgttgctagtctttgttgatggcattctagtccactctccctcgtagtattgctaccattgattctccaaaaaaaaaaaaattgaa

SEQ ID NO: 206903 - DNA, 527 bp, Cannabis indica
ttctcttcaaatttcacgtaagtttgttgctttgaattttcttatctttatttaacagatattatgtttgctaaaagatctcactatcaatcaaacttgtcttgggttaaattctttttgttttttttgggttttcatttttcatttttttttttcgagtttctattcctgtttggttgttggggaaaataataggatttgctttttttttttttttaaattttgttgttttgggtttgttctgtgtacagctctagtccatcaagtacccaagatcaagagggaatcactcactaaatactgagtaagaatgattgaactttatgtgtcaaaatgctattaaatttgattgaattgctaatctttacttgctgtggattgtagctgttgagattttgcattggtctcaattgtactttgttgctttgtctcaattgtttaagtggctaaccattagagaatagtttcttccatttttgtgtttagtgcattcttagctattagtcactgaactatttatgtttctc

SEQ ID NO: 206904 - DNA, 604 bp, Cannabis indica
cactaatttatttttagtcacaacaagtattgtgactaaaaatacatttagtcacaataattattaaattttgtgactaatacctttagccacggaccttttagtaacagcataaaaatttgtgactaaaaataagattttttttagttatttgtactgaggtccctaaactatcattaaaaaaaaaaaacttactttagtcgactaaaagtgaaaaggttattactaattataaatgttatcagtaaaaggattagtgtggctaaatgtactagtgataaaaatcacaatctgttgtgactaaatgtgtttttagtcacaatacttgttgtgattaaaattaaattagtcacaatttgtatctaaatactatgttttagtcacaagtaattttttattgtgactaaaagtcatatttattcacaaaataattatgttgtgattaaaagattaaagctttctctgtagtatatatagaattcggcaaattggccccaaacttattttttggctttctaagaaaaaaaaagtatattagggatcaacttaccaaaacttatatagttcactttagaacatgtggtacaaataagccaaataataa

SEQ ID NO: 206905 - DNA, 1248 bp, Cannabis indica
tatatatatatatatatatatatatacctatatatatttaatatcaatatatttatatatataagagagaattagaaattaaaagcagcctcatatcatcatcaaacgttcatcacactacacacaatcactcattcactatcacctttctaatacctatgtatcatatcatcatcatcatctatatatatatatttattattgtggcctttttattactaccacccataataataataatattattaataataataataataattaacctcctataaacaactcttacgttaccattttgtatatgtacatatatagatatttatttctccttttttttctttttttgttcttggcaaaaattttaagaatgtgaaatgtgatggaaaaattggaataacaagttaggtgtatggtaagatttgagattctatttcaaaattaatatttgactatgagaaaaatagtcaaagaatgtatcttggttttagcaaggtgaccatcttgagatgagacaagtgagtagttgtcgctgtcaccttaattaggcccttactgtaaaattttcgattacgtttcattagacgatataagtagtttattatgtagctaggtatattttcgatatctttaagtcgtagtatatttgagtataatgctctaatcttttaaacctcttttgtatttagaatgctaaatttcagtaaattagttgctatttcattttcaaaattgtaataatataatacacacattactaaatgcattattttgtatttcaatagtaattaatttgtttatgttgggtgtgtaacaaaagtttcacattggctagaaatgaaaaagatcatagatatataaggatggataatatctaaggtcttttgggaaggtgcccaaaaaattgaaactgtgtgagcttaagactaaaacagacaatatacatactaattcggtaattaaagtagaagaatagggcctaacagcttggagtaacaacttggaggtctaaagctcaaatcccaagatcactacaaagaaaaatcacttttaccagcatagtttgctactacactaataaaaataattgttaccagcgcattttgcaaattgcgcgctggacaaaaatgtacaaagttttaccaatgcacatttacagtagctaaaatctaacttttaccaataaatttacgcactagggaaaaaagtcatttttgacagcgtttttcattttgtgctggtaaagtt

SEQ ID NO: 206906 - DNA, 751 bp, Cannabis indica
tttttttttatagcggtgttcgttatgtttttaatatcatctctataaatttttacaaaatttcgaacaatttacagcgttgaaaatacgtttgaagtttttagaacaaacgtggtaaactgaaatattaagaactttatttttaatattgtaaactattcggaaattatcaaacatttacagggataatactgaaactataatgaatacagctattaaaaagatttgaaacaaatattcccgcatgtaatttcgaacgtgaaaataaactaaaaatttataatattatgtagaagaatatatttttaatgtacctaacttttgatgttatagttgaaaaaaaaaataaaacatttgatagttattagtacaaaatgatattataacattgtgattgaaaatagaatggcagaaacgaaagcaccaaatataatgttattttgcaaaaataacattaaaagataatagtcaatatatatatatataaattatatagataaagtaatatttttgaatatttaaaaaagagagaataaataaatatattgtacaacatacaaagattctaataagctagctactatgtaggaagatatattaaggataccctacagtacaataatgtggacaatagtaatgtttatgattcaacccactatgcatttatatatatatataatccaataatatacatacatataacaattactgaatatccttaagtacaattaccaaaactaaaggaccatat

SEQ ID NO: 206907 - DNA, 957 bp, Cannabis indica
atatttcatgaaatttgatcaaaatttgatgtaatttatgtttaatttgatcatatattttgacttccaatgattaaaaatagttctatcaatccaactattgatctaatgttataacactaaacataatgcatgtctaaacaacataataaaatataacatgaaatttaaagaaaatttatcaaaaccctaatcaatataataatgaatttttgggttgttttatatacattgtagatatttaattacccttctacattttataaacgtaaaattgtttatttttttatttgtgaaatttggaacaagctgcaaattaatataatttgtagcattttcaaatgttttggattttcttttcgagtttatcaaaatattgtttatatattttgatgaatttgtagatgggtatgttgtatagactcctcaaataatttttaaacttatctcacatctttatacttagcctctaaaattattctcagttggaaatatgcaaacaagttaaataatatatgaaattatgttcaatgtgagatttttaagaataacaatatcaattataaatatatgaaaataaatttaaaattttagaggatgtttatttgataatatgtgtttaaacttaattataaagagtttcaaattttaaaataaaattcatatgttaagcttttaattattagaatattatttttttgaaaaaaaaaaatacatggagagatattatatacctaataaaggataaataactaattaaaataatgttagaatatcctatgcgaaaaaaaaaatactttttttaaaaaataaaataatcaatttattgattttattgttgataaaatatagccagataacataatatgaataaaaaaataaaataaataataaaacgttcttatctttaatacctttttattgtgttccttcttataaaagtttctccttctataa

SEQ ID NO: 206908 - DNA, 725 bp, Cannabis indica
aaaaaaaatgatatttcagcacgtggtcattttgggatatttttcatggtgctatagcgcagcacttatgttttttaataagaaaatcctaattctaagagaattcatctatctttattggcctatataaagaagggtgtaaatcgggttggggtaccactggagagatagaacaagtaactttgcgattagaaaacaccttgaagagcgagaaagaagaattcgaagcaatcatcatcaactttcattattagagttcttttcttcttcttcttattcttttgtttagttatttaattatgaacataattattatggttattatatttgtgattatgaactaaacactcattctagagtgttgatggaactattttagattatgaatttaagtttttagattattctcatatttgttcttgctatttatttattcaattttgtgctaattatcatcttcttaatgcttgatcaccattaattagtatagagattttaggttttacacttgagagaggtaatctaaaattagacttagaatcgcatgacataggaaaagtatgagattgagaaattctaataattctatgagttttatttaaagagaatcatattgctttatgagtacttatttgattaactttgaatagagatatcttgttagttaatttaagttaaatatatcatcactcgagagagttcaatagattacattaggattcttg

SEQ ID NO: 206909 - DNA, 1242 bp, Cannabis indica
caatggcctatagattcgattttacaattttagtcaaacatgagactggagtatgtaacattactcagaatcatatagttttctttaagtttacttccatgattatgtcttaggtattattctcttggcttaatagctatcttggtaagaaattggttaaaagtttcttgtataattttaagctgtgattgtagagaaatcagagagaagtgatgttccaaatcccatgctctttacactggtttttcttcagccacaatagtgttatagttctttaagtttaactatatatgttatgcttaattaattcgagtactatagagaactattagtagcactctcagttctctcatgcatcaaggaaatatgacattgtatcatttagcttgcatctgcactctactctttacaattatagattaacttcttcattttgattgaaataaaataaaatttcttctcatctctgcataaatgttgttctatatataatgactaaaataatggttcaaaatttcttttcttttcattaactttcatagttgattttagtgataatttatgactaaaataatggtctgaaattggtttggttcaatatagattcaacaatttaagattaatttgtttgattgattaattattttacaaaaacaactctgaaactaaggataaagagactgtctttgtggactgccgttctagtacatctacattgttctatttatttatttattttttctcttccaaatacacatctaaatatagagtatttatcatcaaatttgttagatcatagatttccttttatttttttatttcaactttcttttctgtgaaacaaagccaagcctaacttttagaagatgacaagtatggagttgcatttatatagctagttaccaatagcagtagctctcattcatatcatataagtgaaatgttgttgtctttttatagctcactgtaaatttgcttctttagccttaaatttagagttagttactcagtgatcagagtatagaaggaatttagaaagaaagaaaaacccttatagtttgatagatacttcattttttttacaatattttagccgttaatatttgttgctttaatgttcttgatgtttcatttgtgactctaacaaaggtaatatattaaaatttatatttcaggcaagagcttcaagctttgtaagaaatgtgaaaacgaatgagtattcagttgaataacatagtaaat

SEQ ID NO: 206910 - DNA, 686 bp, Cannabis indica
gcaggttcttttcaatcccatcgaacttgtgtgcggtttgtgagaatgcccaggaatctcacaaccatttgtttatggaattcacctttaccaagaagctgattgaaagtatagaaagctgggttggtaatctgaattggccgagcaacatccaggaccttcagcgaaggaattggcaacaaaaacctaatctgtctactgccattttgaatgtagtaactgctgctaccttgcattatatttggattaatagaaacaactgcatttatgatgctctttgttaaactgtgttgtctattagtaaggatattaaagctatagctaaggctagagttttagggagacactacactaatattaagaaaaaagacagttaagttttgcaactagttagcacgtggtagatttggtttgtggctggttgtggttccaaccttctttgctttgtattgttcggtccttttgaataaaattttcttttttagttaaaaaaaaaattgaacatactgtccaatattaaaaataacaataaaaaaataataatgttacgaataatatattaatacttttatatattttaaattaatttaaaattagtataagttcaattaacctaaaaaaataatattaatatttatatatattaaaatcaatctaaaattaataaataatattaatatttttgt

SEQ ID NO: 206911 - DNA, 1252 bp, Cannabis indica
atatatatatatatattgatgatctgagtgagagtgagagagagagggagatttaggtacattgaataacttcaaggcagagcaagagacttttactaaataacaattattacttttaatcaaaataataaatgctaatttctttttgtttttttcgatggaagaagtgatcaattcggttgtttgttatgcattttattagaaaagctaataaataaataaatgaagaaatatagagacttggcaagagtggaagcaaataacgatatgcacattataaaggagtaaatgaataaaaaggcatattaagagacctacttataataatagggaaacttacaaaaatattgaaatttggattaatttttacaaaaatactgttacacagaaatcttttcaaaaatactgtatttttatataacactaataaaacacaaatcaaaacaactcaaaacaacagtagaataccagtaaaacaccagtagaacactagtgaaaacttaacacagtatactacagtatgaaacttatcaaaaaacacagtaaaaaagtaaaaaataccgcgtggcactatttttgtaaaaaaatagcaaaatttagtatactatgtaaattttcctaataataataataatggtagagtgcaattacttttaaaaatataagtgagagaggagtgcaatttatacatttataagatttcaatgttgacaacaattcaccatgtattatggagactaacagcatctcaatgttaatattttggaaaatgccgattatgagattaaaagtttagggcaaaatatagagatgttatatcattaaagataaaaaaaatgttatttttaaaatttacatcaatatcacacaataacattaacgctatttttttataataaaaaattagaagtataatatatatgtacaataatttaataaagaaacaaaattatgcatatataatagtgtgttaggtcataattatactatttttaaaaggtattatactattaaagtatttttagaaataaatgaccaaaaataatgtagagaaaaaataaaataaaatattatatatttcgataatgcaaaaatatataacacctttaaaaaatactattatatatgctctaactagaaagtaggaaggacttggtggatgttatttatttatcttttgctccatcccaacaaaaaccattagtactatttatttactgctgcaattcattttaataaataataaataata

SEQ ID NO: 206912 - DNA, 615 bp, Cannabis indica
taaattaattattcaaacaatacatatttttttatttgaagtatttttatgttttttctcgtcaacaatataatttaatattaaatttagtagctttagaataatttaataattacatgtagatataaatttctacaatttacttaattgtctttttttccatcttttttctttgcaaattatttatttacttattttttttttaattttttaatattttttaatattaattacctttaatttataataaatcactacaggaatggcgatctttttttttttgttagtcaaatttaaagatttaaatcgatttagaaactagattaatattagcataaagaaaataaaaaatattaataatagtaaatattatttgaattaacttgatttaataaatattgtttaaatatatttatgatatataatttgaaatcaataaaaattactaaataattatacatacttaatatagatttgaattaatagtaataatgactacaagtgaaatatggtgataacactaactttaaatgtaatagtaactataatttaattgtagcaacgacaacatttttgaaatcacatgaaagtatttgtgtgagaattcagttctaa

SEQ ID NO: 206913 - DNA, 531 bp, Cannabis indica
taatttgtaagtgagaaaaataactctgggataaaaaaaagtaattatgaagtgattcaaataaaaaaaaaatgatattatgtgataggtctttgaaaaaacacaacgttttattaaaagggagcaaaacaaaatgtagaaggaaaagagaaatgagagaacatacgcttaaataactccagaaatgagaagaagaaagcacgaagagaattaatccatgtggaccaattagaataagcaaaaagaaaagagctaataatcgattgcacctataaatagaagacttatcatttgaaaaacgaacgaattcttgcttacataagactagttaaaactctgttggaattcttcaagaacacttcaagctcggaagaagacaaaccaaagaaattgagagaattgagaaattgtgtaaactaagagagattatattttgattagacctaatctggtgtaaagattcaaagtctgaatgcaatttgttgttgagcctattttcagcatcaacagctggcaccgcccgtgagaatc

SEQ ID NO: 206914 - DNA, 532 bp, Cannabis indica
ggaacaccatcttgagaacgagtatagggtctcgccattgatgcagtggccaaagtttctgctgataccatctcataatagagtgttgaaagaaagcttataagctttgtgattttattgatatgaatcactgtaattacaattaagagagaaggtacatataggtagtagtgagctgagttagttatgaaataactaacttggctcttaacataatttgaacaaccaagaaggttccaatgtaacagtcatgaagacacctaagaacatggaacagaataatatcgtaatacggagaaactactactgcaacccaaaccgtaaatttaaaaaaaaaaaagttaagaaaataatacatgaggtaattttttaataataataaaaaaaaataaatttttaggaaaccaactcatactcatacgcatggggtgttaataatatcaattattttttttacaacattaaaaagcttactgatgtcttcggttagcgtgatttttttaattagagctgggcatatatttttttcaag

SEQ ID NO: 206915 - DNA, 1042 bp, Cannabis indica
gaatacatagcatagcatagcatgtaaggtcaaaattatgacaggaaaatactacttttcgtttcttgttcatagattccgatagaattaaggaaataacaatgtgcattctttcctttttaatgcagaaacaatgccaaagcaagagtctaaaggtcaggtcaactgcttgccagaagacttatcaaagctgttaaatttcgtgcctgctaatcttcaggctccagaatggtattgtgataacagtgaaaactccagtggtcaatgtttaggtgttacagatcataatctttgtctcgacatgcagcatttagcttcactattccctatcgcctctgcagctgactgtgggcaaaaccctgcctcttgggacaacttgcctgacatttgcaaagggtggtttaaaaatacttgaatgatgagaattatgaaacctattattattatttaacgaataaaataaaattattttaaatggtaattaataaagctctacactataatttgtttggtccaaatcttttaaatgttgaagccatatggccaaactatacttaataaaataacagtatgatcatttcttttatcaataaaagatggtctgaacgtgaacgactctatatatacgttgtagtttaacactataattgtgttggcgtgtagttttagcgtcatatgatttctctactctaaccatcaattatcaaaactatacaaaaactagaaaacaaactgttctttggattttattcaaggataattaaattataaaattatataaaatttcaaattttaatgttttacatagatgtatatttttaaattttaatagtataaataactattttactaaacttttaattttttactctgcataaaaattatcataataatcttcatataaaatagagatttttttttttaaaaaaaaatctataaaaaattcattatatcattttaaaattgttatcattaccgcatcgtacttgtagtcatcactacattcaaaattcgttatcattatcgtatctcatttgcagtc

SEQ ID NO: 206916 - DNA, 1207 bp, Cannabis indica
ttattattattattccttaattttcttctattggacttattagctaaactatattgtaattctctaattttatataatatatgtatatataaataggtgtttgatttgttagatcataagagaaatattggggtaattgagtttggtgaatttgttcaggcattaaacgtattccatcccaaagcttctcaagaagataaaatattacctccttaatgcagtgtctctcctctttcacactttctctggagataggctactaccactaccagactctctctctctcgctctctcgacttttttttcgtagatcttcctctgtcgccggaatcacagtccttcctccttcacacaacatcaccaggtaatgtatatatatacgtgtaatattaattttatatatggtacttgttttgtttatcattatgttgattgtatatcaatttatgagttggaaatttttagattagtatgatctctctagaatatgtatgtataaatagtgatatttctggtccagattcatttttttgtttaacattgaagcaaaggctttgaaattttccctagagtatcatgattttcctgatgaagccctagatgaaattatcagtaagctatcactgaaaattatgataaggtgtagtctagtaagcatacagtggaggacaatcattaaaaatttcatcacatattgcgagcataagtactttcctattaaagtgaaatctgatcagaaaatttgtttccaccatgggatattatctaacatctctttaactcctctcattggtgccattattctcgatattaaacatgagattgttttgatagaagtggacagtggtagaagaaagttgtaccagctttttaatcctactaccgaacagagaatcactttgccatccatacccattattgaatatcgtatttaggcatctgtatgttgaatcgaagaccgtaaaagtcttgttccgatgtgagagcaagaagtatcccaattggctagcctacttatacaccttaggtcagccgcaatggagggcttacaatgtgaggttcctattctaatacatactcgactttgacttctatagatgcacaaacggtacatttcatcacatcatcttataccagaacgagtgaatcgagagaaatttcaaaagcgggagctactatagtttcatttttaaatcagagatttttt

SEQ ID NO: 206917 - DNA, 617 bp, Cannabis indica
tgattgtagcaagaacaatgatcgattatgggtcgtcagccaatatcatctttaagtcttcattggagaggatgggtttgggggcaaaggatttagaaccttgtgaacatttcatatacagatttacaggaaatggtatggcactggttgggctcattaagctaccattgacgatgggagcagcccccaagagtgtcattgtcatggcattattcgtggtattggatatagtatcacactcaacgtcttaattggttgtccaaccctgtatgatctaaaggcagtcgtttccatctttcacctcctcgtcaaattccctaccaagggtggaattggctacttgaaggataatcaactagtagcatgagagtgttacaacctatccataactagggagaaagcatctaaatccctcaaagctacaacgagtagttctcaataatgaggactcgcccaaaacgggatcgaaagcattgatccccgtttttgggatactgataaagcaatcatttattacgactccacatcggttggctaaaaatctagtcaacattaggcatttctaatggcattacttccaatagctaagcttttaaccaagttttgtttcaactaaa

SEQ ID NO: 206918 - DNA, 853 bp, Cannabis indica
ctctcaactaaaacccaccaaatatataccaaacgcaacataagtgtaatgagagactatctttagtcatttgatcaaaataaaccgattaccaccaaaaaaattaaaaattaaaaattaagaaaaccaatttcatagctcttttctttagttctaccataagctcttattttaatttctttcataacctcagcgtccgaaaacaaataaaaaaatctttctcttataattttgtttattcacaatgttcgttatagttaccatactaaatttataattttcaaaataaaaaaacaatttatactataacaacagagttcctgataaatttactaggagtgcacatttaagcctgaaactcgaaaaacctaaaaaaaccaaatttcaattttagtacattgaattcgggtgtaacctaattatgcacctagtcagattcaggtttaatatttttgaaaactcaaaactcaattgaaaccggttagctatttatttatttattatcttttatgtataaatattgtataattatattataaatttttttaattgtgaatttgtgagtgtgttaaattgttattgtgataatttatgtaatatgtagataataatatattgtataattgtgttattttattaaaaataaaaaaaggccaaccctaacccgtaacccaacccaaacaaacctgtcccaacccacccagacccgaaacccgaaaaacccaatttacatacggctgggctcgatcccaaaattataaaattcaaacctaaaaactcaaaacccattaaaacttacatgatgtatacccttaaaattcactactcgagttcaaaaaatttcaaatttatt

SEQ ID NO: 206919 - DNA, 600 bp, Cannabis indica
gttttttttttatctgtgtttaattttgggagtaactaacagtagtggtagttatgtaattatttaaacttgatctttttaaaaataaaaataaaaatatatatataatcataaaaaatgaaaaaaaaaaatcattaataaggtcaattaattcatacatggttgaattatttactgattagtaaatttaaatgagggaattttcatgctttttttagaaaaagtttaaaatatatctatataagaaaacagtttaaggtgactagttaccttgttaggccgaatatactttatactgtttatcttcatagttttttttttaaaaaaaaaatcataaaataactttaaattagataagtaattagcatttgattatagctttgactttaaaaataacttcaaaacatcttattaatcatgcaaattacgtaaattatgtcaagtttaaaataaaatagagaaaaatccttacttttaagtcacatttacgtaggttttcgaatataataagcaataatatcacattagaatattattctaaacaagatgctaagaacccatatcaacctgtatgattgggcttcctcaaattaacacatt

SEQ ID NO: 206920 - DNA, 800 bp, Cannabis indica
aattttttaaaacaaaagtattaccaaaaatctacttaaatattttgtttttcttttattatcaatattattagttaattatttttgaaatcttcatttgcgtgtaagcgtgtgcagtggagcattttgaattttattgttatgcatgtcttaacatacacactttgcttgacatgacctatacattctagatttgtattttgttgtttaaattttttggagcagttttgtcttatgtgattcactttaagaatttagcagcccatgatttgacaaattatacttttcggttaaacgatgagttattctgacttgaggagagtctgcgctaattgcggatatctgcatcgtaaattcattagtgattctaatcattatgtcaaaaaaaaaaaaatcattaaactacttctttatgatttaaagctgattaaattaatagtaatcataattataatgtttaaaattgatcaacttataagtaagtacaacataagaaattagtaatttaccaataataataataatattcaaagtactaaatgtgcactaaaattatctcttagtatataaaaaattacgataaaccttttactaatatagataaactttagcattgcttgtgatgggatagacaaataaaagaaataatagagctccatttataggtctcttttaatgtaacacaaaactttggattaaatgcataattaaatatgtgcatatacctcaattgacatggttgaaaaacctaccttccccatcggtgtgaatgtgcttctctcattgtcctataatacact

SEQ ID NO: 206921 - DNA, 829 bp, Cannabis indica
agagagagagagaagaccaattacagaaacacaaagaaaaagagcaacaaaaagaagaagctgtgaccatgttgaagaggcctagacccaataataagccaccaccaccaaacaaagtatgcattcatatacaaatcttattaattaattatacatgtttcaacaaaattattattaattttgtaattaatttattgtcatgactactatagaacaagcaagaagacctactcctaatgtcacacctcatgagataaatgtagatgtgggtcaggtaataattaattaattaattaattaattaattaattacataataattaaataataatcaagtttcttgtttctaattaattaatattaattaattttaggatgttgtgagcaaagtaagagaatgggttaaaagttcaggatcattggatattctttctattgcaggcacagtatcatttgcatcatttgatgatccttctatggttttccaagaggtaataaataaatatatttagatatttagttctttaatttcttttttttctttataacttttcttgttttgattttgaatttggttaaataatttttgcagagtttttatcatattgaaacaataaaacgttgtgaaaggaaatttgatcatgatgaagaagatgtaaaattcgaagttaatttgtttgaacaaattacctacattaatgtttatcatggtgttgtacgagaattactagcttctactcctgttaaggtcatcatcacattattcttatttaaatttaaattaattttcttcttttcttttgttcatcataattattaattaataatg

SEQ ID NO: 206922 - DNA, 633 bp, Cannabis indica
aagagaccacctcctcctctcccaatcaaattcagtcagagaatacaaattcttttctgcttctctaaaacctctcaactatttaaatacaaactacctgcaatatggaatctttcccaatacatttattactgagagaaatgcaataaaatattggaaaaacttaaaaatgtaataaaattttggaaaactttcactctaatacttgttatatattttaattacattactcttaataattcatttcttgcatttttaatttattattttgtttttatgttttcattgtttcgctttttaaaattttatttcatttgtaccttaatatgacaaggaaaattacattcaatactgtattttcaatttgtttttcttttcttttatactattatgcggtgatttttatttttatactgcattttattttttattaataatattgccacatactaacttttttttttttaattgagaatttacacattttgttccatttaattactatgtaacagtcaaagttcattataatattttttattattatttttaaattttataaaagttaaagttttgtatgtgactggtcatgtcatttgtgtgaatttttttttaattaaaatttgataattaaaa

SEQ ID NO: 206923 - DNA, 1063 bp, Cannabis indica
gcttcaatggcacttttttccaaaaagactagaatctgctagggaatgatgtcatccaagcagctcttactttcctgaaacgaaacatagatttaacacctattaacaataccatcattgtccttatccctaagaagattcaccaccattccgtcactgattatcatccaattagcctctgctctactttgtataaaatcatgtcccgcaccctagtcaatcgcctcaaaccaattctctgtcatattatttcaccagcccaaagtgctttcttacctaatcgcttaatttttaacaacatcattatagggcaagaagtcacacactctctgactcatcgcaagcacggtaaaatggtttggggctcttaaacttgatatggccaaggcttttgatcgcatggaatggaacttcctcaagaaggtcatggaaaaatttaatttcccatcaaagttcataaatcttattttgacccgcctctcgactgcctcctttactttttccatcaaccaacagcttcttagatctgtcatctcgtcccatggcattcgtcaaggcgatctgctctcacgtatctctttcgcttatgttctgagggtctctcatcgctcatctctcaaaaagttcatcaatgcctcccaaggaagcatgctattggcttaaaaattgctcggatgacaccaatcatatcccatttgttcttcgctaatgatagtattctttttagcgctgcatcccctgttacccctaaccatatcaagaaactccttcatgattacaacctggtttcgggccaacttgtcaactatgataaatcctcgctctatttctctcccaataccattgacgagatcaaaaatcaaattacttcattgctcaatgtgcctattcgtgattctattgagaaatacttgggtctccctcaatcctttggttgctcaaaaaagtaagctttcacctaccttcaagatcgtgtgtggtcccatttaaacaagtggaattccacttttttctacaaaggaggcaagaaaatcctccttaaattggtagttcaagctatacc

SEQ ID NO: 206924 - DNA, 508 bp, Cannabis indica
aagtttcgttccttagctgatgaatttgtgaaggaatgtgattgaaacgtcttcttgctgaactcagaattgggcatgaaggctcaattgatgatctctatgataatcgattagccatagcaactgcaaagaatccagtccatcatgataggaccaaacatgttgaaattgaccgtcgtttcataagtgagaaaattgaaaacaagaccatcgccttgaagcatgttccctcaaggcaacaagcagctgacatcttaatcaaagctctccgtcatcctaattttagtgaagctccaaactaggaatatttatatcatctagcttgagggggagtgtaggaaatcaagttagtaattagtctttatattttatttatcctcccaactgtatatatatttattgcattctctttattctaaaagatctagggtttgatttgtatatatatatatatatatatatataataatactctattcttcttgtagtaataagtagttagtaagta

SEQ ID NO: 206925 - DNA, 671 bp, Cannabis indica
gctgagcacgaaagatctggggggtatttgcaatgattaaggttgacatggagtaattaatgcaaaataaacagaagaaaggaagagaagttagggggaagggaagagaaatagagcagaacgctcatttactgtaccagagaaaacctggaggaagcttcaaaaagaagaagttgttatgatttaaaataatattatatagtataatttattaaaattatattcaataaaatataatttaatatagtgtatgaaataaatttgcttaaaaaaattatctaaattattattattattattaaacgacaatacaatttatatagttcagtagtgaactaacattgtaattattaaaatgatggttagtagagttcgaattcgcattcgtataagacaacatatttcatttaaaatttaatttaatttgttaaaaattacgggattttatctcaaaattagtagtctatgtttttatatatgatttaatatttttacatttgatccatgtagtataatgttatccaatattccatgaagatggtgatgactaactatctgataggtgtagatcgaaaatccgttagagatataattttaataccacgttaaaaattatagtttcatcttaaaattaattagtaataggtgaagtaatttatatttttatatat

SEQ ID NO: 206926 - DNA, 570 bp, Cannabis indica
taataccaagattatcatactatactggcaattttatatggtgatagattaaggttgaaacaatcctaataatactatcacgaggaaatgatctctctacaaaataaaccttataagcttttacctcagcaactactaaaaatattgatactttaacattctgaacctagaattacttattcaatgaaagtaataaaataataataagattacatataaaagtttagaaacacaattaattccacaagaaaatagtactgaccgaataaagactgaatgacaagccaccactccacctgtattgttgcgaattatagcaccaatacctatagtattagtatgcttatcaattgatgcatcaacattgagtttgaattgtctcataagaggagtaacccaattagaggtagaagagcacttattccctttatgaatgttaatattttttttgaattttactaaattcctcataaagcttatgaaatcgtgtgacaacaactgtgggcgaaaataactcctgatcatgaacaatttgtgtgcgctcacagttgggctttgtgccctaaataa

SEQ ID NO: 206927 - DNA, 822 bp, Cannabis indica
atttgagaatattgtaatatttaaaatgttaaactaaatatttaaatttttaaaactttataactaaattccacgtaaatgtggtccattatttaaatcaataggtaacatattctgtggtgttaattatataaattagtgttaatatttatacataaattaatatataaaatttgaattttcttgttgatttgggttaaaatcacactttaattattaatatatttaatttaatttaatttttgaagtgttcaataccatgaaaataaaagtgggagaaagttggtcataataaagttttttttttgaagggataataattaaagatgttgattcttttcttgggctccaacccattatttaaataaaaaaagaaaagaaaaaaaactatacttttatgttgggtactactactagtaattagtaaaatatatatatatatatacaatataattaagattttaattatttgacatactactacatcattaacaatattactaattaaaaaagctcacatcacataatttggctagttttaattaatgcttcttaattgatattacattattaagctaagtgtaggattaaaggaaagctcaaaaacactacatattatatgttgtatgtaatatcttcctcaacaagcctctaaaatacaaaaaatataactcaaattataaaaaaaattatatggtaatacaataaataatctttaatactatatcattataaaattatttttgaataaatataatatttatacatatattataattaaaataaattaataataaaaattaaatttatatacatatattt

SEQ ID NO: 206928 - DNA, 1678 bp, Cannabis indica
attccatctggtttgctgatacgggagccacggatcatgtactcttctctcagcaccatggattctgctatccctactctggccaagacactctagctattggagatggtaagagacttctcatttctcatattggttcagcttctttaccatcatctaataactgtcctttaaacttacaatctgttattcaagtcccctctattactaaaaatcttgtgagtgtctctaaactaactgcagacaacaatgttttcttgaatttcacgaacattggtgctttgtaaaggagaaggatactggctaggttctacttcgagggaaggttagagatggactttacatgcttggagatgaatctacttcaaaaccgaaaaaggccttgctgtgtgaacttttttcactttccaattctcccaatttacattctgatgcaaaaacctcatgtaattctgatgacaataataataagtctccacattcatcttatatgtttagcaattagcaaaaatatcacatcatcttcctcacaatggcacacttaaagatcttaattctgtaatgcttgtcaacaaggcaaaagccactctcttccctttcctctatcccatacccgtgccacccaacctcttgctttaattcatactgacttgtggggaccctctcatgttctttcaaaagatggatacaagtattatgttcacttcttggatgattatagcaggtacacatggatatttcctttaactctcaaaggtcaagcctttgaagttttcattaagtggaaagctttagttgaaaagcagttcaatcttccaatcaaagctgttcaagtagactggggtggtgagtataggccattcaaaaggtttttacttgatcaaggaattcactttcaaagcccttgtcctcatactcatgagcaaaatggtcgtgctgagaggaaacatcgtcatatcaatgaaaccggccttactttattggccaatgctggtcttgatttgtcatattggtggcatgcattcagttcagccgttttcactattaataggcttccaacaagagttttgaattttgctactccttatgagactctatttcacagcaagccggattacaacattccaaagccttttgggtgtgcttgctttccacaccttaggccctacaataaacacaagcttgattttagaactcagcaatgcattttcctagggtattcttctcatcataaaggatatctctgtgaaaatactgaagggagaatatatattgttagaaacgtggtgtttaatgaggatttctatcctcaaaaagttgcctctgcctacacttcagcaacacactcgcaggtattatcccccacccatacacctttttcttgcaattcttcattttgtcctcaagcacctacatttactaacacttcctttaccactggtccaactgttgctactgaggacatacctgctggtcttggtactgatgtgtcacaatccgtgcctgctgccactgttgctggtccaactgttgccactgagaacctacatgctgctgcctctttatctggtgtgaaccatgctgaaaaatgacaggtcacagcgtgctcctgctgctgctctacctgctcttggtgctattgtttctccacaaaataatattcatacaagtggtcctc

SEQ ID NO: 206929 - DNA, 1235 bp, Cannabis indica
taaaataaaattaacatacgtgagttgggacgtaacatctatctagtatatatatatcaaaaaattctcaaaaatcaaaatctcaaatattattttaattttgttttaaaaatacattatttaattaaaataattaaacttatatatattgcacttaacattatttaattaaatttaattaaaaaacttaattataaatttattgtacgtaatatcaccttaataataatatataagagagaattttaatgagctaccgtccaatgatgattaagatggggtccccctagagatgatttgcttatggacaatttcaggaagaccttagatcattgtcatcttagtgcaattccttgtaagggtgatgtatacacctggactaataaaaaccaccgtggaaatattgttagagaaaggcttgatagaggtttcatcaatcacaagtggtctgaattcttcattgaagatcctatatctcatcttgatttttaccactcggatcatcaagctttagcatatattgtatcacaatcggtgtctactgctcaatctcatcagaggcatactcggtttcgttttgaacaattttggctcaaggatgttgactgccgaaacatcattcaggagtcttggcaccatatggcttcggacaatcctacctcttcgctgctgcataatattgcagcaagttcggctgctcttcaagattggaatcttaggaagtatggacaaatgggaagagatatatctgcagctcataaaatatcagtacaccttcacaatagccataacaactcggctgcccatcttcaacaagtggaaaatgatgataaaatattggatgaattactggaaaaagaggaactttattggcagcagcgagcaagggtcgactggcttcaaagtggggattcgaataccaaatttttccattctcgagctaaaactagaaacaagaataataagattaaaaagttacaagctgagaatggtggtgttgttcatacttaggaggaaaataagtgttgaaaattgttaattacttttcacatttatttacttcaaatggagttgatgaggaagctctcaattatgttctctctgccattccaacgtctatcacaccagagattaatcagcatttgttaatgcctttcactgcctcgaatattgaagaagctctcaaatcaatggcccctgataagtctccacgtattgatggaatgtctgcaatg

SEQ ID NO: 206930 - DNA, 882 bp, Cannabis indica
attgatgtaggagtggaataagtttatggccaacattgacatcttctaatggtaatgtactggtttctctttgactttggtcaaacatttcttggtcacttagtctttctttaccgttgccactctctaatgcatcttcgaattgttcaatcttttcatcatattggtggccaaaatcttcatcttcatcagccattttagtccttgtttgtgggcatgttttcttgttatgtttcgatttcttgtaaattgtgcatttccttttgttcacagccttggaaccctgcatttttgctgttccttttgtctttgaaatgtgtgggtcttctacaattatatcattttgcttaattttttcttcctctttgcctctcttattttctaccttatcatatttttgcaagctaatactcatgttctccaacaattgtaaagtttcatggtaaggtttatgtgttttagccccaatgtatgcaacttcatccattttcgtagttatcctaccatatcgagcttgcacttctgttgacgcattctcacattattagaatcattgatgagattgttttaaggattatattgattaacagtgtaagtgcattggttatagataactttcaatattgtacactatttttatacatgttaggcctgaggactatgataattttctaaaatgtatgtaatattatagaacacactatgatatgatgtaatggtaaaataatttagtttattaagattacaaaaacatcacttataggataaatagatggtacttttctggcttttccttacaaaaaaaaaaggcttcattagaccaacatattgtcaacttagagctatggatggacaatttaactattaagttgtgccttcttt

SEQ ID NO: 206931 - DNA, 1015 bp, Cannabis indica
  modified_base (39)..(39): a, c, t, g, unknown or other
aggatactaagtgcatatagtatagtgatttggttggcncaatcaacactaccaacacttaatactttttaggtactaatataagtgcatgtggtatagttgttgatcgtctagaacattttgagacacatacacatttagatgttgggtaaatttgtgattagatgtatgagcgcctaagttacaagtcagattatatgatttatgattttttgactgagtctgtcgactcacaaatatgtgattcatgtatagtaaaggcaagataaaacctgaataacggtgagtctagagctcaatgaggattatacatatctaaatagttggacctagagtgttcgaatcttcgagatgacgtgggcttagtttgttagccgttgggcgacacttttgttgtatttaaaaaataaattgggatcctagagtttgtaaaatttatacatttgtataattagtaaagttttacatttatcataaaaaattttgttaatcacattttttactactctttgataaaaaaaatattagcacattaatttagaaaatattgtagtgcacctacgctaatagggcattacaataacactctaagaagaaatgagtacaagaattctgggccatatggcaaaagatgcgttgattattactatcaaaaatttgattgaactgttgtctaaatggaagaatgtccctagccaccttccacaaaaagaagcagaccctatcatgaaccggagtcaactagatttaattccaaacctcacctagtgttgatccacgatccttaatgatagctctataggcttgtcacaccgaaaaggacccatctaaattatccttccatataagtatatcctcatggtatggtggaaatatttgtaccgaggtaagagaaatacataaccttagcacgatccaattaaacactacattgttaatctaatcaccatcaactatgactagggcgaggttgaacatcctactcttttccaccaatcttgaattgaatcctgcc

SEQ ID NO: 206932 - DNA, 645 bp, Cannabis indica
aataaaataatttgtagataatatcgccaattaattgtagggcgctacttatagaaggtgatgagcactattggtagcaaatagcaatgttcctccctaaaagttattatattaaattatacgagacttgatacttaatttaactaatagtgatattgatatgtaaaagagtgttagattttttattattattattatttattaattactatacaaaatatttgtttctctttcctgttactttcggtccggtgcgtcctctccctaaaattagcaacccttcatttttatttttatttcctttttgtacttctccttattttggtacggttttttctagtattgacaaatccattttggtattcacaaaatttgtgttctaaatttctaatatgtatttttttattatttttagatcaaatcctactttctcaaaaacaaaatcagatcctaattaccaaattaaataagcttacccaaataataatgataattagagtggccaatggccatgtttgtttgtagtaaatatttatatttattttcttattttatagattttgaactattattttattattatatgtactttcataattaaaataatgcaattcttttataataaactagggaatggtaccgcgc

SEQ ID NO: 206933 - DNA, 1178 bp, Cannabis indica
attaagagaaagtgagtcttcttgtctgattccccttctagggactactggacccatctcacggcctccatgaacaatagaataagtggttgaggtcacacatttgagaattaaactcacccaacttgttgcaagttccatttttaacaagattgcttctaaaaaaatctcaccctattctatcataggccttgctcatatccaatttaaatgccatgtagccatctttttcttgtctctttctctttaaataatgaaaaatctcaaaagataccataacattgtcagtgattaatttcctgaaataaaggcacttcgggtatcagcaatgaacctatctataaaggcttcattctattagccataatcttggtaattactttgtataaaatgttacacaaagcaatcaacctaagatctgtcatacttctaggatttttcttttatggtgtcaaaaccacattagcctcatggcagttatcacggaacatgccatctaaaaagaatcgctgaaccatcttgactacatcaccaccaacaatggaccaacacttttgatggaaagtaggggtcatgccatcatgacccaaacttttatcgaggtgcatctgaaacaaaacttttttaacctcttcttcacacactagctgattcaacatcttattcatttcatcagtaaccgaggtacccacacaatcgatcgcctctctaaatcttgaacccgagctagcaaagagagcattaaaataattaacctctaaacatgtctcccaatccacccactgcccatacttattcttcaatttctaaattaaattattacttctaggagtattagcagcaacatgaaaaaacttattgttatggtcaccatcttttagctaaaattatttcgatctttgcttccaaaaaatctccctctaatttagattctcaaacaaccttttttttttacctctttctattaatgaacagaagcattgtcgtgcttattcttcaacatattgagcttatttttacaatcttttaaacactgcttaagtttccaataatcgactttacccattctggaagtttaaccgcacaagaattaacttttctaccaatttcgatctacaaatcatccacaatctcgacaatttgatagcacatcggttcctttacgtccaacgcgtttt

SEQ ID NO: 206934 - DNA, 594 bp, Cannabis indica
aaatgcgggtcgtgccatgctatgaaaaaatacgggttgtgtcatatcgtgtcaataattttatagggtagatacgacacagcttgcacacccagtaatttcgtactgtgtttggatttgtggcgtattttattcggaccattccgattttttttaaataaattaattcattttcttatatgggctcaaatttgtactccacatttttgcattttttattacgtactaattactaatatatatatatatatatattaagatttagttccacattgttaaatcagaataatactatacatctaacaaaaataatgatattaatatctagccaaacaagttgtttatccattcgaaaatatgtacaactaattcacgagcaacacagattagggacactcttataaatctggataataaacttgtaaaaacttctaataatgatcttacaatcatttgagtagggaactctaatagtaaaatcaatcatagttgtaaaattttagtaacagactgcaatttattatcatcatcagtgtcacgcaatttgtttaaaaactcgctatcctatttttaaaagcttgaagggacaatagt

SEQ ID NO: 206935 - DNA, 639 bp, Cannabis indica
cacaggtggttgtgtggtaggaggtggtttcggtacaacaggtgatggtgtggcaggaggtggttttggtatcacaggggttggtgtcaaaggaggaggcttaggcacaacgggtgatggcattgaaggaggaggcttaggaaccacgggttctggtgttgaaggagggggtttaggtaccacaggtgtcggtgtggtaggaggtggttttggtacaataggtgatggtgtggaaggaggtggttttggtaccacaggtgtcggtgtggtaggaggtggctttggtacaacaggtgacggtgtggtaggaggtggctttggtacaataggtgatggtgtggtaggaggtggtttcggaacaattggtgttggtgtcaaaggaggaggtttaggtatcactggcactggcaccgaaggtggggcttaggaaccaccggtgctggagtcaaaggaggaggctttggtatcacgggcactggtgttgaaggaggcggcttaggaaccactggagtaggcactgatggaggggctttggcatcacaggtgctggcgttaacggaggggcataggaaccaccggtgttggcgtggaaggagggggcttaggtaacgactggtgttggcgtggtaaggagggggc

SEQ ID NO: 206936 - DNA, 1512 bp, Cannabis indica
  modified_base (1495)..(1495): a, c, t, g, unknown or other
ttagtattactctgtaaaataaaaaaaagaaaactttaaaatgtaaaaaataaaaaaaaaccctatcaaataatatttggtttttttttttgaaacggctataaaataatattgtttacacaacataaaaacaacattccatatttttcttaaaaaaaaaaacttcaaaatagacacttttgtccttttcgagtagtactattattacaaatcctctaataaatcgcaaagaaaagttttggcccagtgtcggcccagcccaataggttcacaacctatccattttaagacccaatagcgcttaagatgggccagcattgtccagtgggctggtcgtataggaaagaaatatgtcgtaaaccagatttgaatccctctgattgggagagagagagagtaacatgggcgttgacaaggaggagaaagaggagagagaagctgaagaagaagaagaagacgaagacaaagacgcagagatttccctctgaattcgccaacgctcaatctccgatagggtttctctatccattatttaattcggggttggtgaattagggcatcatttccattggggattgattctctctctctctgtctctccggaatttagagaatttgaattttcttgaatcccatttctatactctatctatgttatatagagattgagcttaaagaaatggcgtacagaaggaagcaacagcagggattttctaggcctttagccacaagcgttgatgaacataatggaaattatttgcatccaccgccttcttcggtttttggtgatgatgggtattcgtcttcctcatcgtcctcgtcttctcttgctgcaaaagcaataagagcttcttcagcctatcgagactcgtctctttcctccgcttatgctggcggtggcgttggccgtgggataaattcctcaacaacaacttcaacttcctctgcttcacgatatcccaatcctactgtaccaacctcttcttcctcgtccttcccgaaggtaatatttctcttctgctgttgaatttcttaatagttttaattgacaatgatcataactcaagacatataccttttcaccaatgttatgactcacattgcatttcaatacttattttctccttgtttcttagttcttgcagagaaaatgtacttagtttccaccttgaagtcattggtaattcatactatttcttttttgttcgtgttgttgtggtatttgtggatgtaggaatcgaagccttatgagtacacatcaatgaaaaatttaaacgaatccaaacatagcttttggggtgctttggcgagaaaagctaaatccattcttgatgatgataatgaacctcaacaattagattcacctcgaagaacgcacgcccaagtaccaactacagctacagctatgagagggagggtaagacaatactgactctttgagcaaaaaaggataatctttttgaaaaaggctttgtttttggggtggggggggggngggggggtggggggggc

SEQ ID NO: 206937 - DNA, 964 bp, Cannabis indica
aatattattttgagttaattagttgcctagtcggtttttaaaaaaaatatatatgtatatgtatatatcagcagactctatatgagtgaaatacttttagctgtgttttgaaccacgggatctagacccatataaatataaagatataaaatattacagttaacttttgagtttattaaattttacatacgggcgttacaaaagttctttcttcctagtattaaagtcaaggtttcattaaagtttctcaatattatcagctgaaaaagtttatctatatgttaacgagtacagaccgttaacatttgggcaccgtctatgggaagcgacaatctaaaagcaacgtttcttccctaatacaagttatcatgaaaatgccgagacattctcgctgctgtcaagaagtagaggtacgacttgatgaccatcagttggttgcttcgatacctcccctgccagtagcagccgctgaggggggaggcgtggtgatgaaacaccaccgaatggaggaggcaccaatggccaaaggccgtcgacaaaagaggaaaatgagtggtgcaaagatgatccagtaaaccatccccaggatggaatgaccgcctccctcacaaaggaagaaggcaacgaagcctgacgatcaaaagttccatctccaataagacacccacaaccgtcagggccaaaagacccaagaacgtcccaccagcgatctagaaaggagaagcgggcctactttgtgagttccagttcatggacctgactccacgatgaggagatgagtgaaccaaggctgaggaacctacgactggaagagacggtcacaaacatgcaagtggtattggaggaactccttaaaggccgatccaagatacccctagtcgggcgaagagcaccagaggcgaggagaagaagagcggacgaagccgagggacggaagggccttcgagatactcgacaaacaaca

SEQ ID NO: 206938 - DNA, 836 bp, Cannabis indica
cacattagcataaataccaaaatccaacaaaaaattacaaaaaatagaaaaatctcgcttctagaaatttttcgtttttttttcaagtttttagaaaaatataaataagatatcaattggttacctttttatttcaaaaaaatatttcaagataattttatatcatacacgtttagttacttattttggttagtaactttaaactgtgattttctttttaaatttttaggctacattatattattttatttataagataccttgacgatactgtatttattattttttttttgtagcaattttaaatattttgagatgaggggaatatatataattttgttagtatcgtaaaagatgactaaaataaaaataaattttatgtttcttttatatttattaaaaaataagtaattaagttttaaatttaaataaacttagtacactaactaactttagagattaccataaatatcataatatttcatatttaaaaattataattaatatctaaataagtttactttaaacaagtaacctacccattcttcctatacaatgtgtacaataaccttgactcattaaaagagaaataacctcatataaccaaacatgtaaagcaaaaagaaaactaaccaacttgtaggttttactattgtaatccttacccttttttcattttaaattttcgattatattatgttattttgctgtttaagtcaagatattttggtgttactttattttaaaatagttttttacaataattataacataattgaataacaaacaagttacaataaagtataaaaatttactataaactataaagtcattag

SEQ ID NO: 206939 - DNA, 636 bp, Cannabis indica
tcattacaattactcacccccgttaaaaggatttccgtaccctaaaatataagcttaattgatctggatattgagtcctcatatcagattctaatttccaagtggcttcttccaccttactattcttcaagggcactatggccacggctatggccctgtttcgaagtgctttttctttcttatcaagaatctaaactgactgactttcattaaataagtgtgactctagctcaagggcttcataactaaagttatgagtcgagtctgcatcatatttcctcaacaccaaaatatgaaatacatttttaatagccaataacgtttgtgataaggctagctaacatgctacctgcccgactttctcgagtatctaaaatgacccaataaacatagggctcaacttgcccctctttccaaagggcttaatagccttctttggggaaactcataggaaaacatgtcctcctgccaataatgtaatgtctctgcgctttagatcagcgcaatctttctacctattttgcgaaataagcatctgagctttgatcttatctacagctttattggtcctttgaactaaattatggacccaaatacttattttctctagtttgtcccaatggattagggaacgac

SEQ ID NO: 206940 - DNA, 694 bp, Cannabis indica
ctctctcttcatgtagatgaactagttaagaagctcatttgaaaattaagagatacaagagatttctgaattttgtgtttctaacaaactaagtacaatttgtgagaatttgaccaatgaatattggtaggtaaatagtccctttcaaaaattgaaaataataatatttataaagttatagagttgttaagttgattattgtatgtgtagtggttgtagtttggattctattgagttgacttttgtagttttagtttatgttttttcattttttttggatccacttgattgaaatgttattttgctgtaaatactgattattagcattagagagtagaatcaaaatcagtcactgaaatgatttcagagaaattgcaggctatgccaccattaaaggctctggaaactatggtggactgaataataataatagtaatggtactgctagtcaaggggaaatgagtccaccaacaaacagattgaagagtcagcttagtttctcaccaagaattccttcattgggtatgttatctcagatttcagaggttgaaagtgagaacaaccttgaggcaaatacacttgatgaagaaaataagcttggaaataataatgacaatcatactagtgatgttcaattctatggctctggattctcatttggttcttggaatgattcatcaaatttctcagatag

SEQ ID NO: 206941 - DNA, 970 bp, Cannabis indica
ataatttgatagtgataatagttcgaggtgtacaatttattaatttaatgacccgtgttaatttttgaataagttgtgttaatttttttaacagatggacacaatttaatagtaataataatttattcttcaaaaaaaaaaatagtaataataatttaaagacaattaaaaacaacttgacaaatttgaaggatattatcaaataataataatagtttacaccacaaaaatcctacttttctatatacacttaaaaaaaataattatgtgaattttttttatatttattaaataattgacgttaattctcattattttgcgaacatattttttttggatataatgttaggatttttcttttataatattaatattttattgtctaatttttctttcagacattttttttatactaattgtaattttaacgttgtgacctatacattagctttttttttattactggcacctcgaaagaaagccaagaaaaagactacaaagaaagcaaaacacccgcaaagactacaggagagaaaaccaaaagaaaacgagaaaaacatcccaaacaaaggaagattaaacaaactaagcccatagaagggcaaggagaaattaaacaaaacaagaactaagcaaaccaaattaaacgaaaataaacgagggccgatgagcgagcacggtcatccgctcaaccattgagcagggaaccgtcaaaattggacagatcaatacacccaaactgctgtgaattaactgtccattttgccacacagagggcagcatacattaagtctttttgggatccaagtggcctcccaaaggctcgaaaactgagtaaacatcttgaatttcaacactacatcttttcaatagataataagatgaaataaatccttctacctaatgtataacattttaccttttttatctttatcttttcaaagttacctcaataataataataataata

SEQ ID NO: 206942 - DNA, 1298 bp, Cannabis indica
agtgtctttcttttctctctcaattttcctacatatgtttgttatttcaatgaaatttttattattaaggaaaaatcatactagttacctagttttacaaatgagactactttgaaaccaagtgaatatttcaaaagggtacagactttattttaatcaaattccatcaagtctacaattttttagagtataatacaaacaacaaatatgctctattgtataattttagaataattaataattttgcctttgaacttttaataatattgattttgtcttttaaaatatacggcttgttaagaattctgttgaacttttacatttatagaaatttagttcttcagttaagttccattttattattctgtttaaatactgacgtgtttttgtaaattaacaactttgtccctaaactttgacaactattgtacacctaaaaataaaaataagaacgattcaacatttttattaataaatcttaaaaaattaatttagatcttaataaaaatcatttttaataattaagaaaataaaaaaaaataaataattaaacgatttaaaacattatttattttctattaaaaaaatatttacatattaaaaatttaatttttgttaaaactatattttacgtgaacaaacttgagttcattttattttttctcaaaaaatatagattttttaagtaaacataatattttttaatttcttttctaacgttttttttttcaaaattaattttatatttttattaaattcttaattatttttctttatttgttaaaagacgtgtttataaataaaataaaatttgaaaatatttttttttaagaataatttatatttttttaagtaaaattaatattttttatttaatttaatatttttatcaggtctttatatattttttactatttttttcagaattaataaaatagtataatttttaaaattagttttttttaataaaatgggttaaaattttgtattggtcaaagtttaaggggtaactaatttttaacgataaaagaaatggaacctaaccgaaggggcaaaaatatgtaactgttatattttagggagaatttttttacaagtcatatattttaagaggcaaaatcagatagtgccgaaagttcagggagcaaaaatattaattattcataattttattcctctctgaattccatgcgaaagtagcattgatggaacttaataagaagtgaacctgagtcagattgatcactaatgtttactgatgtttaattcattaccaaccatcagtgatgaatttaagt

SEQ ID NO: 206943 - DNA, 1271 bp, Cannabis indica
aattacattatatatatataatcaaagaccattcttatatgatattttgttaccaaataattcttttgatattttccaacttgttgagaaaattcccttgctattttcccacttgttaagaattattatagactttgtgctttgacaagaaagggagaggagaaaattatcaatatcctatagtctagggatgaaataataattttacataaattaatgacattatttttttttttttcaattaattatctaccaaatatgtgtctcctagatttctcttctcaatgatatgttttgtgaccaatgtaataaattcccaaattattaattgtttttctaagaagaaaaagggtaaatttggggtgcatgtctctttccatatatacaaatggagatattatagagagcaaagacaagagtcaaaccttattaagaaaaatgctacacatgttatttgactttattaatgagaattacctactttcctctttgtttttttaagaaaaaaaaatacataatattttttaggggaatttagatgctaattttctcaattttgaggcctttttttctaatataaaatatcaaacatctatcaaaataataataaaaaaattgtagggtgttttggtcccccatccctataaaaattacctatcttccttaataatagtatagggataaagtcctaaaaaagttatagggatgaagtaataatttaaatcaggagcttattgttatttgttggtcatatactcatattactctggcaatttaagttctatttaattgaaaaaaaaaataaaataagtaattttaactaattatattttttcaagtttacttgttaaaaataacttaagtttatgtgattttatatgtacatatattattattcccattttatatagaagaatcttgaattaaattttgagcaatgatatggggtaccaaagtgttaaacattactatgaagtagcgccagttagtaattctttataatttttattaaaataaagtgtcactcgatattcaattgcactagtaatgatattacacctcacaaaggtgttgagcgtttctcttaaactttagtgcataataattgagagacactcaaatcaaagaaatgttaaaatgcaacacgtgccatatcgctattagtataattaagtattgagtctcatataacttaagataataattttttaagagatatcgctaatcaattgtagggcgttacctgtaagtagtattagacaccactagtg

SEQ ID NO: 206944 - DNA, 677 bp, Cannabis indica
agccacatgtacaaatactacgtcatctatcactatttttttctcttttaaatgagacaaacttgtctcctctaatttgtgagattcgttctcacaaaggtgtcatgtaggttgatatttggatgcttcttcagtttccctatttagattaccttatgagtttgttggaccttacatcttctgggctagtcgcccttccagaaccaataaggtccaagtttattatgcatgtacattggatttatagctgaatttggagccatggcctaactctatggtggactgacctactagtttaattgggctgtgaattggtccgtcttgcagaatttcgatctttagaagacacgtgtaacctatctagaaatacagacaacaatcacctatatacattctcaaacattagagactctgcaagcgtattaagtcgtattgtattgtattatattgaattaaattatatatcatattactatataatatgatgttaaattttaatttatattaaaataatatatatttagatatctataaaagttaataccacgtatagttttacatatattgtataatatacaattcaatatagtgttatacagtggcagaactaggtgaacttattaagagggagtaatttttttcaagtgtatacacgtatttatatatatttttgttta

SEQ ID NO: 206945 - DNA, 597 bp, Cannabis indica
atttacatttagggtatgtttggttgggaggagctaaaacacaagaaattcggaatagaaatgaaataaaaataagaatacatgagatttttaccccttgaatatgacacttgtaggaatttgtcccatgaattattattttttattttttttgtacaaaacttccctcaagccattgaaataattgcaaatttacctctttaactgatttgtttactttttaatataatttataaatgtggccattaaccacacatataattacaatactagtgtttatttaagtggaacttaatataatagtcttaaatatgtaaataataagtctaatattatagataaataatcttatatttcatcattaaagtatactttatttatgcaattatttttcattttgaattgtttacggtaaattagattttagatcagtcttacaacattaaataattttgcaaaataaaaataaatacaactacagaaaaaatttacaaatctttttatagtcggagaggagtattttacacaaaaaaaaaaagtaagttacaagtaaaaaaaaaaaaaaaaaaaaacgaaaaatttaaaagtaaaaaaata

SEQ ID NO: 206946 - DNA, 713 bp, Cannabis indica
gtcaaagctaagacaaatgtgttcatgctcatatatatataaaatatacaaatatatatagaagatatgtggatgacctacaatttgtagctggttccaattacaaattaagcaatatatactttaggattttattccttatattaggattctcagatcctttggcggctactccattaacatttaattcaagaaataaatacattatatatataaacagtacttgagaatattatagaaaattaataaatgattttacctaagccactcaattttgtataaaaatttataatagtttttctttttcataatgtatagtctactcttctcttatgataaattgcatagttataatgtgtgtgtgtatatattaaaaatttgatacatttttggtttatagaaaaattaatattctaaaaaaaattaaatttaagggcaacctgttagaccaaattgacttcacataaaattgaataatcaacaatatttgagaaattttattaggctgggattattataataggtaaataaataattaaaggaataaaataatatgtttacagattttataagatataaaatatgagaatgcccaccaatctaaaatattatatttgcagtggatggatatggtacactatacaatatcatacaggtttgagaacattcaaatgtcattggtctttctcaattattaattaagtgtctaatta

SEQ ID NO: 206947 - DNA, 1103 bp, Cannabis indica
attatatattattgtactccttgatttttcagcctcttaaatgtaatcactgaactaatcacaatattgtaaagtgatccttttattacgtttgtcatacgtggccaaacataacgatataatataattatttacactattgtctcgtccgtatatattaattaattttaaaaagttaatttaaaagtttttaaaattatcttactgtcaaattcttttttatcttttaattgatttttagctagtttaataattctttaaaaatatatatttttattttaaattacacatgtagtattaatgtgacatgatgatcatctaattgtaacactgaaaatagttgaataatcatttttaattgactaaaaaattttaaaagcaaaataatgcatatatgtttgagggtcaaaaattataaatagcctatatattattgtttgtcatatcatgggtcactactcactgttatggaataatggagatttagcattttaatttttaaaaaatttacacaaagtattatttttgaggaagattttacaatattgttatatagacaccatatagttaacaatatcctagaaataaaaggaattaaatttagataaatgccaaaggatattaatgatacgtgtctgacactctaatgagatatcatacttatattagtgtaattaagtatcgagtcttacatatttaataattattatgaaaaaaatgtaatcatttgcaaaatattaccttgtgatagtattaaactactaatatttttgagaaatgttaaaaagtactaaaagtgctaatagagttgtttctactactattgcttatcttaatcaatagacggatgctcaaaaatatggttctaacatatagagaagctacttttttctctgttgttagtaacaagcattagacgatacatattattaatatgattaagatcaatgtaaatgcttcagtgttagtgagtgagtatggtagtggtataatgtcattgaggcggaatcaaaaatgtaatctgattttgtacaactaaatatgacagaaacagtctatctcaaaaaaattctaacccggatcaaacattaagatctttctca

SEQ ID NO: 206948 - DNA, 1060 bp, Cannabis indica
attgcaaccataaggtatggtgaggcttcgttggtgactctttcttcaaaacatggtgttgctatgcaaatggtattgagtttatttttgtctctttaatgcagaaagttgtcttaagacaggaagatgccaggaaaacctaggaattggtagtaatacatttctcaggctggtagaactaatttatttttacttctttttcttaccctaaagtcgaaagtcaataaatattttttgatgagtctagtctgattcgcaataggtatagtatctttcaacaattgaaacaaatgtgatgttttgatactttagaagttgattgaaaggtttagattgtgttccttgtacttgtatgtaacttacactgttgggtgtttgaagagtaaaacaataaacattatttatgatattcaaattggatgttaaaaatggattgtaagttctgtttttttttttttttttttaacaaataagttattattatatatatattgagcaataagttatgttatatacatttcttttttgtccaaaatcacgatattggttacaaatttggtccctttttagtgagaaactaaaaattaaatagaaggaagtaattgataccggatctgaaatgaaaaggaaataattattttcttttcttttttaaattaaaaaaaatccaatacaatgaggtattaaacatttaatgaaaaaatattttcgataaattcaatatttatattaatttttgtaaaaaatacaatatctaaatttgaaataattagtctgcactctgaaatgcagaataacaaaaatcatatttaatgacctttggatagcttggaccgtgaccaaattgttcgattccaccaccacatcatatcgtcctgtttatgtcaactagctcaacacttctttaaccccgatagctttagtaagaacaaaatcaaccattcccatcgagcttactgtccaagtcataataatctgactagaagagttccacaccacccaaccatacccatacttattgtgatggctaaagatagttacattgacattgattttaatc

SEQ ID NO: 206949 - DNA, 680 bp, Cannabis indica
agtcatagagctgcatttagccaaataaagaaaagaaagagcaatacaaaagtaatgggacaccaaggatgatacttgtaatatggttttgagcacatattatataaattcatatacatccaacacactaagtcctgcacttggtatgtgaagagaaaccaaacttaccatcttagacatattcacactctaagaagttaagatcgaactataactgccctatgctacccaaaataataatgtaactttcaaggcaccataaatttacataacaagaaatacaaaatcttattttcaaaaataaaaaacatcaaagtggactctaaaagtaacaacaatagtatgatgtcgtcacaaactcaggcagatgaacaatcagctacaaataaaaatacccttttaggcaaattaaaaaaaaaaagtactgtttatatcttcttcttttttttttttctaaaacttctaacaacgtttacattttcattttatagctaacatcaccaccataatcatagtagtgataaccatatagtgatgaaaactagacctcttagagcgtctgtgttgaccatgaacaagtaagccagtccaagaatctccattccatctcttcccacatgcttcatcatcatctccaactcctcctcttcctacaataaaatcacgcatctctctctctc

SEQ ID NO: 206950 - DNA, 628 bp, Cannabis indica
aaaattccagatgaaataggcaacctcaaggagctatccttcttgtaagaaacaccatgatgaatattttcaaataatttattcattaatgtttttggtttgattccttgactttttcattggaaatttgttcttgacagagctctgaattcaaataacttcactggtagtatacctgcttctttgggtaagctctcaaatgtttattggctggacttggcagacaatcagttaactggacctcttcctgtttcaacctctaccaccccaggattggaccaacttcttaaggctaaacacttgtgagttataaaatagacccctatcgcatctaaggcatcaaagatatgatacttttacatttctatttttattgtgtgacttactgcctaaactttatctaaatgccagccatttcaacaagaacaagctttccggtcccattccagaaagactttttaactctgagatggtactgatacacgtgtaagtaaattaacatatatatataacttggtcatctttatttgatgtttgtttttacttatctaacatcccctacttgatcattggcagattgtttgatgggaaccaatttactggagctatcccatcaacaataggacat

SEQ ID NO: 206951 - DNA, 1208 bp, Cannabis indica
ttgagttgctaactcagaaagagagtgcaagaagatgaaacaatattgtaagtcgcttgaaaaatgataatggtgtatgtatgggtgggttgggacagtggcctctcagaagttatggtaaactattttcagaattcacttaattactacttttgaagtggtgggtgatgggatgatttcttgggtggaggaaaaaggtttactgttcaaaatgggttcttactttctcctatgacagttgaggtcaaacaagcattttctagatgcatcctaacaaagcacgtggactagagtgcatgagccttagattctatcaacgacattcagatactgtaggaactgatgttgtgaaaatgattatggaatttttttgtctctggtagccttccaagaggatttaacaaaataaatattattcttattttaaagaaaaaaaatcttatgtagatgagtgacttaagaccgatctcgatgtgtagtgtgttatatcgggtgttggcgaaggtgttggttaatcggacaaagggtgttatctcggatcattagagtacattcataccaggaagactaattaatatttgataatattattgtgtcttaagaggtaatgcactatttaaagtgcaagacaagtttgaagatggggtatttggcagtaaaactccacataagcaagacatatgatcgaagtggtatgagatgttgggacagtaggtaaatttggctaaatcttctatttttgtagtctgaatattgatcctatagtgaagcatgagatttattctttgatgagaactcaagaagctgatggcaccaattttatttgggtttgccaagtattttgggacaaaaaagtttattgtgttgggctttttaaaagacaaaatgcaaaaaataattaatgggtgagttggaaggattttcaagagtggaaaaggagaatctattgaaaaaatgtagttcgagctctccctacgtatgctgtgggcgtgtttctattacccctaggcatgtatagggagattgaaggggtgttggttaagttttagtagaaatcttcatctcatctagctaaaggaatcaattttggatgagttgagaacgaatgactgaatcaaaagtttggggagtttggaatttcaaagcctaagagacttaaatttagctatgtttaggaattttttttttttttaatttactcgtatatt

SEQ ID NO: 206952 - DNA, 683 bp, Cannabis indica
accttccttgatgctagcaaaggatgtaggccttcgttggtatggatcagtatctcttggggtaaggagcttcttaagatggggattaggaaatcgataggtgatggcaccacaacttctatttttaatgatatttggatcccaggtcatggtaaaattagttatcttgcacatctttcggatgggatctccaaagtctctgaccttataaccccttctcatcaatggaatgtttcttgcattgacaccatctttccctctgacatcagccaagccattcaatccatactcctcattcccattacctccctcgataccttttattggcctttcacacctcatggtaattatacagtcaattctggctaccaccaagcacatagtctaaactataaacatgacccctcaccctccaacaccaccaacaatcaaacctggtggaaaatcttgtggtcacaatcgattccctcaaaaaccaaacatttcatttggagagcttattatgacatcttgccaactagtttaaatctgcacaaaaggaagaccctaactacatctacctgctgccgatgctcaaatcaaactgaatccctagagcatgctctcttcaggtgtggaactgtccagaaggtatggaagctaacaaatctttataatttcatttcaaaatatattacactaac

SEQ ID NO: 206953 - DNA, 1365 bp, Cannabis indica
aagttattaaatttttatttttacagaaaaaaatagtttaaataaaggctaattaagatttttacccctcaattttgatatgtaccaaatcatgccccctgaacttttaaggtcattgaaaatgcctcatgaactattgagattgttggatttaaggatttttttcttctaattttagtaaaaagtctaacatggatgaaagtttagggagcataatttagtacatgtcaaagttcgaagagcgtgatttggtaaatatcaaagtctggagagcatgatttagtatatggacaatcactgaattagtgaaattaaatgaaattagacaaaagtccttaaatcaaaaaatctcaatagttcaaggaaatttttaagagaaaattacactcacatggaatgttaaaagttgtttacttaaatatgacacttttaagtttggccaatttatatgatatttttttgttttaagtatttttatggtatttgatatgtcacatatatgtaaattagatttttaaagcccatatttaatgtttgtatttgtttaggcagttttatttgtcattgatgtcgaaaaagtcgccggagtttgttgtcgacgccagaaaagttgttgaagtagctgctggtggcgaaaaagttgcggagtttctgtcaacgccagaaaagtcattggaactggcattgtcgccgaaaaaatcaccgaaaaaatcatcaagaaaatggtttcttgaggaataaactattttcttggtgattttttcgatggcaatgtcaattttgatgacttttcccgcaccggcaacaactcggacaattttttcaacaccagcagttacttcgatgacttttctggcacaaacatcaaactctgaaaaaatcgtcggaattggcattatagcagaaaaaatcaccaagaaactgattttttggtgattttttcggcgacaacgccaatttcgacgatttttctggtgctagcagcaactccggtgactttcccaacaccggcaactactctgacgattttttcggcaccgacaacaaactccagaaaagtcgccgaaattggcattgtcaccgaaaaaatcacaaggaaacttgttttttcaactttattgatgaataaaccagtttcttggtaatttttccagcgacaatgccaattctgacgaattttccagcatcaatagcaactccggtgacttttttggcaccgatagctactccggtgacttttctggtaccgacaacaaacttcggtgacttttctagcaccgacagctactgcagtgacttttcggtgccaccatcaaactacgatgcctttttccagcattgttgacaactccggcaatcactgta

SEQ ID NO: 206954 - DNA, 703 bp, Cannabis indica
acattcatgtgttaatatttttgctaggccacatggcctttatcattatatatatgtatagttttacatgtcaatttttgttcagtgtgtaccacgctatgcgtagacatttatttacagtcaaccatttaccacatataagttgcttaaaacattgagtaatgcactaacacttgaaaatttttacgtctacttaagcgagagtacattattgcttactagtccatgtatgggtgtggttgcccccgaagtgactaagtaggttcacctctttgtcacttttcgttatgacttgggtcttacttttatgtattggctgcccattacacctcatacaccattgaccatagttaggcttgcaatttgatccaataacaatcatacaagttgcgtcattatgtgaaaataacttgcaattttatttatgaatgagattggcaatcatgctttattacattactaattggcagtacatttcttaaactaagacaaatctaaaagacaagagtaaaagtaataaaaatcataaatttgcttacaggcatacccatagcctaagtcgttgctaaaaagcaactgctattgataatacttgtggaggtgttggtcgttccaatatcagggtattggtataaggttcatgttagagttgtaacgacctagcttgtacgtattggggagtacaatttctgtaatctcgtat

SEQ ID NO: 206955 - DNA, 967 bp, Cannabis indica
attaaattacatgagatcttatattagggatttatgaattttttttataaggatgactcttagaggtagtggagaacttaggatttaaagtgaggaaggtaatttttttgataagtgggggggacaaaaaaaataaacttaaaaagagaaaaaaaatgcttttaatgggattggaacccttgttctatgctaaatagcttaatattatgtttattagtatcatattttattacaaatatatgttgtaactaactaaattgcatatatatttttttcgattttcattttcaagaggacgactgtcccgcctcggttatatgtgggttcgcccctatctagaaggactctctcttaatgggatagagatttttcgtctaaatagagaacgagatgggaataggtgtacattacaccacatttaatatttttaggtctatttagattcgatctaattatatattggatattaaattttaccatatgatttgatctaattaatttcaaccattcaatcgatccaacattgaatggatgttagattagatcggttttatacattaaatgtgtttcatgtatatctattggtttaattcgggtttatctaatattttagacctactatttattggatcagatcagatccatctaatattttagatccagtatctattagagtatattggattcatccactccaaataaaataaaattttaatattaattttcatatatgcatataactttttacatacaacaacataaattctaattgttcattcaaactaaatgaaaatattaagtagttcgattggatgttgaatgtattaattagattttcagacatcacatccaacatccaatccgatccaattgaatattaaaaatgacattcaatccgatccgatcacaattgtatatccaatgtaggcactcggttgtcatttgattgaatcgatttatgcacatt

SEQ ID NO: 206956 - DNA, 1156 bp, Cannabis indica
atagttgaatagatttagtactaaatcttacacaactttaacattttaaagttctattagagatagaccttaaaataatgacttattattttacgttttaggtaacccaactataataataataataataataataataataataataataatttattttcctctaaaaaaatattatatatcattacactaaattgtttttttatttggaaagaacatcaaattgattgaagcataactttcacttcagtgttccaaattcacaattgctggcctacatccaaaaatcagtaaagttgttagcaatataactattttaatttaataaataaataatgtttatttgaaatagacaatatatagaaatgggattctcagtatatataaccagaatgagaaaaaagataatatttgactcacctgaaaactaattaaactgtcatgtacttaagaaccgctcccctaactttttccatgaactctgctgcttgtttctgcaacataacaaaagactcaatttaacatgatagttttaacagtgtattcaagggaattttgttctgtatattatgttgtatgaagtttaggcatgtaaaaattcaagtacggtcacatgggtccccaaattatttcagatacatatttttttcaaatgattgtccaatactacaatctttttttgagggtcaggaaagtccagagaattacaaggtaggttctcacaatttctttgaaaactagattctctgtctaaggttttgctctggctctgtcattgactataataggtgtcaaaaagtgactagaacctcaagctttgtagagacaaaactacatgtcttactatttgagctaccccttagtgatttcagtaagtaattgaactctgctaattacaaaatttctcttattgcatggtttctatatgcacttggttgctcttaatatgcttcatgcgaggacaggaacaagtaacacatgagtctgagaagaataatgtatcatcggcagcatgaatataaactagaatttacactacaccacttccagttatgtacattctttattttcttttcttttaactagactccccctgcctaatcctaccatatttgaataccgaaaagctataacaattgtatctttcaagtgaact

SEQ ID NO: 206957 - DNA, 1459 bp, Cannabis indica
aaaaatcaagaagttgtattccaatgaactagacaaatacattttatcagcacctttgtaaaataggcctgtcctcaactatacaagatcaagtaaacaaattttataatctctcaaaaccattctctatttggattgtcaatatttctttttttttttttttgaaggtaaaactttattaacaaaccaggaacaaatcaaggaaggtcagctttacaaaaaatagctaaccacctaggaaaagaatgtgtgaaaatatgagtttccttagttgcaagacatttccttgctaacatatgggcacactcattattgtttctatgaacatgaacaatgtttgtacaattagaactatccatcctatcctgaatctggtgtaatatagtgctaacagcacttaatttgttgtccctgtgttggatttcatcaacaatctttttgcagtccgattgaatttcaaaagccatgttggctgtgtgaggttggtgcttgagagcttccaagattgcccaagcttcagccatttccaccgagcagcagctttggtgatacaccataccagctaacagcaagtggccttcatagtctcgccaaatgaagcctgtgcccacaccagcagtgccattattcatggcagcatcacagtttacgctcatgtttccagttgttggccgaaccacttctttagttgctggtgcttcatgtctatgttcataggctgctctttgttatttctcgagtcggggtaggctgtggagatccaatccaacaactgaatcccattcatgactgggagtttgttccaatatttgttgcggttttcccaaatggcccacattattttgatggcttcttcaaactcactcttgtgaagatgatcctttaaagtcaccattatgtcaaacatagatccattcttgaaatgagcacatttgtgataccaaggaacaagtttccaaatggttttaactttagcacaaccccataatgcatgggtgagagtttcagcttgatgaccacacaaatcacagttaagattaacatccatacctctatgtgctaagttgatttttgctggcagccaattatgacaaactctccatccaaagagcttcattcggggaggtaaagacatgctccaaagcattttccaccacttatggatgtcctccatattagagcttcttgtgggatgtaggtttatttctcttccaatacggtagccacttttcaccatgtattgaccattcggagtgtaaggccaagtcaaggtgtcctctacatacaagtcgatcgggattccttgtacccaagggatgtcctcctcatgaaagtgcttttgtaacttatcaatttgccattgtccatccgaattgataagctcatgaagcttagtttgaggttccaactccggttttttgagaagaatagtgcccgaaggcctaggtatccacttatc

SEQ ID NO: 206958 - DNA, 735 bp, Cannabis indica
aatgtattcattcatatctttatctatttatctttctttactatctaaatgagagtgaatatagtaggattaaggtcgaccttgaaaattgatggagtaaggtaaattttgttttatctgcttgggtaaattcataggtaggtgagtttggatattattgggcttaattcacaaaatttcagaaaggataatattttgtttaataacaattgcatacatctgtataagatttttgagttctgagtttgggtgggtcctaagcacagatctaactcgccttagctcaagtccagacttaaatatactctacttgtagagtacaaagagcatcatgtgtaagatatctgatcattgatgaatggttaggatcgtaccctacatgtaaggtaccttaccacaactaatataggatgaagcccttaggaaacttatctctttgcatattataaacattttcattcactttttgcatttattgtgttgtaaaaatattgtattaagtattctattcatattgtgaaagagtaaattgcatcttaattctgcattttagcattggagtaattggtaaaaatagatgtttatgtctttatgttacattgcaaaatgacattttttctttgaataatattctgcaaaagactattttacaaatgattaaatgtttcttgtgtgacattactaaccattttcttatggcttttcaggtattgtgaacaccattcttgacacaag

SEQ ID NO: 206959 - DNA, 1798 bp, Cannabis indica
cttccatgtaatttatcgatgaatttgaggaggcatatataaatgtttcgatacgcatatatatatatatatatatatgaatgtgattggtatggctatggcttttgtttttgtttttgtgatgcttcgaactttaatttgttcattttggtgaccaaaatagttgatcatttggtcgatcgatcatttactcttttcgttgttttgctcttttttatattctttcttgaatcctgaagataaatttgaccagtctggaatttatgaatgtgattggtatggatatggcttttgtttttgtttaatttgttcattttagtgaccaaaatagttgataatttggtctcgatcatttactcctttcgttgttttgctcttttttattctttcttgaatcctgaagataaatttgaccagtttgggatttatgaatgtgattggtatggatctggcttttgtttttgtttaatttgttcattttagtgaccaaaatagttgataatttggtcgatcatttactcttttttattctttcttgaataatcctgaagataaattgtcagtctgggatttatgaatgtgattggtatggctatggcttttgtttttgtttaatttgttcattttggtgaccaaaatagttgataatttggtccatcgatcatttactcttttttattctttaacttgaatcctgaagataaaatgtctgggattctttaaactcttttcatttaaattttggtttactagtactgaacccaatggtaaacataaaaatttatctggaccatttttcgtgctttatggggaaccaatatttgagatccattataacccttcacacacatatataaatttcctcacccaatgtttatttggtacattattttttactattattattattttttttttttgctttattttgtgttgctacgatttaaatagttaaatcaaataataagagtatgatccatatatacttgaattgaacaaacctcaactatatggcatgtatatatatatcaattgatttgaactatatattattagggatgtaaacgggacggggcaagtgcggggattgccccccaccccgatacccgctttttaaattcaccccatacctgccctaatacccgtttgaattaaagcgggggcgggacgggaattacccaacaggagaaggatccccatcgagtacccattacatatatatatatattttaaaaaaaaatgatgtctcaaagagaatattttttaaaaaataattataaaaacttagtaaaataataaatttaagtggaatagtgtgtatagtaaaaaaaaataatataatcaataaaaaacctaaaacatgaagttattttaattgtagtagttatgattttaaaacttaaatatatacatatatcatatcgaggcggcactactacaaaatctacttttggtgtcagtaataattgacacctatacttttagtgtcaatgtataaaactgacacctattctacaatcacaaaaagtcaactattggtatcggttctaaaacgacaccattgagttttggtgtcgttttataaccgacacttaaagtatatacatatgttttttctattagtgtcggtttaaaattgacactattgagttttggtgtcgttttataaccgacacttaaaagtgtttttttggattttaatgtcggtttagaactgaaacttaaagtatacatatatttttgtcctatatccataattttcaaaaaataaattgatatttgtattttaatgacccta

SEQ ID NO: 206960 - DNA, 1986 bp, Cannabis indica
aaataatatttacctttatacaaagatttgcatgtgaacaattttgcctttatccaagtgaaggtatttttaaaattactttacattttatgtatataattaaaaaaatcactatcataaattattatgacaattaattatttataaatacataattattttacttataatatcttaaaatctaattatttatcgaaactacataaaaatattaattagttcgattgaatatcggatgtatttaattttggattatttcatccaacatccgatctcatccaattagatatttgaaaaataacatctccaacccgatccaatgacgtttagatatccaatatttgatggttgattgtaattagattagtaagttatcattaaatttgatcgatttacacacaccactaattatgcaaagcgttcattttttttttttttttgtacaaatataatttattggcttaacaaaaaaaaaaattaataatctttttcttatagccaaatgggaaagcaaaatatatatcaataattgtatatcatcacttttcatgtaatgtaaaggcacaccatgcatgatataaaaacaaataaactcgtgcaatatatgtgtatatatatatttatacctttaattatttttggatgataaaatatactcaagttggagcaaatagagggttttaatattatagctttatcttctttattaacaaagaaagaaaaaagcttacaagttgttgaattatcatcagtttgtcgagaactataccattaaatattagtttcattaatttatacaatcttcaactacttgtactgatcataaacactatcctcgattattcctcgttgatcacaattgcttataatatatgtttatgtaaattaaaaacatgaggaaaacaaaacaaagctaataggcaagaaaaaaaaacaatagaagaacaggaaaagaaaattattagaaattaatgatggaactcatgtgcttttatatttatatcagatctaattgtattcgatccaccttaattaaacaataaaatattacattattaattaatatacatatatggtgcgataattacttgttgtagagaaaaaaaatctggtatatatggtctaattaaaatgtttttcaatattttaatttgtgttttcaatattttaatttgttcttaagtttcttatggcagtgttcatatactatattctgattttgggcacaattattcagaatattttttaaaaaattatttgtaattatgattactatcatttgtagttataacaataatattaattgggaagaaaagataagtgtcgtgcttttaatttaatacttaactactacagtagatctgttaaacttatatccatcttactgtatttgaatgaataatgatatagtacttatatccttccttatcatagcaattaaattttgattatcattattttttgaaagataattaaatatttgttagttgaagttataatttactgtaaaaaaatcttaatttgagtcacaataaaatttgtaattaaaaataaaaaaagttgtggttaattataaattatcattattgtattgtgactaaaaggtccgtaactaaaaatattagtcacaaaatttacaatcggtacgttattactaaatatatttgttgggattaaaattaaattagtgacaatttgtatctaaatactatgttttataattttttgatataactaaaaatcatatttagtcacaaaaaatttatgtcgtgactaaaagtttatcactaaaaaaaactgtttttttaagttgattagaaataatttatcaaattaattttaacggaaaaggtacacgtgtacatgtgattctctcttttggattaaattcagatatcaacatatgtgatcacttaattttttggtccttaattatattaactgtaatttaacataaataagtgtttaatttttacttaatctatt

SEQ ID NO: 206961 - DNA, 949 bp, Cannabis indica
ttttaaattgtttttttttttttgctgaattttcttttaataaaattaaatttaatagcaacaaccaatctcaattcacgaatggctgccgcctacagcctgcaatatgggaacgcttctttgaccgacttggtattttgactttatcatgtttttgtctttttcttaaattttttttctacccttttctctttttttattttaccttctttcttttctttctttttttcgaaagacagtaattttttcatagaagtcacaagaacttttttacatttgagcatggacgttacgtatacgttgacattgacaatgagaccatattaattaattatattatacctaaaaaagaacttattacctcaaaatgtttcagtctttagagaaatctcaataatatatatatatagtattatagtggaaagcttgaaagtgggtcaactctatgtattggctaaaatttatcaaatatcaaagatttgatcttttcattttttccatttttttagatcaaactacaaagactaactaatagtactattttcagttggtaattggtaaatatataatgcccatgtgaacactaaatcaatttttaaaaaaaaataaaagaaacggccgcaaaattggtattaatattatgcaggtgttatatatttttagaaaatatgtataataatatgctatctatcaataaacacgcttttcattttctctttgagctaggatttcggcttaatacttttcttgatgcaagctgacgagtcacaagtgtgcaaaaaaaaaaaagaaagttaaattaatataatagttttgttgtggcttttagttttagagtatatgatttttctcaatattaattattgccaaatattaataaatttatgatgagatttcctttctttatctttcctacttttctatcgatcaaaaaaagaaataaaaaacg

SEQ ID NO: 206962 - DNA, 1065 bp, Cannabis indica
acaattaatatgattctataaaaatgttaataaatatagtttttgaagtgtaatttatatgactttagatattaatttaaaaaaagaatataaataataataaagaaaaaacattaatataaaatatagggtaataatttaaataataaaatagtatgatattacatatacagtaaatgataattaacaaaatactatatatagtaaaaataatttaacattaatgtttttaataaattaaaaaacatatgttaagcaacgatttcctctaaatttaagccttcatccccgatacatagtaagaataaaacttaatttaaaattgaggaaataaagaaagaaaaaattatgtatctatatatttatgactaaatagttatagatgacttgagaattaagtccaatttggattgactaatccagtatattttccacattaatgtgagtttaggtgtattatgtcgatttttttgagtaatatatcaggaaatgtctattgattccttattcctgcggttttgaacacaattggtacattccaaaataatcattacttgggcatgtggccggagaatccgctatttcaactaccacaatagtgtattccatagctccccttttcaatcaaatgatattgagcatgtttctcatttcttctcgataaactagtgggcttttttcgcaaaattgtgctcaattttatatgtggcaattctgctaaaattttgattatattcagccacaaaaccctttggcttgactgccagaaattggtcataaagggaccttatgtaagtgtttttgaaatctttcaacaccaattttttcatctctttccagcttaatgtggctcgctttttaatctcacattgatactgtagtagagcatcccttgaaaatgaaatgaaagcagcctcaaatcttctcgtcgttgtcgtatccatgacaagagaaaaatatttcctcttgtagtatcaatctgtccagattctctccatcaatactcgacatcaacttcttgagccaattttcatgttaagagttgcaagtcttggtagttcatgt

SEQ ID NO: 206963 - DNA, 507 bp, Cannabis indica
agagagagagagaaaaactaaaaaaaataaataaaagtttttaaaggtttttttcttgtattatcattattctttaaataacttgataatatcatacacttttttttgtgtgaatatgaaagtaccttgatgaatcataaaaaaaagaccatatatatatgctcatataagtcattaatagaaagaaataaaaaaaaaaaaagaagaaaatcgatcaatcatacaagtttataatataagaacaaaaaaaaagtaccaaataaaatgatgaatgctgattatttgtttattttttttaatttattgaaggactaatgaataatgattttgaaatattttaatagtcattatggaacttttattatattataattattaatgaatcaaataataaaataagaaaatatatataatcaaaagtgattattgcatgtagatatgcatgtagaagccagccatttattttataatagaagcaacaaaataataaaatagaagaaaatatta

SEQ ID NO: 206964 - DNA, 1517 bp, Cannabis indica
tgtcaaggtatatatatatttttgaagtttgaatttttatttttgagatttgaacgaagtgatgatagtatttttgtcgccccagtcttacttgcaatttttctgattgtaatatggtgattgacactcatatctgatttttctcaaactctgtttttgtaaatttcttaactttttttgaggctttaatgaagtgatgattgtaattttgtcgccccaggcttacttgcaatttttctgattgcaaggtggtgattgacattcatatctgatcttagaacattgatttttcattttattctttgcttttttctgtttaattttagacttgaactgaattatgatatgaagatagtttcttcacagttttttaatgaatctgattttgcaattggagatgaggataacaacccaacatttctgtatttgaatgatgaatactttacatgcatcaccatctgatccatgttgcaaattcaacttttattttattaaattacaacaacctatgatgcaaaagtttcaaatgtactgatttatatgtgattattatcaaacttatcaccatctttcggctgaggttgcaatgtctaaattttctttctttttcctaattaattgttattttgcccatggtatctaatgcccagacttaattatgtgtctgtgcatctcgtttttagggcatatagtgaatctcttacaggtcttgcgacactgattgccttgttattttcataggctttctgttactttttacctgtttacatacttttccaaattgcaatacttagttttatatttggggagcagtgattaaaaagagagatgcttgagtgggattcatgattacccatgtttcgaattcaagggtggattgaggaacaagatgatgacacccatgacagccgccccttttagttttttttgttaaacttaaaaggcaggcttgtttggcgtcagggaaaattcttcctttctctttcattaactctttttctctgaaatgggttttcaccactgtgacagtcctattaatatacacttgatatgagccctttttcggcttaactcttatatttttgcacttgttgattctatatggcgaggaaacaatttttttgtttttcgcccaattgatagtgctgatattaaatgtctggtatctgcctctttgtaaatttttacaaagaggatttgagatcaggcagcggccagacaaccgtagtgatgatttccacagattaagagcctaattttatctctttgtctactaaaagcatctcacatttctagtctttccatgtttacatgtgttttctactattttccgtttagtatccacaagtttcaatctttttcatcaggaaagctggagaagaccaaaaggtattgattctcgagtaagaagaaagttcaagggagttactctcatgcccaacatcggttacggtactgacaagaaaacccgccattatctcccaaatgggttcaagaaatttgttgtgaacaatgtc

SEQ ID NO: 206965 - DNA, 729 bp, Cannabis indica
ttatttattttattttttcattccacaaggatatttataaacctatataatccataattaagttaaccaatataaattattaaagcaatttataaaagcaaaaaataaaggcatgcatgtgcatttgtattacacgttacaactggaatagtaatttacatttatatatataaaaaattaattaataataaaaataataaagaatttttacaactaagagaagaataataacctaatagtataacaattataggagaaaattcttagatactgcctcacttttgtttttatggaacaacattatttcaaattacttaaaattctacataccttttaactaggatgcactgatatatttttatttattttggcatctaaaataattttttagtcaaatttcttttatggttattttcgttataattatttaagatattttacaaaattttaaaaaattcagaaaaatttaatacatcgaaaataaggttcaaacagtgcattacatatatgactattttattttatacgtataaaataaattgtttgaacactgctttttatattgtattttttaaaaaaaaatcttaaaattttatatgatattttaaataattacagcatacacaaatatgaaaaaaaaaatggactaaaatttaaaatgatcttaaaacttatatgctattatatatttggaacacttcgcaatggtattattcatgaatagttact

SEQ ID NO: 206966 - DNA, 1379 bp, Cannabis indica
tataaaattatgtaataattaccttggttttttttttaaatatatatgagtttaccttatttgtgtaaaacttatttaaaaataccatatttatatttatgtaactatgtttaatttagggctagttttttatttttgcattacattcaaatagtttgcattggcgtttggttagatataataaaatagaatagaatagaaataaaataatttttattctattttttatttggttgcattttaaattctaatagaatgctttttccactgttttgatagaatgactattttattaaaatggaaggaaagatcattccaatgtaatgtatataaaaaataatgattattttatcaatttcttttatgcattttaaattttattctattctattcttattctcatattttcattcttttcaagtaaacgtcgtttaaatgtattagtattatatatactagaagggtcagtttctaattctatgtttgtttatttatttataataataaaaaaaaaagctttgaggatattttctctgtttgtaattgtctttcgttactactttccaatagctacgtttaatcattcacgttctaacatggaggatcattacacatcgatgacactggatgaagaagaaactggtggcttgtaatatggggaagatgatgaggaactttcgaaaattgatgataggtggtgtcttgtgggaagatttatcacggatagggaaattgatttcctagctatgcaacataaaatgacctttttatggcgactaggtcgtggtttatatgtcaaagagctagaaccgaacctctatctatttcaattctatcatgaaatagatattggaaaggttatagagggaagcctttagacgttcgacagaattcagttggttttccaaaggttgcgaaggggaaaaaaatcctcgatcagtgctgttgaacaagcttgatttttgggtacaattatatggtatgtctacggagttcatgtcccagcgagtagtaagggatattggtaattatataggtgtatttgttgaggctgatcctaataatttcatgggcatatggagagactatcttcgagttcgggtatcagttcgtgttgactagcctttaaaatggaaaatgaagctttagaaggtgggaaggccggtctgttcggctatttttaaacatgaaggattactaacgttctgttttatatgtggcatcattggccactcagaaaaattttgtgagaaacgttttgatactccatcacacatgttggctagacctgtgttgccttcttggtcggccagatttgtgttgggcagggtctggctgtccttgctcctcggttgctggtgtcggttgtgtgttgattg

SEQ ID NO: 206967 - DNA, 730 bp, Cannabis indica
ctgcataatacgcatccacttagttcggcttctatgtttttaactatacgaatgcatctttgggttatctcttctataggatcgattccatagaccctcccagccgcaagagcgttctcattatgttctacaaatttctctctttcaaacatattctggcaatattgacaataccagtcaccacgaggtatagcaggtagagaagcacattctgcacaagacaatgacttcacacatcaaaactaaatcataataatcattagttgtataattaattataagaagtaagattgcctttctgagatcatatatacagtctacattacattaccctgaactttttttatttctcagaccccttgttagatagatttttcaccttacagttttttttattctatctcttcgtctccttttctctttttcttctttgattattttttaaaaaaaaaaatacatagaattaatgtactaaatttctacagcccattaacttttcagattacaaaagcagttaagaagttcagcataaggaaaactaaaacaccaaaatagcaaaaaaagcaaaaaaaagcaaaacattactatcataatcccaaagatacagagttttacctttgtggaaggcccttgggcatccatcacaaagtacaagattcccaccatctgcacaaatgatgcacaagtcatcattgtccttggcagaatatttgcggcctctagacaaaga

SEQ ID NO: 206968 - DNA, 597 bp, Cannabis indica
ttaagagaatgaaaagacacttttcatttaaataaaaatattattattaaatcatgataaatgataaaagattgttaaattattaaaaaaaaaaataaaaattaagaaaaatgagaaagcaaagaaaatagaaaatcttttaagaacaatgtatatttattttagaaaaaaattgatgtgtttcttagatatacacaatcattaaagtaagttcttttttacatacttttaaatagttctctttttttcttaactgtagagacaaaataatctatcaattaaaataatttatattaataattaggagcagacccacattgtagcaagtgagggtagtaaaaaaaataaaaaaaatgtatatatattttatttagttacaacatatatttgtaataaaatattatatttataaacataacagtaggcttggtgtaatggttaagataagttacatatatgttagaggtaaaggttcaaattccactaacaatatattttttttttaagttactttttttcctatttaaaaaaaaattaactagactctcgctttaaattacgagtctgccattattaataataagttaacttattatt

SEQ ID NO: 206969 - DNA, 702 bp, Cannabis indica
acgacttatcgtgcccttttggtcgtgccaataggttcgtgccaaaatataataaccggcaccacaaataacatcgtgcaaaccgcttgaacaaatggcaccacaggtgtagtgcccacttaaaatccttaaaattgtcagctatagcagtaggcaccacatgggtcgcgcccattgttcattatttttttttaaaaaaaaaaatgtaatttacaattaattgatatttatatttaaaatatatatcaaaaaccaataaaaattacattataaaaatattttttactatataaattagaaatccaaactaaacattcaaataacttaatacaacacttaaaattaaaataactgttgaaataaaatatacttatattgtcacattcatacaataactaaaataattattcaaataaacaatacttatattgttacaaataacaatactataatcctaaatgtgtggactcctcctcctcatcatcatcatcaccattctctccagactggaatatgtgatatttgtggatagtaaggctgcaaagatacttctggcatttgcgggtagtaagattgctatatgtgtgacatctactgcattgatgtcatcggtgacgattgctgcatctgagacgctggtggtatatgttgcatcgatggcatcgaaggcatctattgcgcatatgcggtgtctgctgcata

SEQ ID NO: 206970 - DNA, 614 bp, Cannabis indica
aagactagacaacattctcaccatggttcatcgcatagttgtcatactgtgataagcatctcgcgtatgcctgactcaatatttatgaaagaacgcaagaagtactacttgaagtatacttaggcgttgataatccatttttatgataaagcattataaggatattggttgcattgcgagaagaataagatatagttagcataactgcttaaagttaaaagagtggttatgagaagttatttttcatttattccatgtgatgtaaatgggatacgtggggattaatcacgtttcacgaacggttacaagtgataagattctaagaaaataattgttaccctaaacttctatagatagggatagaacccagagaacaagggacgaccaattagagaaaaagagagtgttataccagtcttttattgtattttgtatacaatttattaaactcagaataaaatggacttgtggactataaaaaattaacttcaaaactacgttaaaaatcctcttgttatttattattattactgttcatttaattcctgagtatatttattataaaaagatttatttattaatttataaaaatttgcgttaacacaagcattggg

SEQ ID NO: 206971 - DNA, 940 bp, Cannabis indica
aataataattacatgtaaaatgactaccattttctagccctctcaaacttgttttttcgaccccagattgctgagaacaaatatctataataattactaataaggcaaatagcaataaacatttagtggtatagactatatattgcttatcaaattcaaaataaatatatgattaattaaataattatcataacagtatatatatgaattatgtaacgtgtggatatgtgtgatcggctttttacgtgatcattaagagtctaagacggcaatcctgtatgtattaattaattattaaggctaattaataacttaatcaaacaatttgtgtatgtaagacaaattcatattagtaattaatagtgggggacatcgaattgaatacgattgctctcaactatttgaccttttctatagcaaatgtcgacgttttttgttaatcaaattatatatatttttttttcttgtataaaaggataagagtgcaagtagtttgattcagcacttatcacaattggataagaatatatgaagataattaaaattaaagcagagaattttaaatttttcgatcagaagagaattttaatttttcattaattaatatatgtgtgtctatatactataatcattatttggttttcatcagaatttattcttccaatttccaagtatcaaaattaaatatatttagaaaaaaaaaatcaaaattaatattataatttatttagcacatatatctttatatataaaatgtgactatgtaacaatttttgttggtttaagagaatatatatgtaagtgtcgttattttgacaaattattttaatagaaagtctagtcgtatatggtgattttagtctgttatgtctgcacacctgcttactgttatagtccgtgtgagtctgttacgacttaacgattggtgttagtttgtgtt

SEQ ID NO: 206972 - DNA, 1930 bp, Cannabis indica
tatttaagcttcttgggtcacaaataaacatctcctcgagctaccatccacacaaatgggcagccagaatgattcaatgggatgttggaggagtatttacggcactttatcaatgccaaccagaagaattggtcgcaactactagatgtagctcaattcggtttcaactctcaaaagagttcttcatcgaacaagagcccttttgaagttatgaatggacaacaaccactgttacccaacacagtggatgagtaccacggacggaatccacgggccttcaattttacaaaagattagaagaagaatacagagattgcccaagcataattagagaaagcatcgcaaaaatgaagaagtgggcagatcaaaaagtcgaccgcttgagttcaaagccgttgacttagtgttgatcaaactatggtcagaataattgagattctgaggggacagggacatcaaactcgtgcgcaaatatgaggccctgttccagtcatctccaaagctggcctagcatcctacaaagtcaaactaccttcttggatgaagatacgcccggtccttcacgtcagcagcctcaagttgtatcatgaagatccagaagatccagcgcgcaactagtctaccagggatgacatcagcattcaatgacgcagcatcagagaaccagaagaaatcattaccgaaagaactgttcgtgtgaagaggaagaagagaaaagagtacctgatcaaatggaagggcctcgctgatgacgagatcaactgggagaaggtagaggacatgcagtagtttttgcagaagactgaagatcatgcaacaagttcttcgaggatgccgaataattaattggggaagaatgtggcgtgctgccccatggcacacccacaatgggaccattttgtaacatgagcatgccttggtacttgatcattattcaagtcttgcaccaagcacctcaattagatggggagacttttggtgattagctttcttttttttatatttccattcacatatgtatagagagctataatcatatatgttcctggaaatcccttgagaccccattaagctctttagggggtgacttactgacttatgaagcaccttgtcaccagcatgataggggccctgatgtgtactcccttgccctatcaaggacatataataataaaacgatatttatccatacttcttgtccatgcttctatattgcctttgtgatgcctatttgttgcctttgttgggccattatgtgccatttgtctatatgtttacttgtgggttgtgtgagattgatccttagggacgatttatgtttgcttgctcatgctttttattggcactcaatatgtgcgagacatgtatcgtgcctaacctttgagtttgtttgcctgtaggcgcgtttaggctgacttgctagctcggtgtgccggcaagtgccgcatgttctgcctacttgggactctccaaatagtcggcttgagacaccatgcatcactcacgaacaacaaggaattccccaagtgtaagtcagcttctgagtctactctccatgctctttggagctaatgcactttagaagagattagacatgagctttcctttttgatcaagacaaaacttcctattcaagctaacttctatatgttgatctgtgagtgtgctatggtccttcgtaaagaagaacttgagactttcattgtagttctttggcgagtttggttcagaaggaataaatgtgtgcacgaccattgtttgatagagaaagagggtgtggttaattgggtagttgactattttcttcgtttctttgaagatgatgtggtagacattctacttcaatagttgtttcagcccctactgcactagctacgttccactggcatgttctttcgttggggacggtgaagctcaacgtggatgcgag

SEQ ID NO: 206973 - DNA, 1055 bp, Cannabis indica
gaaaattgattattagaaacttaattatttcataaacatgttattgcaggatttactgatccactaaaggtgtgctgtggttatcatgtcaaatatgaccatgtctggtgtggaacgaaatcactggtgaatggaagtgcagtgttcggttctgcttgtgaaaacccttctacagctatcagttgggacggcgtacactactctcaggctgcgaatcagtgggttgctagccgcatactcaacggttcgttaactgatccaccaattccagttactcaagcatgtaagagacattaaaattagcaataccggccctaatgtaatcgattcagaggagaaacaaaataatagattagttctataatttgtatcagaaaatgcagtctgcaaacttcaactagattgaaaccagaattttgattcagtttacttactacattttagaccatgagtagggacctgatttctttgagattactctttgcttactttccatataaattaccatgtttggtttatatataaatataaacaaaagatgatataatttcatggtcagaggctcatcatcatgtcatgtcctgtgttacatggaggaaaaggtaataactgaactcccatgtggaatactagctatgagaaactaccagtctcatgatcatgttttcaaatatcagtactaagaaggtgcttagcaagataatcattgtgtaatttcaataagacaaattaggattttaaccctaaacgacatgtactaaatcgttcccttaagctattgagattgttgtattttaagatttccattcacttaaactaacggacgcctaacgtggacagaagtttgaggggtacgatttggtacataaacaatttctacgttagatgtccataagtgaacaaaaattcttgaattcaacaatttcgaggaatttttaaccgaaaagatcagagatacaatttggtatatgtcaaagtgatcataaaatcatagtcaagtgattaacggaaagttgtgaaaactaaaaatttgtaagacaagaacttatatttgt

SEQ ID NO: 206974 - DNA, 1192 bp, Cannabis indica
aaaaatatataaaaaaaactgttgaataacaatttcctttaaatagtaacatttaatataaaataagatataagtactaaaaatatatatttcatcatattatttagaaaatatatactaagtggcattttaaaaggtgacatatggttcttggtacatttcaatattagatcttacacaaattaatgtaataaacaatataaaaaaccactaactaattaattactaagtaacatgttatccaataataacaatgttgatattattaacatagataattacttattaagagagagaggacacatgaaaataattaaacatcttaagaaaaaacaaaaaacaaaatgtactagctactactactactacattaataataataataatatataaatataaatacatttatatttatatttactagtagtagtagtaattatatattaagaccagacccaccagcccaacaaaggctgatcaccatcatcaacctggttgttgtgttggtgatcagggaagacatcatcagagaagtaagttgggccaccatgttgatcatgatcatgattgtgatcataatgggtggcctcatcttcttcatcggtggccaaagacatagacattgtattattacatggtggtgttgagtattggagatcagaattaggagtggttgtagtggtggtggtggtggttgtgtggtggaagtagcaagagtcgccactgtcgagaaggtgtggactttggtcatgatcatccaccaccccactcccgctaccactgccaccaccgccaccaccaccaccgctacccgtgctcaccctatcctcaaccttcatcacacccatcattatctcttcttcgtttcccaacttatgattttccaccccaactcctcctccggcgatctccgccgcctccttcccttttagtttctccatcaatgaagccacctaatattaatatcgaatttcacacattttaatttaataaattatataagaacgtaatatttcaattcaataaataaagagtgcttttttttttgggaatgatgaaatgatgatgataataaaggtatattcgtaaggagagtttttatttttaaagtgtttttctttagttttttttttcaaaaaagaaaatgaattaggtggggttaagaaccaatgttattgtatgtatatatata

SEQ ID NO: 206975 - DNA, 702 bp, Cannabis indica
aaaatatcactagaatcaaactcgaaagaaatattattactctgttcagattgtttttcctgcaagagcaataaataatgatcatacattttaaatacaataaataatcaaaaaaaagtgtcataatatatcaattttctttcttttagaatgaggcctttgtctttatacactaataaaaaaaaaaggtacatcaatgtgtccctttaagtgatttaaagaccatttgaatttgtaaaataagaaattaagtagcagattagcttcataagcctagctaacttaaataaaatactttctttctctcttagactaccaaattagtgctttatttttttttttcttactcaaaattttctctgtttggacatatatatttttatattaacataacagaaatctacaagaaaacaactcttgaatatggaccaatcttcactctttagcccacacaatgacttgattatcaaatttcaaactaaatatttatttgtagctataaggtaattataattccattatatttaacataacataatatattaataatttcaagttttatatcaattcaaactattataaactctaattacctaagtttttattttctttacatatacctaaactagaaaagaaaaaaaagaatgaataatgaatcctatatacaaattaagatcaaacatatcttattaactgtatata

SEQ ID NO: 206976 - DNA, 778 bp, Cannabis indica
acatcaggataaagttgttgggccttcaaagcaatcttgcgagctaccgcaaactccttactttccatcttcttttcagcaatctccctggccctcagggcctcttccttattacactccataaataataaggaaaagctgaacccaatctaaggaattaaattgcttggatgtcgtgaaaacaaaattattacatcagaacaccaaattgcttcttcaacaacatgcccaagttcatatgcttgaagcctttatgtgcatactaaagactctccaccaagaccctttacaacacaaccctgcaaataacatttcccctttacaccaattagataaataaacatataaatatataaatacgtgactctccaaagccaaacatttcaaactctgacagtagaaaaatcccaacacaattaaaaataaataaatataatatatatatatataaaaaaaaaacatggctaacaattttgactaatcaaaaccactccacatagataaaacaatttccattaagttacttaaataaaacgcttttccttcatattcgccttacatgtactaaaccctaggaaaggaaactggatactgtaacatcacagatcccaccattccaaaactgaactcacataaaaagaaaaaaataagtttgagatttaattcatcagaaatagagagaatatgtttgagttgcatgagtaattttctaacaaagaatcttttcttcggtctcacaacctagtaatacaaatactgtgtatatatattgtaaaat

SEQ ID NO: 206977 - DNA, 440 bp, Cannabis indica
ttcagatgtgacctgaggataatcagtgatgcaaatcagttctttattgagaagatattggaacatcatgatttattgggatgcttttcacaaatcgacacaaaccggacagttatagatgaagagaaaagacttagaattttcccttatcatgacttgagctcaccccatgattgcaatctgtgcccatcaaatatgtgcaaggtattagttaacacataaatgtgactatctaatgtctgcttagagtgcattattagtgttaagttattgcgtataacattatatcatatatgtggcttaactaaatagaattggtatgataacattctcactcattatacttttcattgtcttgattgcttgatggcttccgttggggtgatttgaacttcttattagataagactagtcatgtagagggcaattcatggtagact

SEQ ID NO: 206978 - DNA, 980 bp, Cannabis indica
cctagcagcggtcttttagaggatgccacacatcagctctatgcaaactgcaagaatgctatttaggcaagctagtgttgagtactttggtcaccttgtttcagtcgagggagtctcagtagacccctcataagtaggcaaacatggcgtactagcccatacccaagaccttggagagcttcgaggttttttgggttaatgggatattagcgcaagtttgtcaagggatatggaaccattgccaagtcgttgacagattagttgcataacgatgcttctggctggtcagatgaagctcaagatgcttttgtggctcttaaaacttccatgtgcacagttccggtattagccttaccaaaattctcgctccctctcatcgtcgaggctgatgcagggcagttctaatgcaaaacaagcaccccatcacttactacagccaagttctctctcccagagcctgtggaaagtttgtctatgaacaagaattgatggccagcgtgctcgccatacgaaaatggcgtacttacatcttggggcaaaagttcatcgtttgcaccgatcaccgaagcctcaagtattttttggatcaagtattttttacatcttaagaataaagattgtggatgctttatctagagtgcactaggaggagttgtctccagcctccatatcaatccctagtttgatcccatgtggcagctgacccctttttgtgtgaaatagtgcaagagttacaaagggggcatgattgcaaagggtacacactacaacagagatgtttaaagtttaaagggccccttgttttaccttcttcctccacattcatcaatattttactttgggagtactacagtccaataagttgacattcaggggtcttcaagacttcagagggtgatagctaatttaaatgagctagcatgcgttgggatgttcaaaagtttatgactaagtgtaccaaatgacaacaaagcaagtac

SEQ ID NO: 206979 - DNA, 604 bp, Cannabis indica
gtcaacgtccccctcctattagtaacaaaaatgatcaattccgagaggcgggaaatgccaactagaaagattctatggacaaaaccaaattgtgaaaacaaagaagtatcttgaacttcatttctcctcatctctttctcttggcaccagaccctgaaccccgtgcgccttttttctctgcggttccagaaccaccttttcctctgcttgctggtgttttcttggcacttgactttcctgagtctttcaaatccagttgtacttggactccttcaaagatttgagaacccagtgttcagtcatcaagaatatcaataataaaaatgacacaaactaaagattagttatgatagtacaagtgccataacccataaaacagtatgacataccattcctgtttaaactttgaagctccttctgcagcttttcaccaacagcagaatcatctgaaatgttgcaatagaaaaatcagtcttctcagcctcatacatccttaagtacaaagacatacaaagatatctgaatttttaacttaaattaaccctccaactaaacacttggggagacaaaataactaggttaaatgactaatgtaacaactaat

SEQ ID NO: 206980 - DNA, 546 bp, Cannabis indica
agggacctcaagatgccataacttagtccaccatttctccataacctagtttgaggaactttctaccatgatcagggtaaaatagaaaactttaaaatccactatttaccgaatacagacaactgggcatataatgccacactagatcatcctccgcacttgagttacaaggagctaaatcaagtataggtggaacatcatcttggtaaaatttttgttcaatctgctctgagttataggttcctttacttgttttgagagagtatatggtcaatcttagggcaacaatagttttggtataaagagaaaggtggtagagcatggcagctatttatcttcattaattctcattgtcctccctgattacacacgccaacggatgccttcctcaataagctcttttccctaaaggatacttctccacacataagagcaatagcctcctcgtttagcctccaaaaaagaaccattagtgaagtatcatgccttaaggacccgagataacatagaatacaggttgttaattattaaatttagtaagatcct

SEQ ID NO: 206981 - DNA, 908 bp, Cannabis indica
ttaaattttttataaacatgttatattataaatagtctaaaaaaattaatattactacaaatattagttataataatataataacacacatttattttcaaaataaataaataaatacatttgaattttttttcatattttttaattttaaattataaaaaaatagtatttgctctttaataaaaaaatatttaatttaactatttattacttattaaataaattttacaaaaatgtgcgacttaataaacatgttgaaacattgatttaataaatataatatattgcaaaataacattacaaacagtaattataataataaataaactaacattttttcttacaatttttgttagagaaagtatatttgcacccccataattgatcaccacaccccaaactaaatgcaccccatatttttttactaaccccattcaattccaaatataggtcttaaacaatctacaattttttcttagatatatcgtacaccccataaaaaatctaacctaaaacttgaagaagtcatcttttcattttctttttcttgaacgagtcctccatgatcacattagaagtaaactatatctagagtgagagctttaaagcaaggttatcaaatattaacagtcttgtgcatgtgatttagtaaaggtttctctttcattagtaatatatacattcaaaaattgaattaagaataaatgtccagcaaattaaaataattatgatcgtgaatgaatatttttttctttcttttacaaaaaagataagggaagactcctatccaaaagaaaatctattattattattatttataattttctgggatagaaaatttatcttttgtgtgagtgatttttcctgttaatgttttttttaagaaaagtaccattgatgaaattttg

SEQ ID NO: 206982 - DNA, 777 bp, Cannabis indica
atagcgaggtgtttatctcgctataagatggcataacgcgagaaagatcatctcgacactagaaactgtagttatcagaattaaagcaatatcaaccttgggaagttatatgacgagccccagcttgccatcaaagtgaactcgactccattcccagcgaggcatccccatgagataaggcttaccgtatatctttaatatgcattcatctcagccctataaaagcatgatattcacagctgtgtgaattctaaataaaaaccgcatttacgcgtgatttgagggaataattgttgtaaggattcaatcaactttgtaattaactgctcactctattattataattagtggcaagcaagatgagagggggagtaaaaaaatgactcatacaaaaggggcccaaaaaaataatcagaaatctgaataagattgactcgtggactatgcagaattttaactgcaaaaccacgtaaaaaaaaacatgtgttcatatttttacttttatagctttatttttttttctgtgtgagattgtcacaattagcttatattaggttaacgaaaatctgcgttaacagaaagtgaccaagagacttgattgtatggtcacttgggggacactcatactgcataagctactaaacttgcctgtaagttgtccagtcatactttagcttgacaaagtaaatctggacccttacttgtgaaggccataagaatatagctaggattaaagatcgcctggttaatcactcaatccatgatgaaaaagcaaca

SEQ ID NO: 206983 - DNA, 968 bp, Cannabis indica
gtttgtaggtttggccactcgtcttccccagcctaaagatctggtcaagtacgccgagagctgtatgtattgcccttcatatagaaattaccggtgaattatcctagtaatttaacatctgttgtatttgaatccattaggatcctccccactattggactaaattaaatcttaaataaaaaaaaaaatgtcaagtcttataaaattttaaacaaatgtttcgactttttgtatattttgtaatacttgttttcttttttagaaatcaatcagtcatatcgttatatctaattatttaattcttattagtttgtagagtgaccaattttcccctttgaatttttcacaactcgcaagtcccaactacaaacgcgtaaaaatagtcaatattggctattagcattaataatgatagttatctcttctgactcaaataattcgtcatgtgaattaatttactaattgatctagattggatggtaaataagctaaaggatatgatataataatgaatctagtacattcgacgtcgtgattaacaaagttccaaggcacattttctaccaactaaaattaaaatggtgtgtcctttaaataaaaaacaaataaagagtagaccccaagttgtagagccctaacagcagcattaaatcgcgtaaccactatcaacggcatttaataaagaaacctatcaaagaaaacagaggacggcatgtcgttggccttaaaggaaaacgacaaagatcgtgtatcctttatgaggtattcttttttttttctgtccaaattctgttttgtttagatttattttgccttgtatatcctatgtacagtgaaaaatggtccttttgcttatagttagaagtataaaataaataagttgtcttattttttataattattatatgaagatttatttttaataaaaagctttttctaaaagtatttagttattattaaaaaaaaaa

SEQ ID NO: 206984 - DNA, 732 bp, Cannabis indica
tttatcccacgtgcatgtatcccggtttttattttagcaaaaactgggataaaatacccctaaaaatcgggataaaaagcatatttttgtagtagttgcttgatgaaggcaccttggttctgatggactaggtgaggaagcacttctgtcatctttaggcaaataagctttgtaatacatttatacaaagtactacaacatgctattggcctaaagtcaatggcttttgcaggaacctccattttaggcaccaaagataacacagtttcattaagctgagtagggatgctgcctgtttcaaagaactgaagtataactttactaatttcaacacctatttttggccaaagttccttgaaaaaagctgatccgaacccatatggtctaggaattttggagttagggatactgaacaaatacctatttatctccctcaaagtaaagggccaaattagttgcaattgctgatcaagattcagcttgtgaccttggtcaagccaggacagatttattcaataacaggcagtacttgggctccccataaagctttaaaaatgatcaaaaaagtccttaacaacatttgaataacaatcaaccatagttccctgatcagaaatgaaactaactattcgattgtcatcccttcttttcttcagactagtaaaaaaataggctgtgttatcatcacctttgctcagccagtttatcttacttgtttgttttgggttttat

SEQ ID NO: 206985 - DNA, 1128 bp, Cannabis indica
actatcattgtactcagcctcaattccacgatccttgcattcagcattgatcctaagatctttctgtttatgcgcattgtaacgagagaggaaactcttcctcctcaagtttcccagccctacttattgcacggtttagagagcacttgtgttaaatagtgacgcatgttcactgggcaaagggaggaaagtcgatatgcaactaagctaagactattattatctaagaattatatattcagagattctgttgtaagagctataagaaaatgaatcttcttccttgttcttaagtcaatacaaataccgaggattaggctattaccgaactactcggggctgaacctctataaaattcatgtgtcttattattgctttattatatatctgttactacatatcgttttttcgcttataaaatagactcattgtcgttggctaaaagcgaagtcaacatattataataattatgtaaattatgtaccatttgaattaatgtttaaattcaaattttattagatatttaatttgttatgttttattgtacattttaatataatttatattaaatttgtaaattttaaaataaaaattaacttaaattatgtattttatttaaatgatacatgatttaattatttaagattattagatattataatgatagttgttttattaaattaaaaatataatattattatattaaaaagttactcaaataattttttttttgctaaacatgtaatttatatattttttatatttaatacaaatatttatgtctcattttttaaaaaaaacaaatattttttttttctaaatttcatttttctaatttttagttaattattaagataaaaaatattaattaaaaaatatttatcataatgaaaaaagaaaacacaggaccatagtcctattattaaatttttttgaataaaatacagattcaaaattttaacttttaaaaataatgagtcaaaatagaataattaaaatacatgttcaatattgtgtaaattcttgaacaaaacataaatttatttacataaaatttacaatttttataattcagttttaacatttcaataaaaaaaaggattccaaagttaatttttaaaaataaag

SEQ ID NO: 206986 - DNA, 649 bp, Cannabis indica
attccattcgtttccatccgatgatgattccattcgattccgttcaatgattattccattcgagtccattcgatgagttccattcgattccattcgatgatgattgccttccagtccatggattattccattccattccattagatgattccattcgggtccgttcgaagattctcttcgataccattcgataattccgttttttccgttgatgttgatacctttctattccattcgatgataattccattcgattctatgcgatgattccattcctttccattagaagatgattccattcgagaccattcgatgattgcattcaattcattcgatgacgattccattcaattctgttcaatgattccatcagattccatttgatgatgattccattcgattccatttgatgatgattccatgcgattccattagatgatgacccctttcatttccattcaatgaggattccattcggttccatttcatgatgttcctttgaattccatttgatgacaattccattcaatccaattgatgatggtatttttgattccatttgatggtgattacattcgattccatttgatcataattccattcgattccactcgatgattccattcgattccattcaatgatgattcca

SEQ ID NO: 206987 - DNA, 667 bp, Cannabis indica
tcacgtattaaacacatataaaaatatattattattctatttaaaactaaaatactcatctcatttcaacttccacattctctttcatgttcctctcattctctataatctctctctcataaactcaccagtcaccgctactcaccacctcacacttctcattctctttctctgtttgggcagttcctaaactatatgtatatagtttgtttttaacagatctacacattagctttcgtatttcgttgatttttttgtccaaatattgaattttgaattttttacatttttttagttttccagtttcttgagataatttgctatattaagcgatgtatttacaataatagaccaaatttgaggttagggatgaaatctagcaaaattttgcatatttatagcgatgtatttatgatataaggctaaaaaatgtaaagcacatcgttaaacatcactaatcatcgtaaaaaattgagtgtgatttagagatatttagaaatatgtttagcgatatcgcaaaaaatataaaattaactagaaaaaaatatagaaaacgagcgatgggctgagaactttgatgatgggtagggattttggtggtttcgcagtggttaagctcgttgatttcgaggttttggggtgaagacatcgagagagagagagagag

SEQ ID NO: 206988 - DNA, 1017 bp, Cannabis indica
taataaaactagaaacaattaaagcaagaaaatagtaaaatcaacacgccgatatatactagctcaaattttagagactgatgtgatttatgactataattcaattttagaacactattgtaatgtctttattgattgagcggaaataatataatacattataatcgagtttgattatctcaaaatgtttatctttcatatttttaccaaagaaacttcttcatgcaaatctcaaaacctaatctctctcttttctttgtacctctctctctcttcctctcaatctcaccctcgacctcttctcttaaaatcatcttatgtgttattcttctaatgatgaggatgacagtatttatagatctaagaaatgaatctcaaagtcagtggctgcaataactaagttgttaagtcagttacgacttaacagacttaacaaactctttgcaataagatctctacgtcagctctggcgagagctctttggatgagaagcacgcttcctagagggatgtcccaaacaaatgaaatgtgttctgggaggatgttccggatagatacaaagccagttggagcagactatctggaaccccttcttggagggaacaactaacattccgaaacttctttttagaggacgactagcttccttaaagactacttttaaagtggacatgctagacttccaaaattctttttcagatgacttctaacttttcacgagatttattttggagatcttttcatttaggaaaattataccacaatattcttataacaatactatacttgaagtacagaatacttggataagagtatggaggttgtgggagagagaacataactcaattccattgtctaggaaaaaaatattaggttatatatttacctttgaaaaagaataaaattactaacattattattttagtgggatagtttaatctgcaataattccaatatttcctttttaaggttaataattctaaatttgaggtataatgttgaaatgtaaattagggg

SEQ ID NO: 206989 - DNA, 584 bp, Cannabis indica
gtttgagggggcctgttaagggtgataaaattagttaaggtggttaatacagttagttacaactgtcagtgtttaattagactaattacccttatttctcaattgtatataaatagcttgtatctctgtactttgtcattaatcaatacaatacacaattttgtttcaacttttctccctcgttctctctctctgtctttgtttaatcttgacaatacttaatagtatagttatcgtaattttaatatataaatatcataaaaataatttttaatttgaagaaaagttaaattagaaataattaatagatattacttatatatttatatggtattttttcaaatcctatcataaggttcccaagaaagattgtattgcaaatttggaaaattataaccattctaaaattgattttatggactcggatctttaactattaattgttttcagattacaatattctaatactttgttataatctgttagttgctaggtgtttattgtaactaacttttctattatgtgtaaccaactatttcttaactctgtatataaagttaagttatcaatattcaagaaatcaa

SEQ ID NO: 206990 - DNA, 2054 bp, Cannabis indica
ttttttaattattataaaattttaaaattcttaaatttttactatatattcattaatatcataatcataattgttaaataaatcgagcataaataaaaatttattaataacacaaatataattacaatatatagtgcactagtttagacttataaaatttttaactcaattccaattctatcatcatcaactatgaagcaaaaaaagtgtttacaaaatgaaatacactctttaaatcctaaggtctcaacttcaaatttcgtctagtattgctccaaagaaagacttaacgatatacatgcacattctaaaaaaaaaaaatcattgatgaataagcacgtcaaacttgtaaaaaataacctaccatattgcaaacacatcaacacaaaaaaaaatcaaagtttttaattattttaatatcaaataaactttataaaattaaacattacctgaactatactaaagttataataaaatactaaactttttttttccaaaactattacacttacactaaaaaatttctttaactaaacaacatgattacatatattttttctagtaacaaaataaacattaacattaaaattaaaatgctatgaaaaaaaatttatgtatttttactctaatctaatacttttcgtctaatatttatacatttttagtaaaatttatcctaattcaatcaaaattttgacatcataataactataatcggacgttcccaaaaatttcaaacatgtataagaaaaaagaaataaaacgtacacaaaacaaacaaaataacattaacaatacaaaaattatacacccattcgaccgcaatacaactgatcgtagaacctgcttcactacgaatgaatatccaagatattcaaactccactaaataaatagttttaaagttttagtaattgtacatttcgccaataaagctagctacttttgcgttcttcaatcaacaccaaaaactcgatacctaaaaaataataaaaatattaacattgattaaattttaaattttacaactactatcaacttatatatatatgtatcaactaaatatatatattaccgataataaggagtcttttccaaaaagaccgtaaaaaaagtcaaaaatatatataaaaaattcaataacaattcaaataaaagtaaataatctaaacataaaatttttcataacgatttaataaaaaacttaaaggaaaatcaagctaatacttaagtaattaataaaaactatttttttaatacctaaacaattaatataatcgaaactaaatattttttattgcctaacaaaaaacaatctaaataaatttttttattacgtaacaccaaataatctaaactaaatatttttcaaattacctaaatctaaaataaattaaacaattaatctaaattaaatttaaaaataagtattaaataaataagtatatatgtatatgtatatataacagtatatataaaatatttatgaattaatttcaataaataatttaatatatacctaaaggaggtggtgggcgccgatggccaggaggaagacgacgatcgtagttggaaatggtcagtggttgagcaaacggaccaagagaagaaagagaaaaagtattgctggtagtggaactcaaatgggggtttcttggtggttatccttcgtcgatggtggatgccgctgcaaatggggtttctcagtggatgtggatttcttctttgaggcttcaaagggagatcatgagagagaagagagagggagatcgtgggtgggttttgtggggtattgacgctgctagtgtgtgagagagagagagagagagaagagacttaatgagaggaagaacgctgaatgagagagatgtagctagggtttacttttattaattgtcagttataccccatggtttaaaatcgtcaggtataatcgactatttaaaatcacgacaaaacccataaaaccatcgcgaatttcccttttgagtgttctaaaccatcgggaatacccattttttctgacggttataaatagtcacttaatattgttag

SEQ ID NO: 206991 - DNA, 514 bp, Cannabis indica
aatctctttgttatgatctcctttgatgctcccgcagttacgtcgtataaaggttcaaccttaggaggaaagagtgttgaagcactgaactcggggcgaggcactctatctgcctcgccacgagctagggtgacccaaattttagcgaacatgatgcatgacaatgcatcagctaacttatgcgtaatgcatagggcaatggcgtttccgccgcacccaaagatgttgagttggacacctagggcaaattctgtgatgggaaacaattcaaatggaagtaacttacatatttcattagggtttggattcttgagcgcgtccgaaagacgactcggggtagtaactcgggcaactgagtaggaaactcctttgtcgttacagtcgacaaatctgtcgctgaccactctgccggctagagggtagtaaagggttaagacctctgataaagaggtcttaatcttgttggatatttcagtaatatcattattatcatcttttaaatggtagtagaaga

SEQ ID NO: 206992 - DNA, 1449 bp, Cannabis indica
agaaacttagagatactcaaaaagtttagaaaaaaatcagttaacaactgatcaataacatgaataaagcctctgagcataaaaaaatatacaacatgagcaacagatagttcagcacaccaatccccagtgacactcattggaacactaagtcttgaatctccataagtgtgtgaagagtgacctcatgtcgtccagtaagagatgagatcttctggaccactccctcaatgaaacaaaaaaatttttgtgtatatacattggtttttttcatgccttcttttttttttaagaaacactctggctttttctctaatacccagacatggctttcactctcttccaaagatgtagccgtcctctttggaccacaagaactaatacagaaggagcatactacttattagtaaataggtttaagagagctcttcccattacatatggaagaggtagcctttttatctggagaagattccaaattagtatcattcgaagtagcttagaggagatggtgatagaaattacaacacaatgctcaagtcatgtcgttaagtacaagaatactcagagacaaacatatttgaccagatgacactaagaacagtttagatggtacagagacaaatacatgtccttaagtgagtaaaattgtgagtatctaaagctttagtgaataaatctgctagttgattagttgtgggcagatgagatattgacatcatatttgaatcaactagataacgaataaagtgctacctgatgtcaatgtgtttagttcgggagtgctgtacggggtttttagagatatttatggcacttgtaccgtcacaaaaagtggtcagtgtttgctatgggtgtccatgaccagtaagcattttgttcagccaaattaattgagtgcagcagctaccagctgcaatatattctgcttcagcagtagaaagtgagatagactgttgttttttgctataccaagagactagattattcccaaattaaaaacatccccctgaagtgcttttcctatcatctagacatcctgcccaatcagaatcactatatcccaccaaggtggtatttgtgtcacagctataccagacaccatagttaacagtcccagccagatacttgaatattcttttgacagcagagagatgggactgtttagggttggcttgagacctagcacataagccgacactgaaggagatatcaggtcgactatctttgagatacagtaatccatctatcatgcttctgcatagagtggggtctacagggtcgccagactcatctcgtgacaatttggttgtagtgcctataggtgtatgtgcatgttttacctgtgaaaacccaaacttctctaacacagacttgacatactttgagtgtgatatgaatgtgccacgatctagttgtttgatttgtagtcctagaaagaactaaggt

SEQ ID NO: 206993 - DNA, 1247 bp, Cannabis indica
  modified_base (1199)..(1199): a, c, t, g, unknown or other
acgacaactttataaaaaaatagcttccaaaattctcaaattgcgtgccatatccttatcacattaacagaggagagagaaccaataaggggctgtgttagggtgggttaagagaactgaccttgtatgaggagaagggtccatgaaggcgactatggaattgattctctccgctactttgatgggctcaaatcaaaactccccagctgatgactgtgattgctcaacggtgtcgttttgggtaaaagaaatgcgtttaaaccagttgattaaagctaacagcagatcttgtactccatcatcatcatcatccccaacattatggcgggatttggttggaatgtgtagatagtgtgtatgtatctgtgtatattatataatattatctctctctgccattgttgtctggtcttccactctcaaaaagtttgactctttctctctttttttactgtctttctttgttgctttggtgtaaaagtccaattttccctttttctttttcttttgcaaaaatacccctctttttattttatttattttacactatagtcttcttatgtgggatatttgtggcgaaaatttcttgatatttacaattattatacatatgattttaattaaaaagtagccaacaaaagtattttattttacaattttgttacagtcgtaccttcttttgttatcaagtgtcaatttaaaaatacgtaacgatatattattaaactacgcattaaataagctaaaaaaatatattactacatgtttctgagctgagacttaacagacttaattgatacttaacagtcaaaaagagtacgatgaacaataaaataaagtatttttgctgtcaaatttcaagtgttatgggaattttactgcaaatatctcttattattattattatttttttttttgggtattgcttttagattgcatgaattaattagtggtgaaaaaatggggtccctccattatatataaatatatatagggtttgattttgatatggacttgtttggaatattgttagacaatagtcataatccaaagtttcttcattcttttctttttttctctctctcactatcttttacattctatctccttattctttttggtaactctaattttgtgtcctttttctttgtactaccttctattttcaattcttaatctgtctctgtgtgctttgcatntactatcatttaaactctagtaaatatttcattactttttaaattttc

SEQ ID NO: 206994 - DNA, 533 bp, Cannabis indica
aaaaaaaaaaaaaaaattctttggtaggaatatgagtttgcatgcttttcaccctaaattaaaaagcattgatattaaagtgactaatactatattgatgtagcattctataattaattggcaattttttatgtaatttattaaattaaaattaatatgtaagactaaatattaaaatgtacaaataataatataatggttggtctacgttatatgtttaaaggttattatatcctggtttgctaagatcttataagacattataatagtagtttgtgcaggattataaaatgtggagttgaaatagactgattgaatggggattgttaaaaaaaataattaatgagaacagttcattaagctagtgatagtgtgtggggctcgtttagaacctgtataggggtcatgttgtattgtattaaattatattagtataaaaatattactgttacgatatcattcataaaattagggttatattaagttttggagagttggttgcattagccaattaatactctctctctctctct

SEQ ID NO: 206995 - DNA, 575 bp, Cannabis indica
ttgcttgtgcaactgtgtttggggttagtgctgtcctcattttcattacataatgggatacatcattatatgcttaactcaactcctaaatcgaaaatcttaaggtaataaaaaccataggggaaataatcatctggggttgtcagaaaaatgagcaagcttgattttttttcgttctcttttgggtttctttggtgattagtagtgatgtcgtttatggtagttatgtgaaatacgacactgaaagtgttgtcgttgaatgttcatttagttccttcctcattgtcatgacgatgcgggttgggatccagtaacagcattcaagtattattgtcacttaacttaccattgattcttataatatttgacagtaatttttgttactgacaaatcattgctcaaaccatcattctgtataggctaatcatgtggacaatgggtgatgattttcagtatcagtacggaaaagttgattcactatgtcaacaaggtaaaataaatgaagttggcttggctgtgcctgtaataattctcatctgttgtaaattttcattgttgttcatgcacaattctta

SEQ ID NO: 206996 - DNA, 616 bp, Cannabis indica
tatatatatatgttcataacaaactttagtttaatataagtagaacataccatgtgtatagaaacgtatactaatataaatgggaattatttcaatttccataatactgtattgaataaacttgatctcttgactctttttatgtataataaaaaaaaaaaaaaacgtgagataggattctacatttctttcttgattttctttatttttttgattattttgaacaatataacaaaggattccacattattaattagacttaaaaagtcaaaatgtgagtgactgtaccactaccacccaccacagagtgttcgatgagaaattgagacctgggccaggcttattacatggaatgatggaaagggccacaccagccgaccctacgacaagtttgggctttaaaaaacaaaatatatgagataatgatattttgaagacaattttgataaaaatgggatgtttgtgttgggcctgccccctcccctcccccttccatatggcttatcttgcttaattcatgacgccttgagataaggggtaaattgaaaaataccacttttattaatcaattaatcaaacttacttttaattgtatatttaattgaaacatacctct

SEQ ID NO: 206997 - DNA, 1148 bp, Cannabis indica
ttggtgaagaaagagtagtgtataattaattattaaagataacaagtacttactttgccagttttaaagaaaatgagaatcaattgttttttatttttttattaaaggaatcaagtgttgactagttcagtatagccaaactcatagcaactaataataaccatagttcattaccatccaccaactaatgtctgccttttactatctatcttttattcttacttattggtttgaaaaattattattaccaaacaaagcaatagtaagtgaaaacttttttatttatttttaacttttaaaagcatttaagtttcatcagtacagtaggacacgatatccttatttataaaataaataatataagtctgttaattttatattctgatttagttgccaatagtgtgtgtttcaattaaatgaagaaaaaagaaaagaaaaggtacaaggatggtaagcttagaaataaatattttaatgagacaatgaatactaataactatataataaattatattttaatttttatattttttttattaagaaagaaggaattatgtggtgcaaaacagatctctttcccaacccttttagctataacaatcttagaaattacatgcgagccatagttaattaatatacttattaatgataattgatttaatattaaaatcaatttgtagttaattgattgcaacaaaaaaaaaaaaattgtagttgaatgttgattgttcaaaaaacaattgtagttaattgacaaaatattaattatttaatttcacaaagtcacctaatttaattttttattaacattattttagttacataattttattttctaattaattgtgaaatattacaataattaattgtggtgattattttaataaaaatgcaattggaaaactatggtgtaattagatttaagtataattatagtttattacataatttaacataattttgtataattgaaagtaattaaaaaaatatcattttcttgtataattattaattattttactaaattaaatatttaaaatacattcatctcatatctaaacacattgtattttataatacagtgtaattagtatgtgtaaaaggcaccctaaaaaatatcacatatatattgaatatattattggtct

SEQ ID NO: 206998 - DNA, 1032 bp, Cannabis indica
aatggtgctgtgcggtgcggtttttacgggttacactaccatcaataattaaactatcacaaatacaacaaagcttaagcaacactagttaaaaataccataagacttgaaaataaatatgaaaataattaagtttcaataatacaataattagtgggctttgggttggatatttacatattggacctaaataaatataaaaattggtatttttataatgtgcggtgcggtgcggtttgaaccgcatattaacaattcaaaaccgcaaaactgcatcgcatcgcgcggtttaggaaaaatttaaaccacgaccgcaccgcaaagaatttcaaatcatatttttttttgcagtgcaatacggtacggacagtttgaactgtttgatgaacactcctaatctgacccatttacttttgtaattttgagtttcagatattatctctgggaaactatttaaccttaaattaaacaattatatttaattaaagaaacattcattaaattaaggtcatttttaattataaagttttcattaatataatatcaaccaggggaacataaaacacttttataggtattgaagtagcaaatcaagagaatatattaattatatgcacacatacatatatttatatattaatattccaagcacaatttatgaggtgataaatcaacataatctgacattgaccaattaagcatatatttttcctctaattaaacaggttgacagatatataggtagctaagttaactagaataatgaacttacttctagtcaaaaatataggggagaaacacagacaacggactaaagagtaataaagttattcaatttcaaagcggtggtgggcaaactattaaatactaataaaatcaatattatatacgttttaaatttttaatttgttttgttgacgtgtgtaagtgataaattcttttgaaagattcaaagaatttttacagtttttttcactttttttttttaatttttaaaaacaaaaaaattatatgtatatactgaaaaatgaa

SEQ ID NO: 206999 - DNA, 638 bp, Cannabis indica
ccttaggatcatcaaactttctcgaaaagagacgctcctaagcccctgattcttaagctccaaatagcttatttaaatcaaaaatcagtttgtcctacactctttaattgaataaataattatcatcattgtattctactcttcaaatcgagtccaacgatatgttacatgactatatatttgtagtttaaagttttaaaatctcacctcagcggtgcgcaatgacaattggtggcggtagaaattggtgtaccgaaaacgtcaccaaaaataagagtagtatatatcaaaacgaccatctcgatgagtagatcacactcataccaactatttttcaaaacaatacacaacatcgctgaaaagtcgtcaaaaaagggcagagctacaaaatcgaaaaaagtagtgagttgagtgaaatggcttcgtaggcgatgttcttcttctcccgacgctgattccaatggtaccaatcattcgtcaaatggtctcctaagttggtcataatattgattcgaagttttgacagtgaaactttggagctttcatacaagtacatttcagctttgattgccactaaacttgggacgtgaagactttactgatttgtgattgtgcaggtccagtgcatttcgaaaata

SEQ ID NO: 207000 - DNA, 812 bp, Cannabis indica
ggaaaaaatgaaagcctaggaagaaaatatgatatgggattttcttgaaagtatagggaggtgatatgtgggtgttatataggtgaaattttggaaagaagaaaaaataaataaataaataaatatggttttcaaatatgatggctgaagaaagactttataattgtatggtatggcatgggaggtaggtgagcatgagagtggagagtgttagcccacaatacaaaggcaaagggggttagttgtaaacaaatcttgaccgttgatcttgatatgatcaaaggatggaaatttttgctacgtggctttaaacaagtgtggactagagaaaaagttctatatagtgtttggtttggtttgagggaaggatagagggagaggggtgtggttggtgggaattgctagatgaatacataaaggaataataaatagcattttaacaccaaaaaaaaaatgcattttaacaccaacctaattatacacaattttcttgatctagttgataaatatcttcaactcatagcatttttattagactattagttgtgtaatatctaattaattaaattctccaaaaaaaaaatctcaatttttttttagttttttcttttctttcccttttgcaagaggacccattcagctacttgttaatactagtgcctttattgatcaagagtactgttctacttgctatatgtatattttttttttctttgaatagaaatgtattttgttgatacacacacaaaaatatagattagatatgtaggtaatagttatcatatgtgtcaaaatactattttttttttttt

SEQ ID NO: 207001 - DNA, 573 bp, Cannabis indica
ttaaaaataaaatattactaaacgccacctgtattaataattttccaacaagtcctaataacactcttgtaagttataagtagtaatgttgggctactattctaagaggcgaacatttatgatccatttaggaatggtaattttggtttttttgcggtcgagccctgacccgacgaggtgatctttggcccgtaacaattgggtttaattcggatcattgacccgatccggcccgctccgataatagttgtgtcggatcgggcccgacccggcctaattaaatccctaaactaaaaatatgggaaattcatatacagattttcatggtctttttttgtctccatcgttacttgcatcgaagataaatgtgctgtttgtattgctgttgttgtaagctcaaaatctctttctctctattccaaactttagatacataaatgtatttcattgaaaacaactcaaggcattcatgattttttttttaagactccggcctttcaattgcattaattttaatagatttgagagaaatagttcataagttctcaaaatttatcgaacaatagttttact

SEQ ID NO: 207002 - DNA, 1556 bp, Cannabis indica
ttactagctaattggtatggcttttcagggtattacttcttgtttcatgttttcggaaaaagtttggaggtatgctatccgagaaggagatattgggatcaaaacatgtaacttcccttgctttcattttagccatttgaagttttctgttttgtacgcagtacttattgtgtaattatgtgataaggtgatatttgatgattgcaaggtgttatcagaaggaaggattggttcagatatatgctaatgcacatttacctccatccatgcttcgatctccagtaagtcgagtaatttatgatagaatactattcagtttgtcattataaacattttttggatagtatctgtgctgtactttgattgtgatggttatatgaaattctgtttggcagcaaggagttttcatgtcactgtgcaaatataattcgtgtggttgtgaggggcatagtagtgacttgaaattggtaaactcatacccgagaagcatttagattcaaagatgatatgccttttttgtttttcattgttgctaatgaaaaccacaaactaaactacttatttttctttattttaggttgtgcctctagcaacttttatccatcattgtgatgccacatggatgagaacagtacaattgaagaaagacaaagacaaagagttacaagagaacaacttatacagtttattcttatgtgaagggagatcatatgatcagccgattaggaatgttttctcaagtgaagatataggcattgtgttaattggaagtctgcaggtttatactttgacttcatcttccatttctcattttgtacttgctgagagcctcagatgttctcgagtgcaataatgtttggaggtgtaatatatctaacatctgcgtgaatgttgatatatccttgaacatttaggctttgctactcttgttatcatcattatcttaaattgattgcatattgaactactcaataaagttggttttgaaccatcttttttctgtttttgtaactttaacggcggttgatctaatgataattagtgttaatgattcagatttctccatcttccggcagatggcagttggttgatgccactagtagtgttgatgtcattataccagaccttccatcaacgtggaattccagcagtatatatgaggtatatattccagaagtttttgtgattaggccatataatttattcagaattggattgaaaaggttcacagataaagatgtccattttgctttttaagttggttatcttttcaggtggttgactacattcttgttcttgaaggaatgcctcaactgatggattatttgggattgattggcaagccattctcatgcaaaagtgtctttaattttatctcattagctagggcagtaaacttggctgttcatgttcaatttcacctacggagtgcagcatgtagaaatttggtattttatcctcgtactgaattaggagaagatatgggacttgaaaagtggaatttatcatttgcttcatgtaactcataaaatttccagttctgggcaaaggtgtct

SEQ ID NO: 207003 - DNA, 1209 bp, Cannabis indica
aaaaaatcaattgttagatctggtatgaaattttttattgaatctaagtttttttctttataatattttttatactaaacacaaaaatttatttttattattttttacttttcttttcttgcgaaaattcaacttccaaaaacatgaatgtaagtatctaattaatgatatggactgaccagtaaataaaagaaaacaaaatcaaaattttaaaaattaaaagcaataatatatgctcatatggtaacaaatctaactcggtatcgtgcctaaatctgtatctaaatctatagaatctgagctggaacaatgtttttgcatacaaagtttcgtatattatcccatacaaaaaaaaaaaaaaagactttgtatacttaataatctaaaatattattgcatatgaacaagaaaaaaataaaaaaaaacaaaaatacgttgcataagccagggctcgtacctccaaagtttgatgtaacaagaacccttttttcccactttgttacgtactacattgtagaaaatattgcatctatttttagtcaaaagtttatcattttatttatgattaattaatttttaatttaagatatgcccatatattattttaaattatcataaaacaatatattgtcaaataaatgataatatataactctctaccttttttctcaaaaaaaaaaactaaataactctctaccttatttattgatcactatataccatttgaaatagttaacaaaacgcatttgaaagaaagaaagaaaaataagctaacaaaacgatatgacgtatattagggtttagtgtcattttcttatgtacgtcatgatgcacaaataagtatttttacatttatattatatactagttgcaacaacacgtgctacgcacgtgtaatctttttggaagtaaatatataatttttattaatgtgctaaatcagttaaaagataagattcttccttaatagcttgtactgtctactaagcaatttgactccaaactcccacttcctgtcaacggtttggagttttaattcagtatagcatgcgtcatgtacaattaaatgtttgtataaaatataacacaatttttatatttctcattgaatacgatctgaacattttattactatatgcgataaaatctaacataattcatttatatttaacaataggattagttcaaagataatctaaaaaaaataac

SEQ ID NO: 207004 - DNA, 838 bp, Cannabis indica
aaaataaaaaataaattatgtaatctcgcctataattttaaataggtgtgtaacatgttagtctaactcatatttttcatgttttttaaaatatgaattctgttgtatcatgccataaaaaaataagtcatgccaagtcgtgcaacaattttataggatagacccgacatgattcacaaatctagtaatttcgtaccatactcaaattcgcatagttgtttatttgagtcggcttatttttcttaaatagaccaacttatttttttctatacgtgctcaaattagtaatgtatagttttacatttttattatatattgatgagttaaatactactaatatatgtgtattttatatgtgtattttatagcattaattaattttacatattttttcaataattacacataattataatttgaatattattatcattttgattaataaataaatatttattattattattaaattattggacattttaatatattatgctttcgagctaattcattatgtattgtattgtatttaagtttatatttttttttcacttgtcgtgcctaagttatactttttttttatatttcatgcttatgcttctcgagttcatgtcaattttatgtggtatcaaaaaacttaacctatatttagactactaatcaggccgaatcatagcaatagtacatatattttttttttattgaatgggattataatatatataaatttgagtaaataaataattgtatgtatttatttattatttgccaactcaacactatttatttcagatttagatccatcccttaacaagacaaacaacaccgttggccatag

SEQ ID NO: 207005 - DNA, 1353 bp, Cannabis indica
ccatatcatcagggtaagagtgaggctggtgcgagacaatagttgcaggaatggctttcccagccttttgggaagaaagatccatagtaatattctgacacactgcttctcgagggatattaggaattggagggtatgtggcaaaggtgatccctagagaaagtacaaatgtccggagtgaaaacatcttttagatgaaccactgagttaccacgggaagcatttgttaagccaaaagaatgacttgcaggaacagcagcagtaactggaaggtgaacatttgaagcagcagtaactggaggctgaacatttgatgcaacagatggagaaaatgtttgtatggtggcagaagcagatgcaagaagttgattacccttattagttttagaagattctccctgtagaagtggactcagatgagaaagtggccgattgtttaactgtgggattgttgcagtgagggtggatcgtgccaaacgagtcaagagtggccaagcatttcctttagaaaaatccgatctatatcgatcataactagatgtaggcaaatgagctcccttaattaagactctgtctataagccaattcagattcaatcccattatccatattttcaagttggattaagcacttattaaaaacatgtccaattcgtccacactccatacaataatcaggaagacgttcataatggaattccacccaaaattcatctttgacattgggaagagagatcattttccccctcagcagtggcttagtaatatccatacgaactctaaaacgaagaaatggaccccaaccttcaaagcaagaatcctgaaagacttcaatgagttccccaatgagattccttaaagcctttgcaagagattgagtcttactgagaaaggggagtcgataggcctgaacccaaaaaggagaataaatcattttgttgtggagtgattgtattcaatgcagatggtgcaagcaagacaatatggtggccttggaaatgccacagttccttctctaaagcacgaatcttgtcacgaatgcaaccaaaagtgatcaagaataaatcagagtgatgttccgagataacagccttaaatcttccatcccagtgttgagccatcaagttttgcaaagttgacagccagacctttttaggagaaaggattcagaccaccagaactaaatcaagtctttcattcaaatcaggcgcaccatcatcagtaatggccaccgccgatctttcatcatcagttaaagaaacagttgatttcattctgtcaatgaaaggatccatgatgaaggaaaccagacagaaaattcaagcaaatcctgaagaaaactgctagaaatcgg

SEQ ID NO: 207006 - DNA, 2841 bp, Cannabis indica
acctggtacctcggtatttaacagattgggtgctgcccacgatctcagggctgacctgaacagaaggagggttctggacgaacaatacgtccaaccaactgcccaaccaggtatccgcatccaggacccagcactaagggatcctgatgtgactcaggtcggtcaacaggtcgaaccaattcattcattcgtgcaagcacaattggatcaattgaaaaatatggtacaaggcctgaccagctcaaaactcactaatctcgagctggactgagcacgcgaatcacccttctccccaaagattgaagtccttaaattacccctaaaattcaagatgcctacttggaagatgtatacagggaaagaagaccccttatcacatcttaaatattttgagatgtagatggatttgcagggggtacaaggtgatgtgcggtgtagaatattccctgctacacttgcagaggccgcccagtattggtacttcaagctatcatcaagaaggtttaatcgtggaaagccttctcttcagaactccacgcatagttctcctcttcctgtcaactcccctcgcacctagaagacctggtcgagataaaacaagtaccaagagaacccctcagagcctacataagcagattcatgttagaggctacaaaggttaaggggttaaccgaggagggaaggctggccgccatactggggggccttgagccgctcagggaactgtggaaagacattaaaagatttggtcccatggggtccatggcagaatttctgtatcgaaaaaatggatttattatgctcgagtaggttgttcggtgtgtggacataatcaagcataagaaaggccagtaacatatctcctcggtgggggcacctacccaatgtccacaatatcctagtagctcaaatttgagcgggaagaggtctaataacagtggcaggcaaggcaacagaaagaagggaaagttcactggaaatggcaaacacaaccctagaaaaagtgcctcaaagtttactgccttttctgtcttgactgaagacctagagacaatttatgcaacaacctagtctatcaccccgtacaaaaaacctgctcccatgaagaaggacgtaagtaagagagatacgtccaagttatgttgtcttcatgcagattacgaccatgacacaaacgagtgcaataacctgaagtaggaaatcgaattctggatcagactaaattacccgcatttgcaaaagtatgtcaagaccgatcagaaccaaagggctgcgtaaatagacgataatcaaaatctattaatgcctccaccagtagatgggcatttacaagtcattattgggggcccacatccagctggagactcgggcaaagctcgggaaaagtatgctcgagcttacagcacaacaaaggaacagttctggccgtagaagagagaaagccaaaaatccaacgggtagggaacccactataacttttactgaagcagatgctattcacatccacttcccacataacgacccattggtcgtggaagtacaaatagcaaacaaaacagtggcccggactatgatagacaaaggagcctcctcaaatatccttctagccagagcgttgcacctctagggcaaatctgtctacccctcactgttggacaagctccaacgagcataactgtaatggcacaattcttgataattactgtcccatcagctttcaatgtcatgttaggccgaccggccctatatgacttaaaagctatcacatcagtttttcatttgttcgtgaacctcccaacaaagaatggggtagggtgcctcaaagggaatcaaagagtagcacgggaatcctataaccttgccctaactaaggtcaaaaaggaaaattcctccggccacttatttgaaaagcatagtaatcagtattgtgtatgtgtatggttggaaatgcttattagcattgatcatgaattgagatgtactaaatgatggaaagttatggtcgcaggtgtatagatcatgcacctgaggcgatttagtaggggtaattgtgagcttgttgggctcggggttagcggtgagggtgtgaatcctgcaccaccaccaaattgggaagagttgtatgccacgatgcaggagaccatccaatagcaacgcgatcaaatccaagaactgagggagcagcgagctcaacctgttctaaatcctaatcttgatcctgcggcacctcctgtagtgccgcaagatacgggaaatcgtctggaaccattgtatgagcagtttaggaagcagaatttgccagtatttaagggtggtgctaatccacttcaggcagagcaatgaataagcatgataacatccatttctgagttcatgcgagttgagggtaatgatcgggtcagatgtgtcatttacatgttgcataaggatgcccacatctggtggaaaattgtgttataaggtcatgatctcaataacataacctggaatgctttctggaccttgttccatgaaaaatactataatgaatctatccgagcggcaaaagtagaagaatttatatggatgacctagggcaatatgacggtgacagagtatgccaccaagtttggccggctggcaaagtttgcctcaaattaagtggccactgaggcggctagaaaggccaagtttatttggggattggaagaacatatcattgagatgtaatactattttgaaccatgtgttttgtaaaagttattaattgaagcctctgttttataaaatgataaattatatcctgtatttttcaaattagtactaaatagtatcttggactgattttttgtcaaactaaaa

SEQ ID NO: 207007 - DNA, 615 bp, Cannabis indica
ctgattcacttatgctaataacaaggttcttacacttaattgatgcagatgcatcaatattcccttttcagtaacatccaaattattgcgagacttaagaattaaaatcaagccttcaagtcatcagaccataactcaacacacatcacgaaagcacaaacttccatttttttattattattatttcaacaagaaagatagcacaacattgcacttagatgataaaaaaaaaagtttctggatgagtatcaaagcaaaagtgaggattaaaaaatcatcttttcatttggcatcagatactaaaccatctagataaaatgtattttgacactttttatagggtcaaaggtgaaagtaattcttaaccttgaaaactttgttgacaatttaatctgtaacaactttccatagtaaattaataaacaatggataatactctaattctcccacacagcagaattccaagtcaatattgtttccacagtgaccagccatctttcaatacaaattgttaatgtttcatatccaatcatttagcaattctttccatctatgcaaacatagagctagtgacttatgcaaagcactcacaacccagcatcctcaacctgcgta

SEQ ID NO: 207008 - DNA, 907 bp, Cannabis indica
gttgttaacttaattttattaataagaaaaatgaaggaaatcaaataaggaataaaagctaaagtgtaattaaggaagaaaaatagaataaaggtaaaaaaatttggagaaacaaaaaggtacatataaggtgccacatgtcttctattttgaaataaatttttatttttcttaggaaaaatatatttttttttatttttcaatttagttgtctgtataataattgcgatactaccaaaaaaaagttatatatttagtaaacaacattaataatttatcaatagaagatctgatttgagtaaaaattgagacatgctaaataatataattttaaatttttgtgattcagtctctgtctagttgtcttaatgatattttgtaaaaatagcctctataaaaatattttattagtaaaataattttattaacaaaataatcttatatgtgggctatattcatatttttccttattaaataattggaaaattatataataatatacataattaattatattttttttaattatatttttccattatatgtttgatttaatgatgagaataccgtggcttataattttccacaaacaaaactgtgactatacgtctcccttgtatgtatgtattaaaataatgtttatatgtaccgtgacttatttttttttttttattttttagagaaaattcaatgttattataaattagaaatcatctacaacaacagagaatataggatagggaacttctcctatccaacaaatgtcatcatccaaccctaaagagaattaagctagaccatgtgctgcttgattagcagagcgttttacatgggtactaaaactgaggaaaaggacaaagacaacgaacatcataatcagatcagaaaaacaaagataaatacctcg

SEQ ID NO: 207009 - DNA, 734 bp, Cannabis indica
ttcttctcacctgatttaaatcgaaccatatcggactggacatcggacccatcagattggacatcgaacccatcagacttacacatatttaaattttaaatcaattgaaggatccatcggacccatcgggccttcttctttttcctcaaaatttttcaatttcacagatccgacataaatgtttaacaaaatttcccttaatctaacaaaatttaagtttcacaaacaaaataaatctttaacactttcggacccaaaaaaaacacacatttggcattgttatggatggcgtgcaccgtgtgggtcgtggatccggtcgtcgattgcctcgtcgatagggtcatgggttcggccgtcgattgggtccaccgtgggtcaaatggggtgttgcaccgtcaccgtgggtttgagcgtggtttgagcgagagggagagagagaaggctgattggtttgggatttcaaatgtgaggggtattatgggaaaaatggtaatgtggtcatatatggccaattttaatacatatggatttacggaaaaaaatattaaggtactttatacatatttaatcaaaattcttaaataattattgtgttgaaaataaaattcaatcatttagttactaaacttaccatgaaaattaattattttaaaagttattttcaatattataaattatttaaaattttacgaacatattataactattattatagacgaccacatatgtatttt

SEQ ID NO: 207010 - DNA, 1747 bp, Cannabis indica
gatggaggagactcccaagtagcatccaactcccctctttgaggcaaggcctctagaggcgccaactcttcctgtccatgaccaatccctacacgggaaggctctccatcctcatcgagaggctccatggactcattgtatccccctaaggaattgcctgtgataacatcagagtctttaatggcctcccaacaagctgctccctctttgtaggctcaacatgcctctcaacctgaccagcctgtgcaacccaacctatttccattaacttgacaatatgaagatcactggacagagctacacggtatggtttttttttttatccaagccaggttctgtctttggacggagtatcgggcaataataatgacagtctcagcctgcaaaggactcttggccaaataaagaacactcccctggggcaacgtgtcctagaatccttcctagacaatgtttgctcagaaggttggcaaaaatctcctccaaccacagttcagttcccaaataaactgactgtagatctccccttcgatccgctcggagtggtggtgatgttatgtctctggttttgtagaaccactactgacgtcaaggttaaaaaagctcaaagaactatttgaaaaatcactagatgaagaaatatttggttagagtgcaagctgatctttgtaaattagactaagaagattcgcatcgatctagtgttcacctcctcagtagtcgtgcatgttcatctatgtaaaaggcaagagggaggtgaatatccagacaacctaaaaatacgtggacaacatataactaatcaggcaaggtaaaacaactaatacaactcaggcaaggtaataaatggattaaaataacctattctatcgtagagaagccatggaatccgagttcttcgtgttcttcaaactcaaaattttgaaagtgtaaaaaaaatagagaaatggtttagccttttcaatgaaaaaccctacatccgtctactctaaggaaatcgtacaattcgtagaaagtaagtgttcctaaaacctcaacttggaggtttctaactccaacaatgatagaaaaaggaaaaaagttcttaaaaagtagagctttgaaagacttacccactgaataatgtttggaaagtaagccgaggctctctaattttggtccacacggcgaagaactccacgagaatagcaaaagaatggtgtttgtgaagtgtttaatttctttttttgggttttgttgaagttttttatctctaaaaatattttcttaagagaagagaaaataagaaaataagatgagaaggaaaaagccattatataggctttgaaataaacttccctcccccccttccaacccaaaaaaaaaatattaaatggaaagttaattctcacaaaatttgcatgggggagtgagaaactcaaaggatggaaacgcggagagtgtgcatccgtcagcacgtcttcccatgatttatgtgttggaattttatgtcctaaataaatctatttcaatataatcagatttactaattaataaaagatcagaaatctttttatgttacatagttcacatgattgctttcatgattatatggttaatgtataaagtctattaaatccagaatatatagttattcatgattatagtattgtctacacagtggaaaataatcatgattatatgttttcaaagtttcagtctcatgatttgtcagtacactggatttacactaacatgataatcagcg

SEQ ID NO: 207011 - DNA, 774 bp, Cannabis indica
atttcacaacactcgaggttttatgatctggtttctgatgttaaattttatttttcctaatagatataaaataatataattttaaaaaatggttaaacaaatgtgcataatcttaaaaataaacttcttatttatttatttatttattttaatttcattgccggccactggaataggtgcaactttccctactatgtgtccaaaatttgaccattttgaatattaacatattacatgtagatattatatataatataatatatatttaaaaaagttggtgtacatattataaataaataaagatttttcttttctccaaagaaattaggtgagaattaaagactatatttattgataatgaaaatgtaaaaagagaacgtgataacataagttacatgatattctgattaaaaaaaaagtgggttttttcattaatgtacaacaaaaataaatatattacaaaaattgtacaaaaaaacttaattataaaaactcatacattttaataagggtaagttgaaaaatgcctcttttattcatcaattaatcaaatttacctctaattttatatttatttgaaacatacctcttttaatatgtattgtacccaaaataccctgacataagagaatcacatggagggtatcttgaagtgacaggggcaaaattggtacaatatttaaaaaaagaggtaaaaatagatagatttaaaaaagaaggtaaaaataaaaagaaggacaatataaaaaggtaatagagtgtaattctctttaa

SEQ ID NO: 207012 - DNA, 873 bp, Cannabis indica
gcctgaattgttcaatttcgatcatcatcatcacggtgacgaaggttcggaaggatttatggtgtccatgtcaagattaaggcaaagagttgggaccattattatggaacagtataataatcacactatcattctccacgagtttcttgaatcgaaatccgccatggaagagctcaaaggggagcttgaaagaatagtggagtttgatgaagtagttgatgatgatgatgatgatgatgatgaagatcaccattatatgataatagaagagagaattgatagattaagaagaggatttgggttgctaagaaatggtgttgagagtataattggacaacttgatgatttctttgatgaaatagttgaaggaagaaagaaacttttggacatgtgctcttctcatcaccaccaccaccatcatcataagtagaaatatagctaagctataataatattaacaataatatatgccctagctagctacctagttagagatccagagaaaatgaaagacaacaaagaattaattattttaggaagcaaaaaaaaaagaaattaatgttcagtttctttttctttttcagttttgttttttagtattattatttttttcagtatttttaattattatgctgtttttctttttcttttgacttttggatctcaaaggttggcagctagagcagtactataatagttatgaaagtttttttttttttttttcaataaagcactaagtgagaaatccaaaagaagagaaattatttaattaactattataattattattttcagaatatgattcttttgtatgaagtagcagaagctagataatatcattacattattactattcaaaaggaaacgaaaagg

SEQ ID NO: 207013 - DNA, 790 bp, Cannabis indica
attttattgagagaaattgaagcagaaaaatgtgtcaatcgctgcagcaaggcttattgtcattgtgacaagattttgtcatgtgttctcatcacggagaggtttgtggttgtcgcagtaaaaatttatggatctaaaattatttatttgagaaactgtagtcattgcggtatggcatggtgtcaccacagtgtcgccatcgtgtaaagtgggacttttttgtcttttcatgtgtttttggctgaaacttatgttttaaaagcgagagagggcttcaaaataagggggagccaaaggagagaaataaaaccctacaaaagaagaagaagaatagaagaagattggagctagaagttggcgacccgtgacaatcccaagctagtttcattctcattctcttctattttttatgtttatgatgatgtttagtttgattatggatttaattatgagctaagctcctaatttaatgatttaatggatattatttgagattatttcatgagttaatattagttaattgttctttcttttttggttgtgatttgtttatatttgtggttattattacatatattattagccaccttatgcatatttggaattcttcaaatgaatgaacatagattttgatatgaataacttatgtaatttttagattattgcttaatataaattgtttattgtactaattgattaattgaattgtgtaaaagtcatcatttattagtacttgagataatacttagtagtcattaattgtttatacacaatagttattagttataat

SEQ ID NO: 207014 - DNA, 807 bp, Cannabis indica
atataagatgcatgagctactctgaccgagtatatgacatttgaatatatgagaaaaaccaattgcaagagcctttaggtatgcaagagagactagccaagacattgcatacccttctaattcaccttaatctcttatattctaatttcttctcaatcaccatttaatctcttgtatcctattctactaacttggggcttatcatacactactcctaagcaattggttctgagataaaaccctatacatcttatcatacatctcctagcccatatttcatattcatattcatattcatgccttttgcctccatcagtaggagggtctttgtagacaaaaagtgaagacatgtgaagataattttacttagtaggtacaaagaatggagagatgtacatacagtttagtaatgtggcagagagaaccattgttgaaagtgcagtcgcatttaataaagggattcaatgaatcattgtcttcgatgtcgatggagtcatctatggcggaaccactgcatggttctccacttatgttccactttttagtgtctgcctttatcttccattgctcaaacatagagttcaaagctctcactgcaacaaaagtactattttcataattaagaacactttttttatgtgaagtttgtgataatacaaatcacaaagtagaaaaatgaacaaaatacataaattgagagagacattaagatagagaagaagaccttcaaagggatcagtagtgggctgatcatgagttctattttgagctattgttgatgaaacattgataatagcaaacaacaca

SEQ ID NO: 207015 - DNA, 948 bp, Cannabis indica
aaaaaaaaaaaaagaaaagatgatatagtatatattatgaatcatcattacaaaattcaaatgcctcataagtccatcgagctgcagatggagcggttacatacttaaccgtaccaacagtgtcttcagagagaacattaatgaagagctacgtcatattctgcctcagacacgacacatcacgggggcttcgattagtctctcattctaaggactcatctttatagatgtcctacaatttatttatcaacatcttaatatcatctctctgcatattttcctctttacacctccatggctttgaaccaacactatcaatatagtcatatgtaatgtgtaatattgaaactaaagactaaagaccaaatttttggaaggttcaaaaaggtatttaaataaatattaaaggtcaaagttttgtaaatcatcctaaggcatccttaatttcatatggtgttgatcatactgcaaaaaaacataactaaatttttttttagtaatgtataacaaagcataataaatcaacatatcattattgataaatttataaatgtaggattataagtggtttaggttatataataagaagagatataaaattaggttatattataagaagagatataaaattaataattttttatagaaatatatatagcttataataaataaacaataattattattttttatataatatattattttgttaaatttttattgaaatttattttaattaatattattaactaaataaaaaattaagaaaaaaagagaattaaagagagaagaaacaatgagattaagggtcggtttggcacagttgtgctatgggaaaaagcagttgttgctgtgctgtgagaaaaagaagctgtagcaaaactgtggtaaaaaactgagatgagtgtttgataaattttaaattttaaagtactttgagctgttaag

SEQ ID NO: 207016 - DNA, 1006 bp, Cannabis indica
aaatgcttcaaaaatcacaccttcgagcgagtttttagatagatccaaaacctccaaatgccttaaattgccaatactttcttctacttgtccatgcaatcgatttgagcccagtctgagctctttcaaagatgagagtggtgtaacattgacaaacattgtggtgatttgattggagcttaaatccaaattctccaaagagtaatgtgcacatgacctaaacgacaattcactaagatcagggagtgctcccctaagattgttatcggtggcatgaaatgatcgtagtgtacacattttccaaaatgatttgggaatttcaccactgagattattatagctaagatcaagatgttctaagacagtcaagttcccaaaatcattaattccaaaatcttgtggaaatgaacttaacgagttatgagaaagatcaaggtgttctaagaaagtactcaagttcccaaaatcatttagaatagaattttctaaattattatagctaaggtcaagatatgtgagtgacaccatggtagttttaaaactattaggaataataccttgtatttgattccaagaaagatcaaggtgttgtaaagcagttgttgtagaattaattccaaaatcttgtggaaatgaacttaacgagttacgagaaaaatcaagatggactaggttgggcatggagctaaacaaccattggaatatatgaatagatatatcattctcagaaagatcaagaatggaaagagactttgaagagttgacatgagaatgaaatgaaggtgatatttcaccaagatgggaggctcttagcttcaaattggttaagtgatgaagtttattgcctaacaatattggttggaacacgtttttgacttcacttaagtctgtataacttaagtcaagatgtcttaaagaagaaagggtagaaacccaatccagattttttataatcaaatcataattatagcttagatcaagatactgcaagctagaaaggtttcca

SEQ ID NO: 207017 - DNA, 1032 bp, Cannabis indica
gagggtcatgaactcatggggttggggtttggacattagagtaatcagattcagaagaagcccaagttttgatctgtggctgccgaagatcttcgatcattttcacgacttgttccatggtgggtcggttctccggcaccttggacacgcaagccagagcaatttgaagcatttgaaccatttcctcctctacatggctctgtctcagaagctccacatcaaacacttctgctgtccattcctcacgaaccaccgatcgaacccatctgggcaagtccaccacctcgtcgtgacccggatatcggattgggattttcccagttagcatttccagtaggaggactccgtagctgtaaacatcagatttttgggtgagttttcgggtttcgatagcctccggagctcggtacccgatgattcgggagattattggagggaagttaactatctgggccaaccccacgtcggttatggaggcttcaaggtcttggttgaggaggacgtttgaagacttgatgttaccgtgtatggatttgggtccgccgtcggagtggatgtgagcaattcctttggcggctcctagagagatcttaactcttgaatcccagttaagagggtttctttctgcacctctgaagcctgcaaaatttagtggaacagaatgatttggttatgttttgagatgttactgatagttgcttgatatgattataaagtgtttgctgaaatgcctcactgaattcctccttatatatttatggaacattacactttaagttgactaaagaaatgcatgttatgtttctggagatttcttaagaagtaaaaatggtagttttccataagattgagggccaaaagcataccatgtaagcttgtaaataagctgccggctggcatgtaattatagactaagagcttctcgtcctttgaatagtaataagcacgaagtggaacaatatttgggtgatgtccgatcctttctacaacctccatctgcagctcaaactctctttttcccactattacttc

SEQ ID NO: 207018 - DNA, 993 bp, Cannabis indica
aatatttaattttaataaattaaatttggtgaaattatattaggttttgaaattgaaaaaatatattgattttttataaaaatcacatttcatatggcgtcaattttttcttaataaccaactctatagggtcctatggtgtcggttattgtataataaccaacgcatacagcgtcgcctggaacaacttcagtagcgaattttgcaaaaattgacgctgaaataacttaaaaactacctccaaagtccaattttgtagtagtgtaaagagagaaaaaggagagagaaaatagtttttgaaaagaaatatctgaactaaggtggaatgcagttcaaaaattagcaaccgttcataacttccttttaatcgaggatgaaattatcaaacgaaaagagaaaaagactggaaaaaaaagaaaattaaggagaagatatatatgttgaagatgatgaaaacaaaaagaaaaacaagagaaagaaggtcgaagaacgcggtaacgtgtttaaattaggaaaaaaaactaataatagtgacaaatgtcactcaacacagtaaaaaaagaaattttaaaaaagtattatagtataaatgaaaactgtacacagtataaaagtaaattatgttgtaactaaaagtaaattatgtcgtgttacagtataattgaaaaaaaaagccaaaataaagtatgggatgtaaattttaattttttgttccattttttattgtaattgtgttgtcacacttgtttaagttgtcttctatgataattccaaaataaaattttaaaaaaaaaattaagaattgtcatttatattatgtggaaaaatttacaatgcactttttaaaagagatttactgatgcactcccatttatttcagcatctaagataattttttagtctaattttttttcataaacgttatagttaattaagatatcttgtaaaattttgaaaaattcaaaaagatttaatacgacaaaaacagagttc

SEQ ID NO: 207019 - DNA, 641 bp, Cannabis indica
aatgattatacatactaaatatatgattactataattaagtatagttaaatcttaatttaatttaatttaatttatacaggactgtaaatgataaaatatactataaaaataaaatataatgtaattaactaatcgaaatcatctcatcttatatgacaattacgtaaattttggccgtcacttccgcttcagtatagcaaaaatcgaaaccaaaaggctttcgactagcaattttggtgaagcgattctgccattgacgctggctgagaatgtggaggaggttcaatatcaaacaatcaatatcaatatattaggaagcgtttatttgggaggagaatgaatataagaataggattaacaaatgtgtaagaaaattgataaaaaattattaaattgtagaatgtttttcttttattttaaaatagaataacgataatagaaatgacattaaaaaaaaaaaaactctaaattaaaacgttgatagagaagaggctcattggttctgatcatttactcctttcataacttaagtcatgtacacgttcttacgaaaaatttccttaaaatatgaagaaactaaaaaaaacattagacgatcgatgagaagaataaaatagtaaagatgatcggtatacacaca

SEQ ID NO: 207020 - DNA, 1116 bp, Cannabis indica
gagtcctaatgggtcataccggggattatgatgctgttaatgtcttataaatggcttcgagagtattcggatcgtgatggggccgtacggggctaaccgggtccgaatataaccgggttgtacttgactgagaactgggtaaggattcaattttggtgtagtaatcggctatgaagtcgaccatttggtgggcttgtttgcgaaattcttctacgtctaatattggtttgaaatcgtttgaagaagagtcatgatcacttaggctacccatcttttcaagaaaaactaaaatacggtcacggggacacttatagctactcctattatttgagatttatagagcttaatattggaacttggattttggaatctatgaaaatggtccactgaaaatgacaatatatatatactatatattctagtttcagtggtatatataaatatttagtgtttcataatatatttttttagtagatggaaggtatgtataatatagtatacaacacagcttacaaattatgaataatatataagaagaatagattaaagtttaaacaagagttttaaacgtgtatataaatatgaaaagaaaaatcataagggaaccgtgcaattcaatatgaattttacctttaattaataaataatttaaaacaattgatgttattaaaaatattattttcacatattttaaatttcctaaaaatttatattgatttttatgtaatttatattatttttaaatgtggtttatattggtgttagatagtcttttctaatacctattattttttgagttattgttttagtttttacatagaatttcagtagtataagtcaaaactttagttgttttggtaggattcaattgggctctacatattcatgtagaatatcaattagctagagaaatctattcaatttcattttttttttttactatttgaggatgttatagctttagtgtttaaatttttaattatggtagctttgtttaacgtggctcgcgataaaaattttacagctcatgatttgttaaagcataccattcggttgaacgatgagctatcctaattcgaagaggtttcaccaacaattataaatagcaacattatt

SEQ ID NO: 207021 - DNA, 629 bp, Cannabis indica
tacaataatagactttagagggcttatttttgttgaaaattaaaataaaggacaacatagagttattaatttattgaaaagttataaattttttatggcatcagtcttttggaaataactgacgccataaggtgtgcccctatgctatcaattatttttaaataatttacaccataaggactttataaccctcctcagccccttgttttcttcattcgatcagtcaacccaaaaactcctaaatcagagaaaccccataccctctccaccaaccacctcgttaatcacctcccatttcaccatttttttttaccatttcaactcatttttttaaattttatattttccatacccaaagttatatactcgaaaagatcacattttttatcgtttttaagtgtaaactgaaggtagagatagtggttgtggtggctatacctccagccacaagttagaataccaacttgattaggcgttagtttaacggttatttaccattgagtagtgtaacttataagcctttcatggactccaagaaaatgggatacaagtgtaacaaaggacaacaatctaacaggattgaagcttttaaagaagaggtgatgaaacaacaaactgagcctctgcag

SEQ ID NO: 207022 - DNA, 1209 bp, Cannabis indica
acgcgaagattatacgtaatgatcttgacaacttaccgggggaattattccataactttgtccttcccagtaaggtacattgccgccatgatcaatcacgacatggcaagtctctccaggtgcttttgggcccactatcctctcaacagaaacaatggttgctgtgtaaggttccttaggcttgtgtaaattcaacgggggctctttggcatcttcaaggtgtaaaggcgaaacagcgaccttaggcgcggatgcttgttgcacagacatacacagtacttttcgatctcttgacaccccattctttgtcttgaagttcaaagataatgtaggtgccaaagatttatcaggaaagtttagagtattggtctgcaaaacacaaataaaacaagtttttttttttgagaaatcatcaactatataaaataacatatacaccatggctcagattatattaaattctttatggtccaacctagaattcatttgtccttacacaaattattaattcatatggattttgtttgagactaatgaccattaaaatcattatagaggaacaactttaaaaagtgccatcaaaactaataccactgaacatgaatagggaaaacaatcaatctattgtaaaacaaaacagacaaaaatatccaaaaattgaatgttttcaattacaaaatcatgttttgtccaatctggaaaacgacaggtatttgtccatactagattacaaaacccttcaattgaaaaaaaataaaattgatcagcaaacaaaccttaaacacagatcgcttaagggagcaatcacttccaacgggaacagtcacagaaaccttcaaaacgaaacaaacccattaagcaaaagttgatttggatatgagaaaaccaataaagaaagaaaaagattaagactttgctcaacattctcgagaaccaaacaaagggtatctaaaaagcaaagacaaacctgagagagggtggaaatggagtgagccatggcggagaaatctagagaaagagaaagatattgggaaggttgaagagagtgaagttaatatagttatagggaaggagaggagtagctgattaggtgtgttgaagagagtgatgatcctttggagactatcaaaggacaggtttaggcttgtgtttggttggttccttcggtttgctctttactgtaactacggcgccatctctctctctctc

SEQ ID NO: 207023 - DNA, 692 bp, Cannabis indica
actaggtacatgaagaatatcttacaaaaccaatgaattattagggaaatttttactaacagaacttgatccaacctaatgtataggaagagaagaaccattacctacaaccactttggctttgtttttgtagtcaaagacaaaattgagatgatcagcatcatttgtcatgtgatgagttgctccagaatcaagttaccaggcagcagaagaatctgaggtaggagtggattcagacacaagggcttgaggattatcaccatttgagtaggagggagtcgatccatttgaggcactggtataagtgatgtcaagcctgtgataacacttgacagctgtgtgaccagcacggccacaaagttgacataccggcctgttgccacatccacctctattgttgttgtaagatctgtctcctctatttgagcgtctaaatcacgatttgagggagatcctctggtatttgccaaattggcttgcacattatgaagagattcagttgtgtgtttctgaattctcatttcttgactctgcaacatgaattgaacttcttggagcgtgagaggttcagttcttgatgttaagttgatgaccacaacttcatactctgctcctagtccaccaagaatgtacaatattaaatcatcatcattgatgggctgactatctgcagcaagttgatcagcatgttg

SEQ ID NO: 207024 - DNA, 1308 bp, Cannabis indica
  modified_base (29)..(29): a, c, t, g, unknown or other
ccaaaataaaaaaaaaaaaaaaaaaattntaaataataatagagaaacggtgaagggcatcaatggtgcctaccactctcttatgtgtcaatatggctattggtccaactaagtatcgggtccatataatttaatataatagctttaagggaatatcgttagccaatcgcaacgcgacatgtcaagaatgtgctaaacaccactgatatctaaaagcaatgctcataataataataggaagaattaaccagtaagaaaaaagtcaaaaataaaatttaagtaagacgattacctatttttataataaaatgctaaagagtactagagtgtctgacattttataaagaagtgtcatttgtgtaatttaatattggactcgtcttattttacttttaataataaatataaaaaatcaataactatttatagggcaccacctcatatagtagtactaaacatcatagagtttaataacaacgatcatttttatattacatggactcaaacattttaataaaaattataaaattggctataacaaaatataaaatagtacacaattatgttaaaataaattttaatataatcacattttatattaatttccagtttaaatcctaacaattatacaaaaaatagtgtatgtatagaggtttgaacctttaacctacttaaacttcaaaaatgttttactactacatcaaacaatattaatttaataattttcgactagactagtatttgtataaatgcccaaaaaaaaaattatttaaacataaatcccaaattacttagaaccaagccatatttcaggtggggcatccaccctacttataagctcaatggggcttcgcccatgctagctaccaaaccttagcacaatctaaagaaagagcaaaatgagcaagattgtgtgctagggtgttagtggacctcaaacaatgctcaaaagaaatgacataaatattattataaataacagacccaaattcctctagaaggggagtcttattagtcaaagccaaacacacacgttggcaattagattcccccttaacatttgcaagacccaaccgagaacacaagagaagtccttggaaaacagccatcgcctctgccacaagagctaataagtaagcattaaaaggcgatgtcgttgacacaataacaacaccagtatgatctcgaaccacgactctacatccaatatgacgatccaaagagaaatactcgcattgacattatgttttatgtgaccaattggaggaagcaccccccaaggtgggttcgaattccatgactgtaaaa

SEQ ID NO: 207025 - DNA, 725 bp, Cannabis indica
gtctacttttccatataattttaatttaatataatatgcttacatatgtcatttgatttgataaatcatgcaattaaatattaaaaaaaacaaattcaagagaaagttatatttagtttgcttctgattgaagctaataataacttaatttttaaacagcctccaagtagaataagagtatatagggttttattattaatttcataagtggctaatatttcttttttagatgatattatatgtatccctttcaataatattgattgcatcacctcaaagtggatactgtaggagagactttttattattattattattactattatattcttaaaagaatattttatatagataatgctgtatatatacgaattttatactataggatgtagaaaaagatctgctatactcaatttttgaaaaataaaaaaagtcaatattacgactttaaccaaagcttataaatatcaaatgaattaaaatatcttttttgagggtctcatgaaacttttagaaaactcgaaaacatcaatcaaccatttggtaacaaaactcacacacctaagtgtgcccaaactagggttcatgggcccatgcgagcgttttcaccttagaaacctcaattcgccaaaaaaaccaacaatgacttgacttatttaggtataaaaatgacttaggtttgtacataaaatcaatatggcatcaaatcctcaaaaaaaaaaaaa

SEQ ID NO: 207026 - DNA, 1646 bp, Cannabis indica
attttagaaccagaaaatcccaataagtgtatattcattgggaaaaatctagatgaaaaactaaaatagcaactaataagtttttgaaggcaaacaaggatcagttcacctggagccactcagatatgatagggattgaccctacagttatttgtcaccacttgaatatcaacccaaattatccagccaagagacaaaaaagacgacccttggattttgaaagagaaggggcactcaaggaggaattggataagttgttaactaatgactttatacacgaggcattttatccctcgtggatatctaatcctgtccttgtcccaaaaccaaatggaacttagagaacttgtatcgacttttcaaatttaaacaaggcatatcctaaggaattctttccactacaaaggatcgaccagttagtggatgcaactgctagacacgagctgataacgttcatggatgcatacaagttttgtaaccagattaagatgcatgtctctaatcaggagcatacaagttttgtaagcaacatgggactttattgttataaagttatgccttttggtttgaagaatgcaggggcaacgtatcagcgactagtgaatgaaatgtttgaaaaaacaaataggaaggaacaatggaggtctacatcgatgatatgtttgtgaaattgataaaaaagtggagatcacatgaaagacctcatggagtgctttgagatattaaaaaagtacaatatgaaactcaacccaaataagtgttcctttggagtctcctcatgaaggtttatgggattcctagtcaactcgagggggcataaagcaaatcttgagaaaattaaggctttgatagaaatgccctcaccaacaaaaccaaaggaagtccaggccttaacgggaagaaaggcagctcttaacagattcatctcgaaattaagtgataagtgcctaccattcttaaatgtgttgcaaggtaacaaaaagttcgaatggacaaccgagtgcgaggaagctttcacaagcataaagaaacatctatcaacgcctctagtattggccaaaattatagctggagagactttactcctgtacttggctatctcggagaatccaattagtgcatcattagtgcgaagaagacgaaatgaaccagcaactagtttactatgttagtaacatgttactatggaaagaatcgagatatccccctcttgaaatacttgctttatttgtaatccatacatcttacaaattgaggccttacttccaggcacatccgataaatttgttaactaatcaacccctgagataagttttgtcaaaactagatgcttttggaagattgataaaatggtctattgaactggggaagtttgacatgacctatcatccaagaacattcatcaaaagccaagcattggtagatttcctgatagaaaggataattccaaatggacatccacttatctagcgagacacagacacttaaaaatggtatgtggatggaaaatctaatgaaaatggctcgggtgtcggggtgatactaatcttgccaaaaaactttaagtttccctatgccctaagattccaatttgacacttcaaataacgaggctgagcatgaagccttgatagctggtttgaaaat

SEQ ID NO: 207027 - DNA, 751 bp, Cannabis indica
aataggtttgtctcggaagtttgaccaagtgaaacacccattatttaattttggatcaattaacttcatttcccgcactaactgatcgaacgtcttcatactcttagtccaagaagagctatttagtttttcttgtaccgatctgactacgttgaaatccccgcctaaacaccatgaatctccacaaattgcgctaagaccagccaactcatcccagaaatcatgtcttgttttatacgagcacggtccatatatcccagaaaaccaccacgggcttctaccttctgcttctactaatactgagatagagaactcgcccaccagggagtccagcacattgatacttctggtatcccaagctaacaacgtccctcccgaacttccaatggctggaaacaagatccaagctttaaatcgggatcgccaaatgctaccaatgaagttcctatctacagttgctcttttcacttcctgtaatattattaaatccgggttaactttgttgatagatgccttaattgcttttctttttcccttgtctccgctgcctcttacattccacgataggattctcataatgatctcttttgggatccctcttttttctgacctctgtcatagtcaatgttaaaggccaactttttgagttctctaatgctcttcctccgagcctttgtctgttgtctgtttgttcttcttcgccctcattcattatcaaaattcagtcccaactcctccatggctctcaccc

SEQ ID NO: 207028 - DNA, 966 bp, Cannabis indica
ttttaaaagattcctcagtgatcaaggtatcttattctctcatccttgccctcatactcatgagcaacatgggagggctgaaagaaagcatagacacatcgtggaaactggccttactctgcttgctcaaagcaaattggattttacttactggtggcatgcctttcaatatgccacattcactatcaataggctgcctacagttgttctcaacaacattagtccctttgaatgtctctttggcataccacctgactatagtattatgaagccttttggttatgaatgctttccacatctcaggccgtatcattcccacaaaatggattttaggtctgaacagtgtctctttattgactattcgtcctatcacaaaggttttctatgtgaaaatgctcaaggtcgaatctttatagcacgcaattttattttcaatgaaagctgctatcctggaattctctcatcatatgcatcagatcaggtacaatttcattcccattctccttctactgctagctttactacaaattgtcctttatctcacactaatattgtgtctgatgctgcaataccaccatctggtgctgagacattacaacccaattcaccaaattcccaagctactgaacttgttataccagcttccactactttacctactgcatcccctaatctgcccaacaccacatccgctccatcacaaaccaatactacatcctcaaatatcatcatcaatccacccgtgtctactcccatcagcaacaatgccataaacactgccccataccaaaatatttctttgcctactatctctgcaccagaaccatctgctgcatctttaccctgtgcaggaatatcaatacaggcagcccctactcacactcatgccatgatcacaagatctctaaatggtatagtcaagccaaagtcctatttggcaaccaagcacccactgccacagtctct

SEQ ID NO: 207029 - DNA, 1901 bp, Cannabis indica
caaaacaagtttcaacacgaacacgacacaaattttacaggttaggaacagaaaaattagacgcagatcaaaaatcgaatcaatactactggacacaaaataaaaaagagtcaaacacacgcaacacaacttgcttaacacgaattgacacgtttaatacaattttttaaaaataaaaaaaaaaattaataataatataattatgtaaaaaaatatacttagtgatttaatattaagaaaaaaatttaaatttaatttctttaaaatgaaattaaaatattttaaaaaattaatttttattatataacaaactatatatacaacatagatgtatatacgatttctaacaaaactaaatttatcattttttctctgcaactacagtttcaataatagtaaaataggttaaagtaggtcaacacgaacacaacacaaatttttacgggtcaaattaagatttaaaaaattagacacgagttaaaaaataaatcgacatgcctgacacgaaatataaaagcaagtcacataatataacacgaacataaaacaataacacgatttaccacccctacatccaacgtgaaaataaaacaaattattaacccatccccaatttattttgttctttctgattttagtatatactatattatctttcttatcatcctaatacattccattttttttttttggcaagaacattctaacgtaacaatcaactgaatttaagcatcttaaactcaaagcttataattacttccaatgaatttaccttgagagagaaaaaccaaaataaaacaaatgaatttacaaatcatatggctcttcccaatagagttaagattttaaggattacaacatctctcctttcaaaccataaaagaattaactatatttcaaagtgttgatatatcttgtaattaccagtatggttgtcacagattcataggaatacacagacgcattttcgatatctttggttgttgatcctgctcaactacgccattccgaagaagcttctaactcaacatcttcttcccaccaagtagcactctgaaaaagaaagatatgttttacatctaattagtggatctcatttacatgtttctcactcccataaatctctctgaaattgaaattgtgaaagatattcaaaggggaaaactctatataaagagagaaaccttgtagcctctacgcagaaattcgagtgagcttccttgttcctcttgtagtcctaagactctcaataattcttcttttgtctacaaaacacagtaaaagattagtccaaacatgtgaaaagtaagaggctgcttcagttttcaaaattgtgtttttaaaaatttaatagtgttttggctcatattttttaaaaatatttttagatgacatgaactcagtccacctcaaacccgtctccaaattcggactcggaccccgaatcctaatttgacctagacccgaaccccaaacccaacccaaggtcggtccaaggccaggttcgagatccaagtcccgaggtccaaggttcagtgtttgtatccggatccaggtcaaggtcggggtccagggtttaaatgaacatgttaaaacaaaaaaaaaatatttgaaaaatagaaaacaacattttgatgtttcctgctttctagctttttataactcgatttttcaaaaaaactatttctgaaaaatttggccagacgcactttattagtttttaaaaacttgttttctaatttttaaaaactgaaaatattttttaagttatacgtaaagccaaaattagcttctgtaatatctagaaaatgaacagaggaaatgcagattggagttggaagcaaaatattactcgtcctagagtgaaatcgtgtagtactctcagcctacacaagcaaaag

SEQ ID NO: 207030 - DNA, 1176 bp, Cannabis indica
aatccatatgcaacttcattggccatttgacgtacttggattatggacactccaagaaaattggacatcaaacttgttaaatcctctaacaaaaactaagttcattgaggaaagaaaagtaattttgaaaacgcattaacaaccactaaacaacatgattcaacaaagtgtaaagaaaagaccattcatgaaagtccaatccaatgctacaagttagtcaaacattctgcctaaataattaaacaaacaacctaaaaaaaaatcatcaaaaataacatgagcaccctataaaagaaaagtgaaaaatataacattaacaacatgccgaggacaaccacacaatgaaataacattagtttgcttaatataaatttatatatattaattataaaaatttgtatattagtaaaaattgaattatatatagtttgtttaaataattaaacactttgccaacaaacatttatgaaaacaggtactttgatagaagctgagacgagaggaaaaagagagttgaaacttatgaatcataaagagacttatgtaatgaactctccaaattttttattgaagttatttccacctggagttgggtggggtggtacttaccaagtgagatgccttgaaactggtctggaagcagagttaactattggaggaagatcatttgtaggactaagaggaactcctaaatctattataggaaagatctttcattcctcttccaagaatgagcccctttttgatatcaatggccactgggataggtacgtaattaactcaatatatagggtatcactgtataaaatagtagtgattattatttatagtatttttggtatatggtcaagttgcaactctgtttatatatatttttcacatgacaaatataatataatataggagacctaaaataaattttaagaaattatgggtaattaaagatttttttttttttaatgaatattcataagttttattatacttcaaattctgttaccaaacatgatagcagcttagttgggaaattcctcatactaaaattacattcaggatataaactagaagctcttgcaaaagcatgagccactacgtttgctgaacgcttaataaaataaaagaaatattttttagttctgcaagcaattatttacaatccttgataatcaaacccaa

SEQ ID NO: 207031 - DNA, 682 bp, Cannabis indica
ttatttaaatataaacactaataaaaaaagatttggtgtagcctatagtgtcacaatagtgggacactataaacaatgttatatattggataggttttagagtgtggttagaataaatttagtgtgaaatctcaacaaatttgacattttagtgttccattggagttggcctaagaaaggaagaaacactcctacattgtatgcgcaccagaacattatacacagtgaatgtgacactgcttttaaaacagtgggtactatctggaatgaaagtgattgtatggaagaacacaagaactcttttcatactcggcaaaacttggaaatctcttaacagaattattaattccttcaaaaaaataataactacagaatatttaattttgtataagaacaaacaaaatgcataccattggcgccaaaaatagggcagcatctgcaacacgggaagttattactacattaggctggtgcttttccaaacattcaacaatgggagctgctccaagatatgtgctaatacccttcaccaattatactaaaaaaggtaaggtccaacatctcaaaagatcacagaaagatgaaaatagtataaattgttaatggattacaatcttaatttacagcaaaaaaatagatacttcaggaggaggagcgatacatcagtgtaccacacgactac

SEQ ID NO: 207032 - DNA, 859 bp, Cannabis indica
atttagttcacaataatgtccaatattaataaaaggtaacgttttaaattacatcaagtgtgatatgttacttttagggtcggctttgagtaaatttaagccttagaaaaataatttttttagcgctttttataaaaataaatatatagtatttttataagttatttaaaaaatatatatttattaatttttttttttatttgggttagaagtgggtcctaagcgcgagcttagcccgctttagcctagggtcgaccctgattactctttatttttttttttttttttttttttgagatgatttactatattcatttagttgttgattatattttttttttaaatgatttagttagcttattattattaattctactctgagtaatatttacatgcaataaattatgaactatacctgatttatcaaattaaaaaaaactttaatttaccaataaaaataatagtgtggtttatcaattttcttttactcatgtttagtaaaagaaaaactttgatgatagatgtttaaaaatagattatttcaaaattattcttttacccttaattattattttaaaataacattagtataggttatctcatatatatatatattatttttgtaatattatattacaattgctattagagatttgagataatattatacatatatagttttataattcttatagcttattacaatgtttatctgtatctttttaaaaaaaatatgtttattttattttatttataattgagcaactatatggtatactttatatagaaatttaatttacattgtattttattaaatggaatcccaataaatttatattttcaatttaataattctagt

SEQ ID NO: 207033 - DNA, 1139 bp, Cannabis indica
tgttttggtaagtctaggcaattcggcccaccacacaatagtgccttgccttttaaatttcccgcttcagcattgcgagcacatgtactatccctaacattctctgcatccgtactcattgtgccatgtgtccacccacgatcctcctctgtactcaaaattttggcttccattcccatatttccatgtacacctcctgtatttttgctcattggattatcgccagcagcaagaacaccgccttcatcattcttgtgacggtcatcataaccaggatgtcgtttccacataccctctttatcgcttttccccagggggcatactccaatttcagttgcagccgcattttgccctttccttccatggaaaaaaagtgctctgtcacgtgtcacttttgatcaacgaccatacattctgacagcttcttcattcttagcagataccatagccattggagaatgacaaactttgataaaatgggctagcttacgacatgttaatgttggaaattattttaccaggatcttagatctactcacaagtatgttgattaacaccctaaatatgaacttctaaaacgattatgaaataaacacatataaagtatgagaaaccttacattgggtgcagcggaatattatgtctccttccgttcagatctctaacccttgtatcctttctgtcgcagagtattatcaagatctgaacctggatctctttctctccttctttagtgctgaaactccttcttgttgaatgtctttcttcacgatcttcctcactatgattgaggtatcacttgctgtgtgtgggcactactctaatcactaagtggtttcgaaatttcaaggaagaagaagagagtataggtggcggctaggttagagagagaaggctcaggtttttctctgaaggaaatcagaagtaaaagtgtgaaagttaagtgtaaatttcctgaagccttcactatctatttatagcattccactagggttaggtttgaattatttggcattaaaataatgaaaatatcagatgaaaaaacctataaaagtggccggcctaggcaatgtggatttgggcctcactttttgcaattttgcagttttatcatttctgcatctcattttctcaaaaat

SEQ ID NO: 207034 - DNA, 542 bp, Cannabis indica
gttgtgagtttgctcttagagtatgtatattatttattatttgttactctctatatgtatataattagtttttgtataattatttaataatttatagtaattggaatcataaattatgattgttaattactaaataattacttccatattttaaagaatcctgttaataaaaaaagttaaaaaaaaaaaacaaaaacaaaagacgtatccaatgcaggtgtatatatatagcattgtgacttgtgaggtcccaattaatttaaaaaactaaagaaactaattgtaaccactaacattatattgaaaagtaataacttcaagaagtcaatatatatattttataactaattattcaaatatatataatttaatttcaggataataataataatatataatagttaatgatactgctaataacactttttaattagaattttatatgacgtgtcatgtttttttggccatataaccccttagaaattacttgttaaatgtatacatgatacccttagaaaatatatatactatatatgttgaac

SEQ ID NO: 207035 - DNA, 394 bp, Cannabis indica
gggaagggccttgtgaaacagagatgtcgttgttggttcgacaaatttctaggccaaggaagaaacgaatggagccaatatcttttaacttgaacttgtcatgcaaatatgttttaaaatgtgcaatggcatgtgcattgttgctggccacgattatgtcatagacatgtgcaaggactgctaagaacaaattggtggttttcttagtgaataaagaattgtcagactgtgattggtgaaagccatctgatataagggtacttcttagcttgctatagcattgtctagaggcctgtttaaggccatagatgcttttgttaagcttgacacagtattggggggagccttatatccaaggggatttttgcatatgagaaattgagagagagagaga

SEQ ID NO: 207036 - DNA, 1126 bp, Cannabis indica
tttggtgtacgaagttagtgtctctatttagtggggctgaagaagattgaagacttcgaaacattcactttctgaccagaagcaagttcaaaggaatggagcatgtgcttgattttagtagccgtactcagattagcttgacaaaaaggtagttgtcatcagcaaaaagcatgtgagtgatgtaaggagctccccaggcaacttgacaaccatgtattagtttatcttcttcaaactttctaatcaaggaagaaaatccctcagcacaaataataaacaaatacgttgataaaggatcaccttgacggattcctcgtgaaggattaatcgtccccaagagatgtccatcatgaaaaatagaatatcagaccgtcgtaacacatttcatgatgagattaatccattttccagcaaatcccatacgatgcataaccgccgataaataatcccattccacgcgatcatatgctttactcatgtcaagtttcatagccataaaccccttcttggctttggtttttcgtttcaaataatgcataatttcaaaggcaatcattatattatctgagatgagcctaccaggaataaatgcactctgagttggggagataacatgatcaattaacaacctcattctattagccagaacctttgagagaaccttgtaggagacattacacagtgcaatgggccgtagatcactcagttgtaaagttcttcttcttagggattaagaccaggtgagtgtcattgagactaagaggaatagtttcggttgtgaaaaaatccttgacaagttggactatgtcattgccaacaatttccaaatgcttttggtaaaaacccgagcccatttcgtcaagtccaggagctttgtcaaggtgcatttggaagagagcttgcttcacttcttcagctgaaatcggtctaagaaggctatcgttttgttcggtagtaactgatcttcgaataccattaaccacagtaccacatatagcatgatccgaagcataaagattggaaaaatagtcaagtacaacctggtcaagtcctgagttccaccccttccattcaccattattattttgtaattgcacaatctgattattgcgcttgcgggaactag

SEQ ID NO: 207037 - DNA, 1402 bp, Cannabis indica
tcaatataaacttatcacgtgtgtaacattatacacataagcaatccatggcagaaattaaccgaacaacactttaaatttagtaccaattcactagtttagaaaattttactgtcaaatttaaaattagaaggttaaacataactaaaccaacagccaaaatttcatttaaattttttataaaactattagtcaataactttatggtttaaggcctgttcgctagagtaccaaaattcatggacaatataaaaatcatggaagacaagacataaagtagctggtttaagtgtaaacaacatctttatcatcatcatcatcattattttatcaattcaaaattcatgtgaaaattatcgaaaaaaatgaaacattatttaccattttagaatatactaaaaataagtcctaattattttttttaaaaaaaatagtcctaatttattttttctgtatacaaacgcaatccaattggaaacaaaaaaaaaactaaatagatagtgctacacatttttgtaagtataactaaatatataatgttaaatttctatatggtactcgatcgtatgcatgtgaattgattacggtatgaagcattcaggaagaaaaaaaaaataacaattagggcctaaaaaaatgtgtactaaataaataagcaacataaatattaatttattaatacaaaatatgcacttatgcatcttaatttaattaggaaacaaaattggacagaagaatttacaactcagaaaaacaaagtatagaatcgacaatgcctcataattaattcggactaataaattaccaattttttcttcttaattttcgagtatatttagaatactaataattttgagtttttttttttaaaaaaaaaactgtgtttgagagtaagtgatgaagatgatcagaaaggagggaaacttcttcccatagtattgacattagcaaagaaaccaaccaagtcttgcctgtacggaagaaacgaccttcttttctctgcgtttcgattcaattctctgtttctcacataaaacacctcatgagccgctatcatcttattgttacccactgccttccccaccgccaacgccgcacccttcgatttcacggcggtgctaatcttacccttttcattactactcgcgctaccggagcttcttccgtctctgttaacggcagaagcaacggacgttatcttctcatgaccaattttctcttcaaccttctgtttcgagctcgatgacggagttaagaacacaaacgaagattccttaccgtcgctattacatcgacgaagcaattctctgaaactccaccgcttcgatgaagatccggtagatttgctctttctgcatctccctggagtcggcggagctcccttgggagtccagacacagta

SEQ ID NO: 207038 - DNA, 1085 bp, Cannabis indica
ctacctctgagaagataaaagcactgttggaaaggtgaatgctgggttggattgacgaggttgctcgaaagttggggcttggtgcaacaatccatgaccgccatggtcttcgtttagcttttgcagcgtctctagttcaaggaatcttatctcctttgttggcagaagttttggctatccctcatggtcttcaactatgctttagattggatttcatagagacagaagtggaaagtgactcccaatgaatcattcttacattgaataaaaagatgtgttgcttgatgagtttggaaccattttacaagatatttactccattaaagatagtgttagagtgcttaattccaacttgcttataacttagctaaacttgttcaagtttaatggtcgagtttaccaaattgtatttgaatttttcattgcttttcaatgagaatctctttttttttttaattcttggtgaaaattatgagtgccacgtgtccatcgagtagttaagattagagggactcacatcgtgaatattaatagcatttatttaactttacttctaagaagcaccaccaaccacaaccaatataaagttattattattatttattatttattattaatagcactcaaattaagagagaagaagaaaaagaaagataaaaactcagcaagcggtccaacagtgcacctggtttgttattattagtacttataattattattattattattattattttgtgtttgttcttaaaaaaataaaataaaataaaattaataatcatgtctccattccaagatctcagctttgctttcccaatttctttacataattagggctatattgggatctctgtctcttggaaaattcttccatttctgacgtgacgcctttcgatttactcctgaattcatgctttttcttactccaattctgctttgaactctcccatggagtccatcttcacctacaatggcgccccagattctctcctcgccatttacttcgctttcggcttcgtcctcgccaggttctttcttgatagattcatattccgtgtaagattcttcctgctctctctctctct

SEQ ID NO: 207039 - DNA, 1269 bp, Cannabis indica
ttaatgtttcagttcattttgtttagcaatccgcgaataaagtggcccacttcttagctagggactcttattctaaaattgattgcatgattagtaaggagtctgttcctactcatttattgtccttacttttaaaggatctttaattaatagaagcttctattttcgttcaaaaaaaaatatatgcgaaatttcacactattaataatattgaattttaaatctacactgaattggtgcacaacttcttttttttcttttcattttaactcttttttaatttgttttgaaaatattcataaattatttattgacaatacacataattatatcataaattaattattatttattattaatataaaaaagtataaaatgtaaatttttttaagtaaagtatatttatttggtgtaaataattagaattgttgcactaaaattaataaattctactatgagtgtttatctaattcaatccgtactattttgttcatagtacatctgatccatactaactgtggatttaatatcttgtatccagtccaattcataataactcaaatttaacccaatctaatttgcaaaaatacgaattagatcggttacttttaatattaaattatttaatatttattaatttttttcatataagtaacaataaaataaaataaattattattatttcatgtctctaacaataaattaaaacgaataaaataacaaatatcaaattcaaaagaagaaaaaaattaacatgtataaaaatatatataattttattataaattatattttccttataaataagaataaacatttgatttaatttactaaggtttgaaatatatttaaattatgtgtattaatttattttttacattaaaatagtaattgtatacataatttttaaaatatataaatatatgtgaatgagattagataaattacttttacatatcaatcaacatctaatctacacaaatacagattctaaatttttcaatccaatacaatccgcacaagtacagatattaacactttacaaattagattagatattttatgaacatccctaaattctacaccaaattagtaaaaaaacaaatggtccaatagaataggtggaacacttgatcacttatattcaatataattcttgccttttcttccgatgccactcttaggttgataccccaacatcttttagagattactagtccatataatgacaactagacaaggctccgaagtactacagaatttaaagat

SEQ ID NO: 207040 - DNA, 1155 bp, Cannabis indica
ttgttggacttgagtgaaaattacatcgaaggggaaatttcaatggagataagccaattgtcagagcttcaatatttgagtctcttcaacaattctcttgaggggccaataccttaccagatcaccaatctacaaaaggtatggtacttatcacttggagcaaatttttttgagaattctgattggtctaagttttcaagcatgccttttttaacataccttgatctttttaggaaccaattcaattcaacattcccaagtttcatatctaagtgtaggaacttgactttccttgacttgtctcaaaatagttggagtgggtcaattccaaaatctgtgttttccaatctcatcaaactccaatctttcaatcttaccgataacaaatttgtgggacatttgtcatctaatatttcaaaactttctaagctaaaacacattcgtttacaatttaattttcttaaaggtgatattcctaatgagattagtctcctacatgatcttgaggttcttgaactatatagaaatttatttagtgggagtattccatcttctattggccaattcacaggtccaattccaaatttgaagaaacttaaaatattggatctttctgagaaccatctcacgggtcctattccaaattctttatggaacctcaaaaatctaactgtcttgcaactttttaaaaacaatctggttggaaccatcccaccacagattggaaatctaaaactcctctcacattttagtgtaagcaccaaccaactatcaggagagttgtcagataatatttctagtcttagtaatatagagatcttctctattttcaacaataatttcactggtttgattcctttagagattggaaacttaaagaaacttaaacgactttatctttcgaagaaccatctcacaggtccgattccaacttctttgtggaacctaaaaaaccttacgtttctggtcctttccaataacaatctggttggaaccatcccacctgaaattggaaatttggaattcttggcaaattttattgtgaacaccaatcaattatcaggagagttgccggttaatatttccacgcttagtaacctggaggcgttcaatgtatttgaaaataatttcactgggacaatccctagagacttt

SEQ ID NO: 207041 - DNA, 826 bp, Cannabis indica
tccttgctattctaatttcatattgtaatgtggagaacagatttatttggcactataatgagtcaaaccttttctatgttaaaagtggtttttggaatgaaacttggtggctgggcaaggcaaatccttgctattctaatttcatatcgactaggccatcaccttggtggaaatatttatggtctcttaatatatattctactaaaggttaaaacttttgtttgaagggttgcttagaattttctccctacttagttaatctgagtaggtgtcctctcattgaatctttatcctatttttaataaggaaatgaaactacttctttggctttgctctaaacttaaatagtactcagatttggtggcaagctcaaggaatgccactgcacatgctttagttgatttagccattacacttgagcataccaaaacgtggtggcatgatgagctaccatcttgccttaggccataatgtttatgctttgaaactttgtattcttttggctattagcctgataatatcatattgatgttttctcaaaaaggaaaaaacatacataatttgtggttcccttaaggcttcatttttcattataaagtctcttcttgtttatactaagtcatcctttctctctaagtattgtagtgaattggcattttcattatatgacattttcattaaagaatagctagttgtggtacttgtttagtgacaattgagcctatttagagttgatgaattctcaattttggagtagttgttaatgattgtagacacttgtttgtatatttgggtggagtttcttttttatttgtttattattatt

SEQ ID NO: 207042 - DNA, 804 bp, Cannabis indica
aaatgcttttagccataattataaattcatagtgattaaccagataaaagagcatcccatactttgtttgatgctacacaatagaacaacaaccaatattatttgtttgatgctacacaatagaacaacaaccaatattattggatcttgaagttggtgccaataagtgctgtagattttcccaacaagccaaaagtattctcaagaaagcttgagctaaagggatgagaaatataacaccacttacgaagaaacaattagcacttactatgttcactaccttgtgatcaacatgatatttgattatcaatataatagctaccctaattaaataactgccaaaagctgcatacatgaacaccccaattccccaaattatacaaaatctataatcaaactcagtcattttttgtgtgtagagagagagcgagagagaaagagagagatacttaccaaatttttgctgaataactttgttgctccaatgtactagtgcagcatatctatcaaaggaaaagtttcatgtacaattaagagtagagaacgaataataataataaaataaattaatgacaaatacaaggcatccgttagagtaagagttaccaagtaggcgttgaaaacaattttcaagtcccaaaaaataaacaaaataaataaatttccaaagacacagacaacgttcttgttcttctcacaactgaagatatatttatcactcatatttttcaacaagaaaaggatcatgttacaaatttatgtggtcattttctaactagggacatttacaatcttttttcgaga

SEQ ID NO: 207043 - DNA, 1409 bp, Cannabis indica
accattactaaatttaagaaaaatcaaaaacgatcaatggaattacattttaacttagtctccataagaaaaagtaaatcgggacgctgctccttgattaacagcttcaaatgcctgaatgtcgaagggttacccagtcccctggcattccaatttataattttcatggctgagggcggggttgttgtggtgcaacctccgctgaactagatgaatgcccctcaactgaatctgaatacaaaccagaaactggctagaaaagtatttcatcaatacatgaattctccttagcattacttcggcatctcttaagaacacttcaaaaaatttctgggtccacatgcctcttaaaagacttgctgatttcagaattttcctcactagcttcagcaataaccactgatttacctttgtttttagcaaccacattagatttaacaaaggcaggcacagattgaaccgtagtggctattttgagggatggacttgttgtatttgcagactgtgaggaagtttgtattggtggtatctcagtgggaaaaatggtaggaatataggaaggaaaaggtagaggcaattcagggtatttttctttggggttagtgactggtttttctggtttaacaccagcgtccaccagttctggtttttctggtttggaggactcggctatggttagtgatttaggatgaggttgtactccaattgttaagttttcgtgagtattaatagcagggatggatgacgcaaaagttttcctagtcagacgagtgagaaaagggtaagcatttgcctttgagaagtcacttcggtatcgattataaccagcaacgggtggtttatctccaatcatttgaggaccatataaaagttcaggttcaacaccagcgtccactagttccatgaaggagatacatttgtcaaaaggatgccccaatttaccacaatgaaaacagaacaccggtaagttttcataacgaaattccagccaatgctcatctttcaccctaggcagagtaatcattttaccacgcataacaggctagttaatgtcaatccagactcgagtgcgcatgaatgaaccccatccttcatgaagtgaatcctcgtggacatcaataaattctccaatccattctccaactttcttagcaagagctctggattcgcttaaaaaaggaaaggcggtaagtttgaacccagaactgagcatggcagagatcatctttagtttacattttggagcaaaaagggtaaagtgcagcaatatcagttgattgaaaaaatagccatggttccccagaaagaactctatgctgatcacctgcacaagccaaagttaaaagaaaaagatcagagtgcatttcagagacaacaacttcaaaccgacatttgttactccagaattc

SEQ ID NO: 207044 - DNA, 749 bp, Cannabis indica
ccccttttgcaaacacatcaaaattagattttattttgccagcacattaccaaacatttgccaacgcaaaaatgtgctgtcaaaataatatttcttgtagtaactatagggatattattattcttatatattaatgaatgatcttaattttgttactaattttttataattatgagctattttattatttttaaattttgtaattaaatcaaaggatcatttataaataagcattatattcttgcaagagtttaagtgtgacacctttgaccactttaattatggatattatatatatctatcgcagcggcagcctactgagaatgttacacacccattcaacaagctaccgtgtttgccttgttttttttttctttcttaccattaatgtaaaatattgcaacaattcagtcaaccagtataagaattttcattaatcctcaaaataaatttcaattccatctttaacacaattcttgtacaaaattacctaaacaaagaggagcaacaaaagataaaaaacatgcataaagaaaagtgaaacataataattcagtggccataatcaaaaaattctcccattaatccaaaataacattccataactaattattaaggaatccaaagaagaaaaaaaacacccccttgaactatcaaaaggtgataacattatttccccttgaagccttggcatctacaatgaaacattgagtaagagctgttttagtgtgcagagaagccttcaacaa

SEQ ID NO: 207045 - DNA, 577 bp, Cannabis indica
atatatatatataataattattatgtcagagagtatgagtatttctgttaacggccaatctcaaattcctcctggcttcagattcaacccaactgaagaagagcttttgcagtactacttgaagaagaaggtctccaaccagagtatcgatctcgatgtcatccgcgatgttgatctaaataaacttgagccatgggatatcaaaggtacgtataatatttatataggccgtaatattaaattgaatataattatatcaatgcccaagaaagtggtgtaatatacaatacacgctatttattagtatattatattatatatatactcgctatgatattaattaattaaccgttttgcaattcatgttatatatatatatatatattttatggtaaaactaagtacgtacgttcttattatagaattttgttactttgattctaattaatattttggaccgaaatttattcatccagacaaataatcttaaacgaaaatttttaattttattcattagtttattgtataattataattttatttttaattcaatgcaaatatgtgtggttgttacatt

SEQ ID NO: 207046 - DNA, 732 bp, Cannabis indica
gctctaggtagttaattaatttatttgtaagtttgaggacataatgttaccattttcttttctcgaagaatatacatatatatatatatatttataaaatttatatatgaaagataagtatatgcaaaaaactcacttttatatatgccatactgaaaagaagtataattcctagctagtgagtattcctgctatgaaataaaagcaattattaaaggtttgccatcgataggatcacaaattatacaatttctctgttaatcttcatcataaagcaattctgatgatcaggtttataattggttccctctctagcctttatttccctttctatgtttatgtccataacacttttgcctattatatatttaagggcctaaaagattagccaaagattacatatggaacaagtcctttctgttttagggggcatattattggtcccccatgcgactcaaaaagaagggaaagaaaaaataaagttaacaaagacaaatatatcagtgatgatgatgagccagctttcaatccaaagtgggagagaagactagctagcattctttctcatcatgatatgtacgtctaaagatatatgactttgttaagatttaggattaaggtgttgagtagctcgtttgggttggaaatgttagaaaatataagattaagatgcatatgtttccatctcaaaataatatatagatataatagatagttcatgcatgttagagt

SEQ ID NO: 207047 - DNA, 1334 bp, Cannabis indica
catgatgatgaggcgagatggcccttctcttcgaatttgccaaggtggttcgaggagtggatagtacagaaacggctcactgtagataagaagttcaagcagctgtggaaaatggacaatacattgaaagccatcgattcgtgggaggctagagaaacaagaagacaatacccagggaagagaaggatggttgagcaagtggtagaagacttgccggaaacggaggaagaacgggtgagtcgctttccgatggtcttgttgcccgggataggtgaaatttgcccgttttgaggatacagccaatcttgggcggttgaaaaaactgcctgcaaatttgccccttccagcgtcaacagctgtggaacctgaaaaatgactcctcctccggcgtgccttcgaatacggtgcaggcagcagacaaaagagagggacatgaacctgggtcggatgcagtaattcagaatgataccagctacaacggacagtttatttccccttctgctcaagaccaacctgagatagatacttcaagggttaacggcacccccaatttatcaaaggagtcaaacgagatggattctaagtcaactttggacctgggctcttcatcttcgggcccaagcaaattcaacccgtatacaagtcttctgggcagttaggcccaaactttatcttggccttcaaagcaactatgggcagatgggcttcaacacattaactgggctggggactgttgataaatatatgagggagccctcaatttttaatcccatttttgacatcaatgatattaggtccatggaattcgaatgtggcccaaagaaacgtaaggcattggatgggattcttattgggcctagtccattgaagtataatggccaggaaagcactgtgggagattcaagtctatctcctttaagcagcaatcaaagctcaaaggatatcaaagacccctcccctgtaattgcagtagaatcgggcttctccccaggttcagtggaagatgcaaaacttaaaaggaagagaggtcgcccgatgtctaacaggactgagaagagtgcaaatgaagaagaggggcaggtatcgactcaacgtcgacgcggaagaccagcaaaagccaacccgagtgttggtgtcaaaccaaatgtattcaaaagaaaccaaaaaagaagtgcggctaaacagaagcaaacaattaaagctcactgggataatgagatgtttgatctcactgtggaccttgacaaccattttgtgcttgtggacagaagctcaaaacagaaatcgtcttgtaccatccaggagataaatggggagggagatgcaaccactga

SEQ ID NO: 207048 - DNA, 1293 bp, Cannabis indica
aataagattaggaagtaatgatgaaatgagagatttaaagagagactcttccgcgcttctcatatgtgttgtgtgtcccctcaactttctttttataggtgttgagcatttaacttactctacaaacaacttccttggccagttactctaaccttatctttttatcaacttgtcgatggacaagatagtatctcattcgcaaataaatatttcacttaaaggttcttattaaaggtaattactcttcctattatatccttttatctatcaacaaacaaaacaaatgatgttaatgagcccaaatttgagcgaattcatttctttaatcacatagcaaacgtccccaaaagtgaagtggcaaaaggagtttcattcatcaacacactagaggcaaaatagcttagataacttcagtactaacatcattcctacaacaagaaagacatgagaaaataatgttgataacatcgttgggttcactattacactatgtttcatagaaatggagggatgaagagtgaagggagaacgatggaactttgaaaattcaatctttccaattttggaagaattgtagaaaaagacaataaaatttgttaaataaattattatccttctaaaaagtaataaatatttatattcacagggatagttttgtaatttattaataatttagtcttcttgtcatatttcatacaaatactactgcatgcatcattctagttctttctcagtgagcatcttgcattgctcctcatctcaccaagttttcttcaaatagaacatgttattctttttttcttgctacatttattatcagaaattattggagcttcaccccaagaagggatttgtggttccaccatgttataaagagtttcttagagcaacaagacaagaccacatatttttatttttcaataaatccaaggagagtgaattcttaaagggtctcaaggatgtgacttgaggatgtgaattgaaaaacccatatttatgtagtgggaaagcatggcctatcagtagcagaaagcaaaatgccattacatatacctaaaaaccagctgaagcactaatgagaagctaactagaaagaagcattattgagaagctagaggagagaagcttatatatatttatataagatgacaagaacaactaggctgatcagtcactcagcatcaataaccattgtaagttattaaaccaaaaaagaaagaaagaagaaaaaaacacatgcagctactatatgacaaatctcttagctacgtaatacttcacatcattaccaaa

SEQ ID NO: 207049 - DNA, 1662 bp, Cannabis indica
gcatgttatgttactactatctttaattatttatataactctcaatatatgcatgtatgcattttctctgttggagtgattaagttgattaattgttcttaaaagaaaaatagttgattaattgtgatttggagtattgactctgtttttacaacatatatgtgactgtttgaactacatcatatgctatatacatgttattgatatatgtacatcatatatgtgagattgtttgttgtagcccttattaatgcttaaatgtgttcatatgttactccattaatttcttatattaaaatgaacttttatacttatgctcgagcctgcaaaagcctaagctgcagagtttgaggcgcttctggagttcatgttgagtttggggaaatggttggaagaggggaaagagaaggtgatgatccgaccttcctctaaagtcagcatcaagtttcttattgccatgaagaagcatggtaactttatttatgttcacacttgtacttttttttgataaattatatcggtgagtttaagtcgataaccactgagctagaaaaattgttgttgagttgaattgaaggctcaaacaaatgtggggttattagtcctcattgtgatattggcgttaaaggaagttgaaggatggaatgcaaggttgctcccatcaagagaggttacccttacatcaattttttggatgatcataactgagctatattaataccattgaattagatggctttgcctagtttgagtgcatgtgcatcaacaatgttagtctggaaaaaccagaaaatccaattttattttgtttctgttacttagtaaatccaattaagtgtgttatctgattattacatagtctagctacatgtaccaagataatggttcttactcttgatcttgatttgccaaagtggctgtagctaaattaaacacgccgaggagtttactggccggttgttgtgatagctatcgactgatctgcttaccgaacttctcacaattggtcatttatgatcttttttcttgggacattttatttttgtttctgtgattgagtaaatccaactgtgttatctgactattttagattgttacttattccagctatatgtaccaagagaacggttcttagtgcccttgatcttgatttgccaaagtggctatagctaaattaaacatgctgaggagtttactggccggttgttgtgattgctgttgactgatctgcttaccgaatttctcacaatttgtcagttagtatatatttttttcttaaatttgtaaatgagaaggaagagaagagggaaatgacataggatttagccatttcgcgagagccttctcttacattaaaaataaaaaaagaaaaaggctttaccttccaggcaagttgcattgattcccctgctgcttgcatctgttggtgcccacacttttctttcttcacctgtttcttggcatatttttgttgaaattaatatatatcaattcttcttttggtttatttaggggctctttagtaacccttttaacatgatttgattcagttgaaccttttgtggtcttttactccaatgtccaatgatttgatatagtgtgttgactaatttgatttaattgtgttgatcttatcaacatatcattttgaatttttttgga

SEQ ID NO: 207050 - DNA, 568 bp, Cannabis indica
tattataaaaataaataaataggtaagtttagaaaaaaattgaagtatttcccataaaatattatatttatgttccgatcattcaaaattattgtcatatattatatgtcaccgttatcattaatgtatctcacacgtttttccctgatatatatctcattcattaatgaatattgtattttatctattattacttcgtgcggctaattaaatatacaaattatattttatatagatttgtagaagaaaaacatattttatatagcaaaaaaattgtattgattcatattttgtaaacaatatatattattaatttatatataaatatgatagtttaaaaggattaatttaaattatcacaaacttttgtcttaaaaatttaagataaatcaaaataaaaatatatatgatataatatatgtataattatagcttatatatcatatatagtttagggatatatttttttagtaaggtatttataattatttttttattttgtaagtttttaagtgaattagtgtatttgaataatgattatatttataaattataatttttagttttc

SEQ ID NO: 207051 - DNA, 552 bp, Cannabis indica
gtgcaactattggtagaacaataccgctgttaccacccatgctaggaatccaccagtcataataaataaaaatcttattaccatcactaatgagccaacaaccaccagcttcaaaaatctccttatcccataaaatagacctccaaataaaagaggttttctttggactcttcatccatcaaaaaggaagaattagggtagtaaataaactcttgccaccaaagaatcaagagcaaaatacaatctcgttgctttagccaaaagagcatggttaaagagagataagtccggaaacccatacccttatcaaacttgtgccaacacagttttttccaagtataccaatgaaactttttttaattctcattacccccaaccaaaattgcacacataatccatgaatctcttgaattagggaaataggtagtttaaaagattcatagaatacgtggaaatagacttgataagaacttccttgtcaccggacaaaaaagaatgagacttccaatctgaaagtctatatcttaccgggccggccctgaaaatatatgg

SEQ ID NO: 207052 - DNA, 1184 bp, Cannabis indica
tgctcatagcttagctaggagaattcttgaaaacaagttaacccattcattttacaattcttttctgagtggttggctaatatttgtaaagctgatctctcctattctttgtagtttgctagtgttttgataataaagttttctttcaaaaaaaaaaaaaattgggtgtaaataaaatttctcaaataatatatacaaatactaaaaaataaaataataagagtacaacataaaaataacatgaaatgatgaaatcatcaaaagacggtattatgtaaataaaatcttaaaaatatttaaaattctgtataactgtattttgtaatttttttttattttgttgttaaaatctcacattgctaacgtgtagaaatataacatcatatataagataaatgaactattattctcattgtcaattaattttgagataaagctgtatgtaccttatccactttcattctaaattctaaccgtgttgttatgtgggtttctatataaaaaaattgttttgaagtgtaaaaatataaaaatctctattatttatatatattttttttaaaaaaaaaaaaagccaatcattttcacgtgtgaaatacacgtgtcgatttctgagtagatggcagtccaaagccattatttcaccgacagctggacagtgggcacacaatctatagttttattaaacacgtgcttaattaccggactaaccagtcattcttaccggacctatcggtagctttacgcacctgctcataataaccatttttttattattttttattatcaaatgtggagaaaaacaaaataaataaataacggtcaatatcttataaataactactctctcttctctacagagaaaaaatctctctctgcttttttgtgttgttgtaagctttttccttcaatcaaaagtttttgtgggttttgtggccaagagggtttgatttagtttagtaggcagtgaagtaattaaaatttttctttttaattttttggcttatttgagctgagtttcacttgggattttgcttaatttttttttctgggtagatggagatggagagagatttcatgggattgagctcaaaagattcaatttttatggcgaaggaggaagttgccaatgatgggtccaaagactcaggttttttttttctttaaattatattttttaaata

SEQ ID NO: 207053 - DNA, 730 bp, Cannabis indica
tatatcatctttaatccatgtttcgaaatctgtagttggaagaattaagttgaatcgtgtctaccgaagaaacactctcgggtacttgttctcaatctggccgagaactcgcttgtaaaaagtcgagagcaactttcgatcaacgtttctaaatgggtccactttcacaagtgtctttgatgcttggacttcttcatttcagtgtgctcctcgaaccgcttaagctttctctttttcgattttctactagttctgaagctgtctctaacacctgtatctcaaaatcttgagtattcacgatgctggttattttcgtgttgtcaagtgtacagaatatattatcatcatctgctttataattatttgaaaaaatgatttcatttttcggtaatcgaagctcttcttgtggttgtggctgtgtatttggtgttggccttttaggatcttgcagtgtgattgtgtatctgatgttggccttttaagagtctcattatggtcttcaattgacccataatctctgtctgttctcttaacagagcggtctggcttttcaaccttatgaaaatggcagggtatactggttcgcgagcttctgaggtgctgggaatagatgttgacgggccaagaggaggatcctctgatgcagcagatggggcaacaccagactcatctggtagtgaagatggtgcaggtggtagagacgatgcagatggtgtagagtctctaaata

SEQ ID NO: 207054 - DNA, 677 bp, Cannabis indica
ttggaaataatggaagcataaactatggaatattctattttgtagggattaattactctctatttacatttcaatcaaaataagtaattgatttatttattaaaatctgatttttctaatattataatttatatctcaattacgctataattgactaacgtgactctgataatttccattattatctttctaaatattttttgttttgttataaaataatatttgagatccaaacataataataagtgtatccctttaaatataatctatatataaataaataaaataagtgtattaatgtggaccacacttgaagataaggctctttgttgtttttattattgttttgttaaaattttaacaaatgaaaatcttctgtttttttttttttacttcctattaaaatttaataagatgtactattatttactattgaaaaatagaatcaagaatagtaaatatataataaggaacaaaatcatgtaatatattttatggaataataaaataagactttatagaagcttttgatgtttagtccaatagattccaacatattgatggattggtatgattagatacaatacaaggtggaatatatatttatatatataatttataaaagcatttgcctaaacgacatgagtagttgaaactataatcttttaatactaaag

SEQ ID NO: 207055 - DNA, 776 bp, Cannabis indica
cggccagttccttggaactattaccaaaatgttgttacatccagctgtaagtgtggactctttcttattgcttccttattgcacagtagctaaagactgttaagagagaaaagtccactcattttgcacttgcaaaagttggcaggaaaatgttgttgctctcaacattggttgatataaattacctcacatggttacatctcattgtttaacagattcctttgtttggtgggattgggaaagatgggagaaagaaatagactggatggcccttcaggggattaatctgcctttagcatttactggacaagaagccatttggcaaaaagtttttatggtatgattagtggcttggtaatttctaggtagaacttggctgccttatcccacagccacagtaattgtttgaatttaaagctttgtttttttgatagatttaataacaccaaacatagcttttattcaattaccaaaatcctattatgggattactcacacatgaacaatgtgaaagcagaatacacacacaagtttattttttgatagatttaatcaaaccaaacataactttcatctaattaccaaaaccttatcatgaggttaaagcttggacactactaaggaatttgaagctttcttactctctgatacatgagacacgaataagtcaaataatttaaagtttacactgtatattttttgtttgttttttttcccttttattgataacaatggacatttgttgaatgctataaatgcaggaactttgtatgatc

SEQ ID NO: 207056 - DNA, 676 bp, Cannabis indica
ttagtgttgatgaaattattggtaatcttctaaccttaagagtaacatgcatataaagtttataatatagcatccagtaatatatcatattgaattgactactttgatttttataagttttgttcgctatttttattgtggtatagttcctccaaatgaaaatatcttaaaaagttgttcccgaaaagttaggtgtcttttaaatgttgttctcggacagctaacttgtccattccgaaaggagtctcatgaaatgatagttgagtttaaaagggtgttctcaaaaactatcatgtctactccgagtttagtcttcaggaagctagtccttctccggaaatggagttcctgatggctagtctttcctcttggaaggtagttccagatagccaactccagctggctctatcctattcggaagcttcttcagcaaatgtatttggtccatgatcccggaagctcgtatatggtcccggatgcactctgacttatggtggcgtggagatcttattcatcgaagaattgatttagctgtttattgtttgactaacttaacaacctcgtttcttgtagctaccgactttaagatatcctaagcctataaatactaccttcacttatcatttcagatacacaaaattgacgagttttaaaaggagactttgagtttgagaga

SEQ ID NO: 207057 - DNA, 955 bp, Cannabis indica
tacgacgctaccagttaaccacagatgttttgagtttgtataggtatgactgactgctagtagcaaccctctggtaattaataaaagatgtactgaaataatatgatttctgtcattgatgattttacatttgatactatctataataataaattaagcttaatgttttcttttgtcctcaggctcctctttgtgtagaaggttgggatgaagcacttcatgagattggcagattgtcacatcagacaatcctcactcgacaaaatgctgaaatattactgaaggctgtaaaagacataccagtgatggtggttgcaggtgctgaagatgccttagtccctcttaaatcttcccaagctatggcttcaaaactaggaaattctgtgagtacttgcttttattatcttatctttattgaaattcaactaatctaatctaatataacgatattgatattgttgattgttttgggttaatgcaggaacttgttgcgatatctggatgtggccaccttccccatgaagagtgtcccaaagcattacttgctgccatctcacccttcataagcttacatgtacttaaacaatgctcacaaagctagtaggtgtaattccattcattataaaaatagggcttttatctgtttgtaggtttttttttcttaaattttggcctttaatcacttgaagcaattgattccaataggaggagagagcgagagagataagtcatctcttcgttttgggttttcttcttctttttctttttttgttttttgtgtttaggtttagggccttaccctaactctaattttctagggtgtgagagctctttccttgtatggtctttttttttctttcttttcttttcttctttttcctccctaaaaaaaagcttatttttctcttctcaccaagttgctaattcccacaaaagtggtggcagattagcgtac

SEQ ID NO: 207058 - DNA, 963 bp, Cannabis indica
aaaaagccctgactaaataattataaaacgtgagtggctagtagaaaatcagatacaagtggggtgtataagatataataacgataaattgagtaaggtctgttcgacatagtttgccaatgatatatgtaggttccttacctcaacaacttagcttattaatatattataagattacagggttagcctatagttaaaagttaatgataaataattagttgcgctactatcactcatagtagggttgaactcgttttaaaaggttattagtgcgtttatgatgttttagcgcttatatggtatgatcataattaaaagtaaatagtttgtattagaatgtaagttcgtttgatagattttttttatattttagcagtgaaatttagaagtttgggtattttttttttttttgtgaattaaaaaaaggattgaaatttataagacataaatattactagaaaaatatgtggtattataaatatgaagagatatgatacccagaaagttagtataatagaagaagcaatcattgaatacaacttcacaaatctattaacattacatattcaaacttcaccactatagcaaggtaaacaaaaaagttagtgtggaaaactagttaatctcataattaagttaacttgaaaagagtattggaagaccaggaactataagagagattaacaaagaagatacagtagagtggtacatgaattgtgagactacaaaaggaatcaaagactattatctaaaaaaatgagaaggcatgacaagtgcaacaaatgcacggataaagaaagttaagaagtgaacgttagacaaaaaggtggttgaaatagatcatcaaatatttatacaagaccttttgaagatcatccatgtttattttcaagtaccataaaaaaagtatctatcgatgagtgagtaacaattacgaaaatgcaagaatgacaccgtagcttt

SEQ ID NO: 207059 - DNA, 610 bp, Cannabis indica
attttagaattgggggttagttgaaaaacataatcacttaagaaggttatgccgcaaattacccaaacctaaatgatagtattcaactaatagcacttcaggcatgaatcacaactgacttttctacaacaggaggtgagttgtgagatgatctccagagtcgccctgtgaggaatattaatgagtttaatgaaagaggacaagtctttgtgtgtaaagaggaagctaggactgaaatgaagctgttgaagattggctcggaaagtaaactcagcacaagtacagctacaacgagcatagtcccaatgaaagataaagagaggagaagaggtgtgtggctgggactaggaggttagtcgggaactcaaggggaggttgacagcggtctaagacttcaacgagtgcggtggtggtctgtgagtgggagagggagttgagacttctctagtttgtgtgcggctaaagggaagaaaaaagaaagaggtaggttaggttttagtctttacggttttattatgttattttttctaatttttagtactgtttggtaacttaattttcttctttgttttaaaaaccttattatagtgttttctaagcttatttttca

SEQ ID NO: 207060 - DNA, 653 bp, Cannabis indica
agactgctccagcttcttgcaatatatattaatgagcggtataaattttgatagggaagctatgaaattgcctctctgccccttctaaaggggaaaattaagaggggcactaaatgaaaaagataaaagagcaagaagaaagaaacatttaaaatctggttactgtacctatttatcattatggtttctcgtttttgagaagcagcttatgtgattgaaattattatcttgacttgaattgttcattcaagtcctctgttcattcaatatcagaggacttagaattgtttatgaatgctcattctatgatgcatattccctttgctttcagcaagtgggcctgggaggtgcaaggtaaacaatggtggttgctggcatgacgctcgaaatgggcatgcatattctgcttgcactgtacgtgattctcagttcagtttcttcttttccagggtttttttctctcaaaaacaatttaactttgattcctagctgtgtaacaggatgatggagaggtcaagtgtcagtgtcctcctggatttagaggcgacggtatcaagagttgtgtgggtaagagatatttatttatcacattctgataatttttctgttacacaagtttatgaatcatgataggaaatttgagatccaagaaa

SEQ ID NO: 207061 - DNA, 1097 bp, Cannabis indica
gtattacctacctagctgtatctatctaactaaattatttatcattcacaatttatgttctttctttttttttctatttttgtttctatttgtgaaattttatttcattcaagaaaattaaagaaaaaatgaaattatccttttgggatttctaattaaatgaacagagatcattgaattattgcttgtacaaaattgtaaaatgaagggtaaaattattagtactgttttcatccttatcttgttatcctttattatttgagccagaaagattttaatgggtaccaaagttttgactcttattttttgttattctattttctttcttaagttaatgaagtttttttcttttactaaatttcaaggaagtaggtacagaaatatgtatagcacaaaaatttagaggatctgtttgtttgtttatttattaaaatttatgttcgtttaaaaaaaaaaagattctaatgtgcttagattctgataattatttaggatttttcccctttagctaataaaaaattgaaggctattataagaggaaaagtaatgaaaatgacttgggtagccatttatatatatattatgaaattgaaagacttttacacaaggtttggcaaattttgtctgaagaagaggggattgaaaaacagaattataaaaataaaattatgaaaatgttaactgtaacttttgcataaaagcttatgattttatttttaactttttgaatgcaacttaggattttatgatggaagcttgtctatgtttgagcttggtaccatactgtgcccaaacatatgtaatgatgtatatttctttttatattaattttatatatttgataggtcaatgtcatcatatttagttcagcaatagcatgatgtaagtactatctgggtggactgaaagcaagattctgacccaatgttttttcttctttcttcttttcatttacttatatttttatatttcatcaaaacataaaatatttactgggaagtcattaaattcttctcaattttgtttattgttctagatatatgtttttttgaatgtgctcaaattaattacattgtcctattattcaaaaaaaaaaa

SEQ ID NO: 207062 - DNA, 702 bp, Cannabis indica
aaaatttaatttacaaaatacaggttatatttaacattcgcattcacactaaatctaaccccatgtcaaaaccttaagatttatcaaagaatggctaaagttcaaatctatgacttttttttttctcttttttcataagtataggccaattaaaatattgaatacatctataaattagaagataatttgacattcattccaattgctttgctatgtttgggaaaaggaaaagatttttacagattgacataacaagtaccaaaaaaaatacatatatagttagatacgtatgatggaaggatagggctttgactttgtatagatgattactaaagatacaaatacaaccatacaaaaataaataaataaaaaagatacaaaattataattaataaagcaatctttcttaattaataaccaataaagttacaactcgttggctataaattaattaaactttggaaacattgaagaattagaagtcaactaattttggcttaaaaatacaaacaacaaatatataataattgggtatatttttatatatgtatatataaagagaaactaattaattaatgcaatatatatatatatatggctaaaactaataatgatatgaattattaactctttacttatagatgttatacatatacacaaaaaatcataacttaattattagattcttatatatatatatat

SEQ ID NO: 207063 - DNA, 935 bp, Cannabis indica
aatcaatcctgacaattacgaagtaactgctcttcttcaatggtacgactcttaaaaaaattcatttacattcattaaatatcatttttgattaaataatattgattgtttattactctaataagtaacctaacatttaaattacaatatcaagggctgaaaataacaaagcagatataaataatattactattcaagcacctacatatccgtattctccaaattcatctgctgcaaaactggaatatgtcaagaacaatgaagttaccgatttggtaaagcaattaaaaccaactcaggtaaatagaagatatatggtactacttaccacttttaaatgtatatatttcttagtaattactaattactatcttgatttttttttatactctttgctgtttattatgtatttatactctttgctgtttgtttttatactatttgttgtttactaattacctgcccataccgatgttgtttattcttggggctgtattggaactcatttttacacttcttgtttgtggttattatatttaacagcctagcacaagaaaaataaatatatatacccgattgtcattgctctcatttcattattactaacctattcagaccgtatatttagaagagttatttatttgttttaggtgttttaagagcttaataatacacttaattgatttacatataattgaaagtctcgagaaaaaccagttcattattatatgttaccatccactctaacttgattaaaaacatgtcatttttaactgaattcttcaatttccattctctgtacttcgttcattcaattctcgatttgattacagaatgaaatttttttaattggcatacgttagtatcctaacataaagttgtatattgttctcatttctcaaaatgaaaggaataacttgttggaatttatttta

SEQ ID NO: 207064 - DNA, 550 bp, Cannabis indica
aatttattaaaaaaaatattgaaatcgtgttatgttatagtaacactttaaaaatgccactaattttattattttgtgtcatttttacaaatatcactattgaaatattctagtgacatttttaaaatgatattaaagataaatatctacaaaatagtgatattttttgtcaaatgccactaaatgtacttataatcacattttttttttcttaaaatgttatttattcatactaaagtgatatttttgattaaatgtcattaaataactattattgaaacatttattacaaattttactaaatatcattaaaatttagttatactcgcatttatttaaagggttactaaaatttatttttgatgatattttaaaaatattattaaaaaataactttagaaattataatacattattgggtaaattgcggcataaatacctaatgaaattaaattttctaaaagttttgtgaagagagtattccctgattcagaatatttcaatgttaaaaatttgtattttcgctgagtcgtataattcgttactccat

SEQ ID NO: 207065 - DNA, 695 bp, Cannabis indica
ctgctcaaccatgaaaattcacagattagtgtatgtaactaatgcagtttcactacagaaaagaatagattatatcataatattatgaataaatgaggaaagaaaattacaatgttgtgaagggattcttctatcgaactaaattcattgtttatcctaagggcataataaatcaattcatgactgatccgaatcagaaaaaaatactcctataaaattaaactataaaacttgtttgacaaagtatctcaaaattacaatattgtagagggatttcttctatcaacaaagtatctcaaaatttaaatattgaggaggtatatttcttctatcgaactaaatttattgtctatcctaaaagcatatttactaagtcaattcttaaccgacatgagaaaatgatactcttgtaaaattaaacaataaaacttgaaataccttcttcaacaaagtatctcaaaattataatattgtgaatggatttcctctatcgaactaaattcatcgtctatcctaagggcatactaagtcaattcataaccgacacaagaaaacgacactcttataaaactaaacaataaaactcgaaataccttcttcaacaaactatctcaaaaattacaatatccaaactaaactcattctctaccttaatgaacatactaactcaattcaattcatgactaaaaagataa

SEQ ID NO: 207066 - DNA, 763 bp, Cannabis indica
caaaactatggaagaataacaagtaggtaaataatctcctctaagaacacgatcagcctcataaagagaagctcgcgctaaagcatgcgcaaacctattaacagtccgcttaacaaaataacaatcaacagcctcatgattgtatgtgttgtagttgtttaaaactatttgtaaatttttataaattttgagtagttaaaaatataaaaaataaaatttatattttattgaacgtgtggtaagttactgtttaaattttatttctcagcactgtgaattatttaaatttttttaaaaatttacaagtaatcttaaatatatagctacaactacaacgtatacaattaaaaaaaaaaattaaaaaactctcctaaatactaaaataaataaaaaaatcttccaaaataatgtttaaagtctaatacagaatttcttctaatattataatgtatatacaatacagatgctatatatgtattacaatattatatcttgaaattatatttgcattaatggcttttaatttgcctaaattctggtatggagttggtatatatatatatacatatttataaatatatatatatacatatatatataattaacaataacatcatgacatttaagaatacaaaaaagagaaaacaaaaaattattataattcaaagacttaatgtgaattcttttgtaatataaattaaattaaagtatatcatgtttagtatacttgctaaaaattactaatcatgttaattaatagttc

SEQ ID NO: 207067 - DNA, 752 bp, Cannabis indica
aattattaaattaaaatatttaaatgtgacataataatactagtgctcaatctttatcattttgttttttgttaattttttgcaatatagctaacttttgtttttgtggaaattctgacttaaatattggagactattttgaaaaatattatttattaaattggacaaaaatgaaaaatattaataactttaaattaggacaactcaaattgctaaagttagcttctccacttaaaaataaattatatttgccgtagcatgcattgatattggaaatttcttatagtgatgcaacatatcaatatttagaaaaaaacatgttttaattataagtattataatttccttaaagaatattagttaacacataaatctgacacatatttatgcaatatcactttaaagatatttaactaaaattttctatgtggcaacgcacacacttgtatggttaaaatcacttgttatgtgttgagttttattgtgtgtgcataatcacacacaaaaatgtaaatataattagttataatttttttaattttaatcataaattttattgtcactaaaataaaattaatttgagtgatcattactatatatatcttttataatgatttgttgtgaataaacaaaatctcatatatataatatatataagtgattatgtctaacatatatattttataataattaggtactctttgttcaagattaatattgggccaatcaacagttgaggaatcaaaagcact

SEQ ID NO: 207068 - DNA, 1167 bp, Cannabis indica
attctaaaagttatttttttaagttatatgagtctcaatataaaattattgtacacaaatagcggaacaccgagaaaggtgttagatataccagcaattctctttagataatatcaataactaatcttaaaactgcctcttatcaaaattgttgagtaccacttgtatttatatagaccatttcaagtgggttaagtcagaatgatcatatatacatttcgagtttatgcaattgtcgtcagaaataagtgattatatatatatatatgtatatatttatatatatgtgtgtggcaatctgactcaattaatcagcaatggcatgcctcaataatgaaaacggctgtgctcaatacataggacagcactaataatatatatataaatgtatttaatctatatttcgagtatatattatatggatatatataatagctgatttatatatatatatatagccttaaaacttatatagtagtcatatatatgccaattaaaattaattattataacttagtaaacaaaatagaatcgattagctagttattactatatatctataatatgcttggtaatcatgtaagtgatatatatatataattagctaggtctctattaattattagtatatatatacttttgttattatatatagggataattatgtttagattaatatatatatatttatgattggaccattcaactaatattaaagttgtgtctctctctgcatatatataagtgagtcacacaattttgagaacttctctaattttaatgatgacaaaaccaagccccacattgacttgctccacatccatgtgagaggagaatatatatatatatgtatagatatatacttattatatggtaattaattattaatatacatatatgtgcatatctatatagaattcacttacatgtacatttatatatgcatgttattaattcatgattgtaatattggatagggctctagggttaatttcaaaaaaaaaaaaaagttgtaggttttttgaatctatatatctcactaattatataaatatatataatttcttgatgtcaataattaatttttgactaatcaaaaggatgaagccacaaaaaaggggctttctcatttttgttgtttaccaaaaaatataatgatgcatgatt

SEQ ID NO: 207069 - DNA, 812 bp, Cannabis indica
tgaaattaaagttacctcattctttgttaagcgaggattgtatagactttcctctcccacagtgctaacctgaaattagtagcttagtaattagtagtaatataatctagaagaatgttaacaaaaggttaagcatttacttacagtaaatcctttgtagtcatgagctggataaactaatgtttccttgggcaatgtaaaaatctgacaccaataataacaaaatgttaggactctagaggcataagttcaaacttattagtattttgtagttttatcttcttgcctgtgaatgcactgatttgtagagctgttgtgagcttccaccctgcaatttgtttttttttttttttttgcattaaacacatattcctcaaaaatcaatcccattgtaacaaatggtctcattattttaaaaaatgtgcgcaaatcacactatacaaacaagtccacaaaaccccaacaaacatgtgaaagagaatcctttagaagaaggacaaggattgagataataaaatcacacaaaaattggaaaaaccaaagaaatggagtccaaattttcattcaccatacctgaaagtctgttctcccacatccacgtatcaataaggtatctccagtgaaagccatcctaggctgaggctgatcagctccatctcctgtaacataggtgacacagcccattgtatgaccaggagttgcacgaacctgcacccaaataagttattttcttaggaaaatcaagacatgtgaatgtccttttaagaatatataacctcattttagaaacctacaaactacaaagtacatag

SEQ ID NO: 207070 - DNA, 671 bp, Cannabis indica
gacattggctaagttctcttctggcaattttactttgatatgcaagggtgattcccaatgattcgttagtgacgactaggtgacaattgggtgatcactagtgcacatgggtgtcgtggacttgcgcgtgacatatgtacatgagatattcacttgtgaaatcatttaaatcttattttggggacaaaataagaccgatgctttgagcaaaactaatgttcaaatgactattaacctagcccaaggtcaattaggcacccagagtgcttgcacactagtgcctggtgatgtctggggggctaactcactacttaaacgatattttctcctaattccaagtctcttatcttgttttatgataaaaataagaagaattcctaagatagaataacaataggatcgatggaaccaccaaaagtgtggctacatcaacctgggcgcccaactcttcatttgggtcctcgatgggttcgtttgctttgcaaaagtacttgtatctttcttgtgggcaaaaataagggaaagtcctgggaggcttctttggaatgacatcccaagattgtccaggttaaaatatgtcaacctgggtgcctaagatggtctgaaggcctccattgggcatctgggtaagggttcacatttttgaaattagtctcattgatgttcaatct

SEQ ID NO: 207071 - DNA, 821 bp, Cannabis indica
aaggagaaattataacttgattaattatttttagtagatgttctattaatttttaaaaaaaattaaataatttatacgtgctaaaaatttagcgttgaaacagctactcgtgttcaaatttttataaatttacaattattttatgcatcgtcatataaaaaaaattaacacactaaaaataaaacactaacaaaaataacattatgtagtagcttagcttcacgctaaatttatattattattttttttggtttcaactaaccctatatttatatatatttatatatatatatatattaaataaattgcttacacactctagctatattatatctaatatattaagcacaaattgcttctttagtgtaagtagacactatttttctattttgtctcaacaactagagtatataattaaagcttgaaagtgcattaaggaatttttctactttctctaatataattatagggatatgatattgtcccgttattatattttcacggattgtaatccgtgatgtacgacaatcgtcagatgaagaagttatttgatctgacggctgagattgatctaggagtaattaggattaaaaagtagaaacgtatcctgacactcatttaatgtaccctgagacccatctaatgtaccacgaaatacattccgtaaaagtacattacgggacaaaatcatatccctataattatatattttaggatatttttataatgtacccttctttaaaaaaggagtctagtaatacactttatatctatttcgacatataagagaatgttttagtctaaactttttttatagtcgt

SEQ ID NO: 207072 - DNA, 1073 bp, Cannabis indica
agtcaaaatgaattgatttagacaagttattaatatgattaattaataatattaaaaaaacttgaataaagaaaaaatctatagttggtgtgacactccaacaaaatttcgtttgcctatactaattagaatattgttaacatttggacaaattatattggtgcttttcttctttgtttaaataaatattatatattatattacttattaatttaatttgttaactaacaactaaactttggttatgagatgagagaaaaggaaagaggagaaaaggacatgcaccacaagtgaattaaggtcaacaaagtgaggctcatagttttggacatggtaaaaaagaaagaaaaagtgagtaaaagaatatttcaaagtgagaagaatagcactccttttttcattgcatgccttagataataataatatgtataattattattattattagatttttttattaaacacatgagatgcagagtccaatactatcatgaagtgatatcaaatccgactccagcacaaatgaatcaagcttgtatttagaattcttacttaataatatttaaatttccacaaatgttaatttatttttacattaaaaataatcataatttttttttttaaaaaaaactattattttatgtacaaaaattaaaaaaataatttatttatattaggtctcatctattttagtgcagcttgagtcacaccttatattgattaatatatttttttattatatttattatattaaaacatataaaatttgatattaaattacactaatattatttaagtagtgttaaaagcctgttattcttcttgttataattttttaagtagtaaaaaagaaaggctcttccttacaattgcattggttttttatttaaagtacaaatacattggttaattcattgaatttttattctttcccttttctttttcattaaaaaacgttaaagtaagtcaaaggataacatgccattatttatcaaaaaaaaaaaaaaggaacatggcattgagtttagggtaacactagctacccttcaaaaaattgttgtaataataataat

SEQ ID NO: 207073 - DNA, 763 bp, Cannabis indica
tgttagaggccgaaggccactaatttcttgtaactgatttgtgctgatttggatagtgcatatggggatttgttttaacaattttcacctgaatcctcataagcactcttaatagttgtcttagttattttctgagagtcttagctcgaacccacaaggggttttaccaacctgtgtctatccctaataagcttacgtaaagcttaaacttattaagggaagctaccttggttcccatgtttgttgggttcactatagtaggcaccttttctatttctatttgtccttgagtaaccttgtccatgataaaatgatatttgagttctatgtgtttggtcctatcatggaacacatgattcttgcatagatagatactgctctggctatcagagtagatgatatgtgttttcttaactaggtttagctcttccattaatcctctcaaccataaggcttccttaattgcttctgtagtagtaatgtattcagattcagtagtggatagaactactactagttgtaattgtactttccaactagtacaattgcctcatgttaagaaaaaatatgttgatgtagatcttctagtatccctgtcccctgcatagtctacatctgtgaacccttcaatgttttaatgtgactggtgtgcttggtatatcagtcctaccttagatgtgccctttaggtatctcataagtcgattcatgacattccaatattctttccctagactagacatgaatctacttagcacactgat

SEQ ID NO: 207074 - DNA, 871 bp, Cannabis indica
atcttatgctcttttctttatttaatttcatttttgttgtcgtttgtcactttcgttatcgttttcttacttttgttgtcctttgtcactttctttgttgtttgttactttagttatcattttttacttttttgtccttttttcacttttgttgtcgtttataacttttgttgccgttttaccattgtcgtttttcactattgttgtcgtttgttgtcgtttttcacttttgttgccgttttactattattgtcgtttatcatttttcttgtccgttttacgtttattgtcgctttacatttttgttgtcgtttttacgtttaatgtcgtttttcaattttgatgtcgttttttacgtttattgtcgtttgtcacttttgttatcgtttgtcaaattctttgtgcttttttacttcagttgtcgttttttactttttctgtcgtttttcttttgtagtagttttcactttagttgtcgtttttcactttagttgttgttttcacttttgttgtcgtttttaagttttgctgtcgtttttcacttttgtgtcgattattgtccacttttacttttgctgtcgttttttacgtttattgtcgtttttcacttttgttgtcgttttttacgtttattgtcgtttttacgtttattgtcgtttttcacttttgttgtcgttttttacgtttattgtcgtttttcacttttgttgtcgtttttacgtttgttatcgtttttcacttttgttgtcgttattgtcgtttttcactatttgttgtcgttttattttcgtttttcacttttgttgtcgtttttctacatttattgtcattttttcacttttgttgtcgtttttacatttgttatcgttta

SEQ ID NO: 207075 - DNA, 868 bp, Cannabis indica
ttgtaacacattagtttcttaaaaaagtttgtagttaacacaaatgttactaaaaataagtaatcagaaagtttcataatcaacaaacaaaataattatttaaaaaatgatcacattattttaaaagtaactaaacaaaaaaggtgacaaaaattaatgtatataaaattattttagaattggttgatataataaactttgtttaagtcatttagttactctttagatattaagaaaaaaaaaatagactcgttaactaaataaaaattagaaattaaaaggatgtttttattttattttttttaatgataaaaaaaaaatatgattcccatatattaaaatggttatcttaaaaagtaggttgcaattatattctttttgagctaaaataactaacggtgtaattgttttttttttttaaaaaaaagaataaacaattaatagaaagatatgaaatatattttttaagaaaaaaaatacatatttcagttttaaaaaattaaatttaaataaataaatataaaggtgaaagagtgcacgagattctttgatttttaagaagtttgaatatatatacacggtatggattgttagtattatgtaattttttatgtaaggttatttttgtaaatagtttgataatcatgtatattattgaaaaaatcccttaattatataacacggtaaacatttcataacataatttatgactagttgctttcctttcaatactttatatatatttttttttattattttttttatcaattttaatgtacgtttaattatgtctagtttcattcaactacaatgcggtgtcaaatataaccaatatcaatcaatagggtaaatagtggtataaatactt

SEQ ID NO: 207076 - DNA, 788 bp, Cannabis indica
gagggagttgttttgatcgaataaaacagaaaacaaatgtgtaatttcagtttcttcacagtttttctgatttttttttcgtcattttcagtttagatcattgcaggtcttcttttccagttgatttcgccagaattaatagttgtattttcctcgttttggtttcattttggttgttttgcagttttgaaacgagcgcgtattttcatcttcatggttcgctctgtacagctgaaggcttagtgcatgtggtatttttgaaatatttgtatgtggactgtataaatgtttaatgggccgggccaaagtatttctgtaaatttttttttttctttttgtatttttcagttttttttcccttaaaaagatagtagtcgaaacagaaaaaattccacaatcataaagaagcttcaaatacatactccgaagaaaaaatattatttataattttatgtatgactaattcatttatttatttggattattttaatctataaatctcaaattatttctattaatttttataattctctttattcttcaaatctttccattaatttcgtaattatctttactactttaattatttatcgtgaatattttaatcaagtttgtagaattagtaagtctttatatgattttttatcaataattatatacttatgtcatataatttttttattattattttttctattttttcatgtcaatcatgttatactattatgttatacgcaaaatttggctatcatttcaaatgaggatacgtgtcaaattggaaagaatat

SEQ ID NO: 207077 - DNA, 971 bp, Cannabis indica
caacagccaaacaacaactattatgtaaattgctaatcatatgaaacaaaaataataaaacttagaagtctcgtaaaggtagtaatgtcttgtaaaataagtcatatattagaataaaataacaaatttaatatttgatttgatttataaaatataattaattaaaatattttaattgtggtcagatttaattataaaatattttaattatccgatttaattttttaaattaattatcaaaatattttgataattaatgtgaccgagacttggatggaaggtcttacttatataaatataagatctcagtcgccgagctcactactcacagtaaattcatctaaagagagtagagagagtttggaagactgattacccatactaatcagtttccttttattttgcagatccaaagctcgtgtggaattaaagctcaaaaaatacaatagttggaggtatcttgtatttttttattgaataagtactttgtattcctcaatctcaacaattacaacctattgtagacaatacatccatattgcaaatttatacatgtatatgcattaatcccgacccccctatacaacatatatatctataatctcataaaccaatctctatccttggtgttagttttacaaggcataacactaaggatcctatgtttacaatcacattgaattcgaaaagtagtttgatcaatcatccatagtttaagattccacaagatatcatttcgaacacgccatatatgatacaccacaactgcaattatagcaaataacatgccttggcagttgttgctgaatcttttggctcgagaaatgcttcgcaacagtggctgcagttgagtgcttttgacatcccaattcaaccaatgcttgatcttctccaaacatttcctgttataggcacattcaaagaataaatgatcaatgttctcaatagcattcccacataacaaacatgtc

SEQ ID NO: 207078 - DNA, 593 bp, Cannabis indica
ttttttttttttttttttacaggaatggacgacccaaatgataagacaatctccattaaacaagctttaaatgattataaaaggatcaagtaccataatgactatttgactaatttgctagctgctatcaagtatgtatacataataagctattatatattacttatttcccatatatttagaaatatataaaggctaaaatatttgatatttttaaaatgtatacttttatagttatttattttttagtaaatattttttaaatattacttattaaaaaaaatcttatttttttgtttttcataattacctactgtttttgtaatgttacacttttataccactttctttcttcttcttttttctctcaaaatatcacaaagatatatgttgacacagaaatttagactaagagttctaagcaacacccgctcgctagaatggcgagaataaaataattattaagtaattataagatagacacaataaatgtatagtagctcacttccagtacccgctcgctaaagagggaagctctcccttgtgggtagttttctaaatctgaaaaacgaacaaagggagctctcctttta

SEQ ID NO: 207079 - DNA, 547 bp, Cannabis indica
tctcagaatacacttcccacatttgttaacctccataacaagaaaatcgtctcatttcttatttgttcgcgttgcaattttgagttggaaaacacttgtcatgcctcattcttttgtaattatgtcaggaaaatctaaaaagatatgcccttttacccttttattaaagtttctactcagataaattattttgatataattgcttctcatattgccaatatgttatctaaggaagatctggagttgtttgtttgtttatcttggttaatgtggcatgacatgaatactttcaatcataaaggtagtgctactcaacatccaaacctgttggagtcaggtctttctttgattcatgaatataaaagaagactcgaaaaagcttggagctaggcacggtgtagacaactagattcccccccctcctcggcctttcaaaacttgaccacagatgctgctgcaattgatgctcacacaaatagatcaggatttgaagggatttttcaaaatagcaacagagaataattgcagttattgcaattctttttca

SEQ ID NO: 207080 - DNA, 1017 bp, Cannabis indica
aatgtcattgtattattataacatgttttcattttgtgtgtagagtatgaaaagattaagtcggcgaattcgattttgatagtgggaggagggccaacaggggtagaactagccggtgaaatagtttatgactttccagaaaagaaggtgacaatggtgcattctggggcaaggttactagaatttgtggattccaaggcttcacaaaaggcattagattggttaatatcaaagaatgtggaagttcttttgggtcaatcagtgaatgtggatggtgtatctgatggtcattttcaaacctctaagggagaaactataaaagcagatcgccattatgtttgcactggtaaaccagtgggttcatcttggctaactgagactgttttgaaggatagtttgggtattcatgggaggttaatggtggatgagcatctcagagtcagaggccataaaaatgtctttggtattggtgatatcacagatgttaaggtaatatataattaactttactttctttctttttggggggtagttatatattattgtttttactatatatataatgtgttgtgtgtaggagaggaagcataggtatatagcacaaaaacatgcacaagtggcagtgaagaacttgaaggtgttgttagtgggagggaaagagagcaagatggcaaaatacaaaaactttttagaagccacacttgtttcacttgggagaaaagaaggtgtagctcaatttccatttgtgactattagtggatgcattcctggcaagattaagtctgaagacttgtttgtcagcaaaactaggaaacagcttggtctaaaacctgattgctaatcctacaatctctctctcatttggtttctttctcaattctttttaggcaatgtaattagttggattttttttctcttacatgttaattatagcatttataatgtgttttgcttaattgtcaacactacattgaaaaccaataatatatatattcctcgaccgtagagactagtatg

SEQ ID NO: 207081 - DNA, 1156 bp, Cannabis indica
gaaaaagaaaaaagaaaatcaaaatagtcactatagaaaaaaggaccccaaaaaaatgaaacaatgaacacacaatatataatctgttggagagttaagttacactactttttataaaattataaagttaaattgtgaggtttaaatggtgtcatagcagctaggtacagaaaacttttaaggcaattatttaatgaccaaacacaacccccaccttccttcttcaatagccgcttctctaaggtcgttttcgacttgaatatatatatggactttgtctttgctaagtctctactgccataccactgttaaagaagaagaagaagaagaagaagatagaaatgcataacagaggaggagctagcatggttttgaacttggtgtgtgtatgtgtattactatttttatatggtgggaatgctcaggacactcttgttccagcggtcattacttttggtgactctgtagttgatgtgggcaacaacaactatctctccactctttttaaggctaattatcctccttatggaagggacttcgctaatcaccaacccacaggaagattttgcaatggaaaactagccactgacctcactggtaagtagtactataaacccaataaagaaagaaaaacaaacaaaaaagatatcatgatgtttttgtttaactcgatctgacactaaatagtttaaaatttgtttgtacagctgagactttaggcttcaagacttacccagcggcatatcttagcccagaagcatcagggaaaaaccttctcattggagccaactttgcttcagctgcatctggttatgatgagaatgctgcaaatctaaatgtaagtaataagatctatatttttatactaatacaagccttaaaagtgtctacctttatatttaatgtgggtaaacttgtaattaattagacttaaatcattaattatttgttaagcattaattaactctctttatctaacttgattgattaatacctgaactttttttacagcacgcaatcccattgtcccagcaattgaagtattttcaggagtaccagacaaagctggctaaagtagctgggcagagtaaagctaaatctattattaaggacgctctttatgtagtgagcgctggcagtggcgactttgtccaaa

SEQ ID NO: 207082 - DNA, 788 bp, Cannabis indica
tatatattaattgatgattgataggaattattcataaatgtataaaaaaatgaaaaagtttatttatttattcaatattatatttaaattttattattattttaactcgataatttcttatcttattattattaataataaatcataagttttttttattttgtcgtgccatactttttcggcttatcgtgtgtcgtattttttgagctagtctattcatgcttacgtgtcgtgcctttcgtacttcttgtgtcgtgtcatgcttaagaacatatttttcgtgttgtctcatgccaatttgtagcatcatgtcgtgcccaagcccgtatttttttatgcctagtcgtactcatgtcttttggactcgtgctgatttcgtgtcgtgtcaaaaaacctgatccgcatttataatactatttatatgtatgtgatacatatataagataattatttttaaataatatttatatttttaacacggagtattaataagctccagaaattgatttttttttagagaatagtatttgatatttatacttaattattattcgcgaatgcatattgttatttatagtttttttcttaaaatacgtggcagtctagaagggagccatgtggcagtaggaccccactacgggatgcgacaaagtaaaacgtgtctccaagatacgacaataagtaaaagattgaagactccatgagtttagttttttttgagtggaccttccaagattaggattgtgttagtctttcctccgtcgaggaaagatgtgcctcggagacag

SEQ ID NO: 207083 - DNA, 1443 bp, Cannabis indica
acaaaacaaaaaaaaatttcaaagttgattacataaaaagtttttagggttagctattaaaaactatatgtaattgtgaatttcatttttattgctcattttttacttttgatttccatgtctaaagttcattttttttaataaaattttaaatgaatttcattcttcatatattacttcacttatattatatagcatgaagacaatcttggataagaaattataatttttgcattgatttgttaaaaaattcctctagaaacttttgaaattattagatttaaaaatttttgtccatgcccattcaatttcactaacacgaagattgtaactaattatcagtactaaatcgtactccttaaattttcaaatgaaaaaaattctaattagcctaattaatacatatgagaaaactttttattcaatcatatcaatttaatgatcattaataataattaagaatagaaattttatgaatatgttaaaagttaggtaataattaattaagaattaaaactttgttaaaaaatagttagataatgtacataacaagctagatttatctacataattagtaaaatattatcataaccaatattctaataataataattactaattacaagtatttttgtttgagttgaatggtcacactcatgcatatcacccaaacaacttaactaataatttaatactcttctctcttcataatcataatcaaaatcattaattagtatttaaaagttaattaagtcaagagaaaggtctttctcagattttagtgtatatagacacatattatataatattaatattaataattataatgtcatctgatgatgaagattacaacattattaattttaatgttaatagtaatgaagatgatgattatgtggtgattaagaagaaaggggttgcaattaggaaataatactaataataattataatgagaagaagaaggtgttagtagttggtgttgagaaagacaataaggcaagtcgacatgctttgaaatttgctattgatcgttttttaatctcaacaaatagaaaaatcagaagaaatattaataatactataaataataataataatgatgatgatattagtctcattcttctccatgttcgtcttcacaatccaacctttcctctactatctcattttcatgatctatcatcaagtaagtatacatctttcattctctttcattcatttataaatgtataagcatggagaattctcatttttatgatttttaaagtataagcttacaaaaatttgtggttgtttttttttgttcaaaaaaaaaatttgtatgagaaaacttttttttaaaaaaagttaaaaatatggagaaaatagcataaggtacctggttacctttttatggtaactagtttaattactataagaatacctagttatattttttcac

SEQ ID NO: 207084 - DNA, 857 bp, Cannabis indica
aaaaataggtttgaagattttaaaacacaattcacgtttagttagtgttttctaaaaataatattgacaaaaagtgaattgttttttaaaacagaatataacattttgttgttttcaaaattcttgtttattgaaactttattttttaaaaactgttttcaaaaaataaggccaaacaagactgattgttttcaaaaaataattttctgtctttaaaaataaaaaataattttttatttatgataccaaatatgcacttaacattttccttaaactcgaccccagatgtccaacaatccaagcttttcctcacatatcaattcttcgtttctcagtctagaagttgtggaccctttgttttagtttacttgtttagtttatcatatttttagtttatttatttaattgagttattatttatattataagaacaattaaactgtttttttaaaaaaaaaaataattaatgaggtggacaaaaagtataacatgtgtatgttgagtaagcggttcaaaaaaacatattagacagtaatagaaacactaattttgcatcattgagtacttttaccacaaaaaagtaaaattgagtagttaatcataaccaccataaaacattgaatatttattcgaaattgttctctaaaaaatcttgtcttaaccaaaagatattgcctaaaacccatagtgtgtaaaatcagcccccaaatttatgaaaagccttcatggtatcagacttttatggatgaagtccaggataataaaatatgcttgaacactatcataattttagcccaattcctgagcaaggaataattcctaacatttgtgacgtgttcaaccactcttcctagagc

SEQ ID NO: 207085 - DNA, 796 bp, Cannabis indica
cgtattaatattcgtgtcaactttgatttatctgctttcacattttgtaaattttttacatttttatatttttcatcttcaaagtaaagtacaatgtcagcaagtcagcgacagtaccacggtggggatggtgatggtagggacccccctgatccttctagggtactctcgtcttgcgaatcaggtttcatattttcccaaatctaacattattcttactataagtacatgataaatttttaatgtactaatagattaatttttcttttcgaacaaataaagctgaaccaatggtcagaaagggtcgtggccttacatcaaacactaaatttgaacaaaaagggagggatgctggtaagccattagagcttaaggtggatcttgaaactggcaaagtagttgggactgaagccagtgcttacattcaatttatgggccagcaagtatccattttgtgtccaggtcatcattataatttttccgaagtacccaaacaatataatgatcaagtgcttaatcgaataagggtgagtgatttttaattattttttgttataattattttatatccttatttattaattaatatcaatctaatattattttattacatagcattatttaaatattgacgggaatctccatcgagacctacttatggggactttatatacggagatggcggagaggtatagtgagcgaaagaccaacagacacaggtattttaaacaacattacactaaaccagaagattgggagaaagttcttcaattgccccccgaccacttgaatatgg

SEQ ID NO: 207086 - DNA, 1225 bp, Cannabis indica
atgagatggagcgaccacctccatcacacctgatggaggaagtgggtcacaatgtcccaacgtctcatcactaataacgccacctcaactgccaagactgagagatctgagaatgttgaaccatcatcaaagaaaggagaagggagtttactcgttgagttcaagctctcaaactcgagttcacaatgaagagatgaacgagctaaggataagaaacttgtgattggaagtaactgttgtaaacatacaaagggtacttgacgaactccttaaaggtcgctccgaagcacctctaatcaggaaaaaggtagttggaagtaagaaagaaaggcgcgagtaggctgggagatgaaggagtatccaagtattccataagcaacacccctaagtcttcactacgtagaagtttatctcgtagagatctagaacccactttatacccaaaaggagcgagtccaaagcagtccagggcgacctaaaagaaaagctctgcctaaaaactatggccgagaagcgagcacccttagtagattttcttcaaaacaaaacgaggaaaaaacttgccataatagacttttgagagaagttaactaaaagaagaaaagagctagacaaggagaatggaagacttttgacggaggatagcattagctgtctctaaaaagagtgtaactaggacgaggatgattttgatgagaaatttccattctccaaagaaatttaagctgagcctttgcctacgaacttcaaagagccaaatatgttaccctacgaggtgataactaacccaaggtacaacctagatgcctttaaagaaataataaagattaagagggttattaacaaagcaaagtgtcaatgctttgcggtaacactcaggggtgcggcatacaaatggttcaagcaattaatgcctgggtctataacctcttagaaatagttcactcacgagttcttggctcaacaccatgcctcttgggactacactattccctaaactagtttggcaaatactaagcaaggagaagttgaaagccttaaaagctatatccagtgtttcaatgttgaagcatcaaaagtttggaggtttactagggacgagcataagatggttataactgtgggattctgtccaaaaagcaagttgtggaataacatgctcaagatagagctagaagagttgaaggacttctatgcaaaaaccaagaagtacattcaagttgaa

SEQ ID NO: 207087 - DNA, 820 bp, Cannabis indica
acatcttgattgttttgagacaaggctattattttaattttgtatgtttgtggtgcgaatagtgtgatttttagttaatttattgcccatagcttcagagaaaaaaagaattcaaagaaagaaattggaagttaagaacaattttttttgaaaatatagctcaagaaaagcttggcttttctcacttgtttactaaagtccagtttttggccttattttgcagagtttaaaaattaaggcattcaatttggaaagtcagctccaaaaaatcggggaagctcaaaatttaatagcttgggataaaaggtcaacgagtgtggttaaaatataaaaattcaagtatttaaagaatcgagagaatgctcgtattaggggcaatgcccttaacccacgaggcaaaatgattagaaggaaaaaagtgcaccagaagtaagtacaataactagaataatggcaaatattgagcaacactataagaaatttcaattgatatgtatatattcataattaaggagccaatctacaaaaaaaatacatacaagaagttcattttattcattaaaaatcgacaaatgatctccacaacaaggtgtaaaaagtctacagttactaccaaaaattcatgttcgagaatattttacaaaggtaatgtccttcaaatacttacttctaataaggctcctcttgcgaaattcgagcccattggtaagataccaatgttgagcattgaggtcttttagcctttgaatagcttgaatgaacacattcctggatacatcaactgcatacaaaaatttgttgctattctttgaagcttcaa

SEQ ID NO: 207088 - DNA, 518 bp, Cannabis indica
gaatggtgattgaatcaccacagagaacaaattaagattcaaatccaagcaaaagcatgttgtttttaacatttacaatttacttctataaattaaaacatggttttagtatagaatttgaactcctattaacaagatttgtatttagtatttaaactgtagaaaccaaactttttattattgtagttttactttaaattatatttaatattataaaaatataaatttgtatcaattttgtatcaaaatttttaatacaatattttacacatgttatattattttaaaaaaataaagtacgtgcctcctcaacttaaattctgagtcccccatatatatacataaagagagcattcacacaccctcaacttaaacacgaatatatatatatagagtaatgagactaaaatattacacacaataatattataattttttttagttaaaaaaacaatcatatttatttaaattaagactgtcgttgtttaaatctatagaactataatatatatatatat

SEQ ID NO: 207089 - DNA, 721 bp, Cannabis indica
cattattggggagaattagtttagttgatgggatcttacatttgcattgaaacatcttgacattagaacaaatgtgtctagtggctcctatgtcaactatccatgaatcatgtaatggggaaacaaaattgtgggataggatgatacctatattacccatggaagtactaggatcattacaattcataccatttgtttgagaggcctgtaagttcagcagttgctgatattgagccgaggaaagctgagggagaacagcatgactctcattcgaagcagggttattttcttccccagtgtgtacctggtttgttgaagcatccttgggtatgttttgtctattgaaacctgggggatatccatggatttcgtagcattttttgatggtgtgaccatcgatgttgcagtgagtacagaagggacaatttcttctgggaggatgagattttcctgattgattatcatccttttggtttcctcttttgtccccttgaaaggcaaaggtcatggctgagttgttgctgttgagatttgaagcagtgcctctttggtgttcttcttgagttacaaggtgaaacacacagttcacttcgggcaaaggatccatgagaagaatgctttctctaacttgagagtatgagtccgagagtcccatcaagaatgacatgatgtactccatatgataatggtcttggagtcttttgactcctccacatgtgca

SEQ ID NO: 207090 - DNA, 542 bp, Cannabis indica
taagcgtttatatattacaataggatttctaatactcacacactcacctataattatttgagctagccccaagttgtattttttcggtttcatatcataataatcatactgttgtaattaagtatggctattaaattactattatataatttaataaaataatttgtaaaatgtattactaatcaattataatgccctactaataaaactcaataaaaatgttctttatttttttatttttatttttattaagggattgaagtgggtgtcgtttttctttaatttcattttattggattcgagtttagaagggtgagcttgagctgaattcttccaatggacgtggttcacgagatacacactctctctctcctatttccccggctctagcgttttgtttgtttattggtttatagttatcccaattaattctattcctatctagtgtatattttaagagcaattgctatgtcacactttttaattaggttacattataataaactaggtaataggcctgcgcttcgcgcggttttaaatat

SEQ ID NO: 207091 - DNA, 627 bp, Cannabis indica
ttgtgaaataatcctttttttttctattaataaaactttaagggcaaatccataattttttaccatatagcacatgaaaagctataacatgattctaacaattgaaataaaaacaaatcacaagcacgtaaataagaaaaaaaaaagtttcatcctcttctaggtctatccgccattaacgtcagttagaaagagtaagaagggtgcgagagagcagactcacgaacaagacccaaacccatttcgttagatttggactactcgctgttctttctagtctccgtcagctccatcaagcactcgatccctcaactcctcttccaaatttgtttgtcattaacacccaaatttgtcaaagatgatggctatctcccccgtcttcctaagaggccttacgagatgcttttgtcttaaaaataatcgagaaagaagagagctcgtctggatctatggccttcgacaatgaagaaagtggtggttgtggtggtaatggtgaagaacgccaatttcttcttcttattttttatttatttaattattacttatttattacatatgtgtttcttaaaaaattaaaaacttgtttttaaaaatttgtgaaatgattattgtttgaacatttgttat

SEQ ID NO: 207092 - DNA, 546 bp, Cannabis indica
gatcgaggaaagatcatctcaatcacgacccgagaagtgctattctttgatccactaactgctgaagctaatgctgtgtgtttggcagcggaggtggctcgggattcaggtattcaaaaaaatttattcctctgtgataatctgtgtgtggccaattcttttgcagcatcgactcactgcaaaggggattttagaatccaagcggctgagactcggttcaaagaatgttgttccaagttcgaggaatgggatatcgcacacatttctcgtttatgcaattacttagcgcacaacattgtaaagtgggcaatgatgcatcaaaaaacttggagaattgggattgaagatatccatggtgatgtgttggatgacttcaatgtttgggactcgggacctgtaatccctttgtaaattttctgtttttaccctgttctttgtttggttggggagttattctctttgctgtattgtttttttcctctgtttgtattttcccttttgtttgttttgaactcgacaagcttttgccttttaatgaatgggtgt

SEQ ID NO: 207093 - DNA, 1652 bp, Cannabis indica
  modified_base (41)..(41): a, c, t, g, unknown or other
ctttgtctttcaattcttctttagtttttttttttttttangtttatattcttatgtaaaaatagtgttttttatcgtatttgatcaagatgcatgcagagaaatatcactagttgtaggagccgagaagtttactcagtgtcaatgggtccaaatagactccatagaatataggcaagcttgattaaaacattacgagcttgtttggtacatcatattaggtcacaaccaataatctaagataaaatagaaagaagagagtatgaaactcaaaaacaattaaagtagtaaaataataaaatcaacacccagatatatactggtttaagttatcttatttattgattgagcaagaatagggtacaaatacagtcgagatcgattctctcttggattatctcaaggtgtttactcttgcacttttacccagaatctcttcatctacaaaaaagtttcttcagacaaacccaaatccaatctctcttctctgtacctctctctttctacctctcaatctctcttcaaaaatcacctcttaacactcgtttgaagaatcacccgttgaattgattagtgttagttgtatttataggcccaggataaagatcccaagtcagtggctgcaactgttaattaagttgttaagttagttactacttaacaaacttaacaaactccttataacaatatttccacgtcagcacaagacaaagtgcttacggacgagacatacgcttccgggacagaggatagaagtgtatgctaaaggaacttctctgataaaaaaaaagagtcatctggagtcgactatccgggactctcttccaggaaggaaaaagctcaaaatttggagaagactcctgccatgtgaacatgataaacatctgagaaaaccattcgggatggttataactatcattccacgagactactatcaaatgaataagttagacttctgagaacttactttcacgaaacaattaacttccacttatgaaaattggaggaattatactgcaactatattaaattttaatttatataaaaatattatatattcattgtaaatataaaaattattatcatattatataatttaatataataatatattattattacacctattaaacaaactcatatagtcatatatatatatatgtcctgttcctatagtactgaaacattttttaagttgaagttgttttattggcctggtttaactttctattccactaagatagctctaattttacaaaaaaacagtatatggaatatcttgctggagatttttccctttcaagaaagtagatagtaagtatatgtatacaacattgtataaacatagcaatacttttacttgtaatgataaaagtaataaacatcaatacacctctaaagtgattggtgataagcacgtaaatactagttatagattgggatttatgagtaattataatcaaggaaatagacctgctaccaagtgaatattagattgttgtaaaaagtgaatgaggttcagtctcgagttgctcacggttcctataacataaatttgagttgaattggcaaatctacttacaaaaaagtacgtttcacgttgtttcttgacttttctatatattttgttagttatgatttttaattacaaa

SEQ ID NO: 207094 - DNA, 610 bp, Cannabis indica
aaccccaagttgttttagtttttttttggaaagcaaggaacccaagtgtttagtagtacctattttcatttttattaagaaatgacaaaaaataaaatatgtaaacattgactcgtatattagaataatttaaatattttagtccattaatatttgaagtttaaaagtctaaaattgacttctctataggcaattaactaattacttttaaattaaagaagtaccattttgctttcgttattaaggatttcttcttggacaattagttgatactcgtatgggattgttacatcagaagttgtaagctttgagttggattaaaattaagaaagccgccacaaaggatgactgtcgagatggacaatctatcttttggtgctacaagcacttcggcaccaattgtctgcaggggaagagggtcgtatgtcctcttattttagtgtgatagttgaggattgtacgacattgttaaaatctcaacctaatatgtctttagtttttattacaactaatggggttgcacataatttaactagagtatctcattttattttgagggaatgatagtccttttcatgtcattgataaatttctatctttttattaaaaa

SEQ ID NO: 207095 - DNA, 798 bp, Cannabis indica
aatataagatttatatatttatattacacacaattatttttttcttaactgtttaaacctaatttttaataccgtaaactattcataattttctaaaaatttacaaatagttctaaatagctttaccagaacaactttttaaaggtctacaatcttaattacttatttaattttatatataagatttaccgaaaattaaaatttatattgcacatactattatttttgttatatatataattgttcagaatttttctttaaaattagaataattttttttttaccaaaggaggttttaggggtatactagtgaaatttactttatgtttttactattacagtcttaattatttatttatatataaataaaaagagagtgaaaatgtaatctaaataaactaaacccaaatcgatcgaatgcccatttcctatttgcaccgacgattttggattgagttttgagtcagagactgagtttgagtttgagtttgagctgagaagatccatggcgtcctctctctctacaggaggaagatacatggcttactcaccatccccatcatcgcctcacctactctctgctcttcgttcagcttcatcaacctctgcttctctcatcgtcgatcaagaaaagtaatctcttttttccatccccgatccactttctcattctcatcgcttatatttattactcattactcattgctccactctctgttttttttttgttttcttttgatttgatttgatttgatctgaacttgagtttttcgtgatctcaatgacctgttttgtttt

SEQ ID NO: 207096 - DNA, 702 bp, Cannabis indica
aggctgttgatacaacctcaatctctagttagccaattgttcaaggccaaatatttcccaaacagttcctttctttcagctgaaataggtgggagccccagctttgtgtggagaagcttgatggaagcacaacagttggttaaacaaggtgctgcaatttgagtaggatctcccccggcaacgggtctggccttgaagcaattagttgaaggtcttcaaggcaaacttttactttttggtaatgatgggagtgtctcgatgtatcttctacgatagtgtgtaaggaaacaacgtgagtttagcttgtccttcccatagacgaggccaaattgttgacggtaagaactcgtcaacaaattgttaagacaagattaaatatgaagaactttagaataaaagtgattaaagaaaacttcttccaatctttcaagaaaattattattctatggatattccaaaaaatatccctcttaaaaatgttccaatggggtattatagtatgcttctataattttgaattacatgtggtccccaagatggggggacaacatctcttttgtaccatttagatcagtgtgtcaggtggtctcatgtcccccgtacttttaataggacaaacattgtctctaccatggtacattgagtgaggcaagttttatccccatttcttgtacctgttgtacgatcgctatctcatatgtg

SEQ ID NO: 207097 - DNA, 670 bp, Cannabis indica
ttagtagcagttgaggtcatttaatcatttaataacgatctctccttttggtttaattattgataatttagtgattgtttatcgatatgctaacaatgttttgctcataagtttgttagagctttttattcttttccttatcaaattttgagtgagagtactcttcctattaaatttatgtctatgttgttagacaatttatcttcttgaatttatttccttaaaaaaaaaacttttgttatttattattaatatcacctacaattttaaaaaatttagaatagtcctattagtttctctactctattctcctttaaaatgcatttattaaaatttcacctttatctattttacctcacataaacttttaccttatatcatacaacaaattctttatttttcttctttattttatttaaataacatatttataaatagaatattaatttttttaaagaatcactattcatctagttaaatgtggagaaagttttaactcaaaaacttataaagtaaaataaaacataaaattttaaataaagtcttattggtgcctagtactctgctcgttgtcataaatatatcgctaactaatcgtaaaaacgtcaccaactgatacccaataacaatgcttttgcaacccatagccattccttctcttatcttatat

SEQ ID NO: 207098 - DNA, 600 bp, Cannabis indica
aacatcatcaataatatccgataaagttgaaagatcttctttattatttctaactttgtcaaccagcaatttagaatttgtttccacgatagcaagaggaaccttaatgttataacacaatagaatgttcgatttcaaagttaaaccttcaaccataaggaaattagcacaacctgctgttggaattgacaaaccaacaacaaagttgcccctccaatctttgaaaacagtatgaagcctagcttccttttcctattatccatggctgcattagtattaagttggtaaaagccttcaaccactttaacatcctgagtcaaggagtgattaggcctgagttgcttgtaatccatcgagttcttttaagctcccttgtaatctgagataaaagagctaatccaatccacaatatcagtagaagacatgatttttcccaaataatttgttatttctattcccttagattttccaaagagtggatagcaataataaaatatcatttttttttgtaaaagaacaaaaccagagagaatgaattctctaatatcattattcctgtgataaaaataaaattaactaagaggagatgctttccaaacc

SEQ ID NO: 207099 - DNA, 745 bp, Cannabis indica
ttccactcgagtccactcctataatgccaccaaaatagatatgccaagaaaaagaaaagaccaggaaaaaaccctacttttcaacaaacccacacaacatataataatggaaaatgctaatggacccattcaagtatgtgtggtggcccttcatgttcattcatattagttttatttcttataaaactaattatattttttatgtttatttttgtattaaaataatttttaaattaattatattaaaaaaattctcttaaattaaattcaacttcatattatattattttttttttatcatttcatagtctaatgagtaacttttagaacataaagtccaaaatagatttattttctattatattccaaaacaacgtaatcaaaaactattggccgagtaagaaattccaccaaccaaattttcaataaaataaataataaaacaacaaaaacaaaaacaaaaaaacaatcacaaattatactttattgcgataaatacaacatccattcatgtacagtaaatcattattgtattaaacgaaatattattaattttgagataaaaagagaaattggtgtactttttcaattatctgggccgagccaataaactcagcaccaactgtatgtacacaattttgatttagtaataataataatattcttaaatcggattataataataataattattattaatactaatattcacataatatggtatattcacaaattcacagtattt

SEQ ID NO: 207100 - DNA, 594 bp, Cannabis indica
taagtcacgtgtcacataaatattacccaataaatagaagttattttagtctattagccaaacaaagagaaaagaaaaacgaacttaatatgataaatgtgagttggtactgaaaaattaaaaaattatatgctcaggatgagtataaattgacctgtgtgattgcacacgtttgcaccaacgagataacttcaggcgggacgaaatcgttgccctaaaattataaatggttaatatttattaaacatcacatgtaataagtgttttcaaaggtgtatctaacattacacataatcctaaaaattaaagttattttcctttttccgaatgatgtggattttatacctaatcttttacaactaataagtccaacaagagatggctaagtacaaaaataaagcattcgtttttcaatatatctacacctgcaggggggtttttatataataataataatatgtatatataaaaatggaagtttgttggtatatataacccaatagggaaatttcatcatgatatgagtgcatatatactatgcatgcatacgtacgcacgtttcagaaaaagttttaataattaatcttttttttt

SEQ ID NO: 207101 - DNA, 754 bp, Cannabis indica
ttattattattaggataaatagtcacattaatacttaaaattttaagtttgcaaacggtataagtattcaatgtttgtaaaactgtaatttttctctaattttatttgcaaaattgtaattttcttctaattttattgtaatagacttcgtttagaattattaaaaaaacatttagaaatagctaaaaataaacttcaagttcatgtcacatgtaaacttaaaatttgagcattatttatcttgctatttactattattattattattattattattattattattattattattttgtgtactgtcccctaatacgattccctttgcccgttattcaattgctctggaatttgagacttggtctccccttaacgcttctgctgctacacttttccttcaactgcatacccttaacagttaacattagaagctggctttgtccttgaatagaccgtgctctggggcaattattaattaatgtttgttgttgccacatatccttaagagttttttatggatatattataggattgtaccatatatatatgtatatgatatgcagttattaatataatataatttatatatatatatataaatatatatgatcttaccgtatagtagtactctccgtagggttccagttgttctgctagtttcccgttcttcattggaaaaaccttcccattggaataccgaaaaactccatctttaccaaattctttttttggaacaaatggatggtttggaact

SEQ ID NO: 207102 - DNA, 731 bp, Cannabis indica
gcagagaagaaacttgaagttttgagaagttgaaaattcaaaattagggggaaaatggtaactggaagtcgcaaaaggtatttatacctaaattggcaatccatgtaaaagagaatggaggatccatgaatcaagtctccaaaaacacaaactccatccaacagtttggggattccatcagtcaaagcatgtcaccacacttaatgctccctggaatcaaggtgcagatcaatgatgaaggtgctacttttaattttcgtgacaaaaagtgaatggccatcaacataaacgcgtttttggaaagcaactcatcaataattgtgttcttccaccactaagcgactaccacgtagatgaaccacaactgaagatggaagtcaccttccctgatcgattaacacctagaaagtcatggtattacttctaatcctccacatgtccacactaatggaatgatgaaagcttccaccatacgcaacattttggaagcttgggggtaaatgttattcacgttttcagcgagggacacgtggaattcagggtagtgtcaaggaccaaggaccccccagtgggtcccaaggtagacagttgggccaagtccagattatataagaccttctatgaacgtatcatatgtctgtgatcagatgaccttccaccagtgacagctcgtatccagaagcacgtctagtaccgtgaagttggatgtaatatcctgggaaaaatatatt

SEQ ID NO: 207103 - DNA, 1531 bp, Cannabis indica
gggtctcgggtcctaggtgtaggtcttggatctgggtttgagttttggtgggtcccatgttcggtcctgggtcccaagtttagatcgagttcgggtcttgggtatgggctgggtttgggtcgatgtttgggtctggttttgggtatcgggtctaggtctcgggtctgggtccaagtcccagatccttgtccaagtcctgagtgcgggtgcgggtcctggatctcgagtcctagtttcgagtttgggtctcagttctgagttcaggtcctaggtctgatcaagatttggtctggcctaggttcgtgtcctttttgagtatagagatggtgaaatcatgaggtcaaacccacaaaaactgtgtgaaattcaagaaaacttatctaacctaaattaatttgattttaacctagtttaaataatttaatttgttttttatagtaacaactaagggcacatttggtataccgtaatgtattgtgttagattgcattgtatagtattatattgtattagtattatttaatacaattctacgtttggtattgacttgtattaatacgttgtgtaaagttataatatattttcaataaactcaaccttaacactaactacgggctgggaccgagtcctgggtctaggtcctgaatctaggtttgggaccgacatccaacttttggtttgagtttgtgttcgggtctcgagtctaggttcaggatcagcatgcggcttctagtctatgtcctggtccagggtcaggtcccaattcgaggtctgggtctatgtttggggtttgggtcagagtcccactgggtcccaggtctcgagtccaggtcccgtgccctaggtttgggtccagtccggctccgggtcttcaagttttaggtctaggtctggggtctcaagtataagtccagctccaatttgggttaggggtctggtccgggtcctatttttggtcgtgagtcccaattttaggtccaagttcgggtcctatgtttagtctcaggtcttgggtctaggtccagggctaggtgtagtccgggtctggtgttcgatctaggtcgcaagtcctgattctgggtctacttctgggtttaggtcctgggtttgagtccaagtctggtctgtctggggtccctggtctgatcttgggtttgggttcgggtctcgggtcctaggtgcgagtcttgagtctggatttgagtttgggtgggtcccatgtttggtcctgggccccaagtttgggtcgggttcgggtcttgggtctgggctgggtcttggtagatgtttgggtctggttctaggtatcaggtttaggtctcgggtctgggtccaagtcccagatccttgtccaggtcctgagtgcgggtgcgggtcctggatctcgagtcctagttctgagtttgagtcttagttctgtgttcaggtcctaagtctgatcaggatctggtcttgtctaggttcgtgtcctttttgagtctgggtcccggtccttagatccgggtcgaagattagggttgactctgggtcc

SEQ ID NO: 207104 - DNA, 664 bp, Cannabis indica
tatattaatattattaataataacaacgtaaatcaacaaaaattacaatattgtttttttggagaaaaatggcctcaaacaacacctaaagagcaaaactgtctaaagagacagaactaaaactatccaaggagacagaactaaaaatatacatatttttttaataatttttaaaaatattatttattgttaataaaaaaaaataattttttttaagatccaaattaactcaggacgagccctaagcccacaaatactacatcaaaagcaaggtgaaattcacctaattttagtattaaatcacttttattcaacactactaaaagtgtactaattttaatattgagaaaaattaaaattactttgaaaaatggaatgagtatattgtcaaaagttttttaattattaaaagaaatagttatattctcatttttacattaatctcttatttaagtatgaagattgaagatacatgttaaatgaataatagtgaaaatatgtatacatattgtttttgtatttcttaaatttagtagaacttatcttgattatcatcaatgatgatgccaatccaaaaattgaccgggccaatagatatacaacaaaattatttatttttgtctaattatttttcgtgtgtaaatttttgaaaaataaaaaaaaa

SEQ ID NO: 207105 - DNA, 884 bp, Cannabis indica
ttttgtaagtttccctaaaataaatctcagcatttattttccaaaataaattgcattatatacccaatttactttatttgttttaatttttacttttatttttatattctttaaaatatacctatttttataaatgatatcctcattatatcccttagattaatgtaaattatgtactaaacttaagtgaagggtgagggtatattgttagaaaatttattcaaatattttttttattattatttctaggatttcttatgaaattaatagaaaacaacaaaataattacataaaagtaatagaaaaaaaaatataaaaataatgtacaaataacaaaaacttatcagtaaaggtaaggtgacaactcgtccacacatgtaacttcttttggatcttctccacaatactaccaccgtttgaatctttccatttagtagaccgcaagttaattccaaggtacttcaaaaagaaccttcggtccacttcgaggacattaaaagttacttcttaatactcgggtgtatacctccaaagtaaattgaagatttaaacaagttggccgctaacccaatggaacaatagaaatcctcgaaggcattttgaataatatccaaagaagaaatattacctttgtaagagataaccaaattgtcaataaagtaaaagttgacaagattcaaggacttacataaggggtgaaaactgaaacctttcgctttggatgcagcttgtaaaagaagtctaataaggtactccatcaccaaaacgaaaactaaaggaaagagaagtcaccttatctaagacctttttcacttttaaagaagttatgaacacgactattgagcaataaggcgtacaaagtaccccttaggcaaactataatc

SEQ ID NO: 207106 - DNA, 1051 bp, Cannabis indica
ctttctaggtcccactcccacctccaaccttctctttccattcactaattaattaattattaatttaccatttcccttaaacaaggataccagctacatcatcacaaaaaaagtcacaacccctaaattattttattatatatgatgatatttctttttacacaaataaataataatgaagatttcattgataataatcaatgcgaaaatattatctattaaatgctgaaaatatgaatatttaaagtaactattatttgtatcatctaaatgtattatgtaatatttttttctaaaataaaaattaatatatatatttatgtaacatcgttagtatgtatatatcagggtgaaaaatctaaattaggtaggttaagagtcactatagagaggagcgcgcacaccatttatctctacaaaaaccccccttcattactctacacctctctcctcatcactactcttctctctctctctttctctacacacacattgcaatactactctctctcattagtactactcaaacatatatagatatatatacactgaagtaccagtctctctatctttatgattgtcatcaataatgtcgtttaatccaaaatttccagaatcttctgagaccagtacaagcatttcttcctcttctacttcttcttcatcatcgtcttcatctctctcttcttctggttcattattaatgctttaatactgagtccaaaaagataaagaagaagaattcgagtagtagtagcagcagtagtagtagtgcgagggttcgtgagtccggggactgtaccaaacacccagtctaccgcggtgttcgaatgcggagttggggaaaatgggtttcggaaatccgagagccccgcaagaaatctcgaatctggctcggcaccttctccactcccgaaatggccgcacgagctcacgaccgtcgctactctcgccacttaaaggaaactctgcttttctaattccctgaacttcacgattcactgcctcgccccggcttcccttagcgccgagacgatattctaagccgccg

SEQ ID NO: 207107 - DNA, 502 bp, Cannabis indica
cagatattcggtgaagagatggggaaaaaaatactctcaattcctaggctatcacaggaacatgaagaccagataatttggaagaacacacaaaacggtaagttctctgtcaaaaatgcgtacatagttgatcagttagaccgatttcaacctgtgtgtagaatgtggaaatggatttggcaccccagtatacatcctcgtattgctacctggttatggagagttctgaatgaggctctcccgctcaaaaataggctctctttcatctcggataaaacttgttgtctctgtggaggaaacaatgagacgtctcttcacttattcagagattgtccgtttgccaagactgtttggctcttgggggaatatccaatacgagttgaggcgattccaggtaacactattattcaattcattgagaatttagtgtctaatcttcctattcataagcctcaagttactctattgtatttcggatgtgcctcctgggaaatttggaggc

SEQ ID NO: 207108 - DNA, 1051 bp, Cannabis indica
cctggcgggtgtggtgtcaccttattttttggagaaaatttatttcttaaattattatttatttaattaattaaaacagttttcttttttaaataaaaacgtatttgattaattagtaaacagagatgcttcctgatttatagcatcttcctgatttttcgcatcgtttacacgatcccatgttccaacgttcccatccagtaacgtatttcttcccgttactactatcagcgcattgcctatataatgcgactcaacagtgggagaaaaacacaacttttcattctaaaaaataataccatatatacacactactatattacatatttatatttttgcttcgagcaatagtcggtttttgggtgtttaatttcgacagttctctatcgtgcaataaagttccgataaagtgtgttcgactgggctgttttatcctggggacgacgaggctgatagtctgcttgcacaaatctgggcagtgccgcgaacgtcttaaagagagcgacctagtccgcaactcaacccaaattctatttcggtaactttgttccttttattttctgcagcaactagtttttaagtttccatgaagagaggaacaatatgattgagtacttcggaaaaaaattatcgagattcgccttcactgtcaatagatgagtgtcagtgtatttgtaatgaacatatatataaatatttactgtatacattgaattaaaatgtggtgagatttagttttggtggtgtaaatctggtttccaaatctgtattttttttttaactttgtgactatttagaactgtcgggacctaagcatatacgattgtttttaaccaatgcatttttcattctatttcagttacgtagcctcacaactatacctttacccaactgtttaaaacaataatgaaattaacttagtagtaaaagttcttttctctcacacaaatccttactagactaaagcgaattcacataaaacttgtatatatatttaaatgaatataacaaagaaatacaatgattgtttacaattgcatgaaaatattaa

SEQ ID NO: 207109 - DNA, 731 bp, Cannabis indica
atagaatttcaaatttccctactataaattccataataactttatgaaatacaaaatgagactgagtacaatagttaaagcaaacattttgtatctgtgagtgcttgcatgacatctgcgaaataccttaaaaatgcgagttgaatatactgccactattaggagtacacttcaaaccaccactaatggattggaaatatacataaatttacaaatgtacatttggattaggctataccacatctctcacccatgaacaaagtaaagagtgtccaaggttacaaaataataaatttttttatttttattatatatttttttaaaaaaattataaaaagacttttggtgttcgttcgggagatagattttttaaaaaacagacactaaagaccatcctaactctaactaaagtgtcagttatatgtcagttcataactgacacctataatacctttaagtgttgattaatagaccgacactaaaacaataatcaagacaaaaaaaaaaattaaatatgtatatatatacagattgagtataagtggcagttgtgaatcgacacttaagtccttaagtcttggttcataaccgacacttaaagtcctaaaatataatttttttagcttttagttattagattttttatttttaaaatggtatacaaagaaaattttataaccctaaatgaaaacgttaaacacttaaacatttttatttctctctctctctct

SEQ ID NO: 207110 - DNA, 828 bp, Cannabis indica
gtaaaaattgtcactaaaaataataaatagtgactaaaaattggtcgttgattcttttagtttcaattaagcattgtctcatgactaaaaatatctacgcctaaaagtcataaaaactaactattagtgactaagttgatttagtcacaaaaaatctaatcactaagaacttattttcttatagtattacttacacctagaggcccttcatacccggataagaaggcaagtcccttatccacgtgcagaagaggacttggggtaaatgttatttgtgtttccctctatcaagacaagtggcctccgtacgagaggatggaagggccaacagtctgtaatgtgggcccaagaggaaaatatggtccaggcccaattgctgaatcctaggaacggcaagaccgggatcaagaactaatatatggtcctaaatcagtgaaattagaaatgtagcaagtttggattaactatactctcaacccgataacccactcaatcactcaccttcatgcggaacactaaggagccagctgcaacctgtttgtcgtgttcaagcccaagaggaaaggtggatagttagaatcttgctacctcgccataaatgaacatccatgatagaaacaactcctcagacacatacatcatcaatattatatctcataggtcctcgaggcatattgcaccaccccgagtaaatatactacgttgtatccctttgacagaatcccacaaaatctatggaatgtctcttgaaaggatttagctagaaggtatgatcaacctagggattgaacggccacttctttgatattttccaatttcccatgcatt

SEQ ID NO: 207111 - DNA, 514 bp, Cannabis indica
agtcatattgtctatgtccgttgaaatgtggctgctaactcttaaatccacataccaatctccttttttaaccatttaggcgttgcaataaatgttgggggcctattgttgtttctattttaagatcattttgttgaactttagggtttatattagagtcgcaacgaaagggaatacaataataataaaaatatgttgaatccaatatgaaccagaaatcccgtatctcaacacaattatacataacacaaacctaattattagtttagagattttgacctcttgttgtctatcaagatttccttgccatcttttcgtataacacaatcgaacatccaatacagaagaacttgtagaagatatcacactagggtcttccgagccaaccttaaattctggattcacagtcacaccttcttctcttgtcgacgaatcttcaaggagaaacttgatcggtttaaccttcattagtaccttttaggtatccatctaatccatctaaccaatgaccacg

SEQ ID NO: 207112 - DNA, 780 bp, Cannabis indica
ttataattggcaactttagttctctcctctcttgtccttgatgtattgttacatataaatttatccgtttgttatggccattaaggattgaatatatggtttgggatgattgtctttatcaaaatgaccaagccaaccatctatagaaagtgagaccaaaccttcacccattcccacatgcctcacctcatctttcccatttatttctccacgtggaaattacaccccatacggatttctaaagtaaacaatgttaaaaaattagaataatttgctgcaaaactcccttaactatcaatttacttgcaaaaaattatccaacctcatattttggtgggaaaactttctaaagtactattctgtttacatttttaaggcatgcggatttctaaacaatgttaaaaaaatatgacatattgttgttaatttgtctattttttatgctattttttattttttgattttctggccccatacaaatttttattacaatgtttgataatgataatagtgtaaatcgctacaacaccacaccaattttgatgactatgcaggtggagtttgtttatggttgtcctactgagtccgattgttagagggtggttcaagttttacagagtaaaaaactttaatatatttgcatttggcttaatattgcaatctttttcttttgtttctctttcagtttcttttgtttaaacaatttataaattaggtcgattaattaattgatttatttttcttgattcaaattcatcaacgtcttactaagctatatat

SEQ ID NO: 207113 - DNA, 568 bp, Cannabis indica
cacacacacacacacacacactgtttgtcgaagcaccatttgtcggagcaccttttgccggagtccattaacttagcttgacaactaagtaggggtgttcatcaaaccgctcaaactatttaaatcgcccatactgcactgcaccgcaaaaatatgtagtttgaaattcttggcggtgcggtcgcagtttgaatttgtcctaaatcacgtggtgcggtttgcggttttgaattgttaatatgcggttcaaaccgcaccgcaccgcacattataaaaatactaattttatatttatttatgtccaatatgtgaatgtttaacccaatgcacactaattattgtattattgaaacttatttttttttcatatttattttcatgccttatggtatttttgacaagtgttgctcaagctttgttgtatttgtgatagtttagttattagtgatagcccaaatcgcagaaactacaaaaaacgcaccgctccacgccatttttgcagtgcaatttctgcagtttattagtttcacagtacgggtgtagtatgggaaattagaaaaactacatg

SEQ ID NO: 207114 - DNA, 1278 bp, Cannabis indica
ctttagaaatactttgaatttagtatatgttcaactcaaaatatgatgagggtggctaattcattatataggcacagttgtaaattctaaaatggaaaatacatttacagggaaaataattttgcacaaaaatatacgaagagtattctaacaactttctggcaatagtacaatttgttatataagggaccacagcctccaacggtacaataacaacaaggaagggagattaattaggtgtgattaacataaattttagctcatttcttaacactccccctcaaactaagaggagttccaaccactccaagtttatcacttaggaaatagaatttgtgatgagtaaggctcttggctaagcaatttacaatccagttttgagaaggcacatatctcacttcaagttgtttctttaggactttatctctcaaaaaatgcatatctaattcaatgtgcttagctcgagaatgatacataggattagaaacaagggcactagctcccatattatcacactagttgattggaacattatgcaatgaaaattttaaaacatttagcaaagcttgtatctatggaatttgtgctgcctcatgagcaagtgcgcgatacttagattcaaattttgaatgtgacactacaacttgctttttggaggatcaagatacaagtgtgtcacctaagcaaacacaatagccatcaacactttgtcgatcatctggacagcaggcccagtctccatccgaggatccaacgatgtctagctaatatgaatatttgatatgtaggctgtgattgactgttccttctaaataccttagtattctttttgctgcagactagtgagttgttgtaggagcttcaaaatattgactcaacttgtttactgcaaaggagagatctggtcgagtatgaatcaaatactctaagcctcctatgatactcgtgtactctataggttgttgaagtaattcacaatcagattttgataaagattttccaacaatcataggagtggagcaaggtttgagatgcagcatccctattctggtgagtaactccttaatatactttacatgactgagaagagccatgttttatctcagtaaatctcaattccaaggaaataatttagagatctcaagtcttttaaagaaaacattgtgtttagattggtcgtgaatgtttgtaacttgctcgagtcattccctattatgattatatcgtctacatatataagcaccataataattaaattaggtgctttgtagaagaaaa

SEQ ID NO: 207115 - DNA, 874 bp, Cannabis indica
taaaaaatgactaattggtgatggttatcacataaaagataaatgataaaggacaataataatttctattaatttctattgtaagttctattgtaaggtataatattattattgatataatttaatattaagtctcgtaacgtaaccatgttgatggcccatgacaatatttcacataaaaacgatcattgttaaggtgcaatggtactaaactcatgtaatatttatattatttattaaattaaaatgtataagacttaatattaaaatatacgcaaaaagtacacacataatttaaaaatattttttttttcctttcattcacataagatttatcacatatttttacaaaaataattcaataattgacaactctaaaatctgtctaacatggtctcatattacatttaataaatgatttttttttagtaaaaagtaaacttttttacaaaaaactgtcatatagtctatatttatattaagcaacagcaacactttatataaaattagtcttgaaaattagatcacattgtacatgtagcaagactactcttatctctctctttctttgtctttccctctctcttgtcgccgcccaaacccgcgtctcctcccattctcgcaccacaacccattccacccacaacctacgaccatcggccaagagaccattcatcgaggattgccaccaccatgacccaattaaaatttaaaagatatttattcaagtttccaattaaaattagtaatgatatatgcaaaaaaaaaaaatatatatatatatatattaaaaaaattagagaaatacgaggactatgagtatttatattattataagtttaattaaatatcagacaccaattaaaaaaaagga

SEQ ID NO: 207116 - DNA, 612 bp, Cannabis indica
ttcacttacatatgtttcgttgtgtaaaggccttaactctaaggctgaaatgaatggaaccccaaaacctgtattgactagacaaacatgaatgtgatctgacaatggagtatgcatgatctcttcattttgaatactccacgaatactttagcaatacactactccaaaggtcacccccaatatacaaatcgaaggatgggatactgtttttgttatcgtagtttccgtacatgaaccttgctcggatcaagtacagttcaccactcccattcataggtttgagagtataacagtttctggttccttcagggaagcttctcacattccaaagctgcttttcatcggttattaatttgtgagtaggtgttatttcgtagttttcaccagcatccgtgaagtttgtgtcggaaatgtaagctagacctgttgtttcatctgtgtagcttgaggtctctgataatccacagtcaatgctaatgaaccctgaaaaagtgatccatatccatatatctaatcaattgatgtaatatataatataatgagtagataatgctaagaacctagtcgccatactattacgagtgtatttcaatatatagtttcacacatt

SEQ ID NO: 207117 - DNA, 784 bp, Cannabis indica
ttttgtctgaaaatgtatcaactcacgacactcactcatctaatctttcgttgttgggttttgttaactgactcactctaaatgtttcgctagggtaggtaggaaggagtatcctaatgttatgcaaagaagaatacacaatatttatttccaaatacttcctaagtctgtgtaataagtaataacctattctttttttttttttcatttactataaataaattttaaataattcacataataaaaataatcataataaaatatttacacggtaaattatttgaatttttttaaaaaatttactaataattttaagtaattataacatacattatcatgacaaaaaaaatatactaaaaactcttcatgaacatcgaaaataatagattgtctaccgaaacaaagtgtattatagactttctttcaactattttttcaatcgtttaaaaataattttcgaactatttaaaatgttatgaagtggtcgttttattaaattttgtgacactcttatcagcgttgtgtgtatttttaagaaaaattaaaattagtattatttttcttaattttcttagtttaatatttttttttctttcaaactacatatttttaattaatgtagtttgaattacactggtaaggctgatgtgataaaaatttaaatatctagactaatatttactacgtgtgacaaaatttaataaaatgatcactttataataatatgaataactccatgactatttttaataggttgagaaaaaaaaaaacccaaaaagtacac

SEQ ID NO: 207118 - DNA, 519 bp, Cannabis indica
tgagtttgtgtgtctttgtaattgttagtatgtgtagcaaattcacaaagtgaagaaggttcatctaagtcttgcatcgaaaggaaagtaagcattcatcaagtcatttgaagagttcaaacattgtcttaactaattaaagagatttattcaacaaatatgagtacattaaattttcaacaaaattattagagggagtttatatcttgcttaagttaattactttatacttgagaaatttgattgatgaattatctctggacgtgtctctatagactatagtaacatctgaaaggatttgttaattgaaactacatataaaatttgtgctatatataactttaattgaaactacttataaaaatttgattgatgaattaactcttatggtgtatatttctatagtactagtaacagactctcaatctatagtcacaaaatatctgcttcagtactaattttatttttttcaaatagctcaaaaattttcattatgaaatgtagctaagaattatctta

SEQ ID NO: 207119 - DNA, 949 bp, Cannabis indica
tactttagccttatttttccctgctgcatcatgattagttagtgtcccagccatcgtagcatgattatgcaccagagaggcagagtttaaagttgctggtgcaaaagagaaaaagccactggtatgagggtgagtgttgtccgattgggggagattgccatcagcaaaatgttgaattgagatgtcattagaatgttcttgctgttgacctgaagattccccataaagcaatttttccggatgtggttgaccacgaagagagagagcagggatggtacttgttattgcatgactactgctgttgcatttgcatatactgattcctcatcaaaagcaagtactgattcctcctcttcttctaaattgataatacctttcattttatgagttcatggatccatgttacagggagaagttgatgatcaagagtggagaatgggatcgataaggtgaagatggctatgataactgcagaaaactgaaaaaatggatgaaaaaaccataaaggaaaataaactgcctgagagcaaataacggcagacgctctttaaaatttcccaattttaactttaaactatcataataaaataaaaaaaaaaaataatcacactatacttaaaaaaatatcacgatttttttcctaaattaaactactacactatcaccataacaaatatttttttgtattttttccaacaaatcacgtaaaaattccaatcatatatgctataaacttaaaaaaatataacaacactaaaaaaatatatctaattaaatctaatcaaactacaaaaaaaaaaaaatcactaaaccatataatataagtatggaagaggtttcaatggttacatttttattgtaaccatcatggttacaattttttaagccattggattactattaaatggttgtgattaatttggaaattaaataaaaataaataataaat

SEQ ID NO: 207120 - DNA, 572 bp, Cannabis indica
gaggatggcgagctcgaggtatgaattacatgttaagaaattgtcacggtattttgattttaattgtttgagattatgattcgaatggttttgtaaagctttatattaaagattgcgaataatttgatattttgttttaaaataatgagatctcatgtgctttatatttatttcaataaatgagtttgttatttttgttataagtagtttaaaatagactattacatgaattatggtattgcttaggttcctaaatagagacttgatacagatgtaatggattgattgttatgctcttatagatatatattcaaagtgtggtttgctctcgattttctatttcagcttctccctattaatttttttttactactattatttaatgccttacctatgtattcatattttatattccattttgtcaaattttttctataataattgcaagaaagcttcaatgtgttggcaatatgtataaattggtgtaataatgagatttataatacatttaaatttagtttgtgctgtagattgtgttttgttaatattttgtattttgtatttgatatttt

SEQ ID NO: 207121 - DNA, 1037 bp, Cannabis indica
actttgaaaaggagagataatttgatcgaggagcccttcattcattggcaatgactttagacacaactttatataaaacattacacagcgcaattggtctaagatcacccatcacaacggggttctctttttaggaataagaacaagattcgtatcattaagaccagataaaatctcaccagttgtaaagaaattctgaaccatcgacaccacatctgcacccacaatattccagctttttgaaaaaaagcaggagtcataccatccggaccaggagatttatccgggttcatgtcgaaaagagccatcttcacttcatcaacagaaaccggtttaaggagctcctgattatgtgaaaccgaaacagaaggttcaatacaatcaataatttcatcccaatgagatagaccagaagcggaaaaaatatcagagaaatattgatgcatgacctgatcaagaccctgtccccattcaacccatctgccagtctcatcttgaagcttttgaaccacgttgttttttttccgagtggtagccgaagcatggaaaaattttgtattactatccccatctttaagccaaagctgtttagatctttgacgccaatagatctctttctgatgaaaaatagtattgagattttttttctcagcttcataaagagaaacagaaatcgagtcccttttgtttttcaactgtttcaagatctttttagaatcagcaatacgactcttgaaattacctgttatagcctttccccacttggacagtagatctccgcaagctgtcactttatcaaccacagatacactcgccctcccttcccacccatctttgataacttgtaagcacataggatcagagagccaggcgttctcaaaccgaaacaatacttctgagagagagataaatgggtaaataggatctaagaataatgcagtatgatccgatgaagagtaatcaagattgaatattagctgatgaaaaaatattaagccaagaaatagaagccaggcacctgtcaagccgcacctcaa

SEQ ID NO: 207122 - DNA, 766 bp, Cannabis indica
taaatggggtgatgtaaatagaggtattttagggatatcataaaagttgtcatatcttacaaatattagttattatttgtttagaagtttttttttttaaccaaatgtaagcataaaaaatcaaatttcccttgtttaattagtgtaggattatgtatttaaagttagaaaaattaacattgattaatgtatatatttatgtatatgtattgtatgtgtttagtgtatatgtatatatgtgtatactataaaaaaaagggcattcgcgatagtctttaaaatgtttttttttggaccgtcgctaaaattatcaggaaaaattgggtattctcgacaatttggaacactcgtgagtgaaattcgcgatggtttaagagtatagcacaatttttaataggggtataagcgacggtttaaaactgtcgcctacactattggcaacgattttaaaccgtgctttatagtataggcgacgattttaaactgttgtgtatacctcgagcataataaaacccccctaacaactactccttcgtcatttcacacaacaaaaaccctaacccaccctagctactctccctcttcgccaaaaactctaaatctcgaactccaaaccccattttctcaatgaaaaccaccacccaccactgatgaaaactccattttctctctctcattctctccgttcttcctccctctatctctcgctctcttcttctcccattcgatgaaaaccaccaccaccaccacctgaacctctctctct

SEQ ID NO: 207123 - DNA, 543 bp, Cannabis indica
ctgtagaaaacttctaaagcataggagtaaaccaaatgcaaaagtactaggaatcaaatatagtaaatagtgtccggcttcattaaatatctcatgatcctggtgcatagctctcaaaattggaaatgcatttgaccatagaacagatatcaaaacacttgtagccgagttaaagttgtatgccaagtgaataatattgttctgctccaaatagttgcccacataaagtgtccaatgcattggtagatcccactagatcaaataattttcatgtaacttaaatattttaaaataattaatgcacacaaattaagaatgaagttaataatttaatttaccaataagtaataatcagtggctgaagcaaatgtagtcgctaatgatgtaccagctaaacccaacttttcatcattgtgcccaatgaacattagtgatatcataagtagagagagagtacggtgtatacgatatatcgagttcttcttcgttcttcgagtgaatttcaacctgagtgaaagtagatgtttgagaccacttatgtac

SEQ ID NO: 207124 - DNA, 703 bp, Cannabis indica
aaaaaaaaaaaagaaaccatttttaaggctgaacatttttaccgggtttgacccggacctggccaaccagcccagacatgacccggccaacccaaaagtttaaagaaacccgtttaatttgggcgggttgggttcaacttggtatacttttcgagcggatttcgggtttgatttttcaagtgaccaggttttgggtcggactcagattcgcctgtgtacttggttttttttattactactgttaagcaaaactttcacatttaaaatattaaaaataaatgcaaaacacaatttcacctatgccaaatttatagtataagagtttattaatttaaattcgatccatctaagattataagaataatttttaattacaatccttttgttttaaagaaatttttttatttcaattacagtgatattaaataattgaggtaaactttgaaagaattgggatgaatttggaattgcggttgaattcaacaattttgactaattgagctgcctacatactttctttgtgaataatcaagtcacttgtagtttagaatttgaatataagaatttcggtagatgaccgcttttttgaattctttgctctttgaaaatttggaaatttttgtaggtgaatgaccttttgtgaaattttgagagttgtgttttgtacaattttgtggtattggcaactacacttagtcttatc

SEQ ID NO: 207125 - DNA, 1234 bp, Cannabis indica
ctgaattttgatatgtacaaaataatgcttcttgaacttttcaaatcgttaaacattcctctcgaattattgagaatgttagatttaaggatttttttctacttttactaaacaaaatctgatgtggatgaaaatttaaagagcacaattttgtacttttgaaagattgagggcatgatttaatagatatcaaagtttaaaggagagtgtttagtatatggacaatcatcatattagtaaaattgaataaaatttgacagaagtccttaaatctaataatttcaatagttcaggggaattttttaacagcctgaaaagttagggacatgatttggtacatgtcaaagtttagggattaaaaatcctaattagcctaaatattactaacacatataaactgtgataaaaaatttacaagtttatatacattttatcaattaattacacgtgaagaaaaaaattatttatcttttagtatacattttgttacgggttagaaatatatttttacctttacatagaaaatagagtaattggtggcaaaactctcccaactatcaattcacttgcaaaaaattatccaacctcatattttagtgggaaaactctctaaagtactattccgtttacatttttaaggtgtcgtctgtccagccaagttaagtcctaattttacctacgtggcaatgataggtcactaaaaaattatctacgtggccatattttctaaaataaaaattaaaatgagtaattaaaataaaaataaaaactttaaaatataaacaaaaccctaatatttgcaatagacatttggaaaacaaaattaacatagaaaggagacaaagacgaagagaaagagtagatgaagaagaagacgaagaagaagagaaagagcacatgaaaaacaagagaaagaggggaggaagatcaggagacgaagaagaagagaaagaggaaggagacgaagttcagcaaaagagaaagacgaaaaggacgaagaagagaagaagggaagaaaatggcttaagtgactgtaaaatgtcgttgtcgtcctccgaagagagctatgattttcacctcttggactgatgtaaatccaggtaaaaaattcatgaaatattctctgtacaatgtaattttgtattgttcttcaatgttgagctttgtcttgcattgttgctacatcattttgattggatgctttctaatggaatgaaatatgaagatttggaca

SEQ ID NO: 207126 - DNA, 818 bp, Cannabis indica
aaagccgtctctgcttcttgatgtgagttgttcaatccttgacccccttgaatagctgaaaaatccattttttgaagaccttgaactcaaacccagccagtttggcctcatttatccttctattccaccttaaaattttccaaaattcttacttggggagtttttgtacctgagagggattaatcccagtttatacatcatgaactccaatggtataggattataccacaacacagcttcattttggtcctctttgcctggggctagtacatgtctatatgcggctcaataaacttggattttttttagttttgttgatgggagaactcacaggcttaattattatgtaattctattttattgtgtttttagtaagttgtaacataatagaaaagaaataatagcaatttttacattgattgacttcattggtgggcaacatacttcacttggtgtatgattaatgcaccaaataaagaagcataattaagatgtcaagtgatgatttgtatcaaattttgttcctcaatctccaatcttaaagtgattgcttaaactttctccctcttaatttgatttttctttgacattatattaaaacaggtttttattttgtttgcttctactgagtcattttgggagttcattaaatatacgtcttaagcaattttaacagtgtatcttgtttaaaatcatgaatcccattaaccttcttttctttttttctggacaagagcaaagcactattgtatatcatactaggttatcatattggtagccaaaatgtttgtattattgatttcttgaatattgataac

SEQ ID NO: 207127 - DNA, 636 bp, Cannabis indica
gatctacagccataacaggcagtgtagattccatcaaaaagattacatcagggcagtgatccttgaccagcagggagagcctcctgaatgcacgtgtactccccaatccacgtgcattccaacttagcacactcatttttctgggtgggtgtgcatagcaacactcgcctgttccatattatcagcagcaggagaagagtcctcttctctatcaccagcacgagcacgcttcagttgggacctaacagaacttccaaccaccacatgatgtggttggaaagaaggcctcttaactccagaggcagaggctaaccctttcccacgaacagtaggatcaggaaggtccttagaagggctagcacctagagtaggatcaccaccagcaacaccaccagaaaaagaaacagaaacagcaggaccagcagaggaagcacacatttgatcaacaggcttatcagccataatcatggaattagtggagtatgaagtaaaagtagatggcctcaaggaaatgtcaaagttgggacggatggatggtgaagttgtaacagagaagttgggattcaaagaagttggcatcataagaacctgagtagttaggggagaggaaaaaggaccagtaaaatgatcattaag

SEQ ID NO: 207128 - DNA, 571 bp, Cannabis indica
aaaaaaaaaaaaaaaagcttgcataagtacgaaaccgtaattctatgaaagaaataagcaataaatcatccgaagaaaaaaacacgagagagaaaaagtgagaaaaagttacgacgtcgccgacgacggcgatgcgagcggaggaggaggaggaggaagccatgggaggagaagaaagagtggacctgggcttggacagggaaagagaagagcccatgagggagcagagagttggggcgtggaacaacgcgcttggcatcagcttaagcctgcgttaattcgttctcctgttgggtctggtcaatggcgaaaggtcaacgcaaaacagttgcttttacactcctattatggaaaaaaggaaatctgctgactgataaactatttaaattttatttttccaattatattatgaataattagtaaattttaccaattttcgatcctacattttttaagggaaatttgacattttatgcttaaaaataagtaatggtgtttaattatactacccttctaaaaattttgtaactatcctattcttttattggtgaccccaaaatacccatctcct

SEQ ID NO: 207129 - DNA, 1056 bp, Cannabis indica
agagtagcaatcaaggagctcatttattacaaataagacttgaattttaaacgtacgtttattattgatacatgtcgactaattttggactgtcacgtagtttggaaaggtcttcataaaaatattatttcctcagattgtatgacattagtacactactattgtgtgcaatggatctcttaatcagtagagacgtctacagatggtgagtccatctccaatagaaacaagcgatatctcaaatcgattatcattggctagaaacgtattgacctctcttatgatttttctatttgtcttaaaaaaatcatccatttcgtcttcatcagaaagggccacagttccaaaccatagggtattatcgtatgcaatcactcctccaattttaatcagctttacaagttgttcgtgatattttatgtacccatctttattagcatccacaaatgcaaagtcaaaactccctacttctttttcctgtccaatagtgtaattatatcatagtaaaaacttatataaatacatatgtatgtattataagtatcagtataacatgcatgtattgcatgtaatattaatctattataaaaaaatatatatctaactaatttttattaaataataaaataagtaaataagtttagaattttaaacgatgtaactaataaatttattgtaaagtatcattaatgttaatttaaatttaaattaaaatttatatattaaaatattatgtaatttagttgatacttttaaataattatccaagttatattttaataaataaattaaatttaaatatattttttttttaaaaaaaaaaagataattaattaattgatttaacggtattaattttaacggttaactttaacagaagaatttcaaagagtcgttaaatcaacattttctgttagatattattttacctattttgcacaacatgtactatgatctaaaatttacataaacataaatacatgtatcttttttgttttacttaaccaataactaataacttttttgcttaaccgtctaactaataaataatagtgt

SEQ ID NO: 207130 - DNA, 1151 bp, Cannabis indica
ttaaagaagaatatacatcattctaaacaatattacctagttgtcgatgaagtcacacattgccacctgttgcaaatcttctccagatattgtgatatgggtacgacgtgctatgaatccacgtggtacctggattggaattatctcagttttatcattaactcttaaaaattattcaaaccatccatttgagtaccctggagattagtgccatgatcttttgtgcaaataatagatctgcttgattaccaccaccttttcgacaaggcatgggaccttttcctttcgacacatcacatcttgatggtaattatgctaatggaccctatacaaaacaccatataatatatcaaaattgatccaaattcaccaattttttggcatcataatggctataattgaacatccccgaaatttttaaacaaatctaataacaaacaaaacagataaaataattgattatccatccatccgaccgcagtacatgtattcgcagaacctacatcactatggttaaaaatttaagatattcaaacttaactaatcattgataattaattaataacaaaagttacctcaagtgttaaaattaggtatttaggccaaggaatgaacatatttgctacttcctaagcatatctacacccctcaattaagattggaattttagcatcctcttgcagcatttctaaaataagaacacagacatatggatcatgagaaggcttagtgagaactatgatttgaccttcatgctcatatagataagctcaggccactatgtgaccgatattgtttgagcaaaaaaatattgtttgattagctgccctcggttcaacaaaattgtacatgacagatggctcatttcggggaacaagctcctaagcataattttgtggaccctcatcctactaagcatgtttatgtggaacatatgcttgatgagccatctgtccttcttctcatccttattatgctctttttcagcaatatttttcttctatttaagggatatttgattttggcttttaatttctcaatctccttctgtttctaaaccacaacatcaagtactttccttttcttcctgccaaatagttggatgccttggtaaggaaccaacaagttaataaataaaattagctataatt

SEQ ID NO: 207131 - DNA, 640 bp, Cannabis indica
tctctctctctctctctcatgctgtgcaatcctcattagtatataaatggctggtattccaccatattagccttcatgaagaaagtgtactcttctttttccaacaataccagacgatgagaggtttaggcatcatttgcttgtgtgttttgacagcacttgtatatctctcctccctcaatagctcttattcgccatcttctatggtttctctttctcccccaataacaacaccttttattactagaaaaatgggggtgccatcatccatcatgcaaagtaagatcgaggtgggtttttctgagtcgttgaatgttatttgtgaatacatttttttttttcagaaggtttaaagttttcttcttaaagatgaatgtcttctcaaaaccagttttcagttttgtttagcttaacgttcttcctaacaaaccaaaactggttctctcttaatgcaggttacaaaagacaggaaaaaacccacagccgaaggaaactctgagacagttaaatatgatagcagtgacaacttagatgaattagtgtatcatactgattatcatggagccaccactcatccaattccaacgcctaaacatcccatgccatagtatataagttggatatcagagtgagaaagaga

SEQ ID NO: 207132 - DNA, 729 bp, Cannabis indica
taatacaatataacttaatacgacgttcccaaccaacccttacattattaattattgcgcctaacagtaggcttagcaaatacaaatgttatttttattaacagtcttaccttacctccccaatggttattagctacatcatgattttgattacctagcatttatgttttctttttttttttgggcttaactgcatttatgttcgttcatgtataaaaaatcttctccgcataacttgagaaattgagaagataaatgaaaggatgattacttattaatttttaaattaaccacacacactacaaaaacgaaaaaaaaaaagaaaaagaaaaagacaagttggataatatttgtcttaaattaggaaggtagtacttaaacagatgtgaaattgaaattagagcattctgtttgcctaggaagaagagatttgctgaaaccaagccttgaagcacccaaatcaaagagaaggaaattattctcaatctgaaaccctccaataacaacagcagttggggtaaacttaacaccccagtcaacaaagtgaagtggaccaccatcaactaatccaaggcacaacacatcattacccacattaaccatcaggttgggaccaattattgaccacactttatcgttggtcaataccaaatcgatgcgaggcacgtttggtcctatccaggtgaacccaatggacttggcattatagcaagcaccgaatggagccac

SEQ ID NO: 207133 - DNA, 682 bp, Cannabis indica
tacattttgtttattaaattttaaaaagtgaaattatatttatttttgtctagtatactaataattaaaaaaaataaagattttataatttagtaaataaataagatacgataaatgtaatgatttttatatctaactgtggactgtacaattaaaaaaatgaaatgtgtatttaataaaatatagataaatatatgttattttgtaactaatatttttaaagacgttttgaatttttaatctaatatcaaatgataattataatacaataaggatgctatatttataatttgcatagagttataactaatcttgcatatgttatatttttttggtattgaaattgtagatataatatcaaaataagaattttatttaataattaaatttttaaagacgtttttaattttaaatctaataccataaaaacaattataataagaataatttagtggtataaatacttaagtttaactcgcagttacaaataaatacttaagtttattttttgacggcaataatacttaagttatatttttggaactctgtagtacatgattgttaaatattaagtaaattgacatgtgacaattcctaattggtcaaagtcatgaatttttatttttttttttaaaaaataattcatatgtaccaataaaaaaaatgacatgtggataatgat

SEQ ID NO: 207134 - DNA, 801 bp, Cannabis indica
tataaatccaacttgccaaaatgcttcaaatctttcattaaatcctcttgagctttgaagaattgagataaagcttgttcttcattaatgggaggttgcttcacatattcaaccaaaagattggaagagttcggcccactttgatctcccatagccttatccatgtgcgccggcccacttaaattgggtaaaatagtcaagttcgggttccccataggcccatcatgagaattaagatattctctcagcaccggcccaccactagaaaattgagcacaatcagaatttggcccatctaaatgatttaaatgcccgcggggcccaccctccacactatccatttctttttcatttaacacctcattcggcccaatagggagaggcccaacatccaaaacagacaaaccaacggcccttttattcaaattgacttttatattatgtttaaatttcccacttcccacgccttctcccaaactagttaatgccagaccatctttcttattacccagagcatcagacctatcaccattaccataaacaggtaagcttctttcacggttcacatctgaaggcttaggatgccacatcagtcgaggagccttcccaggtacggctgctgcacgagaggtcattctcaaggtgtttctcggacgtcgatccagagcagggatccctttggaccggccctcaaccatggccggagaagccaatgccggtctgaaagcaccaccatttttgcccgataacaccacagaggcagagcttgatccaccgaagaccggcccagagaaaacatca

SEQ ID NO: 207135 - DNA, 832 bp, Cannabis indica
ttattattttttaataatatattttacttattttttacttaataaataatcatttttatttgattaacttattataaatataaatttatattatttcaaaattattgatattactgtattttacattattacatttaaaaatattgtagatgatcacatcaccggcgctttgcatattatttaaatttttatctcataatataaatcaaagttccaataaaaaaaattaaaaaaaaaaataacatagggagtttatttttttttttttgttggggaaatacatgggagttattaaatctcaatcccgtctataactctatattgagccctatctcctaatgctcttattaaatttaatttatttcttatacctatccaaagattataaacttgacttaattataaaaatatttaatacatacatactttttattacatttatactacatcatattttattgtatgtaatataattttacaaatttgaattttatacaaacttacaatttttttttacaattaataataattaatcataaataagtttgaaaggatttttctgcttttagtatatcaaatcaaactatatatattatggtctaatcaaatttaaaagtatatcaaatatgaattcataaactaaaaaaaaaaaaaaaaacatcacaaaatattcataacttgataagttttagagagaaaatatttaaatcaagattttttgaatttgaatttgtatattccttgatgggatagaaaattagttagctataatatttactataataaatcttaaattatgtaatcaaatttaaatttaactctctctctctct

SEQ ID NO: 207136 - DNA, 1388 bp, Cannabis indica
caagtgacatgcaaggtgatatgccgagtatacttgcatgcttatgttgcgaagtgacattcaaacatgcatgtcgagtgacatgcaaaatgagatgttgagtgacattcatgcatgttgagtgagatgcaaggtgagatattgagtgatattttcatgttcatgttggagtaacctaaggttgcctgcttgcttagtgaccctcgaggatgcattcttagtaaccctcgggggtgtgcatgttaggtgactctcttgctgatcctttgatccttagccaactaacctcgagaattaggagcgctaatttataggattaacagaactgctctcgtaccaattgttggtattatgatactaaattaggtatgcaacgtgttgacatggttttccgtcaactgatctaagaaaatcgtaaaaaataaaagattacaatgaactgatttggctaaataaaaccgcgataaataaaaaaggacaccaaggatttatagtagttcaccctccatgtcacgatgataatttggctacgtctactttatttttattaatttgattctacacatgagagtcatgttcacaagagtgtgtggataattgtacaaaagagatctctaggtaaaatttgtattgagacttatgaacagaaagctcatgggagacccaacattcataaatctgataaagatggtggttgtaatattcttaggaacaataaattaatagaaataagaaatagagaatggtctttcttccttgataaatgtgtctgaggtaatggtgtttgttaaaggtataataatgagaacatggtgtcgtgaagagcacaaaaaagaagatgcagaaggaattatattcttcaacggtctcgaattctaggaagctcttagaatgcgatcaaggattttagtcccttaaaccctagcgtatcactatctttatataggtttagggttggttagtgatccccacatgttggggtgtctcactttaaaatatcatatgttattctaaataatgaataaaaaaagtattaataaataaaatctacaacattccttattcataagcaaatatcccacaatcattgggattgttgctgagttgttctttcccttgttttaaacttgcttatgtggcagtatgctttgcgaatggaaaaagtagtgagagacgaccaagggatggcacatctcaaataagacatgtagagagtcataaatgttgtggcacgactctctcaacatcccacaacatcccattgtatctcacacttaataaacccattaattccagagtaaattgtgttagcctatcttaaaacctaattttgagcccaataactttagaattgacctatgaccaagacacacttagatctatcttga

SEQ ID NO: 207137 - DNA, 1121 bp, Cannabis indica
tttttttaaaaaaaaaaaaaatgctttaaccgaggtgaatagtgagttgttgtatttgttcatattggattatgtgagtattttttgttttggatttagtattatgtttttagtttttttttttttaatttttgttaagaatcagggtgttgttgctttttttttttttaacttttgttgtttttgggtatgatttgtggttgttttagttataaactttcattaatttctagaaactgtttttttttttgtgtttgttttatttgttgatttaaacagtttcggtttttagggttttcgtgtgttcattgttggtttattattgggaatttacaatctgtgttattttttaaagaaaactgttaaagtttcatatgtactccttattattagtttccctctttagcacatatttgttgttttcattttttttggttatttttcaaattggttttaatggttgttatggtcgagtttttattggttgtggtggtgtgatcaaggatgatacaggggttgtttggacatcatggccttttgggtgtgtgagtggatttaacgttgaggttgcgaaataaaacacatattaaaaaccagtttctagatcttgatcatactttaaaaatgggttagggatgatacatgggttgtttgggcagccagggatattgggtgtgttagtggttttaaggttgaggttacaaaataatacacatattaaaaattagttttttcaacttgatcatacctttaaaaactaacttgatcatacctaaattaaaacatgtgaaaaaatcagtttctagagtttgatctattttttagaattgtgttgtttgtgcagcctgggctattgggtgtgtgagtggttttaaggttgagatttcaaaatgcttggctctttgagtgggactcctttgggctgggctattagttctattgtttacaaatctattgttgaggaaattgtcattatgttttttttttgttttgtttttgttttgttgatttgtttcagttttttgtgaaactggttttcatgtttattatcatgattgatttgttatttgtgtctaatatttcttttgtactttgttttttatcagatggaaaagtgaatc

SEQ ID NO: 207138 - DNA, 1235 bp, Cannabis indica
agataagtgaaacctcattaccttggtcgtccaccgccacccgtagtccgcgtttaagaggttcagtgatgttaattctcaccctcaccttcatggtcccattgacgatcttaatatcttcaagctttccaatccgttcaccccattctctcgcaaagagttcggtcatacatgccaacggcacattgttgatcgaaatccaaaacgacgtaaactcaaaattcattttcgatatttcacccaatccgaatggcttcacaaagcagatcagctgcttatcgatcgtccacggtccgcctccgaagaccctctgccgatcttcccgactgccgaaaaagaatcgaaacacgttcttagaactcagttcttccacctgaaaccggtggttgatcttccatacgcctttcattgctttttcaataccgtccctgttcgccggtctgggaccaataaccttgcccaccagacacaaatccaaccttttctttccttcctcaatgccaactttgttcagaggaagaaccggtccatctccctcatcaagaaccagcacctcagccaacctgttaaccaattccaaatccatgaagtcacacaaaaaaatcgaagccaaaaccaggaggaaaccagtcgttgccgtcgacttcacccttcccatgaagggactgcactacccagttgtttcgcctgctccgaaactaacgggagaatataacgtgcactactttaagttatttattattcaatattgttttgacatttacttataaaaaaaaaaaaaaaaaaaaaaactatatgtaccacgtattggttttttttgtagcaaatgtacgacatactgtttaaattttgtatttgttgttaaatttttttaaattttattgaatgtattaaataaattaaggaattattacatagaaaatataaatttacattttatttacaaaaatacatccataaggtaaagtcaacatttatacattttatgtaattttaattaccaaaataccacttacactatcatcacttacacaatcagacgatggttgcagagtggttgctgcgtggttgcgcggtggttcaatcagacgaaggtttcaattagacgatggttgcatggtggttgctaagtggttgggcgaaggttgcatcagacgaaggtttcaatcagacgaaagtttttgggtggttgttgggtagttggtcgaaggttgcatcaaacgaaggtttcaatc

SEQ ID NO: 207139 - DNA, 659 bp, Cannabis indica
agtgattatatgtgtagtggtggagccaagtggatatctttgtcacacctaaacatttttcattttaactttatgtatgattaattagttgttatatatgtttttacttacccactttgagagttgttcattttcaattttgttcctacaactataattcaataataacaaaataaataataataaaaaaaggttgtttctatcatttttacaaatataaaaaaattaattcatttattttatttataaatatgcaatttttataactaataccaaatatatatttttacgctcttttctcttttcatgcaactgaagcatagaaaacaacagaataacaatcgtttatattttatatataaaaattcaataaaataagtaaaaaactgtaaatttgtaattttataaactttgtcttaatagatatttataagaatttccctttaatttttgtatatagcataaataagggaaaatgatccatttttctcaactcaagaccatttccaaatgattccatgattttagataattaacttatgaacacaaacatatttatttaaaaatatgcatatatttagacaatttttgatctttgaaattatgcttagttttataattaaagtcattttggtagttagctcatacttttcttttaa

SEQ ID NO: 207140 - DNA, 1233 bp, Cannabis indica
gacggcatacaaatcaatattatttaattaaagtaattttactaaagttgtttatagttgtggaccaaaaagtcatgcaataatggatttaattttgcaccccacaagtttgacaaaaaagtatccttaaatagtctaagaattaatgacaatctaaccaacactccttacattataaagtatatatatatatatattttaaaatttttattttaagtttgataagaaatcattaattaaaacccatttctttgttgttattattggtgtccttaattattctacaaaaattatgtgataattatataaggtactattttttttttgtaaaaaaattacatttttacgtttatattaatttttttttttggtatttttacggttttccatagaaataatacgaaaacaacaaaaaaactacataaaagtaacatgaaaataacatttaaataacatcaaaataataacaaaaaatatcatacagataacaaaaaatcaacaatagtatactataaaaagaccatattttatgtaaataaaattaaaaataatcgtaaaaatgtttaaaattctgtgaaactgtatttttattatttttgtatatttatgaaataattcctataggcatattttttttttctttttaaatgtaagggcatgtttttagggttaaaggaaaatttatatattctccgaatttgtttatatgatataagtgcatgtatatatgtaattatttggtcattccacaaaattttttaaatttttaaataatttataatacctaaaaatagttcaaaataaacagtttaagtgcgtataaaacaacttgctttcatatatttttagcacatgatcattagagtcggtcttaaaatttagtgaattatatagtaaacaaaaaaatatttttaaactcttatgtagaaagaaatttagtatttttcaaaattagtaaaaatatgtacatttttaaaatagaataatttttggggaccttaaataaactaggtgggccctagacatacaaatctaactcatctatattatcaaacttgcacatgatgaatagattatgatctatttttttttttggtctaattagtaatttttccccccgaacctttgacatgtactaaatcgtgcctcctgaacttttttagtccgttaaaaattacccccaaactattgagattgttaactttaatcttgtatatataattggtttttttt

SEQ ID NO: 207141 - DNA, 1557 bp, Cannabis indica
tacacgattggtggagcttccagctacagatcaactggtaagacttgattctctactgatttgttattctcctgtttctacttctttcttctctaagaacaatactctctcttctcacagattctcacttttctcttctttttcactaactttgagttcttatctttgaactcagagcaattacagggttcactctctctctctagtcttcagctctgggcaaaaaatgaaaccaagagcagtcatttatactgctcggaaaagattaggggaaaggggtcgcggattgatgagctgtcaggtagttttctgttgatctgttaattacagttaggatcttgatttgtaactatattgtggttgttgtaattgtgcaagttgtcttcttttgtaacagacttatagttaggaaagtgttagttggatttaattccaacatagcagaatttcaatttcaatatattattctaacattcaattttatttatttattttagttaccattaaaaaaaaaaaaaaaaaaaaaaaaaaaaaaaagaaaaaggttaagcaaggaagagttgtcatgccatatatattattagattcatatatatatataacaaagtaaatagaagaaaatgatatagaaacacttttgtagaagctttgactaattgtacatatattattacccccaccaagtcatatagtgggtgttaggtaataaagcaagcctaaattaaggatttgactaattgataaaatatgatcatttaggttacattttgttaatgacactactaattaattaacacacaaacacttgtcttcatgatcttcttttcacaacccattacctgttcatctctcacacaaatcaataagaaaatagatcagattaattctcaacttataacatgcatacatatgttgcaaatccaaatgactaaccattcaagtaaatatatagtcaaattaaggaatattagttataattaattatttatattttgtaattaaaagaagaagaagaagaaaatactaaccattcaactttgaaataagtatctcttcaacttagaaatccgaatattaatcattacataaagccaatcgcaaaattgattaaagcacccgaaaataagcaagcatccaatagaatgagtttcgatacaaagctccacaaactccaataaaacccaaagcaaatccaacttcaagtccaatgtaaaaccatgacatgtcaaaccatttttgatcatcaaaatctgaatcatcatcatcatcatccttgaaaattggatgatcatctccagggcatttagtcaagagaggaagtccacataatccataatcatcatttccaacatatgaagaagcattgaagctttgtaattgagtacttgtggggatagttcctgacaaatgattatatgacaagtccaaatatgccaaagaagacatttttgccaagccaataggaatttggccactaaaattgttatgtgagaaatcaagtgcttctagtttacttaagttgccaatattcaaaggtatggctccactcaaactatt

SEQ ID NO: 207142 - DNA, 1592 bp, Cannabis indica
gtagacactagctgtgatcatcagataccaatctgataatctcacatcaatcccacttcaatgcagttgtacagtaactttaaagcaccaactgtactttttattcatctcctcaacataattactttatgtcaacaacttgaattgcagagaacagccgaaactctgctcttttactgaatctattccacagaaacaaccacaattaaaggacacgatttgtcccagctttattgccaatcctgattcaatacattccatcagttacataccaaaaacaaacaaagtaaaccaaaaaaacgtaagaagttaattagtgtttaataaggcaaagacacacaggttaggccttaaaaccatttaatattgaagaaacatcacaaagtcaaacttcatagaagtaaagccaaagtctattaaaaaaaaaaaaataaggaaacgaagcagcatgatgaacgtattgttatcaatcaataactataaagatgttgactactcatgagcttcaccaagaacatcaattcgtgagtttaacaaaaaaacctttagccaattaaccaggcagaatttcggaaacttcaagtattcttatctagctgaaatgaaacaatatacttaaacagcaaacctagcacaaatatccctcacatctatcataacagtgatctaatatgcagcatattgaatttaaaccaaactgatcctacatcagatcttcaaacaaactcaacaaatagcagaaaacaagatacagacaaatgtttcaaagaaaaaaagcagaataaccaagatttaaaattgcataagaagataaaaaaaactcaaacccaaaaaagggtgtaaatccaaaaccagaatacaaaatctcaaaaatccagcttccatggatctcatctggcgcaacctcaagaagagtataaaccccaaaaaacccattagcacaacttccaaaatatgttgacagttcaatcaaatcaattactaccagaaaaacaagaaacagggtattgcctccgtacagaagaacccactcgtgagttagggttttcggaaaagaaattaaatgaaaaaaataaataaataaataaaaaatgtttagcctaccttgtaaagttgtttcctttttaatcttaattttcgtctctgccaatctctatctcagttgtccttacagaggcaggagtagtactagtaggagtagatctcagtaaaagctttaaagacagcacaaagtgttaaactcaaacatatctagatagagaaaacaaggacgctcaattttccgggtagagagagaaagtgagagagaaagagagagaaaatgtgtaaaagagccaatatgggaggacttgcaaagccatcttgaagagagagaaagagagtgaagttataattataaaaatagtttcagaaaaatgtaaccaaaaaataaataataaaaaactccaaaaaggaacaagtttttacttctctactttattattagatgcttcttatttatttaaaaataatatatcaatattgaacgttatatcttaatttgtttagttagtttcttgtaacaacaaaaaaagtaagtatactataaatgg

SEQ ID NO: 207143 - DNA, 864 bp, Cannabis indica
aaaaaatagcacatatacaaatttagcattatacaaatgttttgtcaaatttctcttatttatagtgatacaaatttagcactatacaaatgttttgtcaaattttctagctcaacctaagtataatttataacaacatgctcttagtaccttaatcaaaacaaatatataagtacataactatgtatacaatgtgtattaatgctgtatcacagtccaatttttgcagagatagtagctgagaaatctaggacaagtatatatgctttggatagatcttttgaaggagttttatcctcatttgctcccccaatagttggactcttggctcagaatatttttggctataaaccaatttcgacggggtcatttgatgaggcgaaaattgaaacagatagaaagaatgctgcgtcgctagctaaggcactctatgcagccatgggcattccaatggcgatttgttgtattgtttactcattcctttattgcacatacccgagagaccgcgatcgagcgagaatggatgctttggtagagtcaaaattgcctcgacaagatgaagatgaagatgaagatgaagaggaagacaactctctttcgagagcggaatcgaagtagaatttgtgttgcaaaagataagggatgtgtggttgaagatggcattggtcatgaattagatgataatgagaagtattttctttctcataagctaccacttctttcaaagaaagtataagaaagaaagaagttgaaataaggtttgtatttttcatttgtgtacatttgatgatgatcaagatcaacatttgtttatgatatacataacaaataaattcatgctttgaaaactcttaacagagtatt

SEQ ID NO: 207144 - DNA, 640 bp, Cannabis indica
aaattttcttatcatatttatgttaactagttttatttttcaaatatgtaaatatcccttttctaaaacacaaatttaaacaagtattagtataaaacacaaagtacaaaaatagtgtaaactcataaaaataaaaacataagcataaacttcaaccttaagaatattgctgtccggccgtatttttcatttttctaacctggacatatatgtggctgtgcagtcttgactcgaattctttggccaaggcaaagatcttattctccatttagggtaaaccaattgtgtccaaagaaaatctactgtccttaaattggtgttctcttcctattctaccaataattttagtacatattatttatactcaattaacatataattcattaacaaactctaaagtacatataaaataagtatagatgatgtgtcctaaaataattggtgggaacaaggaagacacaccaatttaaggacaacaattctctagagatagctcttgtgcagagagtttaagagcctacctaaggccaacttcagtgggtgttgccctgtgtgttgccaaaaaaaaaaaaattagcaggtctcactatatgatgtggcatgaaagaatagaaaaaaaaaaaaaaaaaaagtatgctcc

SEQ ID NO: 207145 - DNA, 955 bp, Cannabis indica
attcaaacgcgggtaaatattatatatttctccatgtaaaagtaaaagctccttgaaattcttttgcacacatatatataatttttggatttttacacaaacacctaaaattgtatataattcttactttttttttatatatatatatttttttaatttttagagatgttgttttttcccatttttttacttaaatgtttcaaaaaataatgtaatttttatgttgtgaaaacataatacgaatgtaacatagtgaaaaataattattaaataattgcgcaaattttataatagaaaaaaaaaataatttgtaaaatattaaaaatactctttataatatcttcgtaaatatttttgttgtttttaggtatttattcaataatccctataatttgaaaaaaaaaaaaaaaactggggccacattaatggactgggttggaacatgatatgacaaggataacacaattgagtagtttaattaggcaaaccagatgctaataaagcctaaaaacgtgcagatgtagtggaagtggtagaagtactcttcaaattatatattgtttgaccaaacgaaaaataaatgcaaactttgctattgtttatgggcacaatattcactctcattcaaagcaataattataatactctataccctcccccaaccccccataactccatatatgtataatatagaataattcatggaaagtcaaattcagcgtatggagttataacggactattaactgctactctagtcaattaaattcatttggtcataattgatcttcttttatagagtaatttgcggacaaaaaatacctaagttttactccgagtagcagataaatacctaagtcgtatttttggcggttaaaaatctttctgttagacttttggaatttccgtaagtacctcaccgttaaaggcaggaaagtatccgacttgtcattttc

SEQ ID NO: 207146 - DNA, 691 bp, Cannabis indica
gcttatttattagatttttcttttatttggtttgaccatttataaaattcgatagtatattcagtaacaaactttcctatcataaaaaattgacaaaataataaattaattaaattggttatataataataataataataataataataataataataataataatcagtaatttttgttgaaaggatagttaataaattttaggataatgatgaggtcattgaggttcactgcaccaacagctacacctaagtcaaagtatatatgttattggaaagttgactttctaatacttgttttgtttcttctttttttattttttagtaatattgtattttttatagtaataatatcttttattttagcaataatatcttttttacagtaataatatctttttattttagtaataatatctttttggacatttctatatttattgaagagcattgtgtaatataatagatattcagcaaaaaaattcagttttggtaatttaattacttaatagtaatccattatataattagtaattatagatttgttagtgaattgttactatatcgataaccttttttataaaactatatcgataatttagtaattaataacagaaataactccattaattactatatagataatgttgatacatccaaagaaaaaaaaacataaataactccattatata

SEQ ID NO: 207147 - DNA, 1007 bp, Cannabis indica
gcttttgcgtgatcaaattcagtacgtactacttctacttgtgataatttaatgctgtgtaaattaatgcttttctgaacttcagaacataataaatttgaatacatgatgtgcttattaattatatagctcattttcttttttgataaaatgtttttcaaagggtattaattaatgtagcttattaaatttgatatatattaatactatcatcagtgtgtgttagaatttgatacattattataaataatgatcatattaaccacgtactaataataatgtttaataattcaaattacgtacatgacgtagtactccacactttttcattggtttttgtttaattaaaactaaaaaatttaccacaggtagtactacagatcgacgatgctattgctagctagctttcttcaattcaatgttatataatcagctaaattaattaaaaaaagtaacaaataaagctgtagtcgatccatggtttctctatataataaatttcttttattgtttaaataatctaacatgcacataataaggatcaatattcaatacaattatacatatgggaattaattaggagggttccgtagctaaccacaccttttagaggtcagggctggtcttgaaatatgcattagggtatattaaaaaaaacctcttttatttatcaattaattaaatctacctctaattttatatttaattgaaacataccactttttatatgtattgtacctaaaataccctgatataagagagttacatggagagtatattaaagggtaaaatcggtaaagtgtttaaaaaaagaagtaaaaatgataggctttaaaaaagagggtaaaaataaaaaaaggataatataaaaaagatatagagtctaattttctcaaaaaaaatttagccattatgtaaaagaaaatgaagtattttttaaaattaataaaaaaaaaaattgtttaattttaaaaagagaattttttttattggactttttgggttag

SEQ ID NO: 207148 - DNA, 533 bp, Cannabis indica
aatttccaactacttgcacatttttagttagtgtcgcctacgtttaaagaaagtaacctagtccgcaactctaacctaaatttttcattcaataatattgtttcccttttactaccatttactaacgtgtaaggaaaaacaacatcaagtaggactacaagtgaagtttggtaattctctcatagctttcatcagttctagtagatagtgtcggccaaaatgcaacttgctcacatacaaaaagaaaagaattaagaagaaattaagtagcacattaattaacaatcatttaatatatattattataggatataacatattataatacagtctctatgttaatttctgaccctattaataattttccaactactctcacgctttaatttaagtataataactaataataatattaagtcgtccaatattaaagaaggttgttattttatttagtacttattttatgtttattatcctttcttttctatcttgataaaaataaagtaggtgggtgtacacccaaatgcaacttc

SEQ ID NO: 207149 - DNA, 1299 bp, Cannabis indica
gatctttttaccagcgcagtttacgaaatacgctggtaaaagtgacatttcttgtagtaattatgtatattaatgtaataaagatcctatttttatattgttttaagtttttttctgatttttttattaattgggtttatacattttttacctacgatccatgtttatttatttacttttaatttgggtatgggtactaggagaggagagatttgaacttgaaatttcttctttgtaataaaaaatataaaaccactaaaatatgctatggcgcccacacatctacataatattagttaattttttttttcattaaaataaacatatttatatttcttattaacacatagctgattaaaaaaatttgttttattttgcatgtatataaatcttgtacacactaattattaaataatacatataacagcttcactaattaaccattcattaaaaatataacacaattaattaactccacaaatgatacataatcttatgtgttaaaaacaagcatgtcgcctattattaaattaataattataaaggcttaatgcatatgcaattatgcatgctatttagatcataaaaagtatataaagttctgcatggttgaaccaaaatgataatgcaaaatgcaatatcaatatatattcacaccaatttacaaataatgatatatatatgtatgacaataataaataattgctaaaaaataattaatgaatatatatatttatatgattagggatctggcccgaggctaaaagtttcaacgacaaaggaatagggccaataccttcaaaatggaagggaacttgtgagagtgcatcagacttcaatccctcctccaattgtaataggtatataacaaaattatatataaaacaagccttaatttatttaaattacactgtgcttagagccccccaaaaaaattaccttctaaaattacatatttgtatagcccactaaggattcgatattgttgtagacataatttgattataggggaattactttatatattatttttttaacttttttttaaaatttacggtttgggttcctaataaagtggttgtagcgttagttgcactagggatttcaatacgattttttgttgcaatttaggttgcagcggtagttgcaataggggtttctatgtaaaatttcgtaaaaatgcaaaaaaaaaaaaaaaactagttcaaagtagtaaaagaaaagaacctaacttatatgttgacttgtactactataaatataggagttagtataggtgcaagattctaccttcctctt

SEQ ID NO: 207150 - DNA, 1832 bp, Cannabis indica
ttggagaatatgtcaggagacatcaagtcgaggagaccaagaaaacaatcaggatctgattctgtttgaagaattcgagtacgaaagcttcagggcacagaggaaagacgactcaaagaggtcgtctagtgataggaaacatgacaaatacgtacccatttatactatctataccgagcttaatgaaactcggcagagtatctaacttgcgcatgaacaaaaggtcgctttcaataaaacaaagcccatgaaacacgcgagacgtaaaagggacccaactagacgatgtgaataccatggagatattgggcatacaacgaaagagtgtcgtcagttgaaagatcagatagaaggcctcatagcgcgaggacacttctagcaatttataaaggggcaggacatccacgaccagcccgatttacctagtaacccaaggggccagggaccataaccttcctttgtaggaggaaaagatacctcggttatctcaggaggataatatattgcaagaaaaatttgacaaggggcaattagtcttgtcaagcaattacgtaaaagtattcgaagtaatcaaataccagctcgcaagttgtcgtatcgagctgcgtcacagaaaggccagtcgtcgaccaatggcggttggagcagaacaagaaataaccaagattagttcacttggagctgtggggatatggcagtgattgaccctgagcatcaaaaccccagtgggaatatgttagggattgaccctaaatattaaaacccactttattaaaaccagatgcttctagaagattgataaaataagcaatagaactaggaaagctcatacgtgattaaatcgataataaattaatgattgtaaatcacatcactgatgtaataatttatacttcagtcatgaatacatttaatcatttcttttgacaagtaattataaagtgtgaccctttaaaattacttcaggggcatatgtgtatgattaaccaaatttatttggaaatatatggtataattcaaacccgccactttaaaaatttttaaaattttttaaaaggttttcgaccaaacctttttgatgagaaaggggtcaaaccgttataacttcctcaccaaaccttttgatgagagatgggtcaaattattataacttcttgatcaaactgttttgacgagaaagggatcaaacaattataattttttgattaaaaacctatccaaccagaaaggaaaatcaaaagttataaatgagatataactcataactcgcgtgtaaagctgaatactaacgactcacactaaaggaaagtattaaacgaaacaacaaggtgccttgaaaaaggtacttaaacctaacgcgtgggtagaagatctaactactcatgtaagcaataaaaatatatacaaagtgacaaggtcattaaaaatatattcaagtttgcttgaaatcaattaccactgattattgcgacgcagaatcaatgactgctagcaaattgagtgcatggcagatgataaactgctcacgcgaaaagtaggcaattaactacttaatttcaaagggatttatgtgcaatggaaacccctaaaatactttgggtatgatcaaaatatgattatttaaattgtggataaaaccaagtaaacaagtacatgtcaaagttcaaacatataagtacaaggcattaaaggataaaataaaaagcaaagcaggccatccaactttgcaaatttgtctttacaaaaagaaccacaaggggtataccattctctcagctctaaggccatttccttacaaaaaaagataattaaaaaccaagtctacattgtgg

SEQ ID NO: 207151 - DNA, 735 bp, Cannabis indica
atggtctcggataatagctccaaaaccacagtagttctccttgaccagaatacttgcatcgctattgatacaaaagcaaccaggggcagattatcccacttgatctaggcaccatatgaggtttagagcaggaaggattattgtaaatgagcattatttggaagaaaaatatggattattttcttgttccagcaattccacacgagccaaattaaagtgacgaatgagagccaacaacacctggacaaatgttgatgaactgcaaggagaagatcagtaggatcctctatattcggttaaagaagacccttgaatgagaatgccttcttaatgtgagaacttgtaggacaaaaaaaaaacctatgagctataattttgtcattgtttccataccagcagtagaccgtagctatattcatttcgcacccttgaagggttgcgctggccggaaccttacaaacacgccaaatgaaatttctaatcttttgagggacctcaagatgccataacttagtccaccatttctccataacctagtttgaggaactttctaccatgatcagggtaaaatagaaaactttaaaataccactattaccgtaatacagacaactagggcatataatgccacacctagatcactctccgcacttgagttactaaaggagctaaatacaagtataggtggaaacgatcaatcttggtaaaaatttttagtttctaaatctgctctgag

SEQ ID NO: 207152 - DNA, 520 bp, Cannabis indica
taacttttatttttctctgtgaaatttctactgtgaggttcaaatttagttaacaaaaatctgtgttaacaaaatatatatatgaaaaataagtaaataagattttaataatacaaaattaataaagctaaaaaaatataggagaatcatatagtatcagttatttaataataatcgacggtatagggtcctacgacattagttaatttataataaccgatgccatagagtccttatgttgtcgattttttctcaccctatgacgtcgcttagaatagcattgatagcgaatttcttcaaaatcgacattgtaagccctaaaaaagtgcctctaaatcatatttttctagtggtgtatatttctttcaaactctacatttatattgtggtatggaatttttttacatttgtactatccataagatatatattttttttatttttacacattttttatttattttacttttataatttcttttttaaattgtcttctttttttctctctctatttcttctt

SEQ ID NO: 207153 - DNA, 1000 bp, Cannabis indica
cgggcggggcagggcggagcgaaggctcggataacgacccggatgtccttgggcgggaatcgacccgatccgcgaaaaataccctaacgaatgaaagtgaaaccctttctgaattctgccgcctttctcaaccttcttattcctcacagctctcactacttcagtcgagcgcccagtgaccccgtacggaagcttcacctcacattctctccctgattattattattatttgctttatataaatcatattcaagtttccaaaactcacaacaacaaaaacaaaaaatttcaggtagaataatttgatgatttcttcgttttaaattacagtagcgtattgtacttgttttgtgctttttgcgacttctcatctttgttgtggtcgtgggtttaaagggtgtttttcattgtacttgtaccgggcttttgggttgctgccactactatttgtgatagaaacctctgccattcattaatcataaattactaattgggcttacgtctatggttttaccattacaaatatgaataagaaacatgtagacactaaacatgtaacaacgtatttgaaattagcaaaagctaatatggcttgcaacggattataatcactgagcactagattacacaataagattcctgatagaacactagtaaagttataatttatagtaaagttcgtagctttctattgttataagcattgccaccattacagccttcgttttgttactttgggtgtgtgtatgttaaagatccagtagcataaagttcaaatacagatgattttgagatttgttaactattaaggttctggatattctgcagtattagagttgagaaattttctggcaagcaagatgggtgtggaagaagaaaatggaacacttgagaagattgtacctcttactgatcaggtgcgttcaactgttaatttatacaaaatgtcggctaattgaatattatgtgcaaagttagaaaattaattgtcttgtgtttt

SEQ ID NO: 207154 - DNA, 627 bp, Cannabis indica
atcatgcaaaatatgtcacaatttaatttttgtttttattttaccccttaaaaaataaaaaaattaacacagtatagacacttaggcccagtttgtaatagctttttaaaaagttagaagcactttttagaaaatttagcggttataaagtgtttggtaaaatttaaaaaataacttttcaaagagtaaaaattttagcttttaggcaaagttagctaaccctaactttaagattttagattgtacaggaagcttaaaattttctttaatgaatttttcaattgactaaattgtcctcatctaatttgaatattccttttttaccaattaaaattcatctttctatttttaattttaaacttctcctaacaaaaatcttgcacactcttgccaggcatccatctccttccatttgttattatattcttcatcacaaagtcaatcacagctccaaaatcttaaggtttgtatctttatctctcttcctcataaatatattgaatcattttttctcttcatgtgggttttataagatatatacattttagggttttatctatttatcatgcatttgtcaaaattctaggcattctgtttctctattttaggggttttgtaggatttttt

SEQ ID NO: 207155 - DNA, 845 bp, Cannabis indica
tattgtttatctaattatcaaaacctaattataagattaaaatttggtatctactaagtatactataaacaccacaaattatttgcacatgagcaaaaaattaacattatctgtattagtttttgctagaagatggtctgcacaatatcgtatattagccttaggcatattagaacatctccaatgcacaagcaaaacaatgtattaaatttaacacaaaattaataaatattatatttaacaaacattttataattatgctctaatacataatagcaaattaaatataattgttaaaaaataatagcaatattgtaaattgtaatcaaaaaagtttaagtgccaaatctgatacaataatatatctggtactaaatttaacataagttttaacacagtattgaagaaagattttttataaaaatatcaaaatatagtataacttcaattatttggcacctcaaggagatgatcttagaattacgttacatgttctgtgatcatcctcattttacaagtgacagctctatcttgcgttggttacacattatccaagacatgaaatcaattggcaaataccattttcaagcaaaaaattaaaaattaaaaataataatataaaaaaattagcatatatcataaaacatggagaaatactaaaagccacccatagtgtctattacccatataaagtatcatgtaactacaatacaattcaatatccgatccagaaaaccaactatttaaagggtgctatcacatggagatggtaatgctctttcctagtgtggggtactaaatgtcccttttcagagcccaacaagaggaggttctcaaatttctga

SEQ ID NO: 207156 - DNA, 1004 bp, Cannabis indica
caatactaattgcaagtaaaaaatattcttaggtttgatattgtatgtactaattggtatatatttaaaattatatatatactaataaatgttatttggtagctagatactatttgatattattttaaagtacttttatatgatgtttaaaatattgcagtaatagtttattatttttcttttcatttaataatttctttgaggtatgataataaattattactcttaataataattataaattatgtatttaaatataatatttggtttgttattaaaaaaatttgttatttcagttacactttttttaaaaaataaataaactttatttggtgaagatttcagttacaattttgtatgtacgcaaaaaaaaaaaaaattaattatcattatgttataatattttttataagatatttgtataattaagtgcatattgttgtataaatgtgttaaattccctctcttttcaaaaaatttgttaatcttcttattttaagttttataataaaataaatttgttaatcttaaatagcaaatatatgatatggtgtatttttaataataataaaaagcatatcattattattggagcgctttgtctgccaaaaaaaaagcaaaaaaaaaatctgttgttttcaaattggtgtgttttctctttttccaccaattatttcaagacaatctgtacctattttacatgtattaagatagtttagagtttattaatgaattcattatatgttaaatagttataaataatgtgcactaaaataattagtgggacagaaaagacataccaatttagagataacaggttttggctagctctacatgcatactgaatttgtttctactaataatgataataacaaagatgattataagtatttaaaatatattttatatttttacaataatataggtgaaactatgtatacatgcatggatgcagcttcttcatgctatggatatacagacgaaggtgtaatgatcgcagcagc

SEQ ID NO: 207157 - DNA, 1046 bp, Cannabis indica
atccacaatgtaatgaatcagtacgtgtagaagtatatttaatattataattatgattaaatgagaaccaggattagggttactaccctaaagtgagcggtcatatggtccagggttattaccctagtgattagatgattttgaatataatgtcgtgctatatatgttgagataaaaagttatgcattcaaggcataattaggttagactcggtaattagaaccgagataaaccgttctaaggccttcttgtacatagtcgtgtgagcgtaacacgtagatctatgctacatagacataattaagcatagtggtatggccttaagattaaattcttctttcctaaaggtatcgtatgcaggaacaccctcgtaccacaattgactcaaatcattaactagaggtgctaagtacacaccaatgtcattaccaggctgtgaagggcctaatgttaactgtgtaagcataataaacttcctcttcattaccaaccaaggcgacaagttatacattacaagaaaaattggtcagcaactatacttattgctaagggttgtatgtgaattgattctttctgcagaaagaccaagacgaatattcctaggtcattgacaaatttaagccacctatcatcaattgacttccaagcaggtgagtcagttggatgtctcatcctaccatctaatttttcattgtttgcatgccaagtcaaatttttagcatgattgacattttaaaagaagtgaaccaaacaaagtattggggataagtaccatagtacctttgtagggacaccaacccttacctcctcagaattcatctttttgtcacctagactcaccacacatgggacacgatattgcatccacaaatctcttacagtataggatgcaatctctaggacatacatatatttttttcatattgcacacctaaagatgaaagtgtcttctttacttcgtagaaatacaaaggcatcacataaccttcagataataactctactaggaaagttcttaaatctataaaactcttatcattccaccc

SEQ ID NO: 207158 - DNA, 1326 bp, Cannabis indica
tactttgctctcactcatgagaatttagtttttttttttaatttgtttgttggataattaagatgtataagattataatgagttgttgggatatgttattaattttttaatattatttatttaatttttataactttaataaaaaagttattaatgggatttattttctaggtcaaaaatataaaatgattttctcaatcgttttttttttcttttcttagagaactctgaatatgattaaatctaaatttaatgaataccatacaacatttacgctagcatcttttaatcttgttgtttcaatttctccatctaatgctcttaaccagtatttttctacattcagaaaaaaaaaaaaaaaaaaaaaaattaacattgaaatatcccttgcattttctctctggtatattcttgtatttcagtctaaattttctagcctttgaaattatttcattttttttctcccataaaacatttaagtattcatataattaaaaaatttcactatcagaatcaaaacataatatgcatatggtgaggaagttttctacaacagcattgtacataacaatttaaaattaaaagacatgatgaataatgcttgtggctaatagaaacaggaggaagatgaaaaataaaatattttgggatttatggaattgatgaagaagaatattttctattatcatgagaggtgacagggtgaaattgaaaaagaaaataactctattctcaaatgataatctaataattttttttaaaataatttattaatcatatatgtgatacatactctatcgtaaggaaaaatgttattaccgtcagattaaaaatcaatggttgtgaaaatactctaacttatgagagtaaaagtagtgttctcacttagaaattaaacaaaacaaatcttttctttccactagaagatagaaaggttcggttcttttttttctccaattttagtttgattgaggtgcatatattctaattgttttttgttttgagttgatacacatctaatcagtagccttagccttagccttagcctagcctagccctaggtacgttgttttgataatattatggctttgaatttgattatataattatacaggatcgattagttgtattgtaagaataatatttttcccttattattattattatatattacccttgtttaattgaaaataatattctatttctaggtttaattaatttgtttgtctaatctgataatctaatggtagagatggcagaagtggttgatgaaattaaagatggtaaaggtttgttagcacaagacacagagaaaaaagaaataga

SEQ ID NO: 207159 - DNA, 789 bp, Cannabis indica
gaataatttcgaaaatcacaggtaggaaaaaaaaaaagggggggacagaaggggaaattatcaggagacgtccttttcatatatttgagattaaagacatttatgtaccacgtacgtatatgttaattacaacgacgttacattgcttctattgatcatttgcacaactaattttaatgtagaaattagtatcaaaactatgcaatgcgactttcagtaataagaaagcttccaattccattaataaatttgttaacaaatattttatagttgagtatttggatgatgacgagaaaggaattccactatattcaactttaattaacatttgtatgtggagctaaacacaataataccaaaatgatgaatatataatttatatgtatctgctctttgactggataaggtcttgttggtattcacgaattccattatataaatatatatccttctctcttcttcatgtcagctttgactttgcctctgtattttgtccccatacctggcttacctgctttcaacttaatgctgctcctgtctagatattaatatgtacattttaaacaacaaaagaaaaaaaaaaagtcaaaacataaataatgtaccaacagattttaaactttagcttataaaagagaattgctaaaaagttttattagtgactaatattttttctcttctcatattattattattaatataattaagtgttgaatcttatatataaaaagaaaaatattaaaagatactaatagtgcttagtaccctctcttatatgttaatattgtt

SEQ ID NO: 207160 - DNA, 1267 bp, Cannabis indica
agtcccttctttcttcttcttcaatggccaaccatctcttactcactcaactctgtctttctttcactactactgacaatatcgacatatgctggccaaatgtgtttgttggttgtttaaaccctaatctctagtttcgtactcatcatcgtcggttgttgtgggcgaaaaatattatgtttcgctcatattttttacataagctaacactatgtttggtgagaaagacggaaagagggattgacaaactagaaagggaagagaggaagaatgaaagaaaagaaagtaaccatctcttattttgttgagtgtattgcgaggaagagaatgtatagatctattttttatgtttttggtttttttttttttttttttttttttaaaatcaagaatgtagaattcctcacatgttttatatgacttgaaacacatgaatggtctttctcttgcatagtagtacccactatgtaaggtgtgttcaaaacaaatattgatcttatctcacataagtccaatctctaccttgctatattttcacacttcatcatcattaaaatccatttatattaattgtgacatacaagatatatatcaagtagaaataataatcaacattgatcatcataatatatgtatagtcttgtttgttcttacaaaagctagctaaattagggtttaatttattatgatagtagtagtgcaatttcaaggttcaacaacatgtaatccattattgtcttttattttaggtgcattaatattataatgatcaatatggtttggctcttcttcttcttcttcttctgagattatcatttcaaccttctcatctccatcttttccccatagcaacatatatagcccaacaatcacaataagtgctccaagtatgctgtgataaaaaaaaaatcaaaaataaaacttaaatataaatatttatatacatattatatctactagcgagaaaaattataataattcacttctacttataatatatgatctggccattcattattatattattgtactaatttgtactaatgattgatcgaaattgtacactactaataaatttgtatgttataaaaatgttatgacttttgagaacgaattacttcttaaaatatgtatatttgtaaaagtaaaataatttttttaacctcagggctaggtgtgccctaagtgcaggaccaatctagactatgtggtagtactaaataggtcagaatcgctacaaagttgtgatcaacaacaactcttaacc

SEQ ID NO: 207161 - DNA, 1597 bp, Cannabis indica
attaagagatttttggaagcccttgcgtccttagaaagctcaaaatatttttgtatggcgcttaaggactcgctgctcaggacagggatctccttaatagctagaagaccaaggcaagagatcaagtaggtaaaaaaaaaacgggggggggggggggggtgaagccacaatacaacccataccttgaaccctgaatatggaggacacgctatcgggcatcctgtcaacaataaaaaagtcagcaggcttgaacgggatttttgaagacatcctggccacgtcgtaaactttgggagaggggatcttcgagaaataataagtgctgggggatccgggcatatgatggatgttaaaatagattggaactcggcgaccagtggggaagcggtcgtccaccccttgaaagcaataacaaaacacgtcatgatggtgtagcccaccagggaaagttggagtggtgacagaccaaaatatgccaggacttcgacaaagaatgggtgaaggggaaaagtggcacctgcttccatgaggttcccactaaaggaaaccccctaccatgggggcagaagcagattcatcctgcccagctctacggagaacaagagcgctagtggctcgcaccttgaaggtgtccattattttgcggaggccgtctgccgataaattacttcaaatacctgagtatataaagtcaacctcttagggtagcggtggtacatgtcgcttggccaagtaagagggaacacgcttacggggcgcgccggttgtcgctgactgtttggcaagagacatacctgcagacatatagaaacaatgttaagaatgtgccacctgttttctattcctcacaaacctcttgcattctcgggtcttgaccctaggtaggcaatgattgtcccttgcatacagggggttcaacagtctgagagcatgacaggatatcaagcatgggaggaagggttccattaaggaaatccaaatgaagttgagatttcataagagaagccttaagtttggaaaggtagacagtagggtcgacgacaaggtcatgtctctctctgttcaaaactgagagattttctgcctaaatcttctcgatacgctcttgacaggcaatgatgtgttcaaaatggttagccctctctgacactaatctatcatatctaatgtgcggactatgtgaaacattttccgaatcagaagatgaaatgtcaatgatttcggcagtggggaacactgctctaagtagctgacactggatgtgacccaagacaaaatgaattaaagaagatgcattgccttgacagctccacctatgaggtaaaactaaggtgttaagtttactaggacgcgtgtctaaaagggattcaaataatgcaaccagtacaacaaatttagcacacgtgttacgactattagaatcctagacttatggaatgaaagtaacaaaagtaaaagaaaaaagagtaaggggaggcaacatacctatgaatgtaaggagagccgcagatggtagatgagtcactgtaagataagaaagatgtctgccaccaaagaaaaagcaagagtgatagagactcaccctattagcaaaaac

SEQ ID NO: 207162 - DNA, 1266 bp, Cannabis indica
attgattgtttattgttattattgttatatttgatataaaaatgtgttttgatttttttttttacctctatttagttataacctctcaattaaaatataattttcttagttctaattataggtagacactactaaaaaaaaatcggctattacagttggttcctataactgacacctatactactgatgcaaaatccaatttcattagtgtcagttcttaatcgtcaatcggtaccaaaagctagtgtctgattaaaatagttgctagtagtataaaaaatacatttttatagcatttccgtcagtttctaccgacaaaacaaagacaatatttctaaattagggcaaaaacgaaaaaaaaaaaaaaactaaaatcaaaccttaggcatttgatcgccatgcatcttccccttctaacttctggtatagaactcttctcagcttcattcctctttgatttcttcttcatataagatgacgatcgagttttgttactggttctacaaaatctagatcaaagtcatcatcttctacaataggtcgtttcttttaatgatatcacattcattgatgtaggtttagaacttttagaaatgggcttcttaacacttagttttttcacatatggagatggagaagaagaggagtaagtcacaactacttatacggaaattagtagaagaagaaaaaacagaaataaaaatcatggttggagcttcaatggcaattggagattgtgggggagcaattttgtggagagaaaactgattttgattgtgaaaaaatgattcaaaagaaaaatgaagatgaaaaataaaaatgaaaactgaaaatgaaatggagaacatgtatataagagagaggaaaaaatagttttgagtgtcactctagtatcatgacatcatcatagatacaaaggttgatctatgcgtataattgtaaaagggaaatttgattttctatatttacatatacctaatattttttccctaaattaatacttttctacattgaaaatatatgaccacttttccaaaatcccaaaaatactcctctcaaaaactctttttttttcaatttttttgggcttttaaggggtagagtccgatggggcccgatgccgacccgatgggacatgtttttgggtttttgaaaccgggtccgatgggcccgatacccgtccgatgagcccgatgccaaatttttggggtccgattggatattttgggtttttgaagtcgggggcccgatgccccgtccgatggg

SEQ ID NO: 207163 - DNA, 970 bp, Cannabis indica
atatataatacttcacacacacgatgaaatctctatacaattaatatagtaatgttatatatatgtatatataaaaattacttctgcatgctaagaaagatgatatacaattcatgtaacacagagcacatatatatttcagacaaaacacatttataatatttaaaattagacaaaagaaaaacaaaattataatactattcaaactttgagactaattcaaaaatcacttgaatattcatttaaataatgttctttagtcaagttatacaataattctatattgcttctacaattttattttatgaaaacggtacacaaagtatacatgacaataaaagggataatatatatatatatatatatatatgaaaattaatcaaatgtaaatcggtgaaaacaatgagaagtaataacaaattaaatagcatgaaagaatttatcaaatataaaatataattgaaaatactataacaatcttttctcattaagtttgaccataaacagtataattcataattattctttccacaaaattttaaataagtgtctcaatcgagttggtaaagtagcaaaatatttttaatcgtttaactatttaattttttaaaatacatcactaaaattttacttcggaacggaaaagaattattttaaaataagtcataagattgttgtagtggaagatttgtacttttacgcactctcatgcaaaataaaattgatttagagggaaacaaaaagcaattccaattagaagggtgagtgctttgatagagagatgctctataaagtccagtagtttagtatatttataaaatctaaagcctaatctggtttggtttttttccttttttacatatttcatataaatatatatatataaataaatatattgatttttctctttgtctttctctctcatagtccgttttccataagaactgtatcaaaaacaaaaaaaaaaaaa

SEQ ID NO: 207164 - DNA, 1365 bp, Cannabis indica
tcaacaagtcaatatgctaaaatttctatttcctttagcaataatacgatcgaaggtatggagagggggattaaagagatcatagggattaagggcattaaaagcaatatatgataggggtaagttgaaaaatgccttttttattcatcaattaatcaaatttacctctaattttatatttatttgaaacatacctctttttatatgtattgtacccaaaatacccttacataagagaatcacatggagagtatcttgaagtgacaggagcaaaattggtacaatgtttaaaaaaaagaggtaaaaatgatagattttaaaaaagaaggtaaaaataaaagagaacaatataaaaaaggtatagagtgttaaattttttttttgttttggtattaagcccagtccatcaccaccatcgtggcccaacttttcggcctctttgttaaacaccatatatagatgtatagtcatcaatatacaatgataaagctaacttcgatgtctacttattattaatagtaattaacaataaatttaattttttaaaaaaatagaatgaaatatctttttacttaatattccaattaaaaatataaccaattcaaaattcaaagataagcttcaacttttttaaaaaataaataaaataataaataataagcttgaaagtgttatatttatatgaagatgatgattatcataataatcagatgatggcctgaagcaaatcttaaccatgggcttgttattgggcttcatttgggccctaacatgtccagtgaccagggccggccctaggcataggcgggctaggcccgtgcctagggcccacacttttcgggggcccaaaatgaaaaaataaaaaaatttattaggcttttatttaagtaaaatttaagtgtattacaaacaacaaatatttatagcttagttggttgaggtggaagccataatgctcaaggtcatgggttcaaatcccactacactctttttattgatattttttttatgtatttttgagggccccaaaatttaattcgtcttgggcccatatattttcagggccggccctgccagtgacctatttattttagatacttacataaaacactattttctttaaacaatataacaagaaaactacataaaagtaacgatccgaatccagacccagctactccgaagacggacccgagacttggacccaaacccagactggagcccgaaccctaaaccccaaactgggaaccggaccgtacaggatccagatcggacaggacccagacccgacccagagtcggtgttggggtctagtttattaaaaatatattataactttacacaacctattaatacaagtcaata

SEQ ID NO: 207165 - DNA, 516 bp, Cannabis indica
aaaaaaagttgtaaaaaagtaaaaactagttttatagaacattgtttttagaaaaattattttttactttttacaaattttaaaaacagaaaactgaattaaaaaatattaccaaacacactttaatgttttaattgttttttaatatatataggttgatgaattaattttttactcttaactaattttttttactgttttagcctatgtagttagttatagttaattaattagcatctatttaaagtactttagttgaaacataagtgtaattttttggaaacctttgatgagagatacaaaaagctaactatgattttattactagattttcaacttatttaactctgtaaatacatattctactttttaaatatatttctaaacacttatttacatactaaaaaaaattaaataattaaattgttacaaacttttatatagaaagtacataaagtgtctcttttggttccaccaaaaaaagaaaagtcaacattataattcatattttttttt

SEQ ID NO: 207166 - DNA, 459 bp, Cannabis indica
ggtacgatgatagtttcttgatttgggagtaatgagatattgggaaagtgagtgatttcgtttataaatgcttaagcttacacacaaatataatattatataaagtgaggagtgagagagatagatatatattatcagaagggctagaaagaatcatcaccctttcgattctgactaattaatttctgggttttgcttggttggtaatcaccatgaataagcttctagcttgtgggaaaatagcgtcaagagctcctcatagggtttcaagcttgtttggttcttttagtatctcaaggtatgatactggtttccctttttgaacagatgcaaagtggctgtctttttgttttgcttttcaattcccgtgattgaaaatggttttgttttgaattgttattctatgaacacagaaacaaaggtttcgggaattcttcgaattgtgtttttttttttttt

SEQ ID NO: 207167 - DNA, 1019 bp, Cannabis indica
taattttgagaagatagagaaataggagtttattttttaatcagtacacttcgtgggtttaattaataaataaatttaaattgtattttatttgataataatttataattattaaaataaatttagtatttaaataattagatgagatgaatggtaaaattagaaaagacactttagtttcataagttgaaataaagttccaaaaaaagcccattatattatttcagtcctaagagttagattcaacccaagtccttattttaagtccaatctcatctaacctaaccttaagtgcatgcctatataaagaaaataatgagaagagagatctattctaacctaaggtttcaatgtcagacaactctcttatcttctttcttctatattttgaaattcactatgtgattcactctcaaaatattgttgtgtttgagtatcagcccacactattcaaggtaatactcaagcttttgtggaagactgtgatgaacacattcaaagtaggagaagatccaagttcaaatcataataatgctctatcacgagcatgaatcaagggctagagatttagaagaagacaatatattctgttacaatcactgtaaggatttcttaatccctttatgtgtttatttattattttaggaattttccatgtttaattaggatattagattactcataatccaacttacatgaatagtaaattaagatcctgtaaaaaaaattactaataagcaaaaatgggggcgaaagctcatcaaagtaagtctataagaacgcttaaaagaaaactcatagactaggggttaattccgaaaaattaaaaaggctaactcctgagataaggtgacgtttcactataagataaacaaacaatgacacccaaaacgatcactccaaatgtatggttatacatgctatgcatggtaagccactcgaccaccatgatgagcatgtcactcaaccaccatgatgggcatgtcactcggccaccatgatgggaatgtcaccgtcgg

SEQ ID NO: 207168 - DNA, 1202 bp, Cannabis indica
cctggttgaaggaaccattatgtattgaaattgtgaaagattgttggaaaaatggtcaagctactagcttcgatgaaaagttgagtttgtgtgttgaaaaactcaaggagtggggtaaagagataacaggtacacttaatcaccgtataaaaaagtacacaaaagagttgaaggtgctccacggtaaacgggatgtggcctcggttcaatgctacaatgaggtcaagaaaaagcttttcaaggcccttgatcagagagagagctactggaagcagagagctaaacaattttggctgcatgaaggtgaccaaaacagtagctattttcataaggcagcaagtagcaaaaaaaagaacaatcagattgagcagttgaaggatgatcacgataattgggtaacttgggagtcaggattatctaaagttgtggctgagtgctttcatggtttgtttgcttctggaaacacttgttgcactgaggtgatagactgtgtttctaaggtagtgtctgacagtgttaacatggagttatgccaacctattggcgaagaagacgtgaagaaagccttatttcagatgaatcctgataaaagcctgggtccagatggaatgacccctgctttttaccagcggtgttggtctatagtgcgacatgatgttgtgaaatgtgttcgttatttctttgatcaatgcactttggaggatggtaatagtgaggcaaatgtcgtgcttattccaaagaagaagaacccagagcttatgtctgatcctcctccaattgccctttgtaatgtcatgtacaagattatcacaaaggttatgttcaataggatgaagctgattattaacaccgtcatttcagaaaatcaaagtgtgtttatccctggtcgtttaatttctgataatgttctggtttcgtttgaaattcgcattacttaaaaagaaaacgcaaaggaaaggaagggtatatggctctcaagcttgatatgagcaaggcgtatgatagagtgggtggtcttttcttgaagcgatgctccgtaagctgggattttcatagaagtgggtccgactagttttgaaatgtgttacatcaaactcatccatgaacttaaaggtgaggtgaacttggaggagtcttcggtgaataaattttggaagaaattctggactctcaagttgtccccaaagatgaagaatctagtt

SEQ ID NO: 207169 - DNA, 900 bp, Cannabis indica
ctggccttgatggaagcgtagcttaatcgaaaaatttgaaacgataatttgagtaaaaccctaagagcactctcaatggctctttcaaaatagagaaaaaataccttctaacaaataatgtaaactctttctctattttaaagcatctcaattttctttaaatgcttcttgcctttacatgtagagaagctttattcatcctttaaacatatttcaataatattttattctattttttattatatatattaaaaaatatattatttaaatgatgtgaagaagatataaaaaaaaaatagagaagctgatatatgatgtattgtaaaagtgtgatataaaataaaaaaagtggtgttctagtgatttgtttaaaaaataaagtaaataagttgtttggaatgctttagggtgtgtttggaaattataattaaaggtagttatgtatataatttaacatgtttgtacgaccatataattataagtataattagtggtaatcaaagaattctggttacactctttaattcttgaatgaaagaaaaaccccccacgaattgtgctacatttgttatctttgcaattttaatattttatcggttctctctaaaataatatgaattctcagaaaaatattaaacaattgtaaaacaacaaaacagaacaattaaaacaagagtgtaaacaactaaaaaataaccgtaaaaaatttaacacattacacaatataaaacttacataatagtgtttttaagaaaatacagtatttttgaagaaaaaaaattctgccccacaatcaaagaataaaaaagttagaaatttcgtgtaaaaatccttagagataagttgaaaaatgcctttttttttttgtattcattagtcaaaaataccctcatattattt

SEQ ID NO: 207170 - DNA, 680 bp, Cannabis indica
agcagcacccttcgtctttagttgggtctgcctctaaatgtgatcaaatattttcaatgttatgttataccgtcaatgttactgctgagtattcaattaatttttttagttatcatctccattttgatcatggtactaaaaagttaagaattaagtcaataaattacttttacaatagaaaataacaataattattaagaatgaaaaaggaatggtttctgtcttcctctttttctaaaagcagatgattaatgtagtaaattatgatatggtaaatagtggtctaatgtccaaaagagagagattaatagacagaacagttaatactaaggctgtaggggccattatcaatatcaatcgattagattgggtcttttaaagtggaaaacttctgtcggattatataataacaattgggattgtaggttcgatttatcaaaaatggagaaatactgttccaaatgcggctcaattaagatttaagaatattaaaatggcactacttttgtctaaaggaaagcttttatagcatattggtcaattttaggtatcgtttttttctttttttaatatctaaatataaatatacaacaagattacggtaggtcttaactattagttttaaattttgtgattattataatgtaaagtgtatttttatgataaaattggttctatat

SEQ ID NO: 207171 - DNA, 853 bp, Cannabis indica
tcgcaatattgaggctgaaatgggaccaatatatttagttgactctcattaataaagtttttgtttaatttttcaaaaataaaataaaattaaaattatcttactataaaatatgatatgcttttaaattatagatattttataatgaaatattatttattcgaaatttaagatgatatttaagcctaaaaaaaattcaattataacatatcacgtgattatcatatgatttttagagctttaagctcaacttttagagatgcatataagacataatatggtgtatgctcattggaattgttttagaaaaaataataaaaaaaagactctacaatattaattgttttaatcttatttagaaaaatataatataaatatttagtcaaataattacccataattattcaagaaaatttatatcaaaaaacattaaattgaaatttgattttattattcaattgtcattaaataattttttttatataacatatattctaaaaagattatagacaaccgcacaacacactattactttacttttcttcttttcagacaaacatttcacacggtaaacaaatgaaatcaataaatatgaaatattattgaaagtgactatcacaaataaaaaaataacagacctaaaaagagtgtaaaaatgattactaggtactgatagtaataatactagtagtagtaagaaggtcaaaattaagaaggaaaaaaaaaaagaaaaaaaaccattattaaaacaagttattactctaggcaaaaagaaatgagaaaaaaaataaaatgtcatagttttttttgttagaataaaatgtcatagttacataaaacaataaaaaaaaaa

SEQ ID NO: 207172 - DNA, 623 bp, Cannabis indica
aaagcattgaatttgaagaagctgttggtcacttacccatgctggcttgggaatttcagttcagttgatcacaaatggtggtggagtttgaaaccctaagccccaactctgttgacggttgagcgactcaagagaagaaggaggaccgactagagccctgatcggagccccgattcatttcgttggacccgataagaaacccgaattaaattgggcttagattcaatcaggcccacttatttttcactctttattcggctcaggcttaaacagaaacttattttggacaaatatttataattttatttttccttttatattatattgtagacactgaatatcaagaaccatagctccattctccatacccatatacagaaccaccacggcaacatgaaaacacttaaaaaataactattaattccaacgagataacagtgaaatcagtgtcaaattactttctcaaaaaaaaatgtgaaattaataatcatggcaaaataaatataaaacaatactaaaataaatcaaacaaaacaaaaaaaaattaaaaaaactaaccatcttttgcatagcctcaacaccatcagatgcaataataactatatttgcaagtccagtcttga

SEQ ID NO: 207173 - DNA, 733 bp, Cannabis indica
atatatattttaaactaatgttcaaaatgttgtatttctcattaattccctaaaacttcagcaaattggacaagctttactcccaacagtgtctagcaaggctcttcctgcaccagcagaggcaagtccaaatgctgctaccgccgatagtactgtacaaaaagcagaagctgttcctcaatctaaagtagaagaagctgcaccacctgctccccaatctaaactagaagcagctgtacaacctgctcaagaaataaactcagtccccaaaacggaaactaaagcagaatcgcttcctaaagtctcaaaaccgctatcaccatactcttgtgtaagttctgcttttcagctttgctttttttgtgactttaattatgcaatgatttgtgctttgaataccaacttacccttttcatgaatttggtttgtgattgcagtatccagattttaagcccccaacatctccttcaccatcacagccatagagttccaaagatattgtttcaagcggggtagtggtttggttaggaattttcaaagaaagattcaacatagttaatgcaacttgtgtatttatgtttcaagaaattttctttatatattggttcaaataagattgtaataccatgatgagtactaagagaattcaacaacttttgtttatgtttcttagacaactttatgtggtggtatgttatatctatggtcatggattcttgtagattatattcat

SEQ ID NO: 207174 - DNA, 700 bp, Cannabis indica
aaaaatttatgaaaaataaaaaaggtaaccgctagtggtggtgtgttgccttctcaggtacgcagagtgcgcagtacgcattccctactttttcacatccacacgaaagtaatcagtgaataattaatttcacattttaaagattctttaattaatcactcacttttaattttattattattattattattattattctcactattaataattattataacaataaatcattttgttcattaaaaaacaaaacagtattaataatagtatcataacattaacagcacaatatctccccacgtcttcaataattaattttttttttgtattaaaatacaataatatattatcatcatggccatcatatttttattttggggacaaaattctcatcataattttaatctttattaaattgaatttgttactatcgtttctttaattattaaacatatataaaaggcaatattacattaaataaatttaaggttggatatcttttttttttatatatataaatttaataatttgaaaacataaaattcgactattaaattaagttattttaatgagaatctataacatagttagttgaaatatgggtttaccataatttaacaactacaaaaaaaaatgttttaataaatgaaattatatatataaaaaaataatatatatatattttgctgaatgtactttg

SEQ ID NO: 207175 - DNA, 665 bp, Cannabis indica
atatatatatttactatttgataatacaaaaggtctaagtatagattttttaagcaaaggtttcgtttggcaaagcttaaaataagctaatttttctaagaaaaagaagaagctaatttaacttatttttttacaaataaaataattttttttttcatagaagcgagtaatgatgtgtacacacaaacttgacatgcttatgtggtaagtactaagtaatatcaaataatcatatttatctatagtgggctttttttttttaaaaaaaaaataaatttgtgtgtaatttatgtatacacatattattacttaatactgtttaaatttagttgcacatattatttttggtttaatttaaaattcatttatttattatagaataagagggattaaatactttaatgtttttacttttatatgttttattttatttttaatatttttagtacacctaaacgtcttgataacatgaacaacatttttaacatgtggtacaaagaaaataattgtggcccccaaaacctcaagcagtgtagcaccacttgcgtactaggaaactcagggctcaggtggagcataggggccccaagtgagctgatggatttggatatgttcatttctgtgtttttttctaaacagtttaagtggatgactcgtcacaacat

SEQ ID NO: 207176 - DNA, 948 bp, Cannabis indica
aaaaatccaaaaatcctaattttttagtacatcaactttatctttaaaaatactaaccttaacttatatctctctctttctctacaatgccagaccactaaagtagctaaacagatttttaggtgacacaactcaaatagggctggtcctaaagtatgtgatagctaaggtaaattaaattttgaagtcgttatatatatagtttaattattattaaaatggttgttctaatgctttagtataatggtaaagctttaaaaaaattttaagagctctaagatttaatccttcgtagttacacattaaatatatttttttaaaaaataaaattagagattgatctcttgaatatttttttaaaaaataaaaaagcagagattaaagattgatcccttgaccttttgacttaaaggaaaaccttttactattaaaccaaataatatttgttatattttttcttatttcatattttatctatatattaataatttttttttcatgatttcgaggcttgagcggtcaagggcctaaggcgcacgcctagcttgtctacccaaatacctccaaatacctcacaagtttttgtgagttaaagttaaaaaacataaaaataacaattaggcactagtaaaaaacaagacatgtctgatatgaaaattaattaggcgacaggacacgatttgcacactctacagtaattataagagatcacttaagttaaatatgatgcaaaaaagtgatggcactcacagcttgacgtaaatggtgggtgatgtcccgaccatacagcatcattgtgtccaaagagaggtggctgagagtcgtcatcaacgttctaagaaggccatgatctgtatcacttatgttcgacaccctgcacataaattttgatatataatacaatttaattaaatttttaatcagtaaaaaatatgtattatatattat

SEQ ID NO: 207177 - DNA, 1054 bp, Cannabis indica
gatatattatacacaataaaataatatatcatacaacaaaatatatatacctacaagaaaaaataaaataatattatttaaaaacaattatataccatattaacaaaattatatataactataaaataattataccatacttacataattatatatcatctttatgtataataaaataaaaactaagcatgatctaaaaaataataatatactacacaataaaacttatatattagttaacacaacttttcgtaaattaaataattagtatttatagtaataaatatactgcagaattaactatataataattaatagtaggaataacaataaataataagaaagttttttacgtgattttgaaattaaatcttcatagtttaaaagtttattttatttaggatttataagcctgtatacagaatacaataatattgttagtctatataagtgacagttaatacaattagcataattaattcagttaatacaatctattgttcttagtgggcatttcaagttatggccaataataaaactttgtgttaggttacgttagttaagagtctatggcctatggatagactttgtatcaattcatttacatagccttgtaataactcaaacacagaactaaaagcctctcttcaattttgtcattcgaatgaacaaatgtatgagtgtgtgatcaagatcaacagaaagcattgacattaacaacttgacacaatttttttttgctaagatgcgaaaacacttcattaaaaaaagtcaaagatactggttaggaaaggttccatttggccaaaacatgagccgaatggttacaagaacgagacagccaaactacattaacattcaaaactaaaagcaaatttaaaacttgagtaaattgaaaataaacattccaagccggaggttgatgcttcctaacagccaggaccagagcttgacagtccgagatcaagttaacatcagtgatcctcaatctctgaagcacaaccagccctgcagagatagcctccaactccccctacaaacagaagaggcaatg

SEQ ID NO: 207178 - DNA, 1505 bp, Cannabis indica
attaatttatttttgggggctaactattaatatctatacatatatcttttttcatatttaatttatatgaaaatagacataatttatttacagcccctaccttcgtacaacaaattgcttaaaccatattttgagcattaaaatttttagaaaattttctaaaaacaataattctaatatatgaaaagatgatttgaattataattaagtgacgtcagcagtataattttgtaagcatatagtatattagatatatgtatttccatatcagataataaatgctatatgtatatataatatataaagacagagatatcaatggaaagagttcttgagctgctcaaagaatgaaaacacactacacaaaattatataacattatcagaaacgtacgtacgtatacgtactcaccacaccacccataataatgactcatatatatatatatatatatttatatataatgttttgatgaatcacatatgaatatatatgatcagatacttaatattgcttcagaagatcattgagaagctgccatatattgtttttacttttctttcgaagatgatgaattgatgacatctctctatgtatgtataaatatatctaaattgggttttgcagggtctcttcacatgtattgcatgtgaatatatataacatttatatatatatataaaatttatatgtatgtatagaagagtgttatatataggtagatgatgtagtcagtggtagagtagagagttcaggtcccatgtataatgcagtgtcttaggtcatccaaaatcattactcgtttaaaacccatgtatgggcactactataccactacatctacatgtggtgctaaaacaacaaggtaaacacatatttattacagtactgcaacaatcacgaggtagcgttttgtgattggttagtttttcattgcaatagacaccttgcaaatgtctagtgagcatcatagttgtattaggagttttttattttctgaattttgatacgtatcaaattatgtattaaagtgtatcatctgaacgtttttttagcacgtttaatattctctcaaaattattgagattgttggatttaaggatttttatctaatttcgtttaattttatcatagtgtctattcatatatcaaatcgtgtctaaaaagttttgatatgtatcaaattgtacccctttaaatttttactcgtacaaaattgtatcccctacgccaaatattcgttagtaattaattggataaaaattcttgaattaatctaacaatctcaatgatttaagaaattttttttaacaatttaaaaaatttagaaacactatttattatatgtcaaaattgggatttaagaaatctttttaacaatttaaaaaatttagaaacactatttattatatgtcaaaattgggatttaagaaaattttttaacaatttaaaaaatttagaaacactatttattatatgtcaaaattgggatttaagaaattttt

SEQ ID NO: 207179 - DNA, 1318 bp, Cannabis indica
aaaaaaagaaaaaaaataggcatacaacatattagatttatatgcgaaagtgacttgtgtttgtgtctctttattttaataattttttcatctgaatttataatgtaataatatattataggagcatacttctttatcgtgtagcatagagagaaaaataattgtaataaatagtaacataaattaagtacttatcaatagttattggatggttatgtgagtgtttaattaattaaattatatgtgacataattattacatatatatatttttttgagataaacatgattatcacatatatatatatacacgtatatatatcgaatttttacaagcattaaaagacaaacaaatgaccaaaacattaaatatagtggtcgaccgaatataaaacgatcaacgtgaatacttctgaatattacttatacaagaatacgtgcaggttacaaaaagaaatttaattataaatattattaatttaaaatattaaaccattaaattttaatccaataatatataatgaaacaaaattttttaagttttatatttaatttaactattcaattaaaaaaataatcaaaatatatcttttcatactatattaaaaacatatctaagttaaactcaattttatcttatttttttacttgaataaattttttattatctataaaatgtaaagataaaattttttgtttaattagataaaacaaattaagtataaaaactttatttttttttctaataattctcattaatagataattctcgttcaattttttttgtttaaatatatgtataggatgatatccaatggaacaaaattacactagctacttctcttaatcaaattaattagttattacttctacagtactcacataattaataacttatatatatatcatatgtgtagtagatttatatataaatcttcaataataatgcatacttataaataattaaacatatataatatatgtgttaaggtacacgtactataataattaagttagcaaccaccacaatgtatgtaaatatttacataagacaaattgtacactatttagtactatatttagtactatacttatacgaatataatgtgctatatttatacgtaatataatacaacccaatggggtcttacattaattaataaaataaaataaggttgctatctgtaatatgtagcaataaccctataccaactataatcaattatatgactttattatttctgaattttcacatatatatatatatataagagataggagctagctaatatatatagccaaccctagctacgctaagt

SEQ ID NO: 207180 - DNA, 654 bp, Cannabis indica
acagtaattttgtaaaaaaaaatcgtataaacccctatatatgtaaaaattcgtaaaaaattataaacttttacccgaatctagtatttttgtaaaaacccctatatatgtgagaggggcagggctgtatcttttaaggcttaataagttgaggaatacctctctttttatccattaatcaaaaatactctcatattatatttcattaaaatatactcacttttgtgagtgggttacccaacataccctcaacctccacttaagtttagcatataatttacattaatttaaagggtatattttaaaaaatatggaaataaaggtaaaagttaaaacatgtaaagtaaagtaagtatacaatataattttctataagaaaaaaactattatattatatgatactcataaacttttgtgtatacgtaaaatgatatttttgtaatttttttagtctctatactccaattgacaaaattttaacaaacatcgcccaccattaatgggccaagttgaatttaggacaaggaaacttgtgcactaatatattaacgataattttcatttttagtttttatagcaaaagtttacaaaaatatcaccttttttattatcattttgagaatatatatttaaatgtatcatccattagaaggt

SEQ ID NO: 207181 - DNA, 1428 bp, Cannabis indica
tattgccttcttagatttgcaccacgttatctctttattttcggctaaaaaaaaaaaaatgtttacacttttctttagagcaactcccaactattcacgaattatatgttccttagctataatagctaagcaaaaccaaatattcaactccaatggcaacatatatggctccttaaaatagcgaagagaatagggagctcgacaaaccaaatgtggcgagctcgctattcattcctccaaaaattttacattactttaatcaatatcatttattaaaacttttatataattaatttttaataaaatattaaaataatgagtattaaggaacatctccaatcattctctctaaacactctttagctaaaataaaaaatgcattttgaaaaaagaagctccaatcatataaaaaataactttttctatgataaaaaatagataagaagttctctaaatgtacagggtgtattttaattaaaaatattattactttttttattattattttatgatattaattatatatgtaaaaatttaaattataaaaatattattaaaaataatcaaaatactaactaaagagtataattggagaagaataataaaaataacatcctattttaattgtttaactattttagctaaaattaaactaaaacatagagtatggttagaaaattagaaatactctaacatagagagtgtagttggagtaagattaaaaaatgaactctctaaattagttaaaaagtagctaaaatatagagaaaccttggaacaattcaatttatgtacgaactctctagttatatatttattactcttatcaactggcaaaaataatgcatgttagatggagagcgggtactagtacttttctaagttttttgattttttagagcatctccaataattaaattttaaagaattcttattaaggtggacaaattagttatatgagagtgctaatactattagagagaaatgatatcatttttagaaatttgtattgatgtcatataatggtattgatgctatttttttttaattaataatttaaaataaataaaattatacaatttataattaaaataaataatatatttataataacattcttaaatggtgagtgtttttagaaataaaaatatcaaataatataaaaaaaaataaaacaaaatattatatttttaaatcatactcaaaattttaacactttcaaaaaattactattggaaatgtttgagggtgttgttaccttttgtttctttttggggtaaaacaaaaacaaaagccatgaataatatttaaagggtggatgtcgtaagcaaaaatcgagccacaaatcaaagcaataccgcttttataaatcccaaaagggtacttgttttatttatggttaattaattaaaactaagagctggttta

SEQ ID NO: 207182 - DNA, 1311 bp, Cannabis indica
atatggattatgttgtactgtgtcattaaaaaaatgaggataagttgaaaactatcttttcctattacacattaactaaatataactctaaaataattttaattaataaactcttttttataatcaaagtatcaaatatatcatcgcataatttattaaaattagagttcctaatgcacataatgaggacatgacttataaaactagaaataaatttaagagtaatataataaaggtaaaaattaaaatagaaaatgaaaaatgggtatataatgtaaatttcctcaaaaaaaaatgtggatcgtgatgtgtcgtgcaacaattttataaggtaggctaagggtatttatttaatttaattcgcactattttactcatagtgcacccgatccgcacaatgtgcaaatttcatatattttggatccaattaatttgcaaattaaacaaattcaatctaatataataccccaaaagtacaaattgaattagttatttagattggttacttttcaatatcaaataatttaatatttatttaaaaaaatatacatttctacataattaatattaaaataaaataaattatattatattatttttttatgactctaacaaaaaactaaaataaattaaataataaataataaattaaagggaaaaaaatgtttgtagaaacaaaattatatatatattaatagaataaacattcatctattaaatttttaaatttatttgtatattaattatatatatagttttttaaaaatatataaatatgtgaattagattggatcggttacttttatatatcaatcaacatccaattcgcactcaagtgcggattttggattttccaattcaattcaatctgcactttgaggattagattagattaaattgaattggatattttatgaacacccctagggtaggtctatcatagcccgcaagtccagtagttttgtgtcgtgctttcgagtcacactttttttcttaaatagaccaactcgttttatactcaaattcgtgctttatatatttgaatttttattaaaactgatgagttgattactaaaatatatgtgaatttcatagttttaattacttttacatttttctcaacaatagttacacacaatcttataaaaaattattaaaatttcaatattactatcattttaattaataaatattagtcattgttattaatatcaaattctcgagttttttaatgtattgtgcttttgagataatctattcgtgttgttttgtgtttttgggctttatcgtgtctaagtttatatttttttt

SEQ ID NO: 207183 - DNA, 1218 bp, Cannabis indica
accccaattcacaaccattttattaatttatttatttagatctttaattactaaacataacctaattttattttataaataaatggtccataattgattaaaaaatagttttgtaattttccatttattatttggttcattattggcatgtgaattaaattttattttattttttgtagttttattttattttaatttagatatatttcaagtggtatttcaaggaagtgtgttatttaaaaatattataattttattatctaaatttttgaaaatatttttatttacgtgacttgaaataaattttatcagcttataatttaataaagtatgctcttcagctagataatgaattatttagttcgagaaaattcacgcgctatttacaaatttttgtattgtaaatcaaataatattcataccgtacattaattcttgttgctatcaatttgttttgtttatgtatatttgttttagctatctaccttcgatctcaaatatatcaaaaataaaataattataaagctataacacgagatatgtcatatacaaaatattattgtcatctctataaacacaactcgataatcacgtgcatttatattataaacatactattttcttaaaaaaaattacataatacataaaaaaaaaaaaatttataggaatatttttacaaatttttttattattatttatttacatttttatgaagtttttttaataggttttcacttaatttttttgagagaaaactatcactttcacctagctacaatgccgaaataatatttttaaaacaacgaaaaaacaacactttgtattgttgtacaaaagaattatattatttcctgtagcaccaatatctaaacaacgttgtttttgaaaataaaaaaaaactattttataacaaaaaataaaatcaaatatataaaataaaaaaaaacaacatatccgtaaaaatataatttttttgtcatttttgtatattattataaaataatctctcttttttattagaatttatgattgtttgataagatatttaaagttttatcttaaaattaattaataattaaaataatatctcattatgtatgatatttaattaacacatttttattatgtgtgaaattcgttatatatatcttgaattaaacactagtattattaattgtctaacattatattcttgtgttttaattttagttataaggg

SEQ ID NO: 207184 - DNA, 934 bp, Cannabis indica
aaattcttgaagactttggaaaattaggatccaaaccagtaactacaccaatggaaccaaatttaaagctgcatcaggattcagtggaactcctgaataattctcaaagctacaaaaaaatcattagcaagcttcaatatttgacaataaccaagccagatctttcctactctgtcaatatcttaatagtcctagaacccttcatacgaaagctgctgaaaggatattgcaatatgtcaaagaatgtcctggtttggggttattttttcctatagaaacagatgtgcaacttagagcttacactgatgccgactggggagcatgccaagattcaaggagatctactacagggtattgtgtgtttattggaaagtccatgatatcctggaaaagcaaaaagcagcacactgtttctagatcctttgctgagaccgaatacagggctatggcaactacagtttatagagttgtatggctcatctctgttctaaaagagttgggacagagtagaactgttttgttacaatcaagctgcaatacacattggagctaatcttgtgtatcattaaagaaccaagcacatcgaaatcgattgtcacttggttagagagaagatacaatctggtttagtaaaaacagctcatgttacttccaaagaacaagttgctgacgtccttaccaaagcattgttccctaatcaattcaaccatttaaaaaacaagatgggattgcaaaacatctttgctccatcttgagggggagtttcagaattgggtgagttagttaggatgtgatgtcagagttagtttttctgttatgttagtttgtgtctgtaactaatattattcttgtactgtcatgtatatataaagggccatattgtactgttccattcattcaatgaaaattctcttgaatcatttcttttcttctc

SEQ ID NO: 207185 - DNA, 546 bp, Cannabis indica
atataaaaaaatgaaaatttcatttgcgatcttaagatgtataacacttaggggactggtctaagactaatgaagatttttaaaataacttttttggctctagggctaggtgggtctaatgcctgcactaattagcccgtcttaacctaagctcagttctctcaatactatattaacgtgacactttatatttgatgagcaatttctcctatcatttcaaaatgtgtaagatttgataaaatacaccaataataatataatacgatgagctatcttggttcgagaaggttctaacgccaatagcagacgtctgcgtcgtaaattcataagtgattttcattgtcaaaaaaaaaaatcaccaataataatataatactttttattttatttttttatttttggagagagatataatacttttttttagtagtgtttgataccttaaaacaccctttatgtaattaaaaaggaaaatttctcattaggttgaatatcccatttttaatagttagaaagtccaaagaaggtttaactaaaacttattcc

SEQ ID NO: 207186 - DNA, 620 bp, Cannabis indica
ctaaccttttttcttgaaaaaaacaaaataaataaagggtctaaatctttaattaagcttcaagttataaatttcatatagaatattgtcaaatatgaccactcatttttgttagataaaaaaataagacaatttattaaaagtataaattttccataaacattttttttttttaacaaaaagatatcattaatagctaaatcgaacataattgattgttcaaaaaaaaaaatcggacataattgaaataatgaaatcataaaaattaggcatacgaagtcgtttacattttacaataacatgcatggaagacaaccataacaataatctcaacttggaatctaataagccactaacagtcaagcatcaaaaaagtgtgaaatatactaggcttcaaaattaaatgaacatgtgacataattcatctatcaatgactacgtgctaatgagcttcccaatgaaaattgagatattaaaatcccattatttaatctaaaataaataataataagtaaatgattaatcatagcgataacaattgtaaaaagacattcacaatatgaactatgagactaatagaaatataagaatcaccaaataataattaaataaataaacat

SEQ ID NO: 207187 - DNA, 542 bp, Cannabis indica
ctctctctctctcttcaatatatctctctatatctcattaaatacaagaacacctaatattggtcaatttttcaactcgatgcattttatagtacatgaatactctcactattattaggaatataaacaactgtaaaccactttatataaatttatattatatatatatacacatgaaacttggtagaagagccataatttagtgagaaggaaattatcatattacattaaaatatgagtaagtttatattacagttcttattaatgggtaagtttatattaaaatttttaattaaaggtatgtttttcatagattttttatgtggttcgatatttagaagaatttttaatttaattttttttttcataatggtatacattatagttaaataaaatttaattatatttttgtgcacttgtgactattttttttaaacacgtagtaaataactgtttgaactttatttttgttactgtaaattattcaaaatattaaatataaaaatacacaatcataaaaaattagcttttttttttttttt

SEQ ID NO: 207188 - DNA, 1106 bp, Cannabis indica
cgtgcttaacaatctctttggtgtaatattgaggtaattaagtatcggtttatatataatttaaaataaattttaaaaaatatccttaaccaatcccaggtactacttattgaagcttctattttgtttcttacccctcctctcttctcccatgcgattctcatactaatccattctcatgcacactaccttgttaattcaaaaatatcattttttcaaaaaatgcaaacgtttattcatgttttaatctgtgtaaacaaaaaaaagttactgttgtaaatagcatatctccacgtattttgattaaccaagattatttgtcccccaaaactcaaatgattattgtgttcaacctacccttgtcggtaaatcttgagcatatcgtttagcttaaattaacgtcaatctacaaaatgtcattagcgatattaaattaaaagaaaaacggaaaacttcataatctttatttgtaaaagtaaccaatttaatactcattatattatatatagaataataagtctagtgtggggatttaaattatggccccattagtaaggatttaatttggtgtggggatcacatgatctaaaggtttggagttcgggtatattgtaggtggtgtgtttttgtgcatagaagatatttttttttttttgaaacgtagcaaattcaaagggatcaggaatggttgttgtcaaccattgatttagtgttcttgttctttcattgtttgtacttctggttttggtgttctttctgcttcttgtcgttggcccaggacttcggccttttattttgttttactgtagcttctaagatctttcatttgtgattttgcctcctcatggaggtacactttaccaaaaaaaaaaaagaaagaatggtcactacagatgatagcatggggaagaacgaaacgatggagttttatataccttttagatcctgtctactaattagatcatctgttttgttaaatgacaaaatagactctgttaatttttcaaaattatataagtaggatcttaaactgtttttttatcaaaataaacttaataataatccgatcaagagatattaggcaaatctggttacattttttgtat

SEQ ID NO: 207189 - DNA, 1067 bp, Cannabis indica
ttaaaatgcattaccaaaatcttactttttttttatatattttacctaatacatttaagttactccatacatcacattccctatatttttcgctacaatcatttaaatattgtatttgtatctttaaaccctttcattaattaaatattaagaaaaataattaataataatacaaaagcaaaagttgtgagaaaatatgttaaaatgttttaactaaagagtaatttgtagctacatttagctaaacaaaatagctaaaaaaattagtaaaatatagaaaatttagctcatatgatggcgaatggaatcaagattttagctttttcctttattttatttaatggagtgaaatttgacaaactaaatactaaaatttgtaaaataagctcacttaatttactctaagcgaccataatctatgatcgttttactgtgatttataatcatttctgccatcatacatgattattttgctaataaatttgtttgtaaagttatttttactaataaaaaatttcatttttactaaacactccaattaaacaaacaaatagaatgttaattttaataacaagatttaaacaattgaattcaattcaaacatactctgttcctttctgcctcaaaatcctaaactgctcaggcgagaggattgcctgccattcctcctcggatttctgaaccgacccagatgcggacatggccacaacagtggaaccacgaagcccacgcttacttatgcggtgaaaagagcaggacccaccaaacccagaagaagaaatggaaatgggattgggtttgggagaagagagtagtgagaaatggtgggtgttgttgaagaaagagttagaaggagagagaggcctagtaatgtttggtatggatttggttataatggggttgaagattgggacgatggctttcgaggaagaaggaattggtgaggttctgagtatgttaaaccccatctcaaacaacattctagaacaataggactattatgtgatggtgcttccccattgtttggttatagatattctcaattatgaatgaaaataaataaataa

SEQ ID NO: 207190 - DNA, 677 bp, Cannabis indica
gcattgccaaacaaggaaggtatagcaaggctaggccaggtaatattttcacgtctaaataatttataataatccccttaaaaattaatctatgaggtactagaatattatatttataataatgttattaaaattctcaatatggtgcaatctatattagagtattgcagttttaaatttgatcgtgattattttagtaattgtaagttatatataaagtgttatgcgataaatatgtagataccttaagaggtatttttaatttattaaggagcgctaaatttaaaaatattttaaattaataagctagtaatgaggttatatttggtagttctaagaaacaagaatcaattaatctactcttttttcccattaagagaaaaaaattagaaaaacctcaatcttactttcttagaagatcatcaccactaaatcaattatctctatcaatggattaagataggctttcgctatttgaattattctctttaaattaacaaaatgttttatttaattattatcaaatctatactcataatattaagagttagtctcacattgctaatttgtagaaataaattgtgatatataagatgaatgagctactcctcccattgccaattggttttgagatgaaacctcattcttcttatcccaaatctaacatggtatcagag

SEQ ID NO: 207191 - DNA, 875 bp, Cannabis indica
tatatatggtaaatacattcatataatcaatactactaatacaagggaaatttttttaaaaaaaaaaattgaaaaaaaaatcatttttttcttttcaagaaataggttcttgtttctttgatatttgttatggcattgttttggagcctatgacttgtcaacagtgtcaagagaagcttagttagatactttctcaactaaaattctgttatttgtgaagatttcatactaatttagtaaaataatataccattagagtagaaatactctaagagtggtcgacaaacaaaacaaaaactaagacatcaaaaaaaacaacaaaaaatagaaaaattaaaggaacttaatcaggaaactatcacaagaagtgaatatagatgtattaatgttatttagaagtgaatatatcatacaattagtttttttttttgtttttttgaaagcatatattatacaatatttgactctaattttcttccactatcacttgtcacatacattctttatttagaagtgaatataccatatttaggtacctacctaacctatatttgtagctaatggaataatttagaagcaaaccaagtagaactatatgcaagtaaagtggtcaagtaaacactgtctttacattttataaacatcctaactctaatgcatctaatattacaacacaacacatatatgtactaataaacacaaactcattaaccattctaaaaaaaaaagaaagagtagactttttcaagggatcacctaaatgggagtctcagtcaaagtagcccaatcttctacctactcaaggagctcagtcaaagagttaggctcatgttatggggcacccaaaggattataaataacagtccaaaaaagta

SEQ ID NO: 207192 - DNA, 483 bp, Cannabis indica
aacaattaaattgcaacaaaaaattgtataaaaacccatattgcaactagcgctgcaactactttaaaaacccaaaccataaatttaaaaaaaaaattaacaaaaaagtatataaggtaattctcctcataatacttttggcattcaagaaaatgttttaatttaatttctactttttaaaataataaaattatacttataattatcaaaaataaaatttacactattatacatcacatatatataaaataaattttttaataaatataaatagttgatgttcttaattttaatcataataaattctagacataggagttttcttttgcatattaatattatatatatatatatatattggttatattattggctaactttaatctctgtaatagatgagattgtattattaagaattttagatcattgtttatttatttatttattttttggtgtatgtatgatcattttgcttaatataac

SEQ ID NO: 207193 - DNA, 666 bp, Cannabis indica
ccatatctcttcctcatgtgtgccgagggcctatcatccattctcaagtaggctgagcacagagaggatgcttttggtatcaaaattacccacactgccccaaaaatctcccatcttctctttgcggatgacagtatcctgttctgccgttcgaatattgaggcatgcaatgccattaaagaggctctggatcagtatcaaaaaatctcaggtcagcttgtaaactttaaaaaatcctctctctttttctctccgaatactagcctcacttaccaaaccattatccaagactatttgcaggttcccactaccaatcacatggacaagtatcttggtttgcctcagtgttttggtaggtcaaaaagttcttccttcaattcccttaaaggtagaatttggtcttacctgtccaaatggcaaggtaaatttctctcaaaaaggggcaaggaagtccttctcaaggctgtgattcaagccattcctacttatgccatatcggtctttaaactacttgattctttctgcagctttgttgaaaaagcaatggccaacttttggtggggagcaacaaatggtgaacgaaaactgcattggaaaaattggaaatccttgtgcaatgcaaaaagtgttaggggcttagggtttagatctttgaagccttttaat

SEQ ID NO: 207194 - DNA, 611 bp, Cannabis indica
taaataaataatgaaaattaatagaaagttgtttgtagtatggtcattcactctcaaatttccttaatctatgaaaattattatttggtacacctcttgatacctaaaaattaagtaacatttttttaataatgaaacattaaggtcaaatatgtccttaatagcacagaaataacaaatagaaataaaccttcttacttgaaaacttatcctttttgagctttctagagattttgttgcctagagattttgttcgtgcagaagatgtttttgcaccaacaaattttgaatttgtagcgcgagccaaattcaaaaaagcacaagattatacaaattttattttttttgaacttttagtatcatttgatcttagactagcaatgcctctttcacctacattcttaacttcctcaaaaatagaagatccatggttaagcatctcaatatttttctttaaattttgaagttccttctttaatagaataatttattcatcttttaaacaaaaatcattctcatattcttcaattttcaattcaacacatttaattttatgagacacttgtttattaatttttgacactgatttatttttagaagtaacctgtatc

SEQ ID NO: 207195 - DNA, 649 bp, Cannabis indica
taactaaagatttgtgtattttttcgattaagtatgttaaattagtttgtatttatttcaatttctattcatttttaattatgttgatattttacactaaccaattattgagattatacaaattagtaaaaatttaaaaaattaattaatgcatggaacaaataaaagaaattatttatttcctccttttgttttttgctaacaaaatcactgggaaaaattgagactaaaaaatacgaaatttataattttaattgaaaacttgactataagtgacggtgtaaaattgtggcctatactatttccacaactgattttaatcatcgcctgtactacttagtatttacaacgcacgtatcgacaacaattttaaggaccgtgttaggattaacaatttaggatttttttagtagtgtgaatagcaataccttatacttatgaggttgactttgacttttatcatttacaccgaaaaaaataataaataaataaaatgaaaaacaaaacaaaaacaaagatgcaatgtatgcaatgcgtaagacacacttatgttgaaattaattttgggttcatagatccaggcgttgaattagaacaatgaccataaaagtgattagtatattcaatattgaacaatacgtaaagtacc

SEQ ID NO: 207196 - DNA, 1249 bp, Cannabis indica
ccatttgtttgatgagaagttctctatatgatacatatagggtcagtcagaaatcaacctatagctatcttttgaaatatatataatattagataattttttccctataagaagcttatggtatggccatgttacgatacacatggctgtcattaactttcggtccaagtctttttcagttattatgagatataagtttaagaagtcaaagtcatcccaagctgcatgccttaactagttccctaataataatctcctaccatgcacttggcaaatggggaatgatcagaaaaaagttattgctaccaaacattcaagctcccatttccaatttggccatgttgttcgtttgatattcttcattataggtatgtcaattggaatctcattcagtgtttacttcaaaagctttgttttcttattgaggaccggtttactaaattcattaccacaaccacctatattgccacaacaactttcagaaggaccacagcagtcctcaaatcaaccgacgctgccgctgcgctcgcctgtcgacggcgatgttgaatacaatgttaagccaaatatcttgcataacatggaggacaatgagttgttctcccgtgctacattggttccaaggactctgccaaaaattgctttcatgttcttgacaaaaggacccatacctttagggcccctttgggaaaccttcttcaaaggacatgaagacctatataatatttatattcatcgacatccttctttcattgattcaactcctgaaaactctgttttctacggaagaatgatccctagccaggtaacttgacttggtatctccatgcatgcaatatccttcatatatatatactgcacacatacaaaaacatatatacatgcataaatgtacacacaaatgttattatccacacatgcacacacatataataaaaataacataaatcagttgtacggttttcgtgctttcatatttaccaaataactaggttgtactattgtcgcgttcaacaaaaattaaatcattgggttgggtttgtacgtaccactactcaatattattattaggagtatcgatgttttttaaattgtgtcaagttttcgaattctagtcacccagtgacaccatgaaaaagaaagaaagaaatatgtttgtttaatgtgtaggaactaagatatatagtagagaatatcagttgataaatctaactatagatactgtatatagtacaaaaacaaatatata

SEQ ID NO: 207197 - DNA, 2375 bp, Cannabis indica
gaacccgctccggcaccacttccactacctaccaccaccttaagccaatcccctatcccctgttccaattccaatgaccaactccaccaaggtccaaccctaactcctttcttgccactattcgactctctgatgactccatcaacaagcttgacattcacaaccaaaccaataaaccacaaacacttcaaggatcccataattcaaaaaaagtcaatacaaattaagtcaacgttttttcttctaagtagggataaatattattgtaagtacgtagtgtgtgtgttttaattagtttatgatatatgaagaatgagaattatggaggtatttatagaagagaatatgtatgagaaagcgtgtttataatgaactatataaatatagaattatacatcatgggacatgtggcatgcaaattatggttacacgtaaatatgggaataatattttacatacgtgagagttaaggatgatcgacatgtttttgagtggagatgtgatcatgtgtatatataggcagccgacccatgttttcatatcacaactttacaattccacttactcactagtggactatcaaaatgattaattgctacgcttcacgagtctaagtttttactgtaccagaccatgatcatgatccatatatatttttttattatcatatgtatttgaagtactatacatacaattacgtgttaacagatttgtgatgcaattagctagagctatatattattgtgtggtacaaatgttataagggaatataatattggagattaatggtttatcattatgtatattatgtatatacaccactgatactgatctgtattttatatatataatattatgcactacatcgagaagataattctagacataatatacttacggtagtggaaaataataattgtggtacatagtaaagctaggcatgatatatcctagaaaattctagaatatatatgatcgatatgtgcatgtatatatgttatactttgcgaaaaataaaaaaaattggttaaatatatgtttatttattacatcttgcaattgtgtataattattatttccaatataaaatctaattatatagctagctatacatgatcttaattagaagattaatcaatattaattgtacctacaatttaaataattaaaatattgttagagaacatcaatagtgcctatagcacctctaaatatatcgttttgtgacttcttaaaagttattacattaaactatatgaaactcgatacataattagattaataggagagcactaaataccaatactaatattttttaacattcctattagatatcacgaggtggtatattaaaaatgattagcaatcttttacaaaaattatcatgtaaaatcatttgaaaattaatatttaattgtaccaaaaataatataacatagctattaagtccatttttaaatatttatatatcattatacataataaattatatggaattaattctatcttaaaaaaaaatatataagcaattttttagggaggacatggcaactcctttggccctttattatccaataatggttgttaaataaatgttaaggaaattttatgaacacccaccttaaaatggatgtactgataaatttgttatttgttttggcatttaagataaatttttagttcaattgtttttttttcatggttatgtatattgtaattattaaaaatattctacaaaatttaaaaaaatttaatacaccaaaaataagattcaaacaatctgttgcatgtgtgactttttccattttgtatgcttgtaaataaattatttgaatgctattttttatatactgtaaattattttaaacttctcaaaattttacaaaatatcttaaataactaataaaataataaaaaaaatgtacgtgcatcatttttttagtgcattatacaccctaaatcatattcttatgggatattttttttttctttggtgttggtactattcaatcaatcgagctaaggtctctatgtataccccaacataaatatgtatattatttaaaataatttagtaacttctgtcttaaaccatatgcttgtactaatatatctttatatattaaaagtgcctatctaacggcaattcttggtttaacgattcttggtttaacgatttcttttttttattttaggctttacacgtattaacttaacagatctgttaacgttaaacgttaacaaataaaactaaacccaataaacttaaaacccaaaaaattaaaaccaaaatctttttacaaaattaaaaaaaaaactaatcttaacccacatgatatataaatataaattatataaatatacatgcactattc

SEQ ID NO: 207198 - DNA, 1067 bp, Cannabis indica
aaagttgttgaatttggtgtaattgaaaactaaaggctcagactttgagttcacacgtgtgtaaaggagcaaactttgattattactatgattatcaatgtcataaacaacacagtttctgttttacctttctttcttacacttctgttacggttttttttttttttttttttttacatttaaataattaatcatcagttgataatcattgaatcacgttgctaattttagtattaaaaataatagtagtttttttttttctttcttttttaattccccaaggaaaaaaatctcatttttattatgttggaaaatttattttgtacttaattattagaagaaattttttaaattaagaaagtagtacatatcatatttaatatatgcagcaatatttctattttacaatatatgttgaagatatgcattccaaaaaatagaaaataaaaacctaattagtctaaaaacaatcccactaagaaaaagaaatgaacagagttcacaacaactacagaataaaattaaaagttttatcggtttggtttggactgcttaattctaatttgagataaataactatttttttcttgtggtatgaaaagtataagttacttgttatattttctctctttttaatataaaagttcaaacataaaaatatttaattggaattagtttaagagccttttttttttttttcaattttaacaaaaacagataatattattacaaacaaacttacaatcagtcaaataaaaaaatatacaacctaataaaaaaaattatacaaatacctcttacatataccttcaacccacacgatccatgctttgtgagattaaaaccttcgtgtgatgcaatgaggtcggcaatgatagaaagagaaagtaccattaattccgacgacatcacttgagaagaaaaacaaactcacgcacacaaccttcaatcgaccaacctagcaacccaacataatcaaaacaaaacccagctagaaagagaaccaccgttaatttcaacgatttcacttgagaaaacgatcgaaatcaatcaaaacagtggttgtt

SEQ ID NO: 207199 - DNA, 840 bp, Cannabis indica
tttttttgcatattatttctaattaactgacgatggagaatcatagcgttaacaaagcaagaaccaaatacacaattctatagccaaatcatttcaaaagaatacaatacaagggccaaatcgaaataaagaataagacatgagccttaccccacaatccaaagcaattttttagatgaatatcctacctcattgtataaattgtattcttattattccttatttaatttaattttatttttgcttggttgtatctcattattccttgaacggaaaaatttatatggcaaagtttatacaacaactttattactaattatttatatgtactactaattatatattatgaagttttaagttgatcatccacgcactacataaaaatctcactcatttcgtatctccttttctttttttctttcttttttttttcactaaatttaatggcgttaaccatatctttatctttattcttcttcttcttcttctttcttttcttttttttttttttttttatcaactactttttacaattctcttcgataacttagtatgtttatcatcaagtggagatcactaaatacaaaatcaaataattacagggccagacttgacccattaatgttcaactatatttatatttaaaaattactcaataaaataaaaatgcaaacacaaataaattcgaaatcaaaattaacaaaaccgaagaataacatataacaatatataaatatatataataccgaagagatagatgtacgaaggagaggtaggcagtcagcgaagcgagctaaggttcgttgacaccttggcgtagggctgaacttatgctgaaac

SEQ ID NO: 207200 - DNA, 466 bp, Cannabis indica
aagaagaaataacaaaaaaaaaaaaaaaaaaaagcttcttgaaagcaatggttaccagcgatgtaagtagtggcaggggtctcgaaaccgagaagacaagtgtcacagaaaaccttcccttgaacttcataaggatcagtcatgatacgggccaaagccaacgccggaaggaagcaaagagccattaacaaaactgctttcgccattgtagagtttgtttttttttcttttcacagacaagagacctaagagagagagagagagagagagtttgaagaagaagaaggagaagacagtgagttaaaatggggagggaaagcgttgagaagtggattaaagtaattgaaagcgcgtgaaggttatggtactatgtgatagggtctagttgtactcttcttcacaggggctgttttggtaaaattacattccatggcggtgaaaagagcccataagttgtgaacacgtt

SEQ ID NO: 207201 - DNA, 750 bp, Cannabis indica
atataaatattattattattttcttacagggttatttgcggcgagaccaccatccaccagattgaattctctaggttttccattttcatcgttgttagtgaaataataggctggtagataagttggagcagccgatgttcctatgcaaatgtctgaaagatgagcatccaatcctttgtcgctacgtgcctgtaattatatatgaatatattaatgatcaattgatataaataataaatatttatataatatatataatatatagtacctaccgaataagtggaaaaaataataggctcgagtttcttgatgtcaaaagctggaacaaccaagtttgtcaaggtatcattcaacctcttttggcctaataattcctttaagagtttgtgaaggtacaccccatcgtatttaggggacagcagatccatcattaaatttacagccgaacggaaataacttctgcaataattaattaacacagatccaataattaatgaaacataacatacaacatattattaacatgaataatatatataaaggcgcgtacgtacgttgattgtgggaagattttgggggaatggtgatggtaaaattcaataatgtcttttgcagcatataagggtcgtctattctcatttggtgccgttaacattgtagctataagaccacctgtacttgctccagtgattacatcaaagtaatctgctagtcttgcatctttaccatctagctcctatacacatatat

SEQ ID NO: 207202 - DNA, 885 bp, Cannabis indica
tttattgatttagatagatttaatagctttcaacgattgatctatatgcacccacgtagccaatttatccatttatatatatcaacaataaaaattaaaataaaaaaatacttctttaataatgtgaggttctctgtcttaattatatagtctaccacacattaaaacaaagtaaattaatgattgtgattgaataatattattgtaaacatgtatcatgtatattaggaaaattattagacctaactggcttttcaaaagagaattgtattcactttattaattaagcagatcaagtaataatatcaccactctataataaataatatttgaaccatttaattgcatgtgagcaaagccttgccttttagggttattattcttaattatgtgtctctctattagttggtttttgaaaataaaatatcatatatgagataaacaaggagttactcatttcaaattgattttaagatgaaaatttatatatatatatatttattttttttttcaaattctaacatttaggctatgtttattaagaaagaaagaaaataaaagggataaagaggataattaatctctttcgtattatatggtatgtactagaagtaaaattagaaggataaaaaatcaaataaatattgaaattagtattttatcatttttaatataattatttatttttattttaaaatgtaaaaaaattattttatatagtttttttgtccttttttttttttcaattttcctattgatgggggattagaaattgtatatttgaagaggaagggtctcctttccatcaattttctcctttcttttctatcttttgccaaacaaagaaattaccaattactttgagcttgtttggccgtgttttca

SEQ ID NO: 207203 - DNA, 1029 bp, Cannabis indica
tttacaattgtggtaattacaccgactataataatttgaagacaagatctcataacgaatccaagtacatatggtacaatacaatacaattccaccacctaaccatagtgaatggaagtatggcttaatggtatccaacaacaaacaaaaaagaaaagaacaatttgtattgtaatttatggctgcaataatgaacaattttggcttaacataataggtgatagaataatccaattggtgatagcaataacaaatgagacttcaatagtgtatacatttccaataagtgctaacatagtgttatgctatattttagtaatttttttaaaaaattaactccaatgttaaatcttgtattaatttgatttataccaaaagttctgtcaaatttaatacaaaaaattatattatataaaaattacaaaaaaaaaatattataccaaatttaacgcacaataaattcaactttttaatatatgttttgctacatatcaacaaactttaatatatatattttaattacaatattattaattattttttaaatatttaatttattaataattattgttgacattttacattgtatcttaaaatgccattgtgtattagagtatagtaccaaatattgtaacaaatataatatttgtttacttttttgtgttaaatttaacacaatatttaaatattgaatattgctacaagatactagtggtgtttagtaccacttaaaagtgacgttttgtgattgagtagtgatatattacaaaaattattatattaaattatttgagactcaatacttaattatactaataaaaacatattagaatgtactaggcaccactgatgtcttttaacatttatcttcaacattgcattggagagagtctcactacatggttgaccactctcacaccgagaaacgctaagactatctccaatggaagatctaaaatttaagctaaatttagcacacaaaataagtttgtactatatttaggcgactatttataattgtactccaat

SEQ ID NO: 207204 - DNA, 643 bp, Cannabis indica
ataacaaatttaaagctaaaacagccataccaataaagggttttaggtttgataatttaaaaaaaaaaattgcaattcataaatttgttttaagtctcttgagatagttcgctaccatgaaacttgaatttaaatatatttaaagtttcctatatgtatatatacatatatattgtctaaattaagaaaataaaataaagccatctccaattatattgctctaggttattattcaaacttgttattcaggtatatatacactctttaacaatgacgaatccatcccaaaagtttatggatggacattataaaaaaattacttattttttacatgtatttaatttgtttttttaaaaaaattggtggtcccttagctcttcattgctctttaaaaatactctggaaaaaatacttgtgattatgcagctgataacaaattcattcttactatccttaatattataataaaaaataattataaaataaaaaataataacattcatcaaaccaacttttcattccatttgcttaatctgtgaacttaatctgtaaaaatttgaaaaaggagagagagagagagagagagagagagcataccagagtatcaagagctgaagcagaatcgatgatcgatggcaagcac

SEQ ID NO: 207205 - DNA, 712 bp, Cannabis indica
aagatgaatatgattaatttattatgaaatttggtgttataaataatgggtaaaaaaatctaaattttagacgcttaacacattgtgtttgtaattgaaaattatgtctgaagttttaggctaatttttaactatggtgcgttcacttttagggaaaatattgtgaatgaaaggttctagatctctctttcagcttttcaaattatcttgaattgttcgattatgagcactatcgataaagttatggttaaaataccatcaatcgtcgcagtaggatttcaagataaaaaataatatacactgttggaattagcaccatgacgcccaaatattgtgccacagcgccacctccacagtaaattgcaatattttcaactttttaagagtgttttagaaatttcaacaaaataacttagggtttcgttttttaaagaaaaaaattgtaaattttaaagggaggagacttcttaaaacttagaaaaccatgaagaaaaaaaaaattagaagatgaagctttagagcaattatgacaaacccaaatttaattattctcttctctttttataattttctagttttattatggttttctgtgaaaataattttttttagttatttagtttaatttttaggttatattatgtaaaatatttttaattgtgaattaattaaataatgtatttagttgatactaatcatattatataattta

SEQ ID NO: 207206 - DNA, 873 bp, Cannabis indica
aagatattttatacagagtatcaacaattttcgcagattgctactagtccacgagataacgcccagagataaaatttattagccaaatttcaacaagtataaaataattgacttaaacaaaatttagactcatcactctaataattttgtcgcaagcttgatgtactcttatttgttaagtgaatctctttaagacaccaaggtttaaactctttacaaattacttgatgaatgcttgcttcctcccgatgcagaaattttttattgaagataacaatatttgcttcctcctgatgtaaaatttagatgaaccaaagattgttcttcaccttcttcaatttgagaatttgcttacacaaaagcaatcacaaatacacatgaattcaccaaagattataaaaaaaaaatttccttaagaaacactctcttatatagatagttaaaagttaatatatctaataggtgtacaatgaaattataataaatgcctacatataagcgtttaaatttatacacaaacttattatactagaatttttattatggggataatgaaaaaatttggaactatgaataaatttaatgtaaaataattatttatattaaattgatattttaattcttgaataatatagaatcaatatcaattataaataataaagtcacatgagattattaaataaagatttaataataaaataattagttattataaaactagtgctaattaaacaattaagttttattaaagttgtaataaaaattgtacttatgatatgagatattcataaatacagtaattgtttattatgggatttaagaacacttgcaaaaagtgttgattttaatagtactaaatcagatacacaacaa

SEQ ID NO: 207207 - DNA, 632 bp, Cannabis indica
tgtatattctattcttatttatatagaaaatttaatctaaaacaaagctaaacatttttttgtacatataatttttttctcatcttcttttaaatttgttatttttttttgttttgttttgttttaatttgttcttgaagacatgaaacaattataatttattttaatttgttgttagttatgtggaaaaaaaaattaataaatattaaataatttaatattaaaaagtaaccaatccaatctgcacttttattatgcgaattgaattggatctaaagtatgaaattcgtacttagtgcggattagatgtactatgagcaaactagtgcggattgaattagattatgaaattcgtacttagtgcggatcaaatgcactataaacaaaatatattaataatattttaaaataattaaataaaactaatgcatggtacatttatttttcaaaacatatcaaatgtatatgtatatatacaaaaacataatctaaaaatacaacctatcttttctatatacaatttttttctcttcctttattattttttgtttgtttatttattcataattaaagaacctgataaatatctttttgagttgcacaagctcagatttgatcttaggaccctcctc

SEQ ID NO: 207208 - DNA, 1165 bp, Cannabis indica
caaaaaaaaaatattatacttttaagaagttaattggtatttagtaaataaagaatatataaaagaataatgctttcaaatattagtaaataaattatatataaaaaatcatcaattgagaggaaattaaatattgtatcatgttttattttattttaaataattaaaaaaataaaattattaattaggatgaaattaaatattgtattatcttttattttattttaagtaaataaataataaaatcattaattgggataaaattaaatattatatcaaatttttaaaaatatatatatatatatatcaaatttactttattttaaataaataaataataatatcattaattagggtatatatatatagaaaaggttctaaccctaatttaaaaaaccttattcaaaacacatctctcacagccgcacatctctctttcttacagccgcacatctcaaagtttcatctctttctctcggtcgcacgcagtaatggaggagacgacgatgggctttgcacagggcacggtggaggagacatcgacggtggagatttttccacgcacgccagaacgctccatatcgacgaggatagagcgaacttggtcgaagcagtcggcgtcggtggacttcgacagaatgaggaggagtcgggtgtaagtaaacgagtcatggaagaaatcaggagaaaacgaggagcaaaactggaacaatcgaagggcgaggtaattcgatatgtcggagaaagggttggaagaggcaggagaggattggcggcagcggaggaggaggattcttatggctctgcagattagttcgtggcggggcagtggataacctcggatgtcgaggggaagaggagagggggaagttgaggttactttgactgtgtatttggtggcgtaatggcggcgcgttggtttatttcaaaaaattagatttgacaaaaatgagatgaaatctgatattgtgaagaaagaccattactgtgaagaacaagattaatgtaatatatttttttgtttagagactaagttgtaatatattttttatacttgaagaacataatctgttattattattatatattttttgttcagagaatatttagttaaagattaagttgtaatattctatttatcatttattttctattgtattttttg

SEQ ID NO: 207209 - DNA, 1525 bp, Cannabis indica
atactaaaaaatagtgagttggattccagttattgaaggtcgaacttttatcacggagatcccgaagttaacttgggcgcagggctagggtcccctcccaagtcaactgctatgattcggatctactcaactctgtgatgtcatcctccacattatgtgtcaaacataaaaaatgaaaatagatactaaattaacatataaacaactaataaacgctatatcaacataataattaaaaaatttataaataaattgactaattcataaaactaaaataaacaataataataccaaaataacaacacaaaaatatcaacttaaagaagaagaagaagtacaattgaatatgtcttttttctttgggctagttaaaactcaatttttatagatatttcatcaaacacataacatgtgtgtctttatatgcatgcacatatccaaactcatattataatatatttacagaacaaaatttataactaaaaagacatccaaattaataatctacttttgaaaaaaaatgtgaacctacaaatggaatagaaatagacagcgagctttttctaatcaattttgaagtacaaaataactaaaaattaattttttttttgcattcaactgcagtaacaaagtaacaacacaaaaataaaagcatttagaaaataacatataaacaacactaacacaacgagaaagaaatatgagaactacaatttttagagaaatatcaaatatagcaacaaaatctatgcacaacccagtaaaaaaataactttaccaacttgtgagttaaatggacattaataagcattacttttgaaagctaagattatttgaaaaaagataaaagaactaaatttaaaggagattgttgaataataaaactctaaatttgagttttatacatgagatttagatttgagcttttccaacaaaaataaatcaaatgaaatgtaacaataacaacaattacaatagaataaattaaatgatgaaagcaactacaaaacaacttataaacaacaataaatcaacatatttatttaagatcttaagataaaattactaatttataaaactcagatcaataaaataaaaacaataataatatcttgaagaagattaacttaaagatgaaaaaaaaagcacaagtgaagatgcactctttcttttggacattatatcaaacacatgacatgtattttttatatacatatacacaaaaatcaacttttttttttgaattaaaagcgtttatatataataaaatgagttatacctcatgatcattacaaaagataacattcgggatagtagatacctctaccatgccatttatattattggtaaacgcccatttagtcacattataggccgcaaaattacagtaattgtgcaaaaaatatcaacttaaagaataagaaaaataaacaacaataatgtgcaaaaaatatttagatcaagcttgtgctaatgtagtataaaccaagaaaaaacaaaaaaagaagaataatttagaatgtta

SEQ ID NO: 207210 - DNA, 947 bp, Cannabis indica
aaatacattaaaaaaataaacaaaaacaacccatcaagtttaacaaaaacacatataaatttaaaaaaaaaatactaaaaacatataagcaatattaaaaaaatattacaataccatacacaacaaaacataataagaaaatagttatacaaatagttatacaaatctaaatatagaaagttgaatcattaatatatctattataatttaattaagaatttgtatgaaattttgtaaatatgttttcaaatatgtgcattttttaaaattgtatttttttttgcacattttttgtaattatttaaaaaaatgtatacatttatgtaaattgccctaaatattaatagatattacaatgactgtacaataatcggttgaaaaacaaacgacggtcgtttcgatttcccccagcaaaaatagagaagtagcttattttgtaaatgattatattttattgaagatggcgcatgggtaattgccgatttagatttcgaaactgccttatttactcatttattagaaaactccactcttttcctttttctcccaattaaacactgcccataatagatattagatttagatactagtaggtttttttttgtttgactggcaaatggaagagggtaactaaactaacttactgctgctttacttttataatttacttatgttattttgaattatgtttatgttttatgaattgattttgtttatttttttcctcctctcaaaattgagtggttttgttttgattaagaaaagtcattagcttcttcctgtgtgcatgttctttcatcccttacataccacaatcatttgtttttgaaaaaaaaaaacgactgttcagtgtttataaaatcaaaacataatatatctatagcactattttggtggcaattatatctattttttaaaaaataaaaataaattgtgttcttgctaat

SEQ ID NO: 207211 - DNA, 563 bp, Cannabis indica
taaaaacagttaagttttaatttaaataagacgaaaataaaaaaaaaaaaaaaaaaccttagtaacatagagaaagaataaaaaaaaaaagtaaaaaaaatccaacagataaaagaacaagatttcttaaataaattaaaaaataatgttaaagttttgttgttctcaaaattttctattcttttaatttaatttttagaaaagtaaatataagtttatgacttactttgttttcagtagactcgtagggaggattcatgttgagatgttgaactttgtaacagtacggaagaaaataacttaaatataagagaaccaaaataataataattatatgcagtattttttaaaagtatgtacttaagctttggtgtttatttataggttttcagatatatagttcgaataggattaggatatataatacatatataatcatgtaaaatttataaaaatctatcgtaaaaaagataaattttatttttatttggacttaataataatatcttggttattagatatttttgaacctgataaaaaacattatattttttaaagaaaaa

SEQ ID NO: 207212 - DNA, 635 bp, Cannabis indica
aaaaagaaatcgtactttctagcaatctttctaggatccttggcttggggacgcgattccatctgatcatcagaagcagcaacaacaaccccatcagcagggctcggaggcactttcccagaagacgacgtactagcgtgacagtggtgggtaccaacggagagaggatcggcttcttcaacttcggacattgtcggaaaacacaaaccctttttctctctctctctctctagagtagagtggagtggagaagagagagtgaagaaagcaggtgatccacgacaaagcaggcaagacaaagattggtgggaatgtgaataataataataatgtttggtacgagaataagaatggcgtaagtaacgggaatggcttaataagaaaagaatagcttcgagaggttgggtttgtccaagttgagaaataaaagaatgtgggtccacctagtggaaagtcaagactcaagtcaactcactatattagccattcataactcaagttcttttttttctatttgctagggtacttctgtatttataaaatacaaataaatattgtgtttttagaataataataaaaaataatctgtttataatagtatatagcttctatatttaaggtattttctagtttaa

SEQ ID NO: 207213 - DNA, 752 bp, Cannabis indica
catataggaatatgaatgagaatgaagaataagaataagaatgaaataaattaaatgcataaaaaaattgataagaaataattaatttttctcttgttatattagaatgatctttcctttctttttaaaatggaatagtcattccaccaaaatagtagaaagagcattctattaaaatgacattccaataatttaaaatgtaaccaaataaataaatggaataaaaattgtttcctttccattccttttcattacttccaaccaaatagcatcttagttttggtttttttttttccttctgtgactaaaatataaaaaattgcattggtgtttcatggttcaaacacaaatacaattttcattggctgataaaataaaataaaacaaatttgtttttaaaaaatgtgattaatttgcattttctatcaagaataattaaaatgcgcatacctaatgaatatctcccatgaaacgagacagaaacaataaggtctcaatcatatcatgtgcaaatcataaagaaagtaatccaaaaatataacatgaacaaaaaaaaattaatctcaaaatttcaatatgaagcattataattattaaacaaatgaaaactactcttttggaccaataaaatgtatttttatttcatttttaagtatttaaataatctttaaataaaaaattaaaaattaatgatttggaccaataaatgatgaaacgtaaacacttacctgacatttaacagtcaggtacct

SEQ ID NO: 207214 - DNA, 887 bp, Cannabis indica
taccatgcaaatatgataaagggatcatattgtattatttaattaatagaatactatctagattaaattttgtattacattaatattattgcaatcataaatcttaatataataccatcgaatcatattatttaatacgttaaaaaaagtttgtattagcttaagcatttatgaatttaatttgcatctaagctttagactacgtttcatttggttgccaatagtttcattatggactcccaaagcaaacaataaaaaaaaaacaatacgtttcatttggttgccaagtttcattatggactcccaaagcaaacaataaaaaaaaacaatgaaaatcaattttatggaaaaacattaaggcataataagtgacaaaatgcttggaagggttaactaaaaataaacaaagttctggaaattttagaatgagttaatttttaggactattaatgttcatttggcaggtcgtataaggatcatattatatatatattaaataacaagtgttggcatcatttctagtcaataacgcagagtcaataaaataatgatataaatgtttgaataattgaaatatgaaagagcaataaatgatacacgagtattataaaggttcggtctctgaatcggtaatgatctactccctttttagttgtatttttctaagaaatagcaagatcacatgaacttgtcaagtgagtttcctactaattcctttgaatattacatgtaatttcgcaaggtaatagctctcttgagaatacagaattcggtccccgaattgtaaatatgatccaccttttataggaaaaagaatgtagaatatttacatttaattacaaaataatgcatttaatatttgagtgagtcaatcccatcaaattctc

SEQ ID NO: 207215 - DNA, 943 bp, Cannabis indica
aacttttctcttctttttctttttagctgatcctaggttgataatgatatagtcatatttgtcttgcctttaattaatttatttgagtagtcccatgtcacctaaaaggtaaaattaaaaaaaaaaaattagttccaaaccaattatgaaccaaaaaccaacctatttatgactaattagagtttttaattataaatttaataaggacggagttggtttgtggacagatgtgatgagtcatgctgaatagaattatataaatatagggtattattatattatgaattatatcgttttagtgatgagtgagtggctaagaaagttgatattatgtatatcattggaaattaattaagcattaaacatatatagaataataatggtgcactttagagcaaaaacctttaaattaagaaataaaaaagaagctataaatccactaacgaggtcattatgatattatgactccatgagtggaccataagttaaatagtttaattttcaattcataagatgccaaagttctttggcttgaactgtttgtatggcttaaataattcacttaggttgagataatcatatacatatttgctacctatggttaatatgccttatggaaatattattatagagcctattaattattggaaatcaaaccaagcatagcaacagatagttattccctattgtcccaacttcaataaaattaattatagtgtttgctgcatttgtttttgtcctataattcgttgatttcaaatgcaattgacaagatttaaaaactttggtttcttattcctatttttgacaaattaaataaaatgtagtttagccagacaaaaaaaaaaaagttcttcaagaagaatcttagggtgcttttgtaagtaattaggtaattactaggtagtgtaattagacagttagtaattacactatattttaa

SEQ ID NO: 207216 - DNA, 638 bp, Cannabis indica
agaagtagaaagaggtctaagaatgaagattcattggtttcggtattgactaccacagtgaacaaatttggtgacatactagctgctactggtgatagtattggaagaattgctgattgtttctagttcaagacagaaggtgcaagtacaagactgaaaatgttcgatgaactgaaaaaaattgacgaattgaacattgaacaacgagttgaagttggaaaagttcttgtccaaaatcaagcatatatagatttcttcactaattggatgatgaatacaagttgggattcattcttggtctaactaaggtagaatttaatctagttgatggtatttcagaaaatattattagggtgtctctttacatgtaggtgttttaatttctggcaaaactttttgccggttaatttcatctttttgatagtcttttggataaaacttttgacaagataatatgccacgttttggattataaactagacatagtatgcaaacatttagcaaaataatataccatctttgaaaaatagtgttattatgtcatttttctcttttggaatgtgaaaattttaaccaatatttttttttttgaattatttgtattttacaaaaaaaaaaaaaaaaaaaaaaacaaaaaa

SEQ ID NO: 207217 - DNA, 533 bp, Cannabis indica
agtatgtttcaattaaatataaaattagaagtaaatttgattaattgattaataaaagtggtatttttcaacataccccaattttatactacttgtgtaaaaatataattttacaaaaaaaaaaattaattttatgggaatattttaataaaaagattaaatatatgaaaacccaaataatctgatggacttaggataaccagaggggtaacgaagttacattatacaatttttcccatattgtttaactttcttttttttaaaaaaaaaaaaaaaaaaattactcataacatcatattttgataataagccatattcttaccaatttataccttaaaaccatacatataaaaattctttctttattaaaagggcagctatgtgtgtgaaaaatgatacatcccctaaaaattgagttcttttgaaattgatggggcagacaatctaggtttcggggaaatcgaacattggccccaaattttttgaagaaaatgaatttattatttatttttggagacttatatagtattttt

SEQ ID NO: 207218 - DNA, 1192 bp, Cannabis indica
taatgacgatgatattacccgtctttagaacatatatattttataattaactttagacaatttacttttttttttttttttttcagtaacatcttttattattttgtttatttactattaactttagaactttttattacttactaattttataactaatcgaacatgtttagtatattagttcgatcagaatactttttaattatcaatgtaaatatatatatttttaattataattcttttaaaattaattttattatattattattataaattgttaaaatatattttttaaaaaaagctttgccggtgcattttttcgccgacaaaactaaataggaaaatcaaaattaaacccagttgcactttttttcggtgcaataatgcgtcggcaaaatttattagcaccaattcatctcaatggtgcgaacacttttaccggcatatatatatattaattacaaccgttcaataatgatttaacgattaaaacctctttcatatatatgtatatttgtaatattatgaacttttttttttttgaaaatgtaatatttaaactttcaatatatattatataaaagttatgtggtagattgccattttatttttattggtataggcacatctctatttttatcacttataaaaattaaattcaaatttattatattattgtgtacattttagttataacttacattctacttttttgcgaaaaatttagaataattttagtgttaaaaatagaatttaaatattcagttgcgagtgaaatgacttactataactataatatagactcttactacaattttttttacttttagttacaacaaaatttgtgactaaaagtaaaaaaattgtgactaattataaactatcattcttatgttgtgactaaaaagtgtgtggctaaaagtattactcacaaaattacaaattttagtcataatacttgttgtgactaaaactcacatttagtgacaaaaattattactaaaagttaacaattttttgtagtgtttcattaagaaataataaacttataatttctttaaatatcgtaaagataaatgtctatattggtaagaataaaagtgacaactttattatagttacctacctcgatccaatatttatatagatgtaatttgattagatttggatactatctagagtcatttgacta

SEQ ID NO: 207219 - DNA, 1490 bp, Cannabis indica
gggtgatggctataacttatttctttaattatcttaaaaatctttaatatgataagggcacacgcaaattctactctctttcttactacaatataatattattaccttattatatattattaggtatttttacaatataccccactaaaatatgtgtcattagtgcaacttataactgtttcggcatctaacaaaatttcttagtctaattttttaatagtcgtgtacgctatagttatttcagatattttgtaaaattttaagaaatttgaaataatttacaatatagaattaatgttcaaactgtctatttcacatgcttataaaataaaaaagtcacgtatgcaatgcaatactctttgaaccctatttttaacatgttaaattttctgaatttttcaaaattttacaaaatgttttaaataactacaacgtatatgaccataaaaaaatttagactaatttttttagataccgaaacagataaaagtgcatcggtgcactatttttaattttcctatatcattttctatttaattaaatttaaatttaatttttcttaaccaaaccaaaaaacgcctaatacttcacctaaatgggtgctaacttccctaacttaattgcttatattatataaatatcaaacaaatattctcttattatggcttcttctctaaagtctatgtctctttgacatcattaattagtgaaaaatattttaactaattatttatatatttttttggctaatcttcaactcaaaagtgacacatttcatatagcttgtcaacccccaaaattaactaaccaataaccacttttaataatttaattgaaaaaaattcatatatattaaaaaaatagaagaagaagatagtagtaattagaagaatatatataacacaaaatggaaaaaggaataaattttggctaagtggtcaaaagaacatcataatatcatagtgcaaattaaaataaataaagaaaaaagcttatggaaaaaatgacacaacacaaagggctagtccaatacaatttgaatttggtggtgtttggctttaggaaaacttaattctcacatggctttttttttctttttctttcttttctttttcaagaaaataaaatatatatattattatattattaatagtagtggtttttgtatatgatgaaccaaacttgagactatagttgaatagcccaatttaaacaatagtggtctattaaaaaaatagtcatgcatatatagcttattcaattagaaaaaaaaaaatggagaattttcacaaggttggagattttccaataatatcatatacacaaataaatgggttagtaaagatttttatttattttttgaataagatttaaaaaaaaaaaaaacaaaacaaaaaataagaaaggtaaactatatctcctaaatttatattgtctaatcacaaggtatatttagctaatttaccagtctaaatatatgatagcttagt

SEQ ID NO: 207220 - DNA, 567 bp, Cannabis indica
aaatgcatgaagggtagccaggccaccagattgtacattaacaaatctagggcaaaaattaaaactcgcaaaataaatttggaacataaatttttaatatcatcaagaattaaacccaaccaaaaatctaaaactaaagaatgattgagttcatgaaccaagccttgaccatcaaatttgaactgaacattgagaatacagaaggagatgcattgagtcatagctttttggattactagtgcttcgcccattctagaataatattttcttgcattttccaagcagttgaaggaacaattttgctgttggaatccattataaccatgtcgagtccacaatgagcattaagagaatcattggcagtatatgtatttagtttttttttaaaaaaaactagcagaggacgaagccaatggggaggtaatgtcgcaactacacgaccagatatgatgttggagtcttgtcagccttctctctggtaagagcacaagaagtccgcagccaaaggcctaataatcttcgacagtatagtagattgttcatgaactctcctccccccccccccaa

SEQ ID NO: 207221 - DNA, 772 bp, Cannabis indica
aactaattttaattgtactataattaattaataaattaatcataatataaaatagttgaagcaaaagacaaaaaaaaactatattttaatattattaaaatgtctcacaataattaccaaaacaaaataaaaaatattgaagttaaaataaagttaacttatgtaaatattaacaaaatattaattaataaatataaatattaaattatcacgtactcatgtaatttatggcattcatacctctttaattatatgaataataccacacaaataaaaataccctttatataaggtaagagtatgtgaaaattaaattatgtctattatatatatagtatgatttatattttgaaacaacatttcatattaaatacaaccaatcaattttacaactaactaactagtgcacaagtcatcatccctcctatattatattatttccaatctaaatatctttaacaattgaaagaagacaacaattacttaagtgtattaagacaaaaaagttaaatgtccactaaattaaaaacccaaaaggaagaacaaaaaaacaaaaaagaaaaagaaaataatgaggttcaaaaagaagcaagataataaaaaggatggaaaatataaaaggaacaaagtaagagtatctttaagtgtgcactatttaattagattaacttcaaattttttataccatttcatatactaaataaatattcactaaattacatgttattaatgatgttagattttaaaatgtacacactatattaatgtgtaa

SEQ ID NO: 207222 - DNA, 834 bp, Cannabis indica
tgctacaaggtcagagactatgccaaggacaaacctaatgaaagactaatccataaagcaatggtttaataacaatcgaaggatcctctagatttggccactgggcagagaaatgttactcagaataaaaactactaatcccattgaaaaatagaatagtggcaaaccaccattattaaaagcataaataagtgaaataaacaaccattaaaaaaataaaatagggaaataaaaaaacaaaagaaaagtaatagaacaaccaaacaccaacatattagactttggggcactgccactaccaccaagtggagaagcaccccagacccagaggacaatgccatgacacacaagagacgcgccaaagaagaactcgacaatgccatgacacacaggacaatgccatgaagcacaaccctagcatccatatgagaatgcctctgttagaccacccatcgaaaagcgaaaatgacttccccaatggacgaaaaccaaacacgatagccaaacaataatgggcagatcctcgaaaccccttggcctagctagatcgggaccctcccccacaccagatatagccaaatctgatatcctacgatcaccaagcaaaaactccaaaaaataatgacaaaaggcgttgatcctccattagaaaacttcttcaaacgtacaaaaataatgacaaatgacaaaataatgatagcggatgaatttctaaaaaataatacatttaatctaaattatattatttttttgaaaaaaaaatctaaattatatgttaattggactttatcgcatttacgatttattatttaatactagaatccatgaaccatt

SEQ ID NO: 207223 - DNA, 702 bp, Cannabis indica
acttttacaaaggtgggtcaacttttatacttctttagttattttatttactaaaatatcacttacacatacattttgcatactgatgatgtcactccacctattttccctaatatttttttttccattttcaatttactttttcatacacggatttgattttcagttgttatctacgatcaaaatctaaaatcgtgttttcttttcaaaaatttgatctcctcctccatctccacgttctactttgcaactgcccacaattttcccttctttttttttttttttttcattttataaaatgttatatacaatggcggtgacttggtccttatctgcaccttcaccattgttgaagaaatctgcgaaaataagtgttaaagcttgggccaacaaagctaaaggtaaacgccctattgatgacaatgatgattctaattttgctctccctattacaaaacctgttcgtcctcctcggaagaagaaatgaaaaattgttaaggctgagaagagtcctttcctggaggctaaaagatgaagaagtaatctgatcatattatcaaggttttatttccgtttcatttttcgttttgccataacttttaaatatttcatcttttatgagttatgttttccattcgattttagtataggttttacatttttttggttgtttaaatgtttgattactactttgaacatttg

SEQ ID NO: 207224 - DNA, 647 bp, Cannabis indica
ctttttgagaatatttgggatgcgagaaattccttcttctttaaaagtaacagactagatattatggcatgtagatcaagaattaatttgagatttgaggagtccttatcagtttgttgcaggaaactcagttactttgctgcattcaaagattccgtccacttctagttctatatatatgtttgactgatgcttcttggaaagatagggtggcgggccttgcagtggggaggctagatagagagtcaaattcctagttgtggtttgctaagtcaattaaggtggagtcagctatggaaagtgagatcttggccattctttgggcccttcggctaggtgttgaggctagaatttcattccgttgccattgcctagatgccctggtggtggtgaaggccttagagaagatgcagttccctccttgttggaaagctacacccctgattttagaaatttggaatcttgctttagttttttttttttttttttttttttttttatgtctgtaattgtttttattaagagaattgacaatcaatctacggatagtgtatcaaaaatggcctggaataatggtcatttcaacggtgtttgccatagggaggggtcacgtgttgtgatagttatcacttcaactgaactgttta

SEQ ID NO: 207225 - DNA, 746 bp, Cannabis indica
atattgggatttagaaagcgtattgcagtggtatcgagacgggtgggtttttgggcaaatatatagtatgggcggtgtagctgccaaacaagatatattgtgggtaaaaacgaatgcatatgtaatgtgtatatcaaagtaagaaaatttgtgggattatatccttacttcactaagtagatggtattggtgaaattcaagaaaatcatcaatctccagcagttcatgttcatctcttctttaattgagtgttgttatagcaaaaggtacggtgtttcgaagctatttctttatggcttggctggcgtagaacaggggactcatttacagaatttgttgtgagccatcaaacgaaacaaaactaccaacttaatttcaacgataggtatatgtagtttatcatgttaatttggagaaatacaaatgaagtacatgtattgaaatcaatattgtttgcctactttggtcaatacattgatttatagagtgaaatataggatgtgaaatttagaatatcagctattttgaccaaaaaaaatatgactatatatatagcagatattgtggtttgataaattgtaaagcgtatgcatgcatagcaaaatacaggcattcttttttttagtgctgttagggtgtaaagtttgatataatagaatacaatgagttgatgatttctaaaaaaaataaaaattatataatgaagtaatattcattaagaactgtttgatatatataattaagaa

SEQ ID NO: 207226 - DNA, 578 bp, Cannabis indica
tttcggctttgaagggagaagtccaggctgataatcaattaaagaatatttccatgttttcttatgctcaagttttggctaaagccttttccccgacactttcctccaaatttgaaacatttgaaagtggtagaaaaatttagatcatggtaatatttttaattattaaccattttcggtttaatgttttagtctcgtcgactagttaaaaggtgctagaatttttaaccaaggtgcttgtgtaatccttttaccaatctttttctctcaatttcaattaacttattgttctatgaaaataaaaaagaaagaaaaatgaaatctcatgctagcaactaaaacatagttgtgcattttttattacttcgagtgtttgagaaatgatcatgagattttataaagtttttttttttatctgaagattttataagttttaaggatatattttctctaattatttttgaaataattagataatattattttttgtaaattttttatatttttatatttaaagattttttttttttacattttacgtaaaacaacaaaaaactactatagaataacaagaaaat

SEQ ID NO: 207227 - DNA, 588 bp, Cannabis indica
caaaataaaaataataaaatacgtgttatcctaattttgtctacttgacttgacatgtctacatggtcaaaaacagaagacatgtggagaataactcatcactaaccgaacagggtagtgttatacgattcctcaactctcaagatcacaagaaggaatcaaataagaagaaccaggcaggtcttcaagacttggtcggaccctagcttgccaaccaatgatagcagcatgtgccagacagcttacaaataaggcagactagccaaagagtgaaccaagctttggacaacctaaatgggttgtgttttcttccatgggcattctagaagacctccaagcgcccctacaacttcagaatagttctaactgctcacgattttagggattcaacaccagaatgtaactttcctactttctagggatatttctacttgttatatgcaacaaatttataaaccctaacactatataaaagggtcaaaagcccacgtgaaagtgaccacgctaaaaaatcttaacttgaacctgaattcacttcatgcacttaagaacttagaagtactaaggcatagaattctctctctctct

SEQ ID NO: 207228 - DNA, 648 bp, Cannabis indica
aacgaaaatacacaaagtgttatttttttgttattttgaaattaaagttgttatcgtgttgttgttacgagaaaacaatgtgaaaacaattatgttctaaaaaagtacatgaaaaacttgtaaaaaaaacaacagatcaatccataaaattgtaaaaaagtaaataaaaaatggttaaaaaatttaaaagaaaatcagattttaagtatcttatgtaaatttctattaaatatttttagtatatacatggtattggacacatctatagtcccatttctcacatatgcttatagtcttgggcagttaggattttgtggggggggtagcgtgagcatgggcaggtgggaagcacgtacttttctcgggcccctctcaaacattttataagcaaaggattcaatacaatgtgtatttgtgtgtgtgtgttttttttttgttggtataaggaaaagagccatatcaagatacacatgtctttaataaaaaagattaattgactatgtgtaagtttgaaatttgggaattagtatggtaggaattgggtattttacttatagataggtgtactatttataactattgatctaattaaatagttcaaattaaattttgaaaactacaatttaaataatatattttttatttata

SEQ ID NO: 207229 - DNA, 895 bp, Cannabis indica
tgctataaatagatagtgaaggcttcaggaaaattacacactttccttctgacttttcattcagaaaaactgagcctctctctctccctatctttagccgccaccttgctctcttccttccctaatcaggcaagcccatatatcgcattgccattgcctaatcagacaattgacaatcaagaaacctcccatgccatgtagtacattatacttttcttacctttaatccagattcatgcatgttgaccaactcaagtggagaaacattcctgatgatctcgaccctatgtcacaacaatagtaaaccaataagtgtctatcccaaaatactacttaatatttacaaaaatcagtctagggttttttattcaaccccacggtataaatacactaaaataaaacttatattttggctctaaaacatacaccatattttagagcttgttgcaagcttcaaaacagtatatagaatgtttaaaacggacacccgagtaaaaagttatgaccaaagtatattttttgatctcccaaaaaaaattgaaaacgacacccttttattttgctccaaaaactctactatttttcgcagagacaagaaaactcacgcttaaactccttgaaagcccacaaaaacctaaccaattgattctaaacttcacagaacaactaaacaatatccatccaataatctatacgtaacaaaaatcaaaatcaagctcttaaatgaaaaacgctattaaagctcaagctttgagctttaaaaaactcaaacttgatttctaactcaaaacagtggtaaaatcatcccaaaagcatcagaagcattcctatatcatccgagaaataaaacccaacagctccaaaatacaatttcaacttttaaaacttaagcttt

SEQ ID NO: 207230 - DNA, 613 bp, Cannabis indica
gggtcagactcattctcttattttgtactactaccattgcgatttatcagattcataaataaatacaacgtttgaaaataaataaataaataatgtataaatgctaaatagcaatatgattctgattaaattatattttttttaaataatttaaattctttagaaacgagtgtgaatgaatattccaaaataaaactccaaattaagtgaaaagaatttttatactatgtattaaaattttcaattttttttcaaaaatactgtatattttttatattttgtattgtgttaagttttcacagttatttttagttgttttactattattttaatagtttattttgttattttacagttgtttttaataaagttatatttctataaaaatttctgtgtggatataaaattataaacttttacccaaaattgaatatttttataaaaaaaaaaaaatccattaaaaagttaccatctcctatgcgagagaggatgcaaatattattctcagaaatgcaccaaaaaaaattaataaaagataaatcttcctttgaatatatttttttaatattctgaaaattttattacataatttttttgaacatttttatacata

SEQ ID NO: 207231 - DNA, 1050 bp, Cannabis indica
cagtcggtgagccaaaaaggcagagactggttgcccgcggaatgtgacgtttcaattcgaccaggatggttttggcacaaagcagaatcgccaaagaagctaagcaagttactagaaatttactacaactcagttggaagaaactgtgttttactactcaatgtgccccctaacacaatggggcttatatcccaaaaagacgtaaaaagactcaaggaatttagaaatgcaattgacacaatattctccactaatttggttgagaaattcttcttaatcaaggctagtagccaaagaggaggcaaaggaagtagctatggaccggaaaacgttatcgataatgaccatttatggacttattggtcccctaaggatgatgatgatgcaaaaggggaccattggattgagttcagatcaagtacggatgaagggctgagattcaatgttgttaggatccaagaagccattgggcttggtcagaggatcaaacgacatgagatttacgtggatggtaaaagagtggcgaatggaacgacagtgggctacaagagacttcacaggcttgaaggtggtgtggtccatggccgaattgtgagaattagaatcttagaatatagagcattaccattgatatcttctgttggtttacattttgatccatattggaacccttaattaattggttagactacgttcggaaaagacaaatctatagctaaccaatttgtataagaaagcaaatattagacattgatatatattatcaactacctatgtttagatacttatcaaaaactacctatgattatttaataaatgaataaactgcaatattttgcagactgcagtacacaaacttgagaaagtgaatgaatcaatgtggtaaagtgcacaatttattatttattttatttatattatataaaatagcatgcctatatgttcagcacaaatgttattatttttgtttattcctcacagattcctgtcccagtcaatgtatttaggacttttaatagtcagcctcgggcaaaagttaatgagagtaaa

SEQ ID NO: 207232 - DNA, 1423 bp, Cannabis indica
tattttcatattaatatagctcaccattcttattaatctctagctatatgattttagtgtgtatatagttaatttataagttaaataatcaagcttaatgagattgattttttttagtttgatttataaatatatatatatatatatatatatataaaaaacatcaacaacctatatatttataggtagtggtatttaaaatattatccatgaactttgagcctacccacaactttttggccctttagttgacaaagtagactaaagcatttagaaattaaatggtgtggtaacatatgctaaaaacacataataaaaaaaatattcaaaagaaaaaaaaataggatctacaaagactagcaattattcgtcatattgacttcattcaagatttattcgaactattaatcaataagttttggttttataagaaaaaataagtaagcaaaagagatattttcgtcgtttggggaattgcagtcatacaaaattataaaatatactataattatagtagatttatacacaatatttgtacaagaaataaattaatgtaagaactagtcaactaaattgtaattttgtaagaaatgctaaatttactaaacaagaaaaagattctaaacatccaaatgttatattattaatttattattcaaataatataatagattaaagggtaggtataatattttaatttttgtattttacaaaaattataaattagatcttctattttgttaaataatattttgaatttgaaaatggtataaaatattactcagagatcaattttcattgaaaagtaacttaataataacctgaactaaaagtgttatgactattgggtatactttttacatatgttagtgttaaaaatttgcttcaattgattatgttaaataaaatgacggaaattgaacttagggtactatttttaaaattataggatttgatttgttatttaataaaatagatagtacaattaataatttttacaaaatatagagtttaaaatagcatttatcctaaattaaaatgtgatcattaaaatatagtgtatagtttcacaagtttaacatgatcaaatgtatcacatatagaaagagtaactaatttgtagctctttattgaaacccttttatatattgatcggatgagtgtctatttataacttttaagtctctcaaatatgacttgcttcatattgaactttcctgcattaggttcattattgaaagtggttgaaataaattgttaattccatctacattgagggttattagttgttttttcattacaaaaaagaccaccataattattataacattgagagaaattatcatattccttttttttttaaaatgttaggaaaataataagactctggtggtataggaactacaaaaaactgctactttta

SEQ ID NO: 207233 - DNA, 635 bp, Cannabis indica
ataataataataataaaatattagtttatgatcaagaaggaaaaatattggcgtagtggttagttacatgcataaataacgtttttctttttcagtgttttgttctgcagccctagctggatttaagatctcttctaccaactcgtcatatttgccagactagctaggtcttgatcaaacttataataagttcatactatatatcaaaggaacataaactatattagaatttaaacaatttatgtatgtttatatataattagtgtcctactaaaagtatagtacaatatatgtattaatattattacgtgaatgagtatcactcaatagagttatagttgtgttgtgacaaaaaacagttgaaaaaaaaaattgaattgggtatagtaaattataaattttaaagtgttatcagtcgttaagattttattataataatattataatccagtatattattatcacaaatatataaaaaaaaattaatgttatataaaaattttaactttcttatatgtttttaatttttttttcttaatgatagtataaatttatatgcatttgataaaaataatttatttatttttatcatttttttaaaaaaattctatatgatttttaaatacaaataaaaa

SEQ ID NO: 207234 - DNA, 668 bp, Cannabis indica
tataggtatttgtgatgcaaagtgtgagattcggtgtggaaaggcgggaaggaaggatcgatgcttgaagtattgtggaatatgttgcaaagcatgcaagtgtgtcccatctgggacttatggtaacaagtcagaatgtccttgctaccgtgacaagttgagctctaagggcactcccaagtgcccttaatgttatcatcacttaattataatccaaacatatattatgccctctcatttattagctttttttttttttatgtattaatgaatttggaaagtatatcatcacattatttccaatttatacaatttgaattcttatgtttcattgatttatgatcaaccactatgattcttaactccacctctattcaaccaaataagcattaacataaataataataaaaatagaggtaacgttttaaaaaaaataggtatttatttatttaatgagttaaaaaaatcaggtagcttgggtgacattattttgcaaattttattttatggaaacttgaatgggctttttgttgtatatttgatcttttgacattaaatttggagaaatactaaatggcacaatacatcacaagggaatgactcttacgcatgattttaataataaagaaaagaaaaaaaaatcaatcggcatgttaatctcaattaaa

SEQ ID NO: 207235 - DNA, 881 bp, Cannabis indica
cattacttatctcgccaatctagtgagatagtgttggccagttttctgcgtcaatagtaatctaaatgttcaatcctaacacgaggtccaaaataatatttacatttaaaaaacttaaattttagtttttttttcttgaaaaaccaaaaaagtataatttttccaatatttgctcatcttttgttttgggctagaataatcatatgtttctttttaaatgaatagtgtagagtagaagtgtgcacaaccctttttgttcttactagtattcaattcagtttgccttaatttgtaggcctaataaataatacaaggaaacctcaactagctagatttgcccccttgtttttttttttctcctttcccttttaaaataactttgtctatcaattaaaatttatatacgtacgctcatactttttattttttcaactatttgggagaaaataagaatagtagctatagtttttgttgcattggataaattattatattaccttccctatgctaatagcgtcttaaataatcagcatcttttgtgagaagatcatagttatcattcacgtgtctggattttgaatggtagaactatgataaaagttaatatgcatgagtcctttcaataaatatttttttttttaaaaaaaaaagtttaatatgagtaaaacaattaataatcgatatatatatatagttacctaacataaggttaattaatatttatgttgattgctcattgtcattggttttgtagctagtgttgatttaatcatcccattcccataccttaaatacctccatatgcctttgcttggttttctatatactatatttgttaaggttatctaacattcaaaaaaaaaaaactaaaactactagtc

SEQ ID NO: 207236 - DNA, 1051 bp, Cannabis indica
taataataataaaaaaaacaaatcaagttaatatgttatacttgatatttttaattaagggctaaactattattggtggggacaagaattagatgggggtttgttatttttccctcccaacatgggtctctttttctaacaaccccataagatgttaaccaagctatgcttgctaaggaagcttaacctattattttctttcctgattctcttattgggaggttgttgaaagctaagtaattaaaaataactcttttatggatgctcgcaaaggttattgtgcctcgtttacttggcagagcttttatagggaaggaaattgcctaaacaggggctttgttggaagataagtaatggtaaatacatcttgactgttattttcgtagtagagtctcatatttttataataataatagttgttgaaatattggcaaaatgcattattttcgtgatgaggttactgttaatgctatccttagtgttcctattggtgacttttctagtgatgatttctttttttggggacaccatcataatgaaaattttactattaagtctccataatatttagctaagtcttcctctgctcttcctacttcttctaatccttctcaaatcaataaatgggagaaagttttttggaaccttaaaattcttcttaaaattaaacactatgtctcgaaagctttccatcacattttactttgttccctgaatctttttaattaaaacttcttcaatgtcccttttgctctgtgttctaatagagcaaaatttgtaacacataccctccaaagctaaatgtatttcaagctcaatgtggatgcagctctggagaaaaaaggaaaaaaaaaatcgggtatagtggctgtggtgaaagattttagaagggtggttgttgctggtttatcttcctcttttcacacaaaactttcccacttatatgctgaaactgaggctatgctatgtgtgttacattaaggtgttgtaataaacttatcacgttgtttaattctaatgaagttgcaatatgttaaagaaaaaaaaaaaa

SEQ ID NO: 207237 - DNA, 1003 bp, Cannabis indica
ataagtggatgctagtagtggtaaaattttaatactaatacgtctgactcataaattagttcactgacaatccaaactacatttaatgtgttttttttatttcatcttaatctctcttaattcttatctattttctaaattgaatgaaaagcacgtttcatataaataataactcatttctacttttataaaattatatatttccttaaaaggtaatcaaacaataattataattattattatttttggttaatgtgaatatagtgcacgtgtagttcattcctagttataattctcttccattttcacaattttttttttctttttccatttttagtttcccctttttggaaagatatagctgactacccgtgaccaaagtaagggcttttggctttggtcatataaatatagtattatataagtttgaaccaaactgcagagaaaattcaggtgtagacaaaggtagcgattatgagacattaaaattgatgtttagtatattcaacaaagaaaaaggtaacacaaaatgccacgaagtacgaaaacattgccagcgcagattggtccccacagtcaaatcatggtcagaacacacaaatcctttgatcttattggctaagaaagccagagttttggggcggtgaaagtccaaaggcaacaactaaaaactgaggaagcccatgtcaaacccacgtgagcatgacccttgggacgccttgaggacactcgctcacccccgaaaaaaacactctcctgtctcaccctcaaggggaaattatgtgctacatatacatacctattttaatatgtaacaatacatatattttaattttatttttattcctcgcggtattcattataatcatagtaggtcttctataaactttttaaaaaatttattgaaaataaaattgaaatagttgcacatcacattattatcaagctttttgatcctgaacataccatttcatatcttgctaaatttttaagatcgttaaaa

SEQ ID NO: 207238 - DNA, 1057 bp, Cannabis indica
aggacttaacgaggctggacagagaacactttaaaaaagtaaatggaacaaaactttggagggttttcctaccaaaatatgaggttggatggttttttgcaagtaaattgatagttgagggagttttgccgcaaattactcaaaatatttttactttttagtggtaaaactctctatctttaaaattttgttgcaattcactcttttatgctaaaagtgttaaatttgactaaaaggacacatgtttaaaaataatatatataacaaaaattaattaaaatatatttaaaaattattaaacaaaaaaagttcatatttttttgaatatatgtatctgctaatttgttaaaagaatataatttctattctaaaattaaatttaagataaaatagatatatcatttttaaattattattttaatatttaatattattttttaactcttttgtcttgttttctatattgaaaaatataatttatttgatttactatttttttttgtaagtaaaaagtttattgatatcaaaaaactgtacaaaacaagagaagaatctcccaaaccaccaaaaagcaattaaaaggttaccgtacataaaaccccccaaaaacggaacacaaacaatccatacatggttcaaagcccaaacctactaaaattttggtttttattgggaatgaatttgccttccctattatgtagaatatgcttgacaaccactagcaataatctctcttctaaactttatactcttaaaaaataagtatttgtaaatcacatagacaacaactataagggtaggttgaaacacaacctttcggaaataattcattctacttttagtaatccacctaactaactgagttaatgaccttgctgtagtgttccagcccaaccaaacttttaaatgagtcaacaatacgcaccataacaacattgtaatcgaataggctcaattgattctgaaattcaatcacaaaaaagaacacgtgttatgaggaagtaatccccactgttcatcaatctgtctcgagtatgaagtctattagaggtgggtc

SEQ ID NO: 207239 - DNA, 676 bp, Cannabis indica
atgtaatttataccttaattaattaatagtgtaagaacataagatgaaatgccttaaaacaaagatagtgatgaacaattatcaagagagagagagagagagatacatagctgtgggtgtgttgtattggtatatatttaatttcttggtgtgatgatttgttttgtagactccttgaatattatatatacatgacaagagaagatgattatattatatatagttggggggaatgaagcctggtccgaaatccttcttctttatattatatatatatatatatatgtatatgtatatatgtttgagagaaagatctcgaaccagacaacattcccctcaactcaactcaactgtttctgttatggagagaaaaatagagagagagaaagagaaacagagatttgatatgcacaacacaacatggccatgaagtgaacatcaaataatggattatttgattgattccttatatatatatataaatatcacatgacaaacaaaacagtactccactaataatttaacttaccacttctactttccatctaatcacttttcactgtatatttatatatatatatatatatattgatatattatacaatgtagtgggttcgtactctttgagttagtatacaactaccgaatcgtactcttactactaacctaaacacca

SEQ ID NO: 207240 - DNA, 938 bp, Cannabis indica
aacatactctaaaacaccacaatttataaaacaacttctaataaattattgttgatcatcattaatgttgtattgaaaacatacaaatgtcattggagatttatgtcatatgaatatagttgttaataatattaaaatttattaaattgttgatattaatattattatatatataattatttttttttcaggttaaacaaacctgatttaccattagcttcaggagaaatgtcaattgaaatggcatgggttttgactatattttgtgcaataagtgggctcatattaacaattacaatgaactcaggcccactctttccttttctatactgtggttctatttttgtggcgggttttctctattctgctcctccattcagattcaagaacaatcattttacagcacttttgtgtaattatgtggtatatatatttattaatattactacaattaataactactattttaaaatatatgttacacttaaaaaatgttagttattttataacaaattatacagatgtttgtgagcacaactcttcagatctattgtgcttacaaggctggtcttggacttccactaaactggaggtgagttattatgttaaaggaaatattatataggattatttaacaccaaattttaattttttttctttttacttttttaatgtgagtagagttttttttaaaaatactgtgtattatgttaaatttttactgttgttttttagctgttctactattgtttttaattgttctgttttgtgctccattgttttataaaaacacagtatttttgaaaataaaatctcgtgacagtatttttataaaagttaaactaaattctagtatttttgtaagtttcctagtatataaaattaaaggaatattcttcgtctttctgctaaacaaaatgtattgaaatcataattca

SEQ ID NO: 207241 - DNA, 662 bp, Cannabis indica
agtagttaaattaagcatagatattcaaattcttcttttaccgaataattttttttctataattaatttaaaatttaagtaattttaaaaaagtttgaattgttttttaatttaaatttttatggtgccaatgacgattgttttgtatcatatatattacttgttttataccaaaaatggtttgaagcagagatatcaaagttaaatttttcttcataaaataatattttagaaagtttttagtatttaaataaaaattcttattttcatttgatattatctttaaaataatgtgttaattaaattttatatatttatcttatataggtgtgtttttatatcattcacttggttatattaaaggatacaagaactttaacaaagtaaattttattacaattttcttttttaaaatttattatattattattttatatgtcaaattttaaaattttcttatgaaattactaaattaatctatttggtggttttttggtatcagcttttcaaacaaaagttcttgctttgttggtagattaaaatgagctgtgttttatttttcacacattaaattttattatttagaatttttaagtatttttcttataatgttagtcgatcctaatttatttttacgtactcattaattggctaagcttgtc

SEQ ID NO: 207242 - DNA, 784 bp, Cannabis indica
tgttatgtaacgatgagctatggtttttacatatcgaatagataatggttttcgcaaaagttactaactgaacctggtttcgtaaaagttactaactgaaccttctattttgttaactatagtttccaaaatagtaataatagaactagctcaattttcaattttttttttttaaaattactaactttaagacaatttctaacacgaatagatacaaaaaatgtaaccagttttgtcataacaattttagatcagattattattaagttttattttgacaaaaaatcagttcaatgcctatttgtacaattttaaaaaatacagaatctattttgtcatttaacaaaacagaaggtctaattaataacttttgtaaaataaaaggtccaaaataatatttacccatctttttataataacttaattcaattcaacatttttttttcaaaaaataaattaaatatttagttatttatggggacatggcaacctccggctcccttgtctctgttattagttttctaaatttttaagggcatcacattctaattttagtgttaatttcaatgttggggattatgaattggctaaatatacattttagttaaacataaactttattagttagaagaaactcctccttccatttagtactcttctgtaagacatgtttacaaacacaatatcttattcttaacaaaatataaatatatttaaaaaatttacatttttagaagtgacaaagaaatatatcatttttcatagaatggctgttaacatctga

SEQ ID NO: 207243 - DNA, 535 bp, Cannabis indica
tttttttcgaataggtaggtttttttcgattaacattgtaaaataaagaataaaaataattacatgaaagtgtacaaaaataatacaatactaattatttcacttagttataaaaaaaaattatttcactcaattaaatttaacattttcaacagcattaattcaaattaccaaacctaactaacactcaccaactctactcaaattaaaatgcaatcaaacaacaaacgaaaagacattacatggtctagtcaaaatgaagcaacttatgtaaaaataatacattttagcacaacaatatgtttaccaacctactccaaaattttccaataaacaatatatatgttaagtgattttttttttaataaattagacaaatatcaagttcagcctcattaaaacctcaaaagaaatatttcaaagagaaaaaaaaaataaagtaccaaatgtcattgataattagaatcaacttgtacaatagtttcaagataagaggaataaaggtcatcacagaagaaaggactcgctgagccga

SEQ ID NO: 207244 - DNA, 1096 bp, Cannabis indica
tatatatatattttaagataaaatgagagagatattgctgaatacacacttgagatgggctgtgggagacgataattggagaggttctcaacatatttggtcggctttcggattgttttggtagattctttatctgtttcatcatctataagagtttttagtccatttttttcatgaccgtatatgtatagttatttaggattacttctaaatttttaaaaaattctaaatagtttatgatgctgaaaataagatttaaaatattttgttaaacacataactattttctttatctacgtaataaacaaatgtttgaatcttatttttgttaatattaattatttaaaatttttcaaaaatttataagtgtcctaaatagtttaaacttatgtgattatgaaagaaaatggacttttttttttttttctaaatgacaatacagatagaatgatagaatgtctaccagaacatcactttagaggtggacttttgaaatttcctatattaattaggtttgaattgtgttctggatgtcatttgagttatatacgagattaattcgataaagggttgatttgatttgttttgagatatttgattatttgtttgttcaagactcatgagaatttaattgtttgttatttgattttccatttgtaataaataaagttatagttttttattttttgattttgtattattaattattgcacacgggcttgaccttaggtataggtgggctaggcttgtgcttagggtgaacttaatttttttttcttttactaattttgaaaaatatcacattttattctaaataaagactcaattttttctttttctaatgacccgctaaatttcaaggtcaacttaagtatttggcagcttgggccattgcacaagaccctattttttaagacccaaatttttttttcttttttttgaaagaaaaggcttatttgttttctttttttatcatacatacataaataaaaaatttataattgaaaatttaagaatgaatcttaaaaaaaaattggtattaataaattgtggtcttaatatacatgattttttttttctaaaggggcttaatttt

SEQ ID NO: 207245 - DNA, 618 bp, Cannabis indica
ggtatgcaagttgggttattctaccggacgaaaaaaaaaaataaaaggcccaatatgtatatattttttaatgtcttataatttttttaatgaacccaactttttaaggggttaacaacttgttatgattggttacttttatctcaatttctcaaactcatttttaattctatttactgattttaagtaaaaaaaaaaatcaattactgttatttattatttttttcaaaccttttatatttttttttatttatttgaatcaataacaattttaataaaatatttggaattttgaagtattttgtaaaatatgtaactgtatgataatatttaaaaaattatttataaattatatatgtattttttttttgttagaggtcaattttaaaagttaaaataaatttttcaaaatgtttaagactacctaattttttttataacatttattattttagaatatatgagatccaatatatatttaaataagcaaatagtagtatgacatgcattttagattagtgttaagcactacccattaacatttctctaattattaacatgaagatcatattagatcagtccatgtcacccattactaatcgatcataacttattatg

SEQ ID NO: 207246 - DNA, 578 bp, Cannabis indica
gtttcctaatttttttaatatagtagcaactataatttagtgactagtgtgaaagaaaatatatttaatattataccatatatatttttttaagaggagatactcaaactcaactttccaattaaataaacaaagcaacaaattcaaattgtttctttatttaatctataatctttacaaaatattaaacaaataattgttttaataatagattttgttcttcatggaaaaaaattaaaaaataaaaatacccaatttcaattttctcccttaataacaaagtaacaaatctactaaataaaccttttctaatacgatttttaatcaatatatttttttaataaaagaaatcataatttgttgctgggaggagatataattatttatttcatttgttgtcacggattttttctaatttattaaaataaaaaaataataaaatcttaattaaggcaaactatctgtttacaaactgaaaaatcattactcattcaaattcataccttttttgatctcatttcaaatctccgttttcttatcttagggctataaaactaacttcttttctttattaataa

SEQ ID NO: 207247 - DNA, 808 bp, Cannabis indica
atatataaacattttaattagttacaatatatattttcgaataaaaataatattaataaacataatataaattttagtataataataaaactattattttatgcacgtagtgaaagtcatgagttctaatctcaataaaaacatacttactttagcatttaaattttattttttgaatctctactaataagactttttttaaattattaaacctaatatttttattgtttactttttttttttttttattttatactacattaacatgttatacaatgtaagaaaaaaaaatgccccttacttgtaaaaaaaaatgtaataatctctcaacttaaattctgagactgtcactggtcattactacattaacactaataaaatgatgtaatttaaaattcaaattcatatatttattaagattaataaattaaataaagtaaactaaaaattaatattaatcaaattatatataaaaattagataaacaagcataaactaaagtcctaaaaaataatagagtggtcaacatcattattacaaattaaaccgaaacaaaacagaataaaacaagtaaaagaacttaatactaacacagtaagaaaaacaaaattataacaattaaacaaaaaaaaaataagtactgtcattttatgtatatacaaacaatttctagtatatattatatatatgaaatcactagactaataatttctattgaacacatccaagttaacccatttactcaccaacaacatacacataataatatagatgactcagatgtcagtatcttatctccaaggataaa

SEQ ID NO: 207248 - DNA, 800 bp, Cannabis indica
atctcccattaaaaatggtcttacgaaaaaaatgtcatctttcctcaacttaaatcctgaatccgccgctgatcattattacattaacaccaataaataatgtaatttaaaattcaaatttatatatttattaagattaataaattaaataaataaacaaattaatattaatcaaattatatataaaaattagataaacaagcataaactaaagtcctaagaaataatagagtggtcaacatcattattacaaattaaaccaaaacaaaatagaataaaacaacaagacaaggtaaaagaaaaacaaaattataacaatcaaaacaaaaaaaaaatagtactgtcattttaatgtatatacaaacaattactaatatatgttatatatatgaaatcactagactaataattttcattgaacacatccaagttaacccatttactcaccaacaacatacacaataataatatagatgactcagatgtcagtatcttatctcaaggataagacaataaatttatgagagtaattagaataaggtatggtcgtttatagtaacaaataaataataataataataataataataatttagttttattatagcttaaggtaataatggaatattatcatatttatttttggtcattcctaaaatatattttgcaattaaagagagaatactatgatctgagatgctcattaaacatgtaaataattgtacattttccagatttgtagctctaaactctaatcaataaacatgtttactttaattcgaatttcaaaaaattttaat

SEQ ID NO: 207249 - DNA, 964 bp, Cannabis indica
tatatgttttttttcattttaggggaacatgagccctgcatcttccactggtatccttggatccaattatgtgttcaacccaggaatccaagtgaatcaggttctggtggacagtaaacttactgcatccaactccaagtctacctgagagacctgatcaaccggaatgccgatattttatgaacactggaacatgcaaatatggaacagattgcaagtatcatcacccaaaggaaaggattgcgccgtctgcggccatttccaaccaaatcgggcttccctcgcggcctgtaagttcatttccactgcatgtttgtaattcctttgtctatgtatgcactttatattttttgtaatcgatgatcttcaactctatgcaggggcaggctgtgtgttcttattacagtatgtatggactgtgcaaatatggtccaacatgcaaatttgatcaccctgctgtgccgaatgtttataactacggtatgactcttcctgccatgcttgattcaccttatttaagttatcccaaaggctctccaacagccaatgtgccagagacttctcactccctaccatcaaaatcatttgatgtggtaaacaaacctttgagcatgcaaaatcataactcggattcaagactctcagatgattcggcgaaacaggctagttctttggcaccctcatcgccgtcttctgaagcttcagaagaccaatctggttgaggttctattttttgtttttttttttattcttcctgttattttcctttttttggttgcatgtccttcattggattagtaatttgaaggaaacatcatctatcacatgtaccttctgtcccccaatttcacctgcctgaggagtgaatgaataggttgtttgaaatcagtggggtgatagaaggcaattttttgaggtgaataatacgcaggtgggaagttgtaagatctctttttttttcaac

SEQ ID NO: 207250 - DNA, 656 bp, Cannabis indica
tcatgcaacacattgtttaaatcttattttcgctgtgttaatttttttcgaatttctcaaaattttgcagaatgtactaaataattataatgtacatgattataggaaaaagttttattaaaaaattattacagatatcaaaatagatagaagtgtatctgtgtattatttttaaggggtgtattgtagaatttttttataatataatattgaatgttaaatttaagaaattatttacagcatgataaatagtacatttccagaagtgattttcaaacttttctggtggtgcatctctagttcttaaacctaaagactatctcttacaacaaaattcaactgtgagtagttctttctctatataaaatatagcttaattgtttagattaatcaaaataattttgtttacaaaatttgtttgaattaattgtcagtttttaatcgaacaaattatgaaaaatatactataattttgttataaattaaaattttggaagaggccttaggattcccaccagacccaaaaaattgtttaacaaaaaattttaaattgttttttttaataattatgtttagtatttttattattatttgttaaaaatataactattttttaaaaaaaaaaaataacctaatttaattgttcattatactat

SEQ ID NO: 207251 - DNA, 1556 bp, Cannabis indica
taaattataaaatattattagaactattaaataaagtactaaacgaattctcgtcgggcagtgagtatcattcccgtccccgactccccgcccatttaacatccaggaataaaacataattttcatccttacttcactccccatttagattgagaatttttacctcatcaagggcaagtccctataaagctttatctctatagaaaaaatgtacatccctaatccaacccttaaaattattattcacaataattgaagaaagtacataaatgggatatattctttatatgtacaaagaagtgaatgtagttttcatcatgtcatggatatggtatataatttggagttattttatatttacaacttataaaaatattattttagtatgcaagttatctattttcttgttgaggtttttaatttaatttattttcataatcgtatgcgtatttatttatgaattatgattatctaaaaaatttcacaaaattcagaataatttataatgttcaaaaataaagttcaaatattttattgtacatgtgattatatttttatatagtaataaacaactacttaaattttatttttaacactataattatttaaaatttttaaaaaatttacaaatgagcttaatcaagtacaacatacattattataaagaaaaaaagttgaattaattttttttttaaagtttacaaaaactaccataaatctttcttataatttatggaggtgtaagtaattttttttaataaacgacaactatttgggacatcatattgtattatatatcatagttttatttattactttatataatatttaactttttttttttgatgaatacgaaattttattgctcaaaccaaatattacatcacagcattttacatcttaacaagctattttttctgtcactaactttgatcatatacaatttatgttctcataatccaatctatgtcttcatccttcgcttttctaggagggaaagctttaattcttagcaagcaaagttgtttgcttttctgtacagtcgtggaggtcagccaaagttgttggttccataaggcttcattcctggccttccatatgtgatacacaaggctggcaatgactgtgttcaccatgcttttccttgctgcattaaatctcttcgattggtggcaggcttgcagcagctttgcaatgtcatctgctgttgtgttccactgcaggaaccctttaatttgctgcagacaacgtgtactgtaatcacatttaaaaaaataaatgctcactagtttcatcttccttgccacacaggacacaagttgtatcaatactttgattaaatctacttactcttactctctcctttgattaacttttatatttataaatatacacaatattttgatataaatcataaatgaacattgaacattatatataatatacaacacaatttaatataattatgttaggtctaatgcaatgtttataattaaacaaccaaaaaaaaaatttattagtgcaaatatgttatttgattctatatatacatatat

SEQ ID NO: 207252 - DNA, 1715 bp, Cannabis indica
ggttgattcagggatttcaagacatggtttcagagtgcaatcttattgatatggagttggtgggttacctattcacttgggagaagggaaagggtacggcgacatgggtagaagttagattgggcagagctcttatcaatcaaggttggaacaggcattttcatgatacaaaattagagaacttagaaatttctgcttctgatcattgtcccatttgtttgaatcttaatctgtttaaaagggtggttagtataaggatatttttgttcaaaaatgcttgggtgtgtgagcctatgtgtcagattgtgcaagataattgggatgatcatgggtcgaattctttgagttcaaagattaagtgttgtagtattgctctagccgaatgaggagaggatactactggtaattttaagaagagaataagcagtcgtaataaaatcatgaagcttttgaagaatagaagggatgttgatttggttaagagatataaggagctcaagatcgtttgtttgaagttcgggctcaaaaggaggtattctggaaacaacgatccaagcaaatgtggatgcaatcaggtgaccaaaacaaaccatatttccatgcttatgcaagtactcatcgaaaaaaataatcaggttttgtctctgaaaaatagtagtggagtttgggtggattgggataatggtttgcctgatgttgtagaagaatattttagagagttgtttgctgccactgatattgaatggggaagagtcgtggactgtgtgcataatcgggtgtcgacggacatgaatgaggctcttactgtttcggtggaagttgaggaagtttgaaaaggtcttttccaaatgcatcatgataaatcgcttgggcctgatggttttaatcctgaattttatcaaaattttgggacattgtgagcaaggaaatcattcggttagtacaacacttctttacttttggttttgcctgatcatttaaaggaaacaaatattgtgcttatcccgaagaaatccaaacccgaaagtatgagtgagcttagaccaattgctttgtgtaatgtggtctataagatagtctccaaagtgtcagccaatcgattgaaagttgtccttccaagtattatttactgaaacctaaagtgtttttttacttggaagacttatagctgacaacatcttaatctcttttaaggttatgcattatttgaaaaggaagcaagtggggaaggatgagtttatggcgcttaagttggatatgagcaaaacttacgattgggttcagtggggctttctacaagctatgttgaggagattgggttttactgagcaagtggtcagattgataatgcagtgtgttagctctgtctcttatagaattatttgttgggttttatagacagattgatcctctttcaccctatctttttttctatgcacagaagaattttcagctttgataagagagtatgagcgggtgggaaagattcggggttgtaaggttgcaagaggggctcctgtgttatcacacatgttttatgctaatgattgttatgtgttttgtaaagcctaagaggatagtactattaatgtaatagaaatgttacatatttttcaaaaggcttcagaacagcaagtcaatctgcaaaagtcatctatcttcttcagtgctaacactgacaatggggtaaagcaacgagttttgttctaccttgg

SEQ ID NO: 207253 - DNA, 847 bp, Cannabis indica
gtttaaaccaatactttcctttagatagataatatcatgaatatttttgctgttaaaattaacatagatgagaatcgagtttttgatcgttgacttatatgtatatacgtgtaatcttcttcgaaaaggaaggtaatgaatcgatcaatacattttctgtacgtaagtatatatattattcatgatgagaacattactgtagagccattaattcatcagtaagtatcaattttaatcggtgataaatatatacaaatattattattttttgagtcaactttctctacgtatagaacagttgttccatataaatagaacagaaacatcataaataatttgctcgaatcgataagattttcggtcagtcatttaattagaaaattgggcatacaataaatatatatgacaagttagcaagctaccccagtcaaacagtggcattaccacccaatgaactgttctaagttatatatatggaaggtctcatgcatccactagaactagggtttataagtttgttctgatctgatcaacctataatatatctatatttcaataaaataataatattatatatatcaaatcaaatacaacaaaccatcttggaaatatatatttctttaaaaaagaaacttattttaatatacataaaagttatttcaatatataattttttttatagtacatatattgttcaaaatggagttgggtctctcttctaataaaattattactgaagttgggtcaataatatataatttttttattactattatatacatgccatgttttcaaaattgtccagcataaactatatataccattaacaagagttcaatttttgcac

SEQ ID NO: 207254 - DNA, 824 bp, Cannabis indica
gaattttatttgaaagggacattgaacacaaataattgtaaggtatatgacaaccaaaaatttgtcagttgatgttctcaacccacttgaacctctttaaacgttttgggacacgcctcccatataattaaatacaaccccccttttaatttgagtattatccatcctactaagagtactatattaaatttaattactactacagtacaagttgccccattgggttgttctaatttgatatcattttcaactttatgaaaaaaatcttgaatgaatgtacgtatgcctataccttaccgttgggctagttattgtcttgtcccatcacttgtatgtactcatatatatatatatatatcattagtttttatttttcaaacactcaagaaaaaacaaactacctagaaaggttggagagtctgggaaaattctttccattcaaacggattaattgtcgaacttaatatatatatacacatttttaaaatatatatacttggttaaatttgatatgtgcatttaaaataaaacttattctcaacttatgatgtaaataagttaattatatcatgattatatttaatatttttaaattgttcagtggataatataaaaatttactcataaaaagcaataattatctcatatttatttaaaatatgcaataataataagaattataagcattttttgttctttgaactttctaacactacttaatttgtcctctaaaatatacggcttattaaaattttttcctaaaatataatagttacataattatgccatttctgttaagttctgttatataccgttaaaaatta

SEQ ID NO: 207255 - DNA, 1065 bp, Cannabis indica
gttttcatgtaatatgataacatgcgttactactagtagtagatagtctgaataaatatggatgcttacgggaacagtgtttctttacttgaaaaggtaccacgaatataattaccttcaggaggaaaaggttcatactggagagtataggtattaggcagaagctggtgtggaccttagctagtgggaaatggttgaggggatgctggaagaataatattactgtgtattttattatctggggcttcttagctgaagataagaaatagttatttttttgttattgctattagtgaaattagcccgtgctggagtttgaaccgatatctcttactcaacacaccaacccatcctgagctagacccaagtggcgcactaaatccataaattggtggctggagtttggttcttgagctagattgaatcatttaagattgttcgtgagggtagttttggttatagcgtgagatgcatgcattatgaagttattagtgatgatgatccatggacagccgtaattattttaggtatttcctatattttcccttctgaatattttgtatcattgcaggcagttgatattaaactccttgggtccctcagcagagatgatttgaagaaaatttgtggggataattttcctgaatggatatctttccctgtctttgaacaagttggtttctctttatttctcacttttgattatgaaactttttaattgaacataatttttattgtttgatggttctaaattggttggctgtctcaggtgaaatggctgaacaagcaactaagtaaattgtggccatatattgcagatgtaagactttttctcatcctctatcaatggttatataccgctgaatgcaaatttctcttctatctctttagggaaaaagttgcccgtctttccctttttatgtcaaatagtttattatatagtcttatttgaaggagatttgtgttatctatacttcttgtaaagtttgtttggtttctttgtatatggcattgatgctatgtttttgacaagtagttcatattgtaatttttttggggggtttt

SEQ ID NO: 207256 - DNA, 916 bp, Cannabis indica
gatccgatattaaattctaccaataacgataaagacatcagcataactgctgcatttgagcatttctccaaatataattatcctaacaaaaactatattacagcccaaaactatattatcaatggtctgaattctacttcctctatttcctcggattggggcttgtttattaacgagattttatctcttcagcatcatttcattactgtacagttttcttatattcctagagtttgtaatgctgtagcaaatgctttagcaatttggagtcgaaagactcattcttcttgtatttggacaaattctttgccctcttgtgctgctgcccctttaatggcagataagcctggtgtggttgtttaataaagtgattcattttcaaaaaaaaaaatttaagtcattttgcacaattctctaatccagtcccaatgaacacattcaaaactgaaagaaaaagggattgttttctcgcaacgaatgtaattcaatatttataacaaataaattaaaagagaggatactcacttcaaagcaagagtagtcgcatttgattgtgaaagacttggattttctgaaattcaaactgcaaaaagaaagaagaagaaaaaaaattgattgatagcttaattggtgaaattaaaaatcttttgtggaaaaattagatgatgattgccttgagattgttgtgggaaggaaggaaattgatgggtcaggctctttcaaaccattaaagaatttaaaacccgaaacgctgctagtgctcaccatgctcacttaaatcccttctcaacacaaggattttgggctcttactgaaactcaacaatgagaaaacataataatagtaaataaattaataactggaagcatcttagctatgtttgggggaggatagtgagtttacaaaaatggggagt

SEQ ID NO: 207257 - DNA, 936 bp, Cannabis indica
tttttctcaaaatttgatttctaatctactaatcgatccaattcggtgtaaaaaatgactaaaatagtagatctaattgattagtccaaaactttgaagaacaaagtttaacccaatattacatatatcttgtccaattcgaaaaattaatcatataaaaatattgtaaaataatggaaacaagatatttacaatcaatttcatatttgaatcactaatttcaaaaattaaataaataatttcaatacaattttatgaggaaatgttactttaaacatcaaattctctctctatacttaatgaaattaagcatgtaacatatcaatagaaatcttataacaagaggaataaaagctctaaagtttcaaaatcaatacataaaaaattcaacataaataataatgaaagtaatatttaatttgagaaaattaagatatacatatcaattgttacacaaattataggtcataaatcatatacaacagacaatctaataccacatgctataataattaataacaaacctaagatactaatttgtatataataaataacacgataataattagataataattagtatatacatttgattgatcacatttatcataatttaatagtacaatactattaattaagtttttcttctgagatctctaaatcagaatcagcttttaatttttctgattatcaaaaagtataaaattgtgatgagataatatgtatttatagagttagaaatgagacttagctacataactccagttggattggacatgctcatcaaatactgcaattaactagaaaagttcacacttctacttcaactagactttatacacacagatgctagacccattaactattgaccactaacaatatgggctaacacggtaaataactatccaatcattctatattttattaaaaccaata

SEQ ID NO: 207258 - DNA, 917 bp, Cannabis indica
aaaattttaacttttgaacaaatcaaaattaaaagacaatatttttacttgaataaataacaatataagaatactcaatagtacaaataaaattcttaaaataaaattattttcataaatacatatagaaacaattataaaaaaaataattgttaaaaataaaacattaataaaataattatggggtaagacattagtcaatcacccttaaaatataagaaaaaaatggtagactaagaaaaaaaatttgactaaagtattatttataaccaacatagataatacttaaaaactatctaagcgatgtgggactttaatttgtatatgtagattattttacaaacaaaataaggagaatgtgtcaaaaaattagaaaaataaaaagaaaaaaaagataagatgccacatagactattcatatgctttcctttatttatatatatatatatattgatattaatgttctacatgtattatgtttataatatttttaaagaacttgctaaagaattatgtgttacattattatgagtaagttaaaaaaattatatgctaaaagtgatgtgttattagaagaatactcatcattatatactatattgaatgaaaaacacaccaaaataaacttacaaaatttatacaaaatggtcaaattaatacaaatatatatgtgaattaatgtcttatttgaatagtttgatcaaaaacttaaatgataatagtatatatatatatatatattatattatattacttaaattaaaaatctgaattgtgaacttaaatggtaatactttatggagtaaaaaatatatgtttgaatcatctctcaaaattgaatgaaaatgcatttacatatgtatatgatgatatgaacgaaaactttaaacactactatataatcataaccttacact

SEQ ID NO: 207259 - DNA, 595 bp, Cannabis indica
tagttactttccttacggtttttcctatcttttttctggtttttcttgtcagttttcatagccaacttcaccatatcaattcaattctccattcctaataatcaatttctacctgtatcatggatccattaacccataaaatgaaaggcattatcaatttagatgaagatgatgaatctgtacttgcttttgatgatgacgaatctcccaacttggaagttaacgatgaccactgccttcttgctcgagttctcactaggaagccagtctatttgactactctgcaaaaacaaatgaaaacacactgggatggacggtttccttgtaaaattactgaaaaggagactgatctctttatgctctcattcggctgtgaaggtgatatggagagagtccttactcaagagccttggcactttcagaaccatcacattgtcctcaagaaaccatctgcacttcagaatttaactcctactgatctcaagttttcacccttttgggttcaagtatataggctaccttttctcagcaaatcaagggggttagcaaaggctttgggtaatactattggggaattcttagaagtttttactga

SEQ ID NO: 207260 - DNA, 1002 bp, Cannabis indica
caactgaggtaagaagagtgggcatctgtgcacagagtgtaagtctatgcatacaacttggtttagtttgctatttaatttgattatgtgttgtgataatttcagtatcgttagcatgagaatagtgctagggtctttctgcttgtgcggcataacacttgcaggagtataactttatcatgagtgagtacagcttatggtatgtgattgtcctgttggatgccaagtgttagaataacgcaaggcagggtaggttatacctcatgtctaatcaacatgagggtataattgattatcatacgtgagtataatgtgcgacattagactttgatttatgcatgttagaacagtatgcattgtgattatatattatggaatgtgaattattattgattaatgttatgagtaacttatgtcaagtatccagttaggaggatttttcttactgggcgttagctcacgggtactctttgtgcaggtaagggtaggactaagcagtgagaatgaagagctcgaggcgtagactgcatattagggggctggtgcagtattttagttttaatatttttagttgttaaacattgtggatctaatattttgatttaactagtttttattacagtttacggatactaaaaatattttgttttaaataatgaaatcttatgtttagttattttttttttgttataaaaattattttattaactttatcttattaaattgttttgtacggactatcgtgtgtacatctcacaaaatcagagtgttacatatatataaaactaaaaataaaaaaattagggaaataaatatttagggagcacatacattttttaagctcaaaatcaaatatcaatggcgaacctaattttgttggtaaaaatcctcttgtaactctaatttttggagtcaagaatacccactcacaaacactatttttttctcactcaaaacgaaaaataaactactttttatgaatgtatttgagtttctaatgtg

SEQ ID NO: 207261 - DNA, 959 bp, Cannabis indica
gagccaaaggtttaagagcactgagatagtggactgcatttgcgatatgtgggagaagcccttgatgtgatgacatcgagattggagatctatatggtagcttgtatcgaaagtatacccgatattatggtggtcaagcggtgtttcacgttgatgattacgacaatacaagatggagatcaatgttcatggcttgtgttgaaagtcttcttgataaagttgatggtcaggcgacgagtttcgttggtgataaattcataacaacagcacaaagtggtttcgctgaggggaggccacaagtatgtggcccttggtttgaggggaggcaatgagtcagtgtctagcagagagagaaagagacaaagagggggcgacaactgtgtgtgagttagggattttctaaatgggcacgaagcccatgtatttttgtaattttttttaagtaatttagcattggttttgcatcaatgcaaaaaactagcaaactaacactaaatggtgcgtctaagtaaaattgacgcaaaaatcaacccctcatttgtgtaatttttttttataatttcatctttagcgtcaatttttgttttagtatcgaagtaacaacttatgcaaattaattattatttgcatcagttaacaaccgaagaaacaaagtgagagttgacttttgcgttgattaacgagtttgaccagacacgttgactgacgcaaaaatccatttttgtagtagtgaaaccttaaatgaaatgggacatcttagtttagacagagggtccaagtaatatcgcctggtattgagcgacatgtcacttagaaggtgcatgaaacatgcaaaaacacgtaaaatgggaaattgatcaggtaatttaggcgacatgttgcataaggcattctaggaaaatcttcaacatcaggttatttgtgtatttcaacttaaaacttcaaaccaaatatttaag

SEQ ID NO: 207262 - DNA, 602 bp, Cannabis indica
attattatgttagcgacattgtgtagatataatgtccaaagtttgttaagtaaattgaaaaatcaatccctaactatacatgaaccggcattttccactataatccaaagaaccagtccattaatccatggatttcttttcttattatatatatatatatttatattgtttttaattttcttcgattgtactaattaattattattaaaataaaacttatcactatcataagatatatagataaggaagaaaacataggattaatgagagtatatacaaatacaaattattattattagttgataataatgtttttaaaatcaacagaaaatattgttccacgtcgtaacgtaacacttgattatatttatatggtatgattttcttatgtgatgtgacattgatatatacgtacgtataatctttttttttatttattattattattaaaaagataaatattatatttcttaaaaataataataataataataataagagcaaaagttgtgattagtcaattcaatagtgtcatgcattgtgtgaattgttctaactactaacctataaagaaaataaataaacatatctttatattgata

SEQ ID NO: 207263 - DNA, 992 bp, Cannabis indica
gagagagagagagagccgaattctctcaacttttaaattcttagtacaatagtattgtttctcttttttggcctgtcttactcttaggtgctaaggaaagaatttcatctcagtggattggtttggaaggtcaaatttttccccacatttttttttggtggtggagtaacgcaaacttggcactattggaatcccatataataatatgccagaaaagaaggtttaagcatttggggaacaagggaatctgctttacatcaaccccatgtaaaatgagattttactactagtcaatttctttatgtatattaaataatataaaaatagagcaccctttaaccaagatataataataagaatatatatatatatatatttatgacaccataataaagagaaacaactaatacagaatcaaaggaaaaataaaccaactataagtttaaaatgattcatacataatggatatcccattcccacgcactcacttttttttcttagttattataatttaaagggagcataaaatacaatataaagggatatatattaacaccaatttttttaatcaaattaactcaccattttttgcacttgatcactcttacacatctcctcaagatcagttaatataatttctttgcctggtatggtattaaatagtacaaaaaaaaaaagcgctcaatttcttatactataatacattattattatcatttagtgactttttagacatcacatatgaaatttctatgactaaaaagtaatttttatttatagtaaaaatattgtgaattaaaaataacatttaaatatttaaatattttagtgaatgtatatataatgatgttctttatttacaaattgccactaagaatttttgtagtataatattgtagtattatatttagtataaaaaaaatatatatttttttgtatgttgtattttgtaaaaaaatattgattgaactatctattttattgaatgataa

SEQ ID NO: 207264 - DNA, 728 bp, Cannabis indica
aatcacaagttgactttttgttgtagactaaaagtcccatttagtcattacaaaatttatattgtgagtaaaaagttgtacactaaaagttattagtttttgtagtatttatttattattatattattttaattttgaataataattattatattatttttattttaattctaaagtttttttatttagtaaaaaaaaacaaataaaatagtcgagtctattcttaaactaaatacaagattactttcagcataatccaatcttgtctaatctagtccaatcttacttgaccctctcagatgtcccacaatatttttttcccttatgtacttactattcataattaaaagagcaaaacaagatgtgaatatagatgatgaataatatttggttatatgatgaatttgttattcttttttcataaatacctaaaaataacaaattctttacatttttatggatttattttattttttgtaaatctctatggattttattattttttttttacaaaaatgtggagtgttatattctattattttaagaaaaatattattttgaggttgttactataggaaagcaacataattttgttttacaataataaaaaatatgatttttccattgtttcagaataacgttattttgatgttcctattaccaaaaacaacctttttatttggaaaaataaataagtgaaaacttgtacaaaatagaattcgtaaaaa

SEQ ID NO: 207265 - DNA, 599 bp, Cannabis indica
aaaaaggaaaaaaaaaataatataagcacactaaatatgactaacataaaatatttacatttaaaattttcttatatagaatatctataatattttaagtattttaaatttaaattaaattttcttacataaaatatctgtataatttttatctacataatttttatttttaaatattcataataatattataaaattaataaagaatattaatattctgttaaaattaacgtaagaaactaaaaaaatatcgttaaaccaaaaattctgttatatggaatagatatatttttaatatgatgtacacaaagatatttttaatttagtagttttatttgtcatttaattaaagtctatttatagttcacgtcaaaaaaaaaatctatttatagttaatttttttaataatctaaaagtattctatatatatgcttagacaaaaatgcaccccacactagtgactagtgactagtgactagtgactatatgtgtaatatactgcctaaaccacactaaaccacacattatatagccttatagatgttaggtgttgatttgtaacttgaccaaaaactttttaagaatttatatatatatat

SEQ ID NO: 207266 - DNA, 847 bp, Cannabis indica
ttcaccatacactcctgtaagtctccaatgctcacgggtcccactagtaacaacaaagtcaatatggttttgtgaaaaaccatatatgtaaccatcattttgtcttttccacaaaaaagctaagccgccacctcgcccctgggcctccacacaaaacaccccctcaaagcccaaatatctcccaacccaatctactctactttgcacatacttagtctcacacagaaaaataaaaacgggcttcttatgagaaacgatctcttttaagaattgaacagtccatgggttcccaagcccacggcaattccagctgaacagattcataatccttggcgggcctgtgtaccagagcccgccccaattgagttttttttgcatcagcgatgtatcatactcacccatcacgtgatcaacaccatacacttcatgcacatcatctcccacaaccgaatcctcctgagacacctcatcaccacttcccatatttattctccttcttttttggtcaattaccaactgcctatcacttcccttctctccattctctcccattatcatctttccttttttatccgcattcaatcccccctcattcagctcaccattaatatgcaagatttttatctcctccctcaatctctccatcaatcactcccgtaccaaccgcccctgattgcgcttgaggattgccagtcgacgatctagccggcgccggagaaacagaggactccccaccatgtttaacagcaatttctggacgtaaccacctcgcgccaatggtgtgtgagcgtctcctaggcgctgctttcagacccaaatcataggctttaaccagtaggtgtggagg

SEQ ID NO: 207267 - DNA, 639 bp, Cannabis indica
ttgggaagcaatctaagttttatttggaaaaatgtgctagaggctcaatctttgaattaaaaaaggtacaacttgttgaattggttaagacactacggttgatgtcctgaattatgaagacaaataagtttactcgtgggtatcgattgtcttattgttgtccaagtcattcaaagctcatctaccttgctctcttattttggtagaattatacccgagtgcaagtgcttgtttattaaagggtttgcaaataatgtggcttactatttagcgagatctactgattttttttctgatcgtattttgtgagtgaacaatgctccctcaaagttcatttctgtgttgatgaatgatttgattaattaatgaagtgttattctgtttttcttaaaaaaaatagaaacggaaatgtttttaccaataaaaaaaaatagtgttctcgctataggaaaacaaataagtttacttgtggatacctatgagtaggatattatccgttgaattatgatttaagataaggtaagagtatgaaaagatatatatttatgtaattatgttatgtgcatatttttttagggtgttatatgtatatctgaatattatttatttagttcatatttaaaaatcaaaaaaaaaaat

SEQ ID NO: 207268 - DNA, 800 bp, Cannabis indica
atgatgaactttttcattttactttgcatattatattatattggatttaataagttgataaaaaaatatatatgaataaaaggatttattaccctttttcaagaaaaaaataaaataaaatgtatatgattttataagatttagcataattatgaatattttaggataaatataatatttaaaaataaacacattacattttatgatgagagaaagagagagtataaattataatatatatgttatatgcttgcctttttagtggcttccccttgttgttgaagcaaaataaaaagaagaaataatgagagaaaagaagatgaaacaatatgatccatatatagtttttctttgaagctatatgaaattatttcatactttcccataatatatatagtgatatatattagagagaagccattttggactagtgtgaaaagaaaaagaaaaagcctattatatattatgaattgtatcaataaaggcattatcatatgatgggaacatccactaatttttttattggcaatatatattatgatagtattagtaagtatatatagcattatcatgatgggagcatccactagtttcaataatagtatttgtaaaaaaaaacaatattagtaacaatattaactaatcaattatatattatcattttcaattaattactatacataaatataaatattattttgtaccttatatataatttgttaaatgataaattggattatgtatcttgaactcaattttcttccaaaaaaattaaacgtaagccaacgtgaatccatttc

SEQ ID NO: 207269 - DNA, 1158 bp, Cannabis indica
ggagtaaaaattctaattagcctgatactaattataaattattataaggggacgatttttaaagatctttgtatcatttacttattttgtaatgatagtaaagaagcaaagatttgttaatagataattttgcggccaattacttcatctaaacttttttttttgaagaaattacttcatctaaactaatttcatcccaagcactataatttgtcatagagtatcgttattgagcatcagtgttgtctagcactttttaggtgtgtcgtcttgtgattgtctagcgaaactttctaaaaattattatattaaactatatgggacctaatacttagttaaacaaataacaatattaacacgtatgagagtactaagcactactgataccttttaacatttcttcttgtcatattatatataaaacaaattaaaacaaggcaagctggaattacttctaattctttcaatatatattttatatatagaaaatccaaatcatttagttttattattaactttttattttaaacatgctaataagtagaatttttatttaaaaatattctattcaacaataacttttaatttattataaaaaaataaatcttaatttgggccaatcataataagaataacctttaaattgtaattagttgcacattttttaagtcccttattaaaaaagtatatctctatgtaagaataattatactttgataaaatatatacatatattttataaagactaatttggatttttaccccctaaactttgacatgtaccaaatcatgccctttaaacttttcaagtcgttagaaatttttctcgaactattgaaattattggatttaaggaattttgtccaattttactaaagaaagtctgacgtggatgcaaatttagggggcacagttcggtacatgttaaagttcaggggacatgattttgtaaatatcaaagtttacaaatactgcttacaaataccttcaactcacaatctatgcttcctgggattgaaacctttatgtgatacaattttcgggcaaccatccagcaagctaacacaaccgaaacaaaatttaaccataaagaaccaccattaatttcagcgacttcacctgagaaagcgatcggaatcaatcaaaacatgggttatt

SEQ ID NO: 207270 - DNA, 1547 bp, Cannabis indica
agtatagcataccagtataccagtaacagtataccaagaatttttcattacaagaccacaagagcacttacaataggtttaatattatgtgagagagagagagtgttacagatgtaaacggttacaatagcaaaaacaaagaaataagcatctcaaatgaaattttccatgacagggacaaaaaacaatgtactgtaactaaaaacagtagtaatgaaatttgactccataaaaagtacccataaatatataaaagaaaccatcgcaatacataaatatgccctcagagaagaactagagatatcatgtacatggaaaaccaatcacatcttcaaggtttaaacaccactacttcaaccaccattattggcattcaccacatccaatagacacaagaatcatcataatcatcgtcgtcgtcaccaccaccaccaccacataataataataataataataataataataataataataataataataataataatagtaataataataagggatatttgcggcaaaagcaccttttagagatggtgtgtaccaaagatggtgggagcagaaaagatggaggctaaaaaggaaccaatgcacacatcaataaggtaaaaaattacctcatcatcgggcaatggtttaatatataactaacaaagatagctcatagctcttatggctcatatgaatcaataactattaactatattatagactagcataaaaattaaccatcaattttaattaaaaccattttgtctccaaatgagtttagtgttagaggccctatagataatctttaaaatgtaaaggccctacagatcttattgcaaaaatcttccaccacatcaacttgatgcttatcaccagtgctaggtatacaataaaaccacctgaagatggagatcatcatcattagtcattaccaacaacagtaatgagggtgatgacatacacattagtatgtaccaaaacatcaaacaaatggggcactggtggcttatgatgataatggtgggagcagtaaatatagctgattgcaacaaaatgtcaaggtttaaaaaagaaaaggatttgacaaacatttgagcagctaatattaacatgaccccaaatgcacaccaattaactcctgcaaagtagctgacaaatacaaaagcgaaagctacagttaagaagcttctagatcctataaaaaagaatataattcaaatcaagttcttctgtaacacatctgattaactagtatacaacaaaagaatattgtcaagaaaaataaatcatgaccattcaaatgagtatatgatcatcaacaaagccctcagatctcatagctaatcaggtcattaacagtaaaacacgaaaattttcataaagagccttcctacactgtccaaccaccctatgagagagagagagagagagagagagaaatatatatgtccattggagatgctcttagagtagagaagccattcgaagcattcttacaaagatacagagagagagagagagagagagagagagagagagagagagagaga

SEQ ID NO: 207271 - DNA, 1146 bp, Cannabis indica
attaaaaaataaaattattgaaaattcagttcaaggtcctatttttatcattttagaaaaccattttgttatttaacaaaataaagagtccaatcgataacttttgtaaaacacaggatctaaaatgatatttaccctaaagtaaaagttctaatttcagtgtttataataatccatgtaaataattttattgaaatcgtaccttttgtggttgattagaattgaaaaaatgagtcaagggaatccaatcacccatcataactcccatgtaaggttttctattagctttctcaagacccaactcaacaacatttttcatccaccatactttcatctcatttctcctatcgtgtaatgcctttctcataagtgcctcgatttcatccataacaataggattatcacgtggataaataaatttggtctacaaaacaatatttatgcatcaaatatttatgtaaaagataatttaattttaagtaattcaaattcaataaattacttacctctaatctatcgagaatggatgtaatatcagtttgaggaacatctttccaaagaagaatggatggagatatagtaattccaacagacacataaagtgtgtaataaaacatcttcttatgtatccttacatattgaggagtagtcttatcaaaggttatagttaacctttgtaccttaaatttttttaattcagctttaactgccttttcaatgaagtcttctctaactgtccatgtcccctgaaaatcgctaccactatctgaatcacttgatgaactcgacatactacactcataaaatacccaagttggttaataatcaaacttcattgaggaataacacatttatcatcactatttgttagagtgttagctcctaacacatttaaaaaataaaaataaaaaaaagtagaaaaatagtaaccagttacccttaacgagttaccttaccatatttttcttatactttttaaacctttttttttgttttaaattaccccataaattcactattcactttcagtatacattgctctgttaaagttttctatcttcaaagtttatcttcattaacataaggcaaatgtccaacaaaacttatagaaatcaatacatacattttcctaactagagaaatgct

SEQ ID NO: 207272 - DNA, 750 bp, Cannabis indica
tatttttttgttatcgtagctatgttttagtttttgtttgttgttttagtatgttatttagatcgtcttttttccgttagttacttttatcttaattttcttaatttgttttacgtatttatttttaataggtaaattagtaaaaataataaaaaaaaaaaaaaaaaaaatctagtaaacgtaaaaatataaaattttttacaaaaaaaaaaacggtgtttcatgtaattatccctagaaattatcacaaatgatgtaattgtatattagatgtgttataatattataccatttggaatacccaagaatatataactataaaataaagaacacactaactgtctaaccgtttttacttatatagtatcaacagagaagacttggagtcccaacccaaccaattaaagagattgaataaggaagatgcatgttctttcttttcttatgagattatatatccaaagattactagccattcaagttggattatatgtaggaattattattcacccacatttttgatagtttagtatcgaatctaattgcccacttaatccaagcaaaggagaacaactgttgagatgttaatgctatcctaatgaatattccaaatatgttatatatcatgagaaaggcttagtaggatttcttttgtgtgtacagaggcaaatagagttgttcatatattagttaatcaaattttaattaacaaacctagtgctatacaatgagattcgcctaatcttttgt

SEQ ID NO: 207273 - DNA, 522 bp, Cannabis indica
aattggataacatttgcccctaatgtctgggcgggaccttctcggtcgcacgtggactttactcggtctgaattcttgtttgaacaggtggcacgtggcagtggtgtcgattgatgacccaatgtgactctgactaagagtcttttcagattcggctcattaatgccgattaaaaattttacctcgaaccaagcttcaaaatttgcctgtgacgatggttattttgcaagtaattgagtgcataacatacacttttgggggtaatttgagaccttttaaaatttgaaatgattactcttcttcttcgatctgcctataaatagggttgaaaatcataactaatcaattttagccatttttactcttgaagaatcagagcaaaaatccattcactcctaattcctttgaagaattctcagaaaacaccatctggcgtcgtccgagtagatcaaaagctttaatttagtgagtaagttcttcatttcttccattttatatgtttgcatgtttaattttttgggt

SEQ ID NO: 207274 - DNA, 915 bp, Cannabis indica
aactttgaagctctcagaaaccaattacagtgttcaaccacacaagtgaccacatactctcttggttcagatcttttggttttaaattggagattgttgatcatagcaaaaaaaaaaaccacaatgcaaactttcaatattttcatgtccttgtaaatctgtcatttttcaattttgaagactttatgatttgttattatttctctttattcttcctccattttcctcttattctcttgtattttctcaatgatacaatcaaccacactatcagctatttgaaatatgtttggtaatgccagtacctcgcttatttttgaagtttcattattgtattgcctaccgtcgcatgatggctggttggttatttgtaaaaccaatttttgaacatttgtgttttgtgttatagcttcattttctgatgtttgttgagtaatgatttggaatcttgtctcatctatagttgtgatgtaaagtggagactcactaactgcattctgtttctttctgagttctaagtagaataacagtgagttgttacttgttattttcatttgtggtgaccctggttataactggtaatgcatttttattggagtgttgcatttgatttcattctttaataattctagcaaactgtttaggatacaatttgttggtattagtagttcactcattatctagtctgcatattttttctcctctttcattgcccttcacattgaaccacacacattattgagtctattcctgtaaaatattgaaaataaatagttaaaaattatgatttattatgaaaccaattagttttttttttttttgttttatttttgcaaattatatatttttatttcaccacataggtaagaaactagtttttaataagttttctttttgtttatgtttaatagataa

SEQ ID NO: 207275 - DNA, 1333 bp, Cannabis indica
atagtcgatattcagcccacgagagacctgctccattgctttggattgtccgctgtaaacgcccgaaggtattgctccaaatatcgattggtgacttccgtttgtccatctgtttgtgggtgatatgccgagctcattttcagctttgtacccataaactcgaacaacttcttccaaaaagtgctagtaaaaattgggtctctatcggaaacaatagatcgaggcaacccatgtaatcggatgaccatctgtgaaaagagatcagcgactttggtggctgaataatgagtcggtaacgcaccaaaatgagcgtatttggtgaaacgatcaatcaccaccaaaatgttagtgaccccataggaatttggcaaccccacaatgaaatccattgccaagtcctcccatacacgttctggcacttccaatggctgtagaagaccgtaaggagcagcggctgagtatttaattgtttgacaaacaatgcacgcttggataaagctgcgaacttcagatttcataccgggccagaagaaatttgcactcaatcttaagaatgtgcgctctacccctgcgtgtccccccatcttagtctcatgaaattcccgaataagctattgtttaagattggaatgagagctgactctgatgcgctgtttgtagtacaatagtccctcacgcactgaataatcggtcgtagacaatgaacccgtagctagttgttcgtggaggtgccgtagctctggacatgttgtgttttcccttctcaattcatccagaaaatcaaaggtaacagaggatatagcagctgtaagaagcgaaggagcagtatcgtattgccgggagagtgcatcagccgctgaatttgttttcccagccttatattcgatggaaaaactgaacccaatgagcttccgtaaaaagtgttgctgttcgggtgtttgtatcacttgggtgagtaattcttttaaactacgatgatccgtgcgaatgacaaagtggcgacctaacaagtactgtcgccacttagtgacagcttccacaattgctcgtaattcttgtaagtatgctgatgtacccacgaacctgggacccaatttcttgctgaaaaaagcaattgggtgattatcttgcattaggactgctcctatacccacatttgaagcatcagactcaatgacaaacactttggaaaaatccggtaagacaagaactggagtctctgtcatagctgtcttgagctgaataaaagctaactcagcttgtgtattccacgcaaaattatctttcttcagaagctccgttaagggggcagcaatggttgcgtaatgtgcta

SEQ ID NO: 207276 - DNA, 854 bp, Cannabis indica
tttgatgataactaagtaataaagttacattaaatttcttatatatatagatagataaatagataaatagataaatacattcatcttggatttattatcaatttttctaacatataattctttttctaaattttattatattaaatttttataaaatatatattatttactattaaagttattagttatttattattaaagtgtatcaattattgattattagagttgtaaagttattgagtgatttaagttattaattatttgaaataacttgcgttcaagatctactgttgccatcaattacatttgacaagataagtgttctctttttttcacttagaacgactattattactatttattaatactgtttatttgtagtgaaaatctattataaactttgtaacaatgtttatttatttgttatttttattaattttcctactaatgtatttattgtttattattagttaaaatattttttctcttcaagtgagttaattctcacaagtacaagattctcacatatatgctgttaagatttcctttatgtcgagagttgttccttgatgggttttttcgtttcgtttgtagagagtgttactgaagttgttgattttgtccattcttttcctgatagtgtttttgattggagttgtttttttagatcaattaggtctttgttatctgtttttttgggtgtttgtcttctacatataataccaaatgataataccgtaacacatgagttaataagatatgtacaacaaatagaaaacgaagttttttggttgaaaaaaaattcttttttgtttaataactaataaattgtgttgtttatttcagtccttaat

SEQ ID NO: 207277 - DNA, 800 bp, Cannabis indica
aggaataacatttaagcaggttaatctctttctccaattagattatttctttctcagttttatttatatacgtaattatatatttttggttgaaagatacttgtatgtgtagcattggatctagtcatgcttaagtatgtcaaccaagttgagtactgtttgacttcaacatttcctgccttatttaaagcacaatgacatgttaattttgttcagctgacagctaacacattttcaacatttctgaaattggcatagccttatacatcctcatgcattctttggtcctcttggtagcaaagttttctttagtgataatgaattatcattcacttttcgatctagattctaaccatacagagttttcttctgttctttctttacttgtaagaatttgtaaaaagttttaaatgcacctcggttcaaacagcaaaactgcattgctgcttgttgtgcaattcatagtgtaaaaggtttggattattgctgtttatatggcatttacagaggatacagatgaaagtgactaagtcacttttaaatgaaaagaggatagataatcatgttcattgtaactactctaattagctctcatcctccaattaatgctagaccttagtaatctgagatatgatgtaacgtttcccttcccttccaccacaatgtatttttgctaaaatattatgatcattgctactaggtactaacctagtgttcaattctggattggagctgaaattctacggtggtagaaatttggctccctccgatacttgtctttgcaagttttcattttcatt

SEQ ID NO: 207278 - DNA, 566 bp, Cannabis indica
tttttaaaaaaatattttactgccataatcttttccatatatatataactttaacagttaggtaataatactttataacttgattccctacactagattttttatccaaaaaaattattgtaacatcctttataattaaaacaagttgtaactataataattgtagctccttccatgaaaatgttagttatgtctctagtccttacactaccttatataattttattattattattattattatttatttatttatttttttttgtagtaaccttacataaatttatataaagggtattatttaagtgagaggatcatttttgctcttatatatgaaggtattttttaaacttttaatttttaatcaaatattgttagtgtcatactgtcattacttaagatatcacacacggaaatatgattattgatattttttatatattttatttttaaaaaatgttggcagttatttatttaaaagaaaaatgttggcaattactaaacgtgatactcatttagtgagttatttttggagctttaatctatagagttattttttttttttt

SEQ ID NO: 207279 - DNA, 887 bp, Cannabis indica
taatttttttgtaatgaagcaaactttaattttatttgtgtagaagtttatggctatttattttaactagttttttttaacaaaaacttcaactgaataattaaagaaaatactaaaataatggttagaagaacattaaagtagttttctacaaaaaaaaaaaaaagaaaattaaagcagtgtatatttatcaaaatactaccgactaattactagaaaacgaacttatcaccaaatctgactcaataaaataacactaaaacaaatgaactagtaaatatatataccaaaaagctttaaaacttcttacaatcccaaaaaaaaaggtccatccaaaatcaaaaaaatgatagaggtattgccatataaaaagaattcaataccaaaaaaaaaaaaaaaaaagttgcatagataaataaaaaataagatttcgtctcccaatcctttttaagaaaggcaattttttttagttggacaatttaacgaaatgcaacaaaaagcaatgtatattttatcctgctttgatatacatgttatcattctgcataccaatatttattattttaattagtaaacatcgcgcggatatataaaatattttaaattatatataaaaaataaattgtgtattttaattaataataattacttaataaaattatattaaaatttttattttactattaaaaaatttgtaacatacatacttaaaatattaaatttgttccattcaaaaaaaatatattaaatttgctgctaataaataccagaattcgaaaaatagtagcataaatctgcatttatgttttaattttttattctgatatgtgtgttaagttctgggtttgaattttattgtatgtatttttaatgtttgagttttagta

SEQ ID NO: 207280 - DNA, 1162 bp, Cannabis indica
gcgagtgccttcttcatggtaaggctatgaagcttaaacatgtctaacactccaatccttgtcacagcctggaggagaggcagagggctgagaaaaagaaccgggaggccagtggtcatcagttcacaccaagatggtttgaccaaactgatgaaatctgtcctacaccatggggggacttggaagtatatgcctacaacggcaagtataccgaacatcgggccgcaatagaaagttcaagcagcgatgaagtaactgatgtgaaattaactgagtttaacccatggcaatatgaaaatttggcttctgcatcatgaagctttctttctatcttaaattaaatgtacgccttcatctgtaatatattttgtttatttgttattattgatttggctgtaatgtaaggcgatatcatgattcatgatgcagtagttttttcttttctttttctttttaagatttgataaacagttttgttctgttttctttcagattcaactctcatttttagattcaatattacctgaattttattttatcaatttggaagaataccaactttatagtatcgagttggccagctcttcacttctactagtacttattgcttggttggaggtcaattttgagtattattttattatttttttttaaaagaaatacattcaacagggattgaggaacaagtcctaaaagttcaaccagaaataaagctgcatagatctcacaagcactgacggaacttttggtgtttgctttgcaggggccatggcagccccctaattactttgatgatctatatattatgtatcaatttaaatatatatttttatataggtcttacaattatgtaataaattaaaaaattcattccaagtgttttgtttttctgaagtatttactactgctataagaacttatgaattgattcagttggacatttaagtggcgtttagataggaggaatgaaaatatagaaataagaatgaaaataaaagtaaaaatagaaataagaatggaatcaaatttaaaatgtataaaaaaattattaaatttctttttatcttacattggaatggtcatacattctattttaaaatggaatagtcattccatcaagatgatggaaaaattattcaattgaaatgacattccaatactt

SEQ ID NO: 207281 - DNA, 657 bp, Cannabis indica
ttttgttaattcatctcttcttggctattcttagtaaaagtaagaattagaaatgaagtgctcaggttatatatttaaaaatctaatttttatcattatttttatctttgattaccaatcatttccttcaattacgatttcgaaactgaaattctaacttatatatttcaatcagtacaactttcgacttatcatattggtattttcatgcaaattcaagaaactaaaaaattaatgagtgaatttctgaaaacagagtaactgtctaacatttttttcaagtaacaggtgatataatgagtttattcgaggctctgggtgtttcttccccacctatgaattccttcttcttcccaaacccagctcccaccaacaaaactagaccagtatctaagccatcgccaactgttgagaaatcagatagagatttacaagccagactttcaagttcaattgctgtacacaagactcaaaaacaaatattagttgattttttgcgtgattctgcaaagaaaagaatcttttagaagctacacgagctgttcatggttttgtgctgaagtctgggtttccagatacagacttggtagtcctgttaaatcatgtattgcaccgcttattcgaaatcgcatggactttgccactgctcatcgagtg

SEQ ID NO: 207282 - DNA, 543 bp, Cannabis indica
  modified_base (64)..(64): a, c, t, g, unknown or other
ggtttgtgggtaaaggcacacttggccacatttatagtcagtaaaattacaaagatttgggganacaaataaaaatgcaaaccatcaaaaacatactagagagtctcaaataaaacaagatagttctcgatttcccaacagaagataaaatgatagaggaaattaatcaccactccttgagtcgctctccacaatgatgaccttgtgcccctttgatcttttgccgtttcaatagctaagcaacacacagtcacctcgccacaacaagcctccgaaaactccaatatagccgtattaacccacaccacttcaccagcggtgctatcgctacttacattgctaattttctattgcaatatagagtagctcaaacccatgctaacctgatttttgtccgaccaacaaatgttccaacacctcaggtaccatgtaagcctcctgcaaatttgggtttgaaactaaacgttgatgcaattgtcaacatggttgctcgtgttactggtatgggtgttattgtcagaaatggacatggccaagtgattg

SEQ ID NO: 207283 - DNA, 1254 bp, Cannabis indica
aatttttgtgactttactagaacaaaaaaaaaaaaattaatataaataaataaaacttttgttgctttttttaattttttttttaaaaaattgtgctttaaatatatattagaaataattaaataattgttgttcgaccttgtaaggcaagaaattggggatatcatccacacatagttacccacatataacatctgtaagaacttttcacatttacctacacatatggataaaatatgtgtggatagttcaagtgcaggatatttaagtatttgatgaaattatttgtagataattattttcacctatacataaatttggcagtatattttccgtccattttttcttaataaaatttcaatttttataagatgaaaaatctttttttttttatttcagaattttgctgcatcaaaaggacttggctgatcatgataaaaaaaaataataacaaaataaacatggatatgtacacagtatcaattagacagagagtactttattttattttatattatgtatatttgattgattaatatctctttgagctaattaaccttaatcacttgagaaagccctaaattgaatttcaataaaatggaattcaatatctttacaaaaaaaggaaaaaaaaaaaaatggaactcaatatagatatatacaaattgtttaaacgtatatttattactgatctgccggctggtatttgtttgttattgtttccacaatttttttttatttgacatacgtattaattgggtttctatatataagaattggtccagtactataggtaattacgaattagatactagatggtagggtcgacaaagaatcataaatataatttggaccacttgaatgaaatgagatgatcaatttcaagtgtaatccctcaagttacaaatactatctaaatattcgaatcaatttgattagatattagattttctttttgaaagggattagactttagatttggagctaggtttattattaaacaaaagaaataaagaaataccttaatttgactcataagataggaaatcccataacataatatcattgaattctaataataattttgtggggaacataatactactatataattagatcttattacaaattttataagtttttatagtgtaaaattatatatttttttcagaaaagttattttatggaaaaaattttaacaaaaatttaaaaaaagttatcatgtaactttaaggtaactagagaggtaaccaa

SEQ ID NO: 207284 - DNA, 544 bp, Cannabis indica
aaaaaaagactcctcttctagacctttctgccattaatacatagaagaaaactttaaaaatgtgagagagcagaccagaccaggcacgcgggggctcgatacaactcgtagagactcaaagaattgggattgagattgctgcctttattaaagcaattatgaattagctctaaattgtttagcagtattcttgtatttttatttttactaaagcatccttcaactccttcccatttttttttctttttcaaacaattttttatcgttttaatagtatttatatttatttgtattttaattaataaaatatatataatttttaaaaaatatttatttatttaaaaaatttatgtattttaattaaaaatttaggccaaaatctacctatgaagtaaagaaaattttaaattccataggattaaaatatgaaaaggtccatgcatgttcgaataattgtattttatatcgtaaataatatacagacatgaataatttccagcttgttgtttatcgcgccataaaagaaacaagagtaaggagaata

SEQ ID NO: 207285 - DNA, 550 bp, Cannabis indica
attctattacattctccaatataccaaaccaaacatgctccaaatgaaaaaggtgtaaagaaaacaaaacacaatgaaagaaaaaattattattaaaaaatatttgagagatgaataatgttgtctaaatataaatagctagagttaaaatacataaatatttgtcggagtgcgtttttctttcttctaaagtttgaagagtattatttttagagagagaagagactctttagcatcatattttttggctatttacaaaactttgagaaaaaaatgagaaaatttaataaatatggcatgaaaatttaatgacacaaaatatgacattttctaacaaaacaaactaaaaatataggtttataaatagaaaatgtcatacaaaacattaaaaaaaacataatcattttttgaaatagctctctctcatgcgataccacgatcctttttttttctctgttcttcgatttctctctcgtgattgcttcgacaatcctctctctctcctattctagtcaattttactattgttcttctcctgcgattccaaatt

SEQ ID NO: 207286 - DNA, 1967 bp, Cannabis indica
atttaaattagtattttaaaataaaaccaaattcaattttttaattagttttaaagtttaaattaaaaataaaaaaatgaaaaagataattttacgagtattacacaataattaattagttggaataattattatatgatattataacatgaatattatacttttttagttataattattgcttagtagaacatcaaattaattaaaaattaatatataaatttaaaattaattaattaaaattttaaatgatcataaagtaaatatataagtaagaaaataatagatttagagttttattagttggatttaattaataataatttaaaaaaattaattatgttgtagtttttaagaattaatttaaaatatttagctaaattattaataataattattaaattaaattatttgaaacccaaatacttaattcatacttagtactagtggtgcgttttatagcatttgtctatattattattcaaaaaacttacaagtatgttgagcttgccgtaaaaaatggttgagacagtgttaatgaggtcctccctttgggctctaacacttaagtcacaaaccgaaccagtaacctcataacctttgctcttccattcttcaactctttcgttcaactctgtttctgtacgagaacatgtgtgaactgttgccccaagtccagctagctcctctactatggcaaatctaataagaacacagaaaaagttcactaaaattaattatagactaatatatgactgaatttgaatataattatattttaagaagtcaataaaataaaaggctaacccgatgcctttcgttccgcctgtaacgagggcggtgaggcccttgagagaccatctcttctcactgaaactctcagttacagctgccatgttttgtacgtgttgattattttattttcttgttttgactttgatttttgtcttgaagtgttccgcactatataaatacgtgtataaattaaagtgtgtgtaaataaataaaacaactaaagcagttgggttggtgcgattataaaaaatatatatatatatatatttatatatattgatttttttaagaccaaaactcaaaagtattttaaatcaaattatattaaggtatatcaaacttatatgattttatgattgtatgaattatcaattattgatatgagatatatgtacactaatattatttcaatagttaaaaaaaaattaaaaatcaaaatctcaaattttattttaaaaattaaaaaatatatattatttaattaaaaaaattaaatatacaaatattacacttattattatctcactaaaacctagtatatatatatagggtaaatctattgtggggctccttattttttccgcatgctatggggaaagaaattgagccaatcagaagttaaagaaatgtaagtgttgataatttttgttaagacatatttagcagattttttatatttgcagctggtgggtatagtgctgctggcagaggggctgaggactcgccacgtgtcgattgaaaactttgtgagctttctgcctttgtttggattgcatatacaaacggttttgtttgttttgggcattgtatttgcttctttttttttttttttctttccaaatatgccatacaatgttgttttccctattaaattaactaaagattagaatatatgcaaactaatttttttttaactttataaaaatattagctagaattcattttatttagtattttcacattaaaataatatattttctttatcattaaaaaaacaaacatattttaaaaaaatatgtatataattttgaaaatgaaaaaaatattaatctgtcataaaatatatcaccaagaaactggttccttcatcaagaaaccggttttttggaaattttttcagtgatttttttggcgacaataccaatttcgatgacttccagtgtcagcagcta

SEQ ID NO: 207287 - DNA, 1526 bp, Cannabis indica
ttaatataataataaaaaaaatttagtgtaatttttggtgttgtaattaaagtagaaatagattttgatactaaatttagtaatcatgtaacaccaaatttagtatactccttggagataatgtgaatgtttaaaagagggggggtggggggtaggtatagtggacactgtagacaattttaaaaaggaaaaagaaaaaaaaatagtgtttttatttttgtataaataatatcatttataaatgttagctttttctatttattaaattctactctttatattatatataaatatatattgactgagttatatatgtattttttttaattgctcttacaaaaaataatataaatgtattttttatttaaatattattttagatattgatttttatataaataaattaattttaaatattgagtaaattaattacaataaatctcaagaaaatatacattaaaaattttaacttacaaaaattaaaacaaaacattataatatttataaaacaaaaatacaataatataaaatcattattgatatgtacacataagatacaggcttatgtgacatgtaactttttataattaagatccatcttaaataaaaataattagtttaagtgacttgtcacatgtgtgtgatttgtgtgtgtgtgctcatattaaataaaacacaattataatttataagcactcacaatagagtgactaaaacagctataaggtaaattatttagctaaaatgtaaaaaatgatagaaaaatattcttctatcaaattagctattatagctgaaagctataaattttatattaattttttaaatctttttgtaatatgtgtatgatgtttttattaatttatttattttttaaaataaataaaatacattataataaataatttttaaatgatataaaaaaaatataataaaaaaaaaaaacttatttatagtataatgtgaatgtatgcgccgtaacataaagaaaataaagtttctttccataactattttaaaagatagaataacaaactgatgtaagtgctcttaaacatgtacaaaataaactaatattgtgatttaattattagagatcgatattatttgcaatttctcgaaggtgactgctttagaatgaaacagttaatcattataataaagtgtaatttcttttgtaattatgacttaattaataaaatgtatataaaatctaaaaaattatttaaatttaattaataaaatgaaaagattattatatatatatatatgagaatactttttagtgtaattaaaattcaaggtattaagttgaagatgaaactaaaaataaataaaaacaagtgaataaataagtgtaaaaaataagtattaagcaataaataaataagtgtaaaaataaatgtaaaacaatgaaaatagaattggagatggtgtaagttttcttttccattaaatctgaaatggcattatattaacaaaaaaagactaattacatttagtccatgtgttcgttggtcttaacc

SEQ ID NO: 207288 - DNA, 2157 bp, Cannabis indica
gaaatgacgccagcatgctgcaccaaattctgtagtgtactctgagccagtcttctagcctcggcaggcagagttttgagggcttggctcgaggaggtggaagcttgagtcattttgggaatatgctcgtcagtatgtgcaggggtcggaggaggtgttggatcctgagtctcagtttcaaggacctcgagattagcggtctgggaggctcgtttcttgtagtcgtagtcttcttgggccttttgggaggctccacgtcgacatctgatggagcctctaagatggtcaacctcttctttccctttatgtgaaggagaccctcgagattcatttatgcgagataagataaagtgttagcatttatttaaaaacaagtaaaatgggaaattggggcataatttcctacctaaggaatttaccataagaagacgaagatgaaggactataatatccactaacatccctacatcccgtgatcctgaatatatcataaggattaattggttctaaattaattggtttctaaataccagctcgcatctaagtgacttgccctatccatcatggtcctgtactgctcggctatcccgtagtatgattcgatacaactaatttggacatggaactttgggtaccaactatcaaaacctatgtgcaatgcgatctacgagaaggggattccaagtgtaaaagttatagcggctatctcaaaataaaactagagtgttatgctcggccctaagcattgtggctgaccaaccacattgattacctcgggatgctccttcttcgacttcccaaagggcagtgttttagaggtattgtgcttgagtcatgtgattctgagcttcctcctcggctgggacaggaacctactaccaagaagaatacttgggatatttataatcacaagtaaactccttgtcagttaggagacccacagacctcaggttgacctcgttcaaaagaaactcacatgactgaaggccaaatggaagacccaacaagagcctgcatcactcgaccatctcaggagttggaactggtctttttgagatagttgtcgaaaacaaaggcaaaattaaagttagtaaaccaagagtaaaagacatggaatagtttaaccaagtcttaagtaaaattactcacgtattatgcgaaaggtggttgtaccgattggggaaagaccagtcgtctagaagaattcgtctatgggtccagtcctgatatgtttgaggctccaagcgcctatcccggtcgagccacttgtactggcctcgccactggttccctcaggtacttcgcaagtaagtcgtacttgtggataacaactgaactcgccagcaactaccaatctaacccgaaagtctcgctcatactcaataccacaagtcctcagggtattatctacatagtcttcgatggctcgcacctttgactctattagctcagccttgaaggtgacgttagggtcctagggagtctttgatttacgtggcttggaagacataatttcaaagtccaggttacttggttcaaaagcaatcgtgacattgggtaaaaacaaaggcttggccaaaggaatagaagacaaactgggaggttcaggccaagcaatgtctcgcaagaaacggcgtctgccttctgaaatttcttgcaagaagcgtttgtggcgactagcaatatcttcttggtggtttttcactaagtgttccctactttttaaatcatttatctctaatttggatttgggttctgaaattctgggtttgtatgggatggcaagttcaatcggacactctatttctaaatattctagacgataaacttctgaaccagattgggacattgctgcaaggagaaagcaatcccaattactggatgaaatttatcaaaccagaagttagttaattggagaaactcgaaaacctacgttctgcctaaaccctaacatttacccagatacaattcaaccctaaaattgctaatatcaaatgaggcaacaaaggtgctatagaaatgtagaattaaaagcatgtaagaaaataaagagagaagtcacttactgtttaaaacttggttttggggcgatgaacggtcctacaatcgatgggacagcaaacgacatgaagacccctctaaatgcttgaagtcgaa

SEQ ID NO: 207289 - DNA, 1230 bp, Cannabis indica
gatatggaccatacaaaccaatagtcaacacataccaagtcttattcaacctcaaatctaccccaaatctcaagatactctctagaacacctaattagggtccaataaacacaattcaagcaataaaacacaagtataactcataattccaaaaatcaccattgttgagtctagtttgagttcttgaacttaaacttgctcaacaccacaatcaatccttaaaacaagcttaaaataactaaaatgaacctcaaaaaaacaacctacaacttctagggtttgaacagaaccacttttcaactattgcatgcttaatttaagaaaaaaaaaaccactaaaactcaagaagaaagatgctaagaatttacctttggttctagctttcaattcccgtaaattcctgctaaattccctaagaatttgatggagaaaaatggctatgctccttggtttttagggccgaagcaaagtggaagaagaggatgaagatgttccttttgttttttagtttgttttgtacttagatgaataatggttatctatatgttttattctatcaatgaaattagaattctatagtctattccacaataatccattaaatccaaataaaaatcctcttagacaaaactctaaaattgccctttactttccacttaagttatctcaatacttaacgtaatatggtcaaacaccacaaccctgtctaaactcgatattctaaatattacttatgattgtctcactaaataaaagattctaaaccaaattcatgtgactctaatggtcaaatcattacatttctatcgttactgagcaaaaattataaaatattatttttcacacatgtcatctataatacacttaaagtttaataaagtctctaaaattaagaaaatataactctaatgcctatttcttaaaaatagagaccacaatatataataatcacatataatcataaaatataattaattaatgttaattgtcctattaatccatattctaaatatacagtcattacactattagattaagatttggtactacaaaattacgagcgttcaagtcgcaaattagttgtgacacaactttcattagtaaagttaatggcgctataggaacaagagataactaaagagtaaaataataattttattttctttaattaggaaccattaatataggattaaaaatgtacgtaataattatatcaatgatgtaatatct

SEQ ID NO: 207290 - DNA, 879 bp, Cannabis indica
tggagctgctacttctgtagatggtaaacaccgctaatgctctttattagcatattctcaaaatgggtcaatagattatgatccattctattttccaccccatatgaaagtaggttgccctttcttcaagctcatctatttctcccctaaagtcaatgagtttcatcataaatatgtcaacaaaagaatgattgtagcaaaatagaccatttaatttatactaattgattctcaatctcttcttgatttttccatatgttgatagagacaataatgataccatgaaagcttttaactttatattaatatatattattattgttaacatggcctaattagctttaaccatatagctcttgactaaaaaaaaaaacattgactatagcacatatattgctagcaagctatatacaattatattttatctattgatcatcatgaccaataaataagagatccacttattatttgccacacttggattctaggtgaatgtcaacattttgttttggaatgattttagtaatttagtataatgctactggtagtcttatttagtgacatggtagataaaacatacatgttttgtccagtcaatttttgagttagttttcttttagttaactaactcgggtatcccttatttttagttatgcctatataaaattttgtatagtaatgcttctttaggtgacgatttataaataaatttatatgattattacgtttataatgagcgagtaaaattgctaaaaagatatgtgtatttgatcacaaatttttcaagtgattttatttgtaagatacaagatattattgttgatgagctcaaatcttgtattaatgaagatcgaataaaaactttatcttctattattg

SEQ ID NO: 207291 - DNA, 1570 bp, Cannabis indica
aattccaaccgatccaatagaatcggatatccaatcgataatggatcggatcggatgcaaattttaaaaatccaattggatcggatcagatgttggatgagacatccgatccaatggataaccgaaccgatccaatccaatatcatccaatgtccatccaatcatatttatatttataattttatatatttattattttatttaatattttatatattattttattatctatgttggattattaggttttaaattatgttttttcatatattttttttctttttaatgaaatcagcctaaatagtggctaaaatggattggattcatccattggatccattggatggatccaatccaatccaataaaaaaccagttaaagcatccaatggatggaaccgatccaatccaatacatccattggatcagatcggatcggatgactcaattcaattggattagatcggatgggtccaaatccattggatgtgatccaatgaacaccccatacgcatgttcgacaccataaacaattttttttaaaaaaattactttttgtttttacaagcaaaaacttacttcttgaaaataattaagcacgtttggtcatgtttttttttaaaaaaaaacaattttcaaaaaataaaattttttataacatcaaaatgttaatttctagttaaaaataattgttttttaaaatattttttctttattttatctcacttggtttttctcatcattttctcatattatattttctctcatcattttctcacattatattctctatcatcccttttttgttctcattttctcacacgtcactttctctctcaccactatctctctattcaagttgggtccaagattcgtgtctgtgttcgagttcggaccagggtccatgggcaggtctgagtatgggttcaagggccggatctgggtccagggtctgggttcgagactggagtctgggtccaagttcagatttgattttggagtccagggttcaggtctaggtctggcaccagagttcgggtttagggccagaatttgggtcgagtcttgatcatatcagtgtcacaaagtattgaagtgctttaaataataaagttcaaaaactgttttgttcttatttctaaaaataggatttcaaaaaccaaaaagtgatcataagctaaaatataacctacctagctaaaaatgtgctcgaataatgctgcaaatttgacatatagtatatattgtgccaaatttgagaaacatttattatgatatagaattttacatcatcagcttttttctttgttttatgtcatttttattatcttattagtttttttagttataacattaatttataaactatttatattcctttttttttatttgttttaacataataaaattaatgatattattatatgtgtttctaaaaggagacacgtggaatattcagttcaatgttaatcaattatattgggactgctcaaaaagccctaacaagataataggccaggacgattaggaaagatgggcctcaagactatctgagctactaggtagttattt

SEQ ID NO: 207292 - DNA, 995 bp, Cannabis indica
aaaaaaaaaaaaataagtaactaacgtctaaagataaaaaaaataaatttttggacaaaagtgttgggccctatatattcttccatcttgttcgactgtcatgtcacatcactttaactcccatatattattataatattatcaattttaggccaaagcactcacaattttgttttgaacactttcaaagatatcatactaactactaagtaatagagtaggtgaaattaattcttataaacaatgaggagacacctacaataaccaagctctttctctaatctttagttaattaacatggtttagtttgaagcatttttgacctagaaaacatattgaaaaagaaatgaactttaatttgctccccactattcgtatcttggactaataagatattagaattccaaaacaaaatctgtatttgaagaaaacaaagatataatataattgaattggaccacacaaagataataaagtgccacctctaataagtagtagtatactttaattctaatacagccctattattacatagcacacattttcaatagtactcacctatatattatatcattataagcctagctaactagctagctccacatataaacaaaaattctctttgaaaaaggtgtgcatggttcttattgatcaattaattaagttcaagtatgaaatggtccaaaaagggaaccatgccagcttcattaacaagtatgcaatggttgcctctttcttaagttctagttatgatttgttgggttgaattaattttgagacttttaagcttattataaataagtttattaataagttgctgtcacatatatatacacatatatatgctaaattctattaatccatgtcccacattccagccttatatttatgtgcacgtgggaaatgctaataaaaggtaggcaccaattgtgtcaatcaacattacgaaattattaagagcttacttagcaaaaaaatgtgttttaatgtgatgt

SEQ ID NO: 207293 - DNA, 1210 bp, Cannabis indica
caaaacaattaagtgtaacatatcaggtggagtacttacatgcattttgtaacttccataatatcactcattaagtgtataaaagaggtcacacaacttaatcctttgaaaattcaaaattataatagaaatatagctgttgaggatttattttcatcatttataatgtgtataagtgatataaaatcaagtgggtaatttggaatgctttggagagagttatttacaaaaaactcaaaaaaaaaaaaaaaaaaaatagtaactaacgtctaaagatagaaaaaataaatttttggacaaaagtgttgggccctatatattcttccatcttgttcgactgtcatgtcacatcactttaactcccatatattattataatattatcaattttaggccaaagcactcacaattttgttttgaacactttcaaagatatcatactaactactaagtaatagagtaggtgaaattaattcttataaacaatgaggagacacctacaataaccaagctctttctctaatctttagttaattaacatggtttagttttgaagcattttggacctaaaaaacatattgaaaaagaaaaatgaactttaattttagctccccacctattcgtatcttggactaaaaagatattagaatacaaaacaaaaaactactgtatttgtaagaaaaacaaaagatataatatattgaattggaccacacaaagataataaagtgccacctctaataagtagtagtatactttaattctaatacagccctattatacatagcacacattttcaatagtactcacctatatattatatcattataagcctagctaactagctagctccacatataaacaaaaattctctttgaaaaaggtgtgcatggttcttattgatcaattaattaagttcaagtatgaaatggtccaaaaagtgaaccatgccagcttcattaacaagtatgcaatgactgcctctttcttaagttttagttatgatttgttgggttgaattaattttgagacttttaagcttattataaataagtttattaataagttgctgtcacatatatatacacatatatatatatatatgctaaattctattaatccatgtcccacattccagccttatatttatgtgcacgtgggaaatgctaataaaaggtaggcaccaattgtgtcaatcaacattacgaaa

SEQ ID NO: 207294 - DNA, 845 bp, Cannabis indica
aggacttatgccacaatttaatatcaacacgtggtattttaaagaagacttaacggatatgttaaaaagaggactaatagacttacaagaatctcaaacttgaagactagtgtcggtattttttaaggttggaaacttatctgcatcaaaataaattttttgaaagctatttctgctattttctcaaaaaaaaaaaaaaaaaaacacttaagcatactttttaatcgattatgattcatataatgtgtgccattttgtatagtaatacttttagggacaaacttacgttaaggcgagaggagcagttgccctattaaaaataatttaaaaaaatatatatatatttttaagatacaatatatatttacaattaatagtgatatatatatatataagtataatattagtttcagtatagtagttaaattatcttacacatatataatagagatgaataattcaagtctccgccactaaatactctagagtttacatatcattttagtgaaaagaacactctaatataacatctctactcatcatgttacgaaaaaaaaaaacaatctctactcatcataatgtatcaataattggcattttaaattattattttacattaattaatttttattttaataatatgtataagtaattgcaatagatgtattattttaaaaaaaataagaaaacaaataacatgtatatatggagaagttactgcaacactgtaaaaaaaaatgtattttagctaatatatatcggagtggtgagactacttctatgtatttataaaggaatgcattttatacaactcattgtcattggtaatacaaataggagtatta

SEQ ID NO: 207295 - DNA, 906 bp, Cannabis indica
aatagttttgtacttacttttatgttaatttatttttgattctttagagattttatttatttattattattattattattattaggttgttcggtaatcattaaaaaactttattttatgttcgtgtcgtttaaaaaattgtacatgaaatcatattaaccagaataaagttaaacaaaataaaaatgttaattgttagtgtgttgttgatcatgttcacacaatggatattttgtgacattctttcaattttagttgaatgtagatgattaagctgtcctcgtcctttattttcaatgatttgtaactttctttaatttggtattttagttagaatggagtgttttcttagttacattttcatgacttgattcaacttatgtagattctgtatatttgcaatcctttgaaataaatttgccacttgacttcataattaacataattatttgttgatcaaactgtccactgaattgtagcagaaatagaattaattatgtttcctgtaattttaataattatagtaaggcaactaggaaacaacttggaaaaacaatgcatagccaatatgtttgtaaaaagattatgcaatgtacagaaaattgttattcaacttatcattatgtaattgcgcgtatatcaaccttcaattttctatatgaaatatatgtagataacacctaaattatgtacaagtcagatcaatttatacgaattgacataatagaaatgtgaacatggcataaaacgagacgacaactgtaagaaaattgtaatacgatgtcaatttctttatacgtaggcagattgtaattaatgtgcagtcagatccgtgacgcaagatgaatacgaatttagttctttttcaccattgaatttgaataatttcaatattaaaattttgat

SEQ ID NO: 207296 - DNA, 701 bp, Cannabis indica
aatcgttttcgttataattatttaagactacttgtaaaatttctaatttttttttttgagtagtttacaaatgccaaaaataagattacatattttgagtgatttacattacaaaaaattttgagtagtttaccacgactgttttttcttatacgtgtggtaagtaactatttaaatctaattttttgatactgtaaattatttatttttaaatgccaaaataaataaaaaaatccactcattcccatgaagaaacattattgttatttaataacataaaacaaaaaatccatatataaatatataaataaggttttggttctatccaatcctacatggttttagatttaggtaagtaaatggaatggataatcattaaaacctcattaaactacaattaatatatatttaatagaaaggtgactttaattggtgtgatgattgttttgttgttgagaataagaactaatgtatctgaagctgaaattgacccataaaagagaagaaatgactactgacttgaaatctcattgacaaaactacactattcttcaggtgaaactcaactgtttactgcttttaattttatcgtttctccatacaaccacattactatatttatatatatttaactttcatctcatttattataacataattattcaaatacctgacaaaatagtctatatattgagccaaat

SEQ ID NO: 207297 - DNA, 520 bp, Cannabis indica
ttaattatatatataattattaaggacgtcactgtaaagatataatttttttagtgatcacaagagaagactttttaattatctaatataatactatattcttgtagacatgcagtactcaagctagttcctcctttctgctataaatacaactacttgtatagctaaaaaataagcacaagattgatcagagaacatatatagctataagatgatgatgatgaagaagtactttattggattggtattggtggttttgacgatgagtgtgggatcatgtatgggtcgtaatttcattccgaacttgaacgttgatcgttgtatggttcctggtgagtactgtagcgcgttgccatggcaagccaaaatatgttgcgaagggttgtactgtgaagggactttgggtacagataactattgtgcggctgttgaaggttgtaaatatggtggtcagagctgtggtcttggtggagcttgttgctacccaaatagatgcactgctctctaccaaggaatatgt

SEQ ID NO: 207298 - DNA, 1481 bp, Cannabis indica
aaaaaaaaaaaaaaacctacccaattctcactttctttgatcactctatctaatttaatcctaactctctcttatattattttttttttctctctcattttcttagtaaccaaacaaaaaactacaaaaatggagaacatcaacaacaacaacaaacaagatctcgaagaagaattcattttccgatcaaaacttccagacatttacatcccaaaccacctcccactccactcctattgcttcgaaaacatttctcaattcaaagaccgtccatgtctaatcaacggcgccaccggagaaaccatcacctacgccgacgtcgatctcacctccagaaaagtcgccgccggtcttgacaagatcggaatcaaacaaggtgacgtcatcatgcttttactccagaacagtcctgaattcgtttactcttttctcgccgcttcttacatcggagctataatcactaccgccaatcctttctatactccggcggaggtggctaaacaagcggcggcgtcgaaaactaagcttgttataaccttatctggctatatcgataaggttaaggattttaccagtaatgaaaatggcggtggtgtgaaggtgatgtgtatcgacgcgccaccaatcgagagtgagtgtttacatttctcgttgctgacgcaagctgacgaaagcgagattccagctgttaagattcacccagacgacgtcgttgcgttaccttattcatctggaacgactggtcttccaaaaggtgtgatgttgactcataaaggtttggtgacaagtgtcgctcagcaagtggacggtgataatccaaatttgtactttcatcaaaacgacgtcattctatgcgttttgcctctttttcatatttattcccttaattccattttattgtgtggacttcgggtcggggcggctattttgatcatgcaaaaatttgagattaataaattgcttgagttgattgagaaatttaaggtgacaatcgcaccgttcgttcctccgatcgttttatcggttgccaagtgtcccgatcttcatcggtacgacttgtcgtcaattaggaccgtcatgtcgggtggggccccgatgggtaaggagcttgaagaagccgtaaaggaaaaacttcctcatgctaaacttggacaggtaattaattagtcaattaattatgcatttatttttaattatatctaattctaactatactttactaactccacgtcactaatttggtgaaattaacgtgtgtttttgttgatatatattgactttttttgttttggacttaggacaaaagtcatgttattttttgactacgtaaatggtcaacttgtttgataggaactatataatatatacctaagtgccgtcctacgttgattttaataataatatttaatcatttatttagtgccactaagtaaattccaaaataacttggaaaaagatacgattttagccaaaaaatgaac

SEQ ID NO: 207299 - DNA, 568 bp, Cannabis indica
cttctagtatatatatatatattattgaagtaatatatagtaggcctgggtcaatcttaccaaaaacgtacatatatatatatatataaatatatattttatatataagaatattatatatttaatgtaatcttttagatgagattttaagaatccaactaatcttgggtgagtgagtacagtccatatatataatatattgcacagttcatcttcttttaccaaacaaactttattattattaacacaactaataattgatatttaaaataataatcactctattatatagtatatgtatgttatgttcagatcaataatattatatatatatatgtaattaataattataagcatgtttttcatatataaaaatatatatatatagttgataatttattttagttttgcatgcatgcaagaaaatatgaatgaatgtttatatatatatatgggtacttttattacacttataaaaaaggtgcatgcatttttgatgcgttttgtcattcagaaaattttttagtattatttttttatataattgtgtacgttataattatttaag

SEQ ID NO: 207300 - DNA, 996 bp, Cannabis indica
gtcatacttataataaattatttatcttatttttaatgtgttaattttttaaaattttataaaaatattttaaataactataacacttaaataaatgaaaaaaaattaaactaaaaaaaattgataagaatgacaaaatatatattgaaaagggggttcataagttttggtaagcaaagttaagattgttaggaaaggatgatgaggtggcataagaaaagaatcttataggtcagaaaagatgatggagaagaggagtgagtggtatggaataatggcgtgaaagtggggcccataagggacaggtggcagtagattaaactttaacagcctgtggggaacaatacgaccacgtttaacatgaaacccttgtggttgtgggctcaccttcacctccctaaacactcttttctattgtgtttctaacttataacacataagtctaagaaaaatgttaatctacaccttaaatgtgaaacattataagaggtgttaaattgtttttttttttttaatatcgagttttatatattttaatttaataaataatataaaaaaaatatttatcaattataagatgacatattattatagtggtgagtactctaatgtgttaattaatgctctaactataatcctaacatttggttcgacattgagaatggacgagttagacttgtacctagagtctacttagcccaaaggtccaaaattttttttatctatttttagaattacatatattttttatactaattttaaaaaatactatattttatttatggtctaaaatatttctttatttatgactcactatattttagagccggccctacctacgagtcatgtctttaattttcaggtctctttttactctcgaacaacctatatgaaaggaaaagatgttttcctattttctaaattattcatttttgttgagccatttaaaaaattatatttgcatgatatatgcagatgctttaaaataaaaaaatt

SEQ ID NO: 207301 - DNA, 761 bp, Cannabis indica
tattaattatggagattttatcagattatgagagtatcgtagataccatttttagaataaaatgttttcgaggttagcggcattgagaactcggcgaggtggtcagaattgtcacagaaattaagttgtgttatgttggtactatattggactggtttagaattctaaataatcggtttggcgggattaagtagaaaagaccaaattacccttaggcattattttagacttacgtgattaaagaggggcaaaatagtcattttgatggaatgttaggttttgtcctaagtggtttttctaggcagaaatttgggatttagtattagtttaatacttatttacttatttaagaataaaaaaacaaaactaagagaaataataataaaaaaaattggataaccttcaccctctttctcttctcctgttcgacagccctagaatccagctgagaaccaagtcaattcttcaccaattcaacctcttcttccagttttagctagccctaggtgctgctcaagtcttgaggtaatcctttcttttcttctcttcaattttatgattttgagttaggttttgattaaggttatgcttgatttcggggctggggtttgaatatattgtaaaatatatttttgggtttgattcaaagtttgtttgagtttgattgagagattttaatggctttttggattgatttaaattgtaattttagtgcatttctaagttttggatgtttagatatactatttttgtggtatata

SEQ ID NO: 207302 - DNA, 1056 bp, Cannabis indica
ttaggatccgattcaacaaaggatccaatatagtttgcagctgtagaaacaacattctccgtcataaatcccgtagaaagaccatgaatctgcacccacatatcaatctgattaagttgtacagctttcagatctccaccccgcgggactctaccaaagatcaatggtagccgattgaatgtccaagggctgccattaataacccgcttgatatcgatctcatggtaaaactgaaagagataaaggttcggccccagttccttgacaaacaagcattttctcagcttccacaacccagccaaagtgtgcttcatggcttcgaaatttattgatctagcattcaaaaatctccccaccaaacaccacggatcatccactaggatcgcctcctcaacatcttcctcgatctcaatcccacattcttcctcgtcatccaactctatattctcgtattgattctccatatcttccattgccgtgctactcgacgccatcgtccactagaaaaatcgagaccaaaaacaccgtgaaaactgaactccaaaaactcagggacgtatgaacaaacagagagactttcttactcatgccacactgcaagactttagcttgcaagttgttaagaaattgagtaattcttttttaaaaaaatattgaatgttttaaaaatttaaaaaaatatatatattaaaattaaacatactcctattaaaaaaaattacaaataatatattaatatttataaaactaactctactagtactgttaaatttaaaagaatgttcttttataatctgttaaaccaacaaaaataattaaataaccccttttttatatataaagataataaagcctaaaaaaatctccagtatctaaatataattaaattatttttctctactgttcttttataaggttttcatactaccatgtgctacaactacttgtcatcaaacacttatccttttgattttgttgtacaagaagcaaataaaagtgaaaaaacaaacaatacatggtgttaaatagcagagtaagtaaaaatgctcaaaaggg

SEQ ID NO: 207303 - DNA, 1185 bp, Cannabis indica
tcagtatagatgtaaaggacagtcccttcctcgtttctgaatatagccgcacccaccgagtgataatcaccaatggcaacatctgtgttgcagattacccatcctagaggaggtggaaaccacttcagaagggtgttactttgaggtgtgtgcaattcctccatctctctcagccatttattgatttagggcattaaaaccgtgagaggagtaggattcccaagatggatactgttgtttctttccttccaaatgcgttcaaaaatgattgttgcgccttccaactatacgttaaatctcatagcccctggcctattgttctcatccttgaacttctacagccacaaatcccaatctgtaaagtagaactcagtggttttgaggtgctggatactgccgaaccagatagctctagcgaaatgacttgtccaaaaaatatggatagagtcttccacagccgaagcacaaaaaggacaactcgagtcattcatcttgaacatcgaaatcagtttgcctcttgtgagtggactgtttgaaagaattttccaccataacatcttcaacctactatgaatacgagctccccaaatgattctccacttcgcattgttgctgtccctatgatcgaaattcttaaccaatctgtaggccgacttgatactgaagttaccattggcttctggaagccaaatccaagagtctttagcaggtttgctaggcaaagtaatgttgagaattctgttggtatcgtctcggaaaatccaatgtcgaaccatatcttctttccaattgttattgtgtatgaaattacttaccaggctgatccctttcgaggcatcaagtcaaggttgtggttggaggattccgtttggaaggttcatgggtgaaccagattgaggtagattgctcgttgcctatcttcttgcaaagacctctattaataagacttctagtttgcatgatggccttccaaagaagagagtccgaggtaatgtccaggaagctgcgattttttaagtacttggcttccacgacttgactccaaagactatcgttgtccattaaaaccttccaagcccacttcattaagaatgccttgttggtggcatcgattgatcggaatcccagacccccaccacactgtgtcctactttgtattttatactcatacaactaactagtttt

SEQ ID NO: 207304 - DNA, 664 bp, Cannabis indica
aatatatatatattttatattatgaaattaatcagctcgtagttgttgagttttgagtcaccatgcatgattcaaaagaaataataaaattttacaaaagttgatcgaataaacccatgaaataatgattcaaatatgtatacttttctacaaaggtctcttcataacaatgtaaataatttttatgcttaaaaaaatgcataaattttaaaaattcacacggaccaaactatattataaatttaagtgtcaaattttttaaagatattttattaaattcataattaaaattaaaatcacgaaaattatcgttgagtgaatttattctaaattttttggcgatttctctttcaatatacactaacaaacaaacacttcaaaatttatctttcatcttgttgcaaaaagtgttcactgtattcataaatgaaaaaaaatcattttgtggtagcggttgaaactaaaagtgtaagaataagagttatcactttatacacaattaagagaatctctttttctagtttttaccaaccaataacatcagaaatggttgccaaaatagtaaaattaagaagttctcgtacatgagaaaaatgttcaaattgcgtccttagttgtaccatctcgtattgtgtaaaatttcttgggtaaaatttttgtacca

SEQ ID NO: 207305 - DNA, 1516 bp, Cannabis indica
aaaaataaaaaaaaaatgcagaagtaaaaaaaaataatagagataacaaattgctaatacttagtacaatacaaataaattaaaagtaattcaatggggttatatattgtaaataataggcttaccaaaacttgtaattcctcttcaaatggtggaaaattcaaatcttgaggttcctctcaagcattctactatgtctaatcatttgtattggatttttgtgagcaaagtataccctctgttatttgatatatatttttatatcacttaatcaatatttctaatatattttaaacttaaaaattgttcagagtatgaagacataatttttttattcttgtttctctttttctctatttgggtaagtgtataatattgagttttataggaaacaaaaaggttattatctaaaaaggaaattacaaaaaaaaaaatttacagctattttaattactagattggattataatgcctccaattgaggaatgccatttcataaattgttaaatatcaaaataccccaataatgttaatgactgtcaacactatttgagttgtttgtttagtattttttcttcaattatttccatcttctttttgacaaatggattcttttctatataagatatatagtttttttgagaaaccttacaagggactaaaatggtttcactttcaaagttgtaaaatttagatgagtgagattctatttttgttttatcttattaccccgataaatttaataggtagatatgaatctcctcattaattgttttattataaatattaatatataaaaatatattatttaaatatgttgccgaaaaaaatataataattaatttatattattcttgaaaaaatatattttaatactataaaatttataagcttaaagtttatattatccttaaaaaaattaatatggaatatttagcaatgattttaaaatttacttatataagattaatttttttaattttgaattattaaggttaattaccacatatatcatttttttttatttttttttttaaatttacagtttgggttgctgcggtagttgttccggcgatttctatgtgggttgttgtgtggactttggttacaatttaggttgctccgttagttgttatatgaatttatgtaaaaatacaaaaaaaaattgcttagaagtgtaaaaataataaaaaaaaaactcttacatttattttaattttaaataaaatatatgacagtaatctttttttttttctgcgtgccatcattctatccctgaacgaagcttgattagtatgtctggctacagtcacggcaaaagtggctataggcatacctacagcagcagaacttgggcgacctacgggtatactgtcaactatatccagtctggcaatgtatgtccaattggacggcaaatatcgcctccaccccttcctcgagctcccagatataatgttcatagccttcacctgtgatttggtcgggataagaatggtgttgcacctcgggtttt

SEQ ID NO: 207306 - DNA, 720 bp, Cannabis indica
tgactgaatgtatttttagtcactacttggtgtgactaaagttaaattagtgacaacttgtaactaaagactatattttagtaacaagtaatattttgttgtgactaaaaattacatttagtcacaaaaaaattatgttatgactaaaaagttatcactaaaaataacaattttttgtagttgcacaagttgctccatgggaggttgattctatgataattatattattgacacattattattttctgttggaaaataggtacacgtgtcacatttttatgagactgaactcgtatgtttaaacaaaaaattcggactatatataatagatgatacttgcgcattatcttacgtatatttactcaaaaaaaattatgaaacttacgtaacacatgcaagcatgtgtgttctgtacgttgttgtttttttaagacagaaccactacttcaaataaatatatatatacattgactatataatttctcaaagttccattcatttttatgttattatttattctgaatagagactaaaaaacacatagttctaataaaaaagcaaagcaaatagataattaaccaaatcccaatttttaaattttgcttccacagtaaggaagaatagaaaaaacattagtcaaatatttacgtacacacacgaattcttgatcaatgtaaccaatgaattaacactgcgtgtcaatattttttttaaaaaaaa

SEQ ID NO: 207307 - DNA, 547 bp, Cannabis indica
atgctatatttaagtaattatttatcaatcaattcataactttttaaatacaacccaatctaattcttcaattgattcaaacacaacctggataattcttaaattaacttaaaacttctttgacaccaaaaactttgtccatcaaatattgacatataagcggttcaattttgaaatattgttaaatatatttcactactatttttttttcactataaaattgtttctataattctcatactccaaagattcgtgatatgcaaaaaaataatggttaacaaatttttactatactataacataaaactattcacacaattagtaacatataatttcccaaaaaatgaatcatgtaaactcactaatttggtaggccttgatttgtgttttgtggaggtttttttttggttcacatcaacactagttaattacaaccataatttaacaaaaactcaaccttagctactacatcaaatcaattcaatcacttatacactctaaatttcaattcatttgacttcatctatatgatgcatacatttctaaa

SEQ ID NO: 207308 - DNA, 560 bp, Cannabis indica
acgctttcatattacttttttttttaatagtctactacgcatgtcctaagctagtactaatatacaatttatagctattatctaccattttatttttcttgctgaaagctattatctaccacttgcttgcagagttgcaaacaacgagataagaactgcttacgtggccatgtttagttggttaccgttgttttataagcaagtgacctggttggcaattggtgctgtgctaataattgaggtgatgttttgttgtgttgtaggggagaatgatatatttataaagaagaagtatggggtgagatagcattttaaaatcagtttaaaattattgggggattgtataatgcacccctttaaaagggatgtactgatgcacccttaacttgtttcgacattcagaaaatgacactaaattacaaaagtgggctagtatttcaaaagctagcgctcctaaactcatcaaatgtttgctgagatctgaattacaaaaactcaaatcttaaatcacattgggagatatgagaatgacacttgaaagttttttctgcagtgggatt

SEQ ID NO: 207309 - DNA, 680 bp, Cannabis indica
tgttcttgtcttctaataaccgaattcgaaaaaatcatgattaacaacaggaggattcagtgtggctttcgatccactcgatggatcgagtatcgttgacacgaatttcacagtaggaacaatctttggagtgtggccgggcgataagctaaccggtgtcacaggaagagatcaagttgctgcagccatgggaatttatggcccaagaactacttatgttcttgctcttaaagatattcctggtactcatgagttcttgcttttggatgaaggtaactaacttaactaactatgatgcattatcattaattcgatagatactactttagtactttgtgtttactagtttaaccttttattatcgataatacttatttagtactctgtgttttataaaataataaaaaaaataatgcttatattgacccgagtgccctaaagttagatttagagcccttttaactaaaatgttaagaaaattgtatgatgttaaatgataattttgaaaaattgggtctttgggctaaggggtccttggcgtgagtttaacctgccttaacttaaggccgggccttgagtcaaagcaatagttttattgttttgtaaaacaaagagtaccaaactgtttacaatggcgatttcaaactgttataatttgatttttcattagaaaactaatg

SEQ ID NO: 207310 - DNA, 559 bp, Cannabis indica
gttataccaaacccttacaaacagtgacatttgttcctgctctctaatatatatcgaccaccaaattaatgattataatatttaaaaattcgattgatcaataattagtgtcggcaacaaacaaaaactcattcacgcgaggaatctagaaaattttcaacaaaaattattcttttgatatcataataataatataaagtcataaatgatcatttatgtatatatatatggtttttcaggtacgtacgtatatttattgtccctacatttatgttcctccaaattatatagtttgaccttttttttttcccttgtatgcctaattctctcaatctatatcattctacgcccctgtccccaacagcagtatcaaaaactttttaaatgtatatatcattataattggtgtatattaaaacctacaaattataataattaaatatttatttatataaacatggccacgacgatgatcatgttgtacatatatacactatttattagctggttttatgattgtgtcatataaatttaccatgtaggttttttgtaatccaag

SEQ ID NO: 207311 - DNA, 839 bp, Cannabis indica
aaataaaatgtggataataacttgaaacaagtacttaaagaagttttagaaatataacttaaagtattattactgttaaaaattaaatttaaatatttatttataattaaaattaaatttaaatatttatgtggtaaattataaatatagtaaattaagataaaagggttatggaatatggataataacatatataagagcctttgttggatttaattgcatgccttagaaaagtaccgattttactttcgaattaattgtcactaagtcaaatggattttgattggattaaaggttctacaattagggataaatatggtggtgtaaaaataatcacaactttttagagccatgcaagttaacatcaattagtaaagaaaagttcttccaaaaaaaaaatagtaaagaaaagagatatatatatatatatatttataaagagagacagagagcatattatggaaaaaagctaaataaatgtaaataaagatagatggaggaacccagttaggaaaagtgggacccacgagccactaaacacaggttatatttagctcatgataagctcctccatagtccatattaaaaaattgagagagagagagagagatgttgatagagattatattattaatgaaagtttctgattaaaagtttggatgctgcattaactttttgactgccaaaggagagtagttcaccaaattttaaagagtgttaattgggactgttacttgtcaatcttacaacccaatcaacgttttctctctcaccaattggaccacaaaatctctccaacaccccaaatttgtatgcattaaaaaaaattaagaaaaata

SEQ ID NO: 207312 - DNA, 742 bp, Cannabis indica
caattttatttgtaggagacaaacaagctaaggacaagagtgaggagactataagccattattcatagcaggtgattgctggtcaaattggaccaattcataagtcattctgctaaggacaaaatgaggtatagtagttaaggccggacatagaagattaacattggaaacatctataaacatgtaataaaagaataatggaatccctgcatcaatttgcaccttcttcttctcaaaaatacagattacacaggaaactttttttaatgctctaatgaaaacgcaataagagaatattgttagagctgattaagtacattactaataccacgatgctatataccaagttacagccctttattctgctctttattttctcagcactctcttcactgggttgggcaactccaagtcattatggtattaatattttattctttgttttctttttcttttcaaaactataagaattgataatgataatgatgacagaagagaagaataacggcatggtttcatggagtactcaaaagcatctcttgaggcaacaaatactaaaccaattaacacagaaactcgcctctaataattggctgctgagagaacacatagaaaagaccctagtaatggttttaactattacaagggtggatggaatattagtgaaaagcactacttttctgtaagttctttatatattgaagttaattttcctacagctatgaacttgtcaaacgtcaat

SEQ ID NO: 207313 - DNA, 1026 bp, Cannabis indica
  modified_base (8)..(8): a, c, t, g, unknown or other
  modified_base (39)..(39): a, c, t, g, unknown or other
acaaaacncagggtccaattgataacttttgtaaaaacngagagtcccaaaaatgtattaccctttttcatatttccacgcactgagtaactcggctccatagctttggcttaaagtctgaagcagtaaaacatcctggcaatagcaaatatacaccaactcacgtaattagcatagactcaaccgagtgagagagacgtttgaaattgaaatttgaaatatattacagacaagttaggcaaacttattattaattgaaattaaaaaaaaaaaaagacagagacttttacagagagaaaataaagaagacaagaaggtcaaacttgaccgtggctcggtcaatggttgataaacctctctctctctacaactcctaccccttctctctaaaattctcattcaatttctttcttcttctctctccatctctctctttctccctcttaaattcttttggcttggatcgttaaaagggtttttgtagaagagaaaaaaccaggccatagtagattttgaggtctgtttggttacagaacctgaattgggtataagaaattttccttagttgtttctgggttttattccaagtttggttgaagagaaaatggcagtaagtatttatatatatcttaactgatttatctctttgatgttttttttttttatcttctttgaaatgtacaatttttgtttgtttacagatttttatttttattttttatgttaaactataagttttctgttttcttctgttaaaaattgattggactttccttatcttgacttgtaattttcctaatttgtgatgtttggagaagcaatatgagagtttgttttctctgtttttggcatttagataaatcatatatgctgttttatttcaaatgaaatatttgatactcaaactcaatccaattattaccaaaagttttgttaaaaatcatgactttgttgatcttgttttttttttattattaaattatttatgaaatttgagaagattatcaagatactaattagtcaaag

SEQ ID NO: 207314 - DNA, 843 bp, Cannabis indica
ctgttttcggttccatatcatgtagctgagtctcttagaaaattgaagtatatatatctcagattagtgtgtgaaatttagggcaggtggttcagcttatctgacaaatgttgctgttacgggaagcaagtatttattaatttattttgtttctttactttatgtgatttcttgtcccgaatctctcttttctttaacaaaattacagaaaaaatcatttggtttatgatgtgctcttatgctcgaattttataaaagttaatacttaagattagtttatgttatcgacatacgatctcttagttatttcacctttgtatgaaattgcgttgaaagtttatgggctgaagaagcttgtataaatcattattactcttaggaattttcccgattcctaagagtaatcgaatggaataatttcccgattcttttaaaactgttagaatgatttgagggaaaatctttcggtgaccacctcagtggtgttggttttgtttgctttttatatatttgtttattaggctagatgatgttgatggtaaaggcattagagtttttgtacaagtctatagattatggtttcctcaaaatttattttttcttaggttaatttatgatttaatattttgaggacaacaggtgtttggaaggtcatacatgaagttgcaaagaagcctgatatagctacccggaaatatggagtcagtgctttactttgctatgttatgaaaggaacctcatcgaaactccattctaaagcagaaagagtattgcggttattgatgagcaatccagtactctgtgctggcgataaatacaccgaaggcaagccttatctctatg

SEQ ID NO: 207315 - DNA, 799 bp, Cannabis indica
gagagagagagagaaagaaagctctattgttaagatgattgctgcattttagtttatatatgtgtgattatatatttatagttgttttgtagtttttatacacttatgaaactataactgttttaacattattatttctattttcgtgttttaaaaattaattttatatgcaggattgggtttacaaatttagtcctcgagattattacagatctaagtgtgttactacatgcacttattttgtcattaataatataaagaatactatatttttgataatttgttgaagatgttccgagatacacagtttagttattttttggacgtacaggagtacacattccatccccaaattgtgctcagccttttattgagggaggttaattagcttaatctgaaagaattttggggaaagattgttgaccattatatttagtttagtgtggagaagtactatttaatctttggtttggattactttggtgattgtaataaaacaatatttaggcaacaatcaaatcagttggtcgatatatgctttctttgaactaaaacgattgaccataagtctatcgaagatgcattttagggcactaggtggggcaatgacgattttcttggtatgaaattgactgttttgtatttcatacattgttttcttttatgtaacacacctgagaaggaagtacataggtcagaattagatattattgatagcagtctgtgggatgaatactattggggtagggagtcattcgagttgataattgattcactcaagggaaaaattgatcatggg

SEQ ID NO: 207316 - DNA, 750 bp, Cannabis indica
agaactgagaggaaattcaattttagcaaccaattcaaagctactattagagcgagcgatagcttccgtctaaataattatgaaattccattgggcctatctttttttgaaaaaaagtaatttattttattcccttgagcctaacttaatccaaccaaaacaacaagaactgtttgaaaagttgatacttagatcaaaaaacaccaaataaataaatttagtaacttcatatatgtataaatataaatagtgttaaaattatgttatataaattaataatatagtaattttttaaaaaaaaaaaattgtaataaaacttatattttaggatgtccaagtgagtaaaataaaaacaagatataaaatttaaataacacattatttggtaattataaattaaatgaaatttttatttaaatgttaaaatcatttcaaaatattattttatgaagaaaaaacttattttttgtattatgcggaatggatagttttccactgctacttcgcgttattataagataaacttaaaataaactactatacatgataaataccaaacaaggtaaactggatacataaacatactactacataagttacaaaacaaatcacaacttacacaaacaaaccacaaatttcatagtacaaaataatacattataaaataaaaattaaataatcaataaaatttctttaaagaaaaagaaaagatagattagagtaaaaatagagagccaattcatctgaatt

SEQ ID NO: 207317 - DNA, 719 bp, Cannabis indica
gagagagtcttaaacaaaaattaaagtaattttcaattccccaacgaacatccaaaccgttgatcgaattgataaccactctaaaatcgctcttataatgataaatttcaagctttcctctttagctacctctccaaacaacaaccagccgtctctccacaaagcgcatcaaagaagcccaaactagaagactaacgctttcatggccaatggcgctttcatttctatctccatttatagttatcataaatgtagacaaagaaagtgtttttctttcatctctatatcgtttagcagtttttcttcttctaaaatataaaatagttttcttttcgaaaagtcaaattgtttaataatatatgattatttaaaattttattattattttttttaagtaagagcatacttatcataaattgaaaagacagttacaaaataggttgccaataaggaggaaactaggataaaccaagcatttggtgtgtgaaagtccacttaaccacatcatcacgagcagtataattacaagtcctactaatattaaaaaaaatattacagaactttatattttatatataagagttaagttctgcaaaattttcaaaagttttataagctggcagctaatctcaaaactcatttttttttgggtggattgtgcacgtaaactatataagttacacaatttcattaatctatataaattgatatctaaaaac

SEQ ID NO: 207318 - DNA, 1076 bp, Cannabis indica
aaatattaatactagtattaggttactaccacatcaatctttacccgttacaatcatatcacaaacaaaaggtcaaatttaattaacatattaatttttagaataattaattcaatactaataaccagttatcatgaaaaaaaaatagaaattacataaaatatgaaaaaaaagttaagtgtttactttttttttttatatataaactagttttattttaatttatatgtgagacatctaattttggtgacttttatgacgacgataacatttccagtgactttttcagtgaatttttcgacatcaatgatttttctagtgactttttcggtactggtgacttttccagcgctgatgactttttcagtgacttttcaggtaccaatgaattttcggcgccaatatctattccgatgactttttcgacaataattgttattatatattttaccaactttatttattaccttttggttaatttttcatattttaattagtatttattttttgttctcatattcttttgcattatttatttttaaattctaacatatgaaagtaaattctattattctttttttccatatttataaaacaaccccttcaatttatcatacttgtgtaaattttcctattaacaaacaactatgtataaaaaattataaaataaaataaatgatatatttccaataatatatattttgaaatcgatatataataatactattaatatgaaatttcatattactatatgggaagacccataataatataattaaaacatgtgatgttaagctattctaataatttgttcaaaaaaagaaaatagtggacatatttcttaattaattcttgttcttgggaagaagcttgtttcaaaggtcagccacatcaatttcaccaatatgattctctggaatccaatatcctgtttcaaaggtcgcaacacttttactattgtaattgttgcccatgccacttgtcatttccccgcttacaatattctccactgctaccgtataacatcgttgtctgatttaaaaaatttaagtaaattttttaaaaagaaaaaaaaa

SEQ ID NO: 207319 - DNA, 1754 bp, Cannabis indica
aaataaagaacgaataaaatttgaaagtttaggcaagggagtaaatatatattatcctatgtatttatctatccacacacgcatcaatcaaaatacgatatatgaggaatttttttacatatatttatttggtggaacatattctagaaagtatcattatgaaaacaaaaaattcactacaaaaaacaaaaagaaaatttgccaaaaaagaaaaactgtacttagaatcatgaaaaaatacataaattaccacttaatgatatttcaaaccagttaataaagttgtaatgttggcaacttacacacaagaaaaagaaacaacaccaacaagagcagttaaagaaacaacaccaataatattgttgtaatatattatactcaaaccagttcaagttatgatataaaattttctattatggctatcattttagatttgatcaaaataaactagtagaataaaaactaataaaaactgtaaagaaaaaaaataaaaagatgaaagttgatgaccttttttggtaaaaatgacattcatactttaatatatgacatgcttttagagaaaacttttctttttcccttttttatttgtttttttgtattatcctctactaaagaaacctaataatgattgaacactaaacattcagtcaaaatgttattgcttgctatatggtagttaattttctcttctaagttaataactttatgttcgtttttcactttggttatatgaaaggcaactttttccaaaaaaaataaagcaaagaaaaaaaaacacccaaagaaaagaaataaaaaacaatatgggcataacaataaatcagaggtctaacactttcctagaaaaatttattgaatcatattgaacaaattcttcaaacatcttaaaagaaaattgtcatgttgaaaggtggagctagcactccaaaaaataggaaagaaagcaagagaaagagctatatcaccaactatcgtggagcaataatagagctagcatatgatttataatatatgtatagattatagataattaaaattttacatatacatgttttgaaatcaaaatcagagtgtagaggcacctaaattacatacatacccactttaaaataaacgatttatttcaaatggtgaccttaaaatagagcataatggaaaattgactattctagtgtcttcttcctcaactaagagccccaatttattaaaccagaaaaacagaggtacaacatgtaacacaaatgacaaagaggaaggaaacaaaatactaaaccactatctggccacaaaatcagaggaaaagaagagatcaaataatgccagcacgcatgaaaccaattaacaaaatagaacataacgaaattgtccaatatataaaaatattacaaaacacccactaaatcagccatcattctgtcttctaattagagagaatgaaatcattaaaagcagaacttaaaaagaaaaaccaattagaaaaaaagagtacttcgaaagatactaagacattgggaaaaaacaaatgaaattatcctccaaattgttcaaagttcttataaagaaagtatgaaattcaatcaaccaaaagttaagcctaaactccatctctaaattatgaaggtccaaaatgttacctgtagttgtccatttggagagagagagagcgtgggtgagagacttgttgtgtcattgagagaggccctgactgattatatagacattcaaacacacaaaaatacccaaaaaaatcg

SEQ ID NO: 207320 - DNA, 767 bp, Cannabis indica
atttttatatatttatatttgttataacttgtaatgttatacatatatcacctaaccataaagttaagaaagaaagttttatcaaaaagagagagaaagaaaagatgtctaaatccacccaccaccaacccaacctacaaacaaaacaattacaattatcagctgaaaatgaaaggttttcttaattattttaagattcaaaaatatacaacactcccaaaaatgtcttcatctttatttttataaaaaataaaaaatatatgccaagagttaaaacttgacttttcgaaaaaaaaaaataaaatagtaaagttttttttttttgtagatttagggtttctctcttttttctttatagattctctctagaagttattagccgttgtttgatttttttgcctaaccagaactcgccagccgcttctcaccttacagcatggctccggtcgggtcttgttaattctcacactatttttcgatttcactagaattgttgctattcttctgtttgagtgtttttttcttctttgtcttcttttgttagaagtatgtctcgaaaatttaaattgttcattagctttggattgcatcttcactgatcttaatcctcttagtttgttatttttatttgctaagtttttatttatgtttatttttattttcaataatagtgttgctacaccacctcactattgttatggtggtagggctttttaacatggtaaggattttactcttgattcttttttggatattgagggaatgac

SEQ ID NO: 207321 - DNA, 568 bp, Cannabis indica
ttatttacataataatagtacgtatcagttgctatataaaccacccccaactccaaaaccttcctatctcatcaaacacacatacacattacacattacacgcacccttggaggcttggagtgatacaacatgatggcttcttctaatatggaccaaaatactacttggcctcattgtggtaggaaccatcctagcaggagccttgcccaaaaatgtgatggctcaaagtccagtagcctccattgtgacacaagagtttttcgatgggataatgaacaaggctactggggactgtcctggaaagagtttctacagcagagacgcttttctgaacgttgcgaactcgttcggccaatttggttctggttctgctgatcaatctaaacgtgagattgcagcctttttcgcccatgtctcccacgaaactggatgtaagatactatatacataatttagtgaacgtccctgtttcttaacttcaatcagtcaattataatttggtttgtgcagttctatgtcatatagaggagacgggaggttcaaatctggagaattcacactactgcg

SEQ ID NO: 207322 - DNA, 1675 bp, Cannabis indica
atgtattaattgtatattaattctataatatatgcatgtacatacatgtagtctctctctatagatagtagacatatattacttaaataaataaaatatactaatacgtcgacaacaacttcaatacttcactcgttccaaattaactattcacaacccaacaaccattaaacaaagcattaattaactaaatttttgaagtgggatcagcaagatctgtgctaatttcatcatatctttaccgtttttcaacaataattacgtgtattaagttcgtcaatctcttcttctgataaattaatacatatttaatttatcaccagatatcaccagaggactattacacagttatataaacatatatattacttatatattaatacttactttttaataaatattagagcattgctattttgcagtgtctagcacttttcataggttgcagtgttgtgcttcaagattagttagattattttttaaaaactatttttattaagttatataagattcgaaccgagaagggtactaggcataggcacagtgctttctagcaattctcgataaattattacaaaatatatatatataggatcatcaagatgactaagttaatcaaattattgtttatgaattctttaaagactacgcgacttcaagtcgttggaagtttcaaagttaagcatcagcatcgtgctttttctatatatatatatcattcacgtacagtatgtctaaagcttcttggtgacttctttttagtttttctcaaccgttatgcccaacatagtggaaattttagtataatatatgcctagatttttaagcaatctcagtttggaaaaaaattgttggtttgtctccacatatataataatattttacatatatatgaaatataatgaactacgtaaatgtaaattaaggataaaaaaaatgtgttaaaatgtgctttaatttgaaaatcatttcttaattaattagataccaactactactttttatttgttggcttaacttctatcaacagtgacgatatcaccagtgcagacaggtaaaatatattactattatcaaggacaatcagataatagaaactgacagttttaatcatttaattaaatccatatatatgtgatctatacatagaaaaaatatttagttatgacataaatttataataaaaaatgataattataaacataatattagcttttatgtaatagttaaagtaaatttcatgtaggataaattaaggtgatggctcaaatcctactaagatttatttttttttttcctttttaagttttttcttacttttgcttttaaaaaaaaaaattacacctccctcattttaaattgttggttaaactaactcacttatatgtatactttccaaattgtagaatatttctatttttagtacttagaagaattttgatataaattttttatataattgtatatattgtagttatagctagaggtgttcattggatcacatccaatgtttttagtcctatccaaatccgatccaatcatatattggatgttagattttaccatccgatccgatccaattaatttcgtcatccaatcgatccaatcgatccaacatccattggatgttggattggatcggttctacccattggatgtatttcatatatattta

SEQ ID NO: 207323 - DNA, 579 bp, Cannabis indica
tttgtatatatgttaattaaactaagcaaaaaaaaaaagactgtggggtataatgagcctaacctgcctacttatattttattagttatttacgtagctacgtatatctatcataacatgtgctgtaatgaaaaatttcagtcattgtaatttagcctaatttggagtactacaatatttctacgcacacctaacttcattttttggggtagtccattgaattagaccaatccactaataattcaagctatatatttctctctgatcgatatctccctctattctatatatacttgctaccataacttcttctccatatccaaaatcatcattctcagtttcaccaatatatattagttcaaaaccaacatgaaaaccctaataaggatcatatttcttgtactaaccataatgcttatggctttaaccataattacaaatgctgatctcacagcaacaccaaaccagccaactacaagtactgaggccgaaagcgagaaagcgacgtcgtctaactctcttctgagagggacaaagagtcgttttcttgcttctcggcggccactgacatgcgataag

SEQ ID NO: 207324 - DNA, 993 bp, Cannabis indica
gaattaattagtttaattaatttgttatattaatttgttttatttcttttttaggttttatttatttttttaattaatactttatattttaggggaaaataaaaaaaaaaaggggattaaatctggtgcgtccacgtgtcccgttagtctcactaacggactgagtatgaacggacaaacaactttgtccaccttgggtattttcaccgccaatttttgaggttgaggactaatcggcatcaacctcaagtttttggggacttttgccgcaattatcccttcttgctatgttggatctcattgtcagaactttcttccttcttgtcctgcaaatgctgatgggtctctctctctatactattttgtttttttggtctttttttttttttcaatagcataattagtgtataatattctagggtatgtgtagaagttggattttgattagaaaattaaaaaatagaaggaaattataggagagaaatccgtgtttcatataattttgcctcctatgccaaacatgagaattatttattttactttttttttcttactaaaattcaatttgcaaacatatagtacacatatggttagtgatttttttatctacaataaattaaaattctttaagtttgactttcatatgctttacactttcattaattttttttttttaatttttaaaaaatatttattaaagatacataaaaagttactatatatagaaaatcaaccttgatttttaaattttttgttaattggaaaaaaaataattttcatatttgagtttaaattctccctttcacaatgtaaaatctaaaattttcaacacagttaaaaattaaaattgcataaaatacataaatcaaataaaagtcaaattggcagggttaaatagttatttttgttatttttattaggagagttaaaaatgtcataataataatcatatgtgtatatatatatatatatatatatatatatatatgatat

SEQ ID NO: 207325 - DNA, 1373 bp, Cannabis indica
tgcctaggttgacactagggatgatcctagctccaacaacaaattaaaatgaataaaacaaaaaataataaattcaaaggaagaagaagaaaaaattgtatgtataaataaatgtttaattttattttaggtgataatttccttatattaaaatagaatatacatttgatctattaaattttaaaatacatttgtatcatatgtgttaaattttaaattcttattgtttacattaaaatattaattgtatatatattttaaatatgtgagaattagattagatcgattacttttacatatcaattaacatccaatccgcacaagagaggattttagattttctaatccaatcaaatccgcataagtgcagattagatcagattgcatcgtgaagattagaatggattgggtattttatgaacactcgtaactgtaaattcctaattcatatcacaatgatcatcaattagtagatcgacctaaattctaggtatgttcatgttattagtttctttgattcacttgttaaagtttcttaaaaaagattattcttacaacttctattttgggaagctaataatgtggatggttgggaacttgatttacaatcggaattttgactttcctaacagataaaatgttgactccctttaagtattaattctagaactaaacagttgtgcacaaatttagattagataaaaattatactttcactaatgaattaaatggtactaaagggtaaagagataattagaatggtaaaatataatttgaccaaaattaattatgaaccaatacatagaggactaatcccttgtattgattatattcatggacactatagtaaaacttagtaaatataattatataattactaagagttgaattctatattgttatcctattttttgcatcgtgactggcaatgagttggatgacacgtgtcttgcattttcctatctgggcagaaggaagtactcctagcagccctcgaaggttgacataaatgtcataacaggatgtctgagcttagtaagcaaaagacatccgaccaaagtacaatcttgtgatcaacccatatgcaccgagcaggatatgtgagttggcaatttcagagataaatctcgtcgcttccaagacaagaaaataatccctgtattcgtgggattaaatcagagaataaaagaagtatgccttggtttcccattccttgcattgtaattatagaattaatatagtttcttattttatttattatagattaagagaaaccattcttcatgtaacaagctcctataaatagtagcataaacttattattgggggggataaaaaattaatccagaggaacactcaagagagaaaagtga

SEQ ID NO: 207326 - DNA, 916 bp, Cannabis indica
taacagtgagagagaccaagaaatacagacttgccgagagtttttacatctctttttaacagctcaactccttctcatattttgcttgaagatgagtctgagctgcgattgccgatgtatattatatatatatatatatatatatatataaaagctgtatattattagcctttgatgaagaaagtctaattaataatcttttgagcagaactgatcctttgaaaaattgacgacagaagaacttgaattctgcccttcagcttgagagttgacataaccaccatcctcttcctgatctggttgaaacactcaatatttccaagggaaacgatatgaacttttcttgatatatatatacatatatatatatatttatggagagagagagagaggtgaaatagtagatctataaatgttttgtgttaaggaataaatgaataaacatatatagtataaaatacaaatatttattagtgataagtgatagccaactttaaatgccactacattttttgttttgctttgttattattagtcaaaagaatatcccataaaaaaacagaaactactgtgaatcttagatgcacccacaccaattaactaaataaaaatgtcttattataatttatattttaagtctaccatgttattgatagagacacacatttatgattaattatttacacattcgaaatacacaggataatatttcatgcattttaagactagctagatctgtaaataaagttcacattatttgatagctaattaagaaaggtttgcttggccaaacttagttttggggatggagatgttcacccaatcactacttctgctttgctagtagatacacatgtctttcccgatgtagtttattgtttgtttgtttgtactggaattcataattcattcgttc

SEQ ID NO: 207327 - DNA, 682 bp, Cannabis indica
atttaattttattacaacataataataaatattttaactaataattcaagagttttaagttcgaacttgtgtagtattcgcttttcctactttctctcattattgtgctagcttcaaggcttatacttttctacttatatacaggaccgtttttaagatattatacttttctacttatatacaggaccgtttttaagataagacgactggagccattgcccaagagatgagacctcccaatctcttttctccttttaagaaatttcttttaatattagtccatataaggtcttttaaaatatttttgctagaaaaacggtttaaaaatttaattaaatttcattaatttatttatcaaataaatggttcatttttaaaattttgtcctataccccatacaaagtaaagttggcccttcttatatagttactctaaacatgcctttatgtattaataaccaattgatgataggaagaacaatgatcaaagttagtaataccttggactcaaatagtgtatatataggctattattacagcactataccaaagcatattttatttggggagattaattgctttatacacttccattatcaaatagtgttaaccaaaatggccagaacattggtgaggtaatttattataattaattagttacaaagaattgattgcaagaaaag

SEQ ID NO: 207328 - DNA, 1090 bp, Cannabis indica
tatatattttatatttggatgtagttgtcaagatgtgaactgtatattgatgataacaacgaaccaccgtccaaatatttaagattcatcactttgtaaaacttttcaaaaaaatatatatataataaaaagaaaagaaatacaaaaagttaattatatataggattaatattattttaaattctatgtttacaaaagttactaattgaatcgtctactttattaaatgataaattaaattatatattttttaaaatagtattaaatagtacgttgaactgattttttgtcaaataatagtaataatagtaataatttgatctagaggttttatgtatttatttgtgttagaaattatttttaagttgattatattaaaaataaaattgtcaaaaattgagttcaaatgtcttatttgtaccattttaaaaaatacataatctattttttcatttaacaaaatagaatgtccaattaataatttttacaaaacacatagtccaattgatatcaataaatatatatactaatataatttattcattatttctaagagaattcttatttacacactaaacatttataaggattaaagacacccataatttattatttttataaaatataaattatatattttatttttacacttaaaaaataatataaaatataatataatattttttaaaatattatttttctatcatgctcacattctcgaaaaatacttatgtagaataaaaataaaatatattttaaatattaagagaaaaaaattaaaataattatatataaattttattagaaaatataaaaagatatacattattaataaaatggtaataccaaaaaaaaaataaaactaaatagctattgaaattaacacaatagtatggaaaagaaatttaaaaattattaagagtattttttcaattaatttaagtttattttattttaatttaaagttgtattttataaatttatgggtacacaaataaaatatcccttacttctaaaaagattttatttatttttgaaagtaggtaaaaataagaaaaagtcactattaatcttttaatggaaaaggaaa

SEQ ID NO: 207329 - DNA, 815 bp, Cannabis indica
aagagtttttatgattataaaaaataaattcaataaactttgataatcataaaagaaattaatgaattgctaagaactttccaatcaaatagatctaacctgactaacaatctcactggtgaatttatagctctcgaacaagcgatgatgggtgaggttgaccgaacggatcgaagttagtatagtattttacattctttccattaacatacctaaccgctatctttctcattccttgttatccttgcctagctagcttgcttcgaaggctgtcatgtaagaaaccaaagaggactgctaccataactgcttaattaagtcctcggtagaactcttcctttccactcttgacatctgctctgaaataaggttggtgtatggtgcaccacaatcaatgggtatgagtgaatgcattagtggattctcatgtctagtgtctaagccaaaggcctcttgtgacaattgtatttgagtttgttcactcctcactctcctaatgcgaggtaagtgatcattgatatttgattgccagtatcggtacctacgattgtgatttttatgttattataagaggaacagaaagtctcccaaaatgggtttgctattttcatgaagaatataatttacaattctaaggtagcatttggttgggatgaatgaaaacatagaaatatgaatgagaatgagaataggattaagaatggaatagaataaaatttaaaatgcataaaaaattgataaaaaaattattaaattttttctcatcatgcattggaatgatctttgctttcatttttaaatggaatagtcattcc

SEQ ID NO: 207330 - DNA, 1632 bp, Cannabis indica
ataaggtactattcagcctcttttcacaatattttacaaaatataagtttttttccaaagtaaaaaaatatactatataaaaaatttgggccttgggtttaggtgggccctaagcacggacgggtctaacccgccttagtctaaagtcgggcatgtgcgtagcaccacctagatttagcggcttgtaaatagttagtgatattctataatagttattaaattaaattatgtgggacatattacttaattacttaaatagtgatatgacactataggataccttttagcatttctcttttttttaggaatgagaagagaaaataatttttgtagctttcaaaatacaagatgcctttggtaattgctttcaaaaaaatgtaagattttttttactaaaaaaataacttcataattccacacctcgatacaaacccaaccccaccacgactcttatacagactcaagacatcgatcccgatcctagtcctgaacttggccctgtaacccgagctggactcggacatagttctatacctcaaacttggccccaaactcgaacctcgaacttgaacttggactcagaccctgaactcgaccctaaacatgtcctcggtcttggacgtggaccctgaacccgaccttagccttgggtcccgaggtatgtgatggaaaatgtaaataaatatgtacgaaaaaaacaataaaaattatttttgatatagaaacaacattttgatgtttttgttacttagttttcaaaaaactattttttagaatatttggtcaaaaaactttctattggtttctagaaaaaaaaaaatatttttaaaaagaaaaaatagtgtttagttatgaaatataatatcccttaattttatgttatatgtatatgataaaaatgtatcaaaaaagaaaaggaagaaagtaaggaaacaccgtgagagatagagatttctaccagaagagaacgaaggagagagatactcaagcatctatgttgagtgagaaagaagaggtatacatttgagaaatgaacaaatgagagttaaacaagcacatagaaaagaaagacaagtagtacgtgcattcaaatattatgtagaattcttattttcttttatagataacaaaaagtcataacctacaaatcttgttaacaaagaaaacgattcaagaacgggtcttacaaataatataaatacagaaaataaattcacaaaagtacgcttgaacctaaacaaccaaaagaattaaggagatttcgttgcaccaaaagcaaatatgttcgcgtctatttgtttagaataaatattaataacattcactaacattaaaggtcaatctttattaacaacgctgcatataactcactatcaatgtttaggtgtatattttaattgtacgtattattattcattattttattttagttcagtaaattattactcatcaattaatttatacgtattagttttaaatttatttcttaaatggggtattgaaaattgttatttttgtcaataaaaaatgtgggtttagtaacaagatgtgatttatttatttattttgaaaaaaataataagagaactacaccaatgtggcttcttatcactacgttcaacaaaacacatg

SEQ ID NO: 207331 - DNA, 611 bp, Cannabis indica
ccataaacttaaacacaacctccaacaaacccagaaactacctaaattcactcaaatccgaattacctatgaatgtgtctaacgtgaaccgaaaaatggtgattttcgatattggtgtttctagactctgcttcggtacgttcaaaccaattcttaggatcccacgaacttggaatttgaactcctttggtccaacaaacaacttaaacacactcaaatcttggttcatttaaaaagacggtaaccgtaaacgtaaaatttcgtcatcctcctcttgacgtttctggatggcttcggtgctcttacataactccttatagcctattaaactcaatgaaaactctcatcataacccaaaaattccccagtcctctcaaacccggttcttgtattgtggtacgtaaaggaattttcaaaaaaaatatgaggtataggaggctcattcacaacacaatttctcaaccttaaatgcttccaaaaacaccttatatatagtctaggtcactaccaaaacttaatcgtgaccattaaattcaaaacataatatccttaccgtaggatattaatttactactatatatatatgattaataataacaaaaataatatta

SEQ ID NO: 207332 - DNA, 1631 bp, Cannabis indica
aatgcaaataaatataaaaaaaaaattacgataagcaattagtagatagttatataaatgttaggaggaaaaaataccatcgactaaccataataataataataaattttaggatgcactaatgccatcaccagagaagatggataatagtaaacaaaactgcactcaactatcaagtatgtagtagacacaaaatgtcaacaactaccaagagaaaaataaaaaaaaaaaaaaaaagagagagaaaaagggtaaggagacacaaaatgaaatcaactaccatgaaatatatatatatataatatattatatatataactttcttttttcatttatttttttacacattatttttcttcaagatgttagtgaaaataaaaataaaataactagtagaagaatgttacttatctcgtagaaagataatttcttttttccaactcatcccaacgcctccaaaaacttgttgtatctaaaagtaagtcttttaatatttatgctcgcaagtgcactaatcttttcagaatataatgttcatgtatatacaaggctgaacccatgggagtggactaacataaaaaaaaattgggagactatatggtgaagatcagccatgccctgtagaccctggctggccattcccaggttcaagagttttcctaggctggcaaggcttacacctggttgttgtgcttggctggccaaacctgcattgggcagggtctggccagaccggtaaagggtagggtcttgtcgcttgtgatgcctccttggtcggccagacctgcattgggcagggtctagccgcccatgactcctcggtcaactggtgtcacttgtgtgttgattgggagtagatcacaccagttgctagagtttggtggatctagatgcctaaagtgattgatctcacttcttgaatcgctattttgggtgtttccacccgctctcagtcctcgtcggtcaaaaagcaatctctatgcgcctccctcccctaagggaggaagtgttgtaccatggccaaccataggtactcttgctaatggttggctagccagtggctacacaatggggttgttattgagccaaggatccctggatagcccccaaagttgctggttgctatgatatgacagttcttgccatttgacgtttagcgaaaggtttgtcctccctctagcaggggaagattcgtcctagttccggaagaacttggcggtaatctttcttaaagtggatccctaaggagatcctagccttttcagtcagttttctgattgaaccatcttattagatcattgacctcccggttgcggcgatctaattctgcttggtgagattgaaggatgtactcctagtcatccattcatctcaggaatttgcatctctactgagcaaatacatcacaatcagtagcgcgtggttcttcaactaggctgtgtggcctacagcttccctgagtctggccaactcaaggtcttctcctaagtctaggtgaggcttgccaattgtaggctcgcgcactcccaggctagagcaagaatattctaacctagttcgaaatatttaatgatattttgttgtaaaaacataaaagacaagtaattaaaagatttaaaattaaagatggt

SEQ ID NO: 207333 - DNA, 771 bp, Cannabis indica
tagtttcataagcttgttttagaatttacgtaaaattaagagattttggttcaaataagatgtattattcaccgtatgaaacaacttttttaccttaaaaaatatttgcattctaactcgttactaaaaaatattttgatttttttataagaaaattaaatacataatttggttttattttataaaattgtatttgcacttgcactgaaagcaaagtgtttaaatgtgcacaaattattctgttagaaaaaatttatattgaatctattttcttccccttcaaatgtatatactatatacatttatttgtggtttggcaagtacaaaactgggtgtatttgtcgtttggcaatacaagctgtattattgtctcttgtcttttgaaaataaacatactattcttcgtcgttttctttggaagtaggacttattttttgtcgttcataatgtgaatgaaacttgacagaaaatattaggtcagagttaaaaaataaaaaatgtaattaataatttgatttgtcgtgtattttgcagaactagccaataggatttcatcttgaagagctagaatattgacagttaaaataatgcgagcttttttataactgcaaagttcaaaatattgtttcagcgttaagcaaaaaaagaaaaaagatactgtttgtgtaattctgttaaattttgtttcatattatagaaaatggagatttctatggacacttcaggatcaagtctgctttgatttttaattgtttttcttttaaaaaaaaa

SEQ ID NO: 207334 - DNA, 776 bp, Cannabis indica
aaaaaattatattaaaaaatattaatgtaattcaaatttgatacaattttattgtttaatttttactaataaaaaaagtcatacatatttttttaaaaaaaaaaaaaaatcaacaaccacacacgaagcatgatttgtattttatttgcaaaaatattaatcgagaccgacacatttgtacaaagagttgaataagtacaattagtaaattaattaactttaaataattaatttagattaattattaatatctattagtttattaataaatgagtatatattagtaaattagttttaaaataacaaaaaaatatttattaagtaattaaatcataggaataaaattaattatttatttattaaatattttaaattaagtcaagtttctaatattaatattatatgtagacatataagaaatgatgggtgggattaggagataagggcacaaggcttagactaaggttgtacttagttttgcatttgaatttgaaaaaaaataactgtatactcatgtttggtaatgtatgacttagggacgatcataattatttgaagaaattaagtaatcaaccataatagaaaagttatccactaagattccaactatcatatcaggtggtaagttgtaatgctcaagtaagaatggaaatttgataaaataatttctcttaatatttttaaattttttttaaaaagaaatattagattttaaatttaacacattattactaattttctaatgaatcaaattagaattaaaaaattaaaaaata

SEQ ID NO: 207335 - DNA, 578 bp, Cannabis indica
tatatatatttatatagatatgatgaaagaattgtaacaagaatcaaataataagcctttttcctttttgtagctttaaattaaaaccataagttgaggctaagtaccaaaaagctatttttattttagatgaggaaattattttatagaatgggatttagtttttttttttttttaagagctgtctctataggggccaccacattaattattaaattatgtaaacataagaggccagataaaaaggaagagaagagctatagaggcattatataagcaaacatgcacaattaaatgggccaattttaattttggttcaatggaagaggacaaactagcatgattgatgtgagtgtttttggttaaaaagggtgtaagagacatgaatcattggagtagcttgagtaatagtagtattaaaagtaattaagtactacaaatttagaaaacaagttagtttaatgacaaagattagctttttgtgacttatattcatttgataccttatgtctttaaaaaacatatagctttagtatttttctatttttaataatacttacttgaaataaaaattttct

SEQ ID NO: 207336 - DNA, 951 bp, Cannabis indica
cctataactgatgttcaaatgtatagatcaattgtgggtgcccttcaataccttaccatcactagaccggagttgtcttacagtgtgaatagagtatgtttgtttatgcaaaagcctctaacaacacactggcaagctgtcaaaagaattctgagatacattagtggcactaccacatttggtcttcaccatagaaagccattatcttatgacttggttactttctgtgatgctgacttggcatcagatccagatgacagaagatctacatctggttttgccatcttcttgtgtttaaacttgatagcttggaaaagcaaaaagtctctagatctaacactgaagctgaatacagaagtcttgccaatgtcactgcagagcttacatggtacactatctattttctgagcttcaaattcgaatgccacaaattccaactatctggtgtgataatctgagtactattatgctcacacaaaatcctattctacatgctaggaccaagcatatagagttagatctttactttgtaagagagaaagtcctcaacaacttggtgaaaattaagcatgtctctacattggaacaactagatgatggtataaccaaagctatttcaagccaaaggttctcggatttcaggtccaaactcaaaatcgaagatcattcgattatgagtttgacgggggtgttaagatagttaattctgtttattaacaatcagtgttgagctgtcatggttgtgaagagtttgtttcaattcagttagttgttagctgttatttcttttgttctgtttcttgtaagcttgtgtatataagctttacttttcatcaataacagatcgacactggtttctctccaattctctttctctgccttttctctctttcctttcttctttgtgtttccaattgtttcttgcttttggttctttaatggcgagacaat

SEQ ID NO: 207337 - DNA, 567 bp, Cannabis indica
attaaactaaataaataaattgtttttttaattaaaattaaatattaaattacaataaatatatatcaatatttttatattttcataaaagtaaaatatatcaatttttttttaaaaaaaaaattaaagaattaaggcatgaagaagaagagagcaccataataaagtataatatcttaacaattacatgttttattgtaacatataacatcttatagaatgtttatatagactaaaacttataaaaaaaaagtaggaaataagagttgcataaaatatgtcagcctttaatatatattaatataaaaaaaactttggtagttttttttaaataaacattaataattgttgagagaatctacacataataaattattaaaataaatgagaaataaaaaaaaagttaatattattatcaagaaaattataaaaaaaaattatagtattaatatattaatggattgatatattttatacgaatatattaacattcaactaatatattaataaagtataagcaacttaagtagaatttgtaatattaatatattaacattcaactgatta

SEQ ID NO: 207338 - DNA, 732 bp, Cannabis indica
aattgcagcaacattattcctcagaagctataaaaaggtttagtgttaaatgttgtcgggtaatgaactgtgcggttagtagttgggttcttcctactcttcactcaagttagtattttgtggactcacatttgagtttgggatatttttctaatcacttaaagactactctgcatataaaaaaaggaccacacaaaagaggactatcaccatatattgacattgacttgactaattctcctacatatactgctttttgtatataatttttttttttaggtacttacaacgttgatcacttgacataattaagatttgaaagaaagcttcaagaaaattattagtcttatttaaaaaagaaattgctttttttatttttatggtggataaagttgtttgacttaatgataactacaaacttaagaatataatattacttagcacaataaaacaaaagtttccaagagacatactctttctcgttaactttataaaagaatggtgtcaaatttattgtagaataacatatgtaaagttatataagggagagaaagttatccaaaactcttactaaccaggtaaggcaataaaggcatctgaatgcctagccatctcagccttcctttggtgcatgtctgcaactgccttcacctctcctaccgtttcaccagttaactgcaaaagtgaccgaaaacacataagatattaaagaaattaaaatttaaaaaaaaa

SEQ ID NO: 207339 - DNA, 918 bp, Cannabis indica
tacaaatgttcctggacgccaccaaaattcctctaaaatttctcagtacagatgatgaagagaacaacattgtgaactctgctttcgaagagtgggagcaacaagataacttactggtttcttggttgctctcatccatgtccgagaaaacaacaaatcgcatgatcggttgtgagactactgctcaaatctgggaagccctgagtgagtattatactgctttaaattctgctaatattggtctttataaaactcaattcaggaacaccaagatgactggttctttaaacgattatcttctaaagatcaaaggcataattgatcttcttgctaccattggacacaagcaatcttcccaagatcacatcgaagcaatctttaatggtttgcctcctgaatacgatgtttttgttacctctgtaacaacaagaaaagagtcctattttgttgcagaaatagaagctcttttaatggcactatcggttcgcattgagaaaaacaccaaagccctggatatcaacaaaagtgaagcaaatttagcccacacaaaaccaactcagggaagttttgtcagcagaaatcattttccaaattctcaaacaccaacaggttatagccgtggtactccctacaggtatcttgatccaaattctcaaatgcaatccatgcatcgaatcaatcatggtcgtggccaaatctctcacggtggtcgaggaaactcctcttttggccgtggtgcatctcaatcgtggacacaaaaacctcagtgtcaattatgtcacaaattgggacacacggtcaagcaatgtttctatagattcgacaaatcattcacaggtccggagtgttttggtcaattcccagctactgctaaattgttgaaagtcaagcatacattgccacacctgaaactgtcca

SEQ ID NO: 207340 - DNA, 657 bp, Cannabis indica
aattgtatagattaaattgaattaaaaatattgaatgttcattggatacatataagtaaaattgtaccaactagattgtcattgtggaaaaaaaaagtccattttcaaacactacataatgtaagttttcaataagaaactttataatagtaggacataagcctcaaggggagagctcaccacgctcttaaaattgtaagagcgtggtgagctcccccttcaggcggagctggttgcgatacagcaggcgtgccgtcgggctctattttctggttgggcgtccatctccatcttctcggactgccaaattgcagtgaatggattgttggctgggtcctgcccggagtggaaagctcgaagtgtctttgattccactttggactgtttgtttcggattgagaatattaaactctgttggatatctcgcaacctcaatggtgaagtccactctcttgcagcgtgggctgcatcaaataaatgttttaaaatgtgttctgttagggaagtggcatcccttgttgtcactacaaactttgagttttaatgctctgttttgctttaaagaaatcatctgtttggataaaaaaaagttttgtgatttatttatttatatgtttatatattggatgtagagacaaaagtgatatatatatatat

SEQ ID NO: 207341 - DNA, 629 bp, Cannabis indica
gcttcaggtcagactttaaatcaaaaatagcactcaatctcataggggatagggatgaggctagcctagctccctatactaagacaaacatttgcttgaaaggtacttgatgctttttggggtgagttgtgtcgaacacatactcgaagtatgcaacaatgtctaggaaatgtgaatgaagcggtaacactgccccacgctcaatatgatgctctgaccatgccaaccaacccaggggaagtcggtgtgcccaataatttccatgagttatctcacaatggacacccttcactaagccactaccaattatcttgctaaaagcctcatcagaaagggtagaggtgggagaggcccaagtgtcttcctatgatatagcatcgagtatctcaggctcaaaagactgatccaagacataatccaatccaagcactacaggctcaccaagcctgttcagtgggttgccattggcatcgtaacaacataagggatagtcagggaggacagtacaagtcatgtacctcctactcctaactggtgttgcctcctcaagattagactcaacagcgggactctcagccccctcgtcaatctcttgatcagcatcagcatggggctaagtaacctcctct

SEQ ID NO: 207342 - DNA, 649 bp, Cannabis indica
gtatagctagtggagtagtagctagctatagtacagagaatccctctatcttggcattgcatttccgtatgcggtgtggtggtaggcctaatagcccacttttttcttttattagcttgttaaaatattatttatgtctatcatatattatattataattaaatattatgtctcgtataattaaaaataataaattttaaaaaatattattaactaatcatacagcgtcacttataaatttataaacgccacttataaaaagtattaagtaatgtatcctcaatattgcttattagttgatttcaaaaaccatttgccaagcagattaattaactagcttgagattacctgccattggcaacatttaaaaaaaaaaggaacaaacaattaagaaataagcacactacttgacttgagcaccatcaaaagccaatataagttaaatattatacactcagttttgccatttctagctaagcttgtactattaatttagtgattagtagttcttcactccacacacttaaatttttatatatgtgcactaaaaaaaatctcattatagctatatagctgggacaagcaaatcatgaacaaatatttctttcccttcccattaagagatgtactaatattaatatatatatat

SEQ ID NO: 207343 - DNA, 616 bp, Cannabis indica
ctttttttttctcttctttttttaaaagttgcttatcaaaaaatttaactataaccaaaactaagaagtttgatatattttttttaaagtaaaataaagactgagactcaaaaattttctaatagcaaagtcgaagaacaatgtaaaaaaaaattgtacatatttctctctcagatcatatccaccaaaattattttttttagtagatacgagtaattttgacaaatgattataaaaagaataaataagtaaataaaattaaatataaacataacataaaacaattacacttattaaaaaaaataactctatgtaaaattattttcaatacctcattatcctaaactatataccaaaacttgtgccaccttttttgttccggcaaaaagctaggctaggcatcgacaatactttataataggcaaaaagttagttaactaagcttcattcataaggcatcaataataatgggagaatcttggatgcatactgtacttagcaataaataaatgatttcaaatttgatttccatttataaaatatttacaaaatttataaattgagggagtatctactttaattataatgtaatcaaaaatgaaaataataataataa

SEQ ID NO: 207344 - DNA, 821 bp, Cannabis indica
gtaaaataatttccaacaaaccatccggtccagggctctttactccaggcatactgaacactgcattcttgatttcttctttagtaaattcttgcatcaacatctcagcctgtgtcacagatagcagttgcatgattaagcttgatctgcaaaaggcctatgagactttagattgggattttttggaagaaatgttgcaggctttaaagtttataggaaggttccttaatttggttatcacttgtgtcaaaacccttgaatattcattaatgttcaatgaatctatgcatggattctttgaagcttaaagagggttgagacaaggagacccaatgtctcctttgctctttgttttgggtatggaatacttaagcaaaatcatgattaaagttggaaataagaggagtttggcttttatgagaggtgttcagaaattaagctaaaccatcttagctttgctgatgatgtgttgttgttttgtaaaggagactttaaaagcatctaccaaatgatgcaaggcctaaagttattctccctcagatctggattacagccaaataaagcaaaatctactttgtattacactggaattgatgaaataaagataagaagggtgttggatatgtctggtgtttccaggtaaaaggaacctttcaaatatctaggggccccccatctgtactaggaggattgctgctactgattgtagcaacctcgcacaaaaaatgactgcgaaggtcaaggtttggagcattaagaaccttcttttgcgggtaggctagtgcttataaactctgtgttactcacaatatacatgtatt

SEQ ID NO: 207345 - DNA, 746 bp, Cannabis indica
ataagcatttaatttttaaattatttgtaaacttttaatagagaaaactatattgattctattgacatattatcataataaaaatagtagaatttttttttttcattaaacaaagctagattaataataatattagaaacattaataatactaattaaacatttaataaaattatgtatacactatttataaaacaaatatattcttttttttaaatatgtttgtatatacttagttttaataagcatttaatttttaaattatttgtaaacttttaatagagaaaactatattgattctattgacatattatcataataaaaatagtagaattttttttttttcattaaacaagctagattaataataatattagaaacattaataatactaattaaacatttaataaaattatgtatacactatttataaaacaaatatattcttttttttaaatatgtttgtatatacttagttttaataagcatttaatttttaaattatttgtaaacttttaatagagaaaactatattgattactattgacatattatcataataaaaatagtagaattttttttttttcatttaaacaagctagattaataataatattagaaacattaataatactaattaaacatttaataaaattatgtatacactatttataaaacaaatatatttttttttaaaaaaatatgtttgtatatacttagttttaatttcctattaaattatagtaa

SEQ ID NO: 207346 - DNA, 569 bp, Cannabis indica
atattatttttgtaattttgtttatttgtaaaataatctcataataaattatttgagaaatactaaaaataataaagttgcgtcaacattcaccttaatactatcttcttgtggtactgttcgttgctctgctccatcatctcgcaaaaaatcaggccacgaaaacaccaaatctaatttttgagcaattaaccattgattaaggtatcattttgctgacgaaacatcaatatttgctttttaattcagctgtaataatccaaaaaatacacaaaagaatcaaatcatctcattagttatcatgtttccacgacgaaaaacataacaacaagaaccactaccaaaccgagacagtaaaatactgacatcaaaagttaccaagtcttgcagcaaaacagccctgcaagactgttgacagcctcaaactatagtttgagactataaatcctaagttttggcttaccaaagtaaaatagagctaagtgtaactccaatagaaattgctataagtgtgactgtcagaaatgttagtccatttaggtaatatgagcaccgatacctacattttt

SEQ ID NO: 207347 - DNA, 600 bp, Cannabis indica
gttaaaaaatatgatattaaattgtattgataacattatataactcataataaaattagtactaaacattataaattgagagtggcaaaatagatcaaatatgataataagacttggacccatacgaaataaacgagtttgaattttctttaaacgggtttgggtcatttttaaattacgcacgataatgacctatttaaacgtatacgctattataaataaatgaatatattcattctaacaataatgtatatgtttatatataacatttttgtttcttgaattttttacattattaagttgtgctcttataatatacgactcgttaataatacccctcaaaatataaattttacgtgatccttctatcatattctattcaattttatcataaaaataatgaatacctagtaattttgccttctaaactttcaacaataccaatttttcccctaagttatacggtttcttaaaatttcctcctaaacttttacatttatatagtcattctattaagttccgtccaattattatatttaaatgctgacgcgtgtttgtaagttagcaacttttccttttaaactttgataactatcaaat

SEQ ID NO: 207348 - DNA, 651 bp, Cannabis indica
cctgcatagaaaatatctgaataatggttattgcaatcaagcttcgaaaagttttctatggtacatcttaaccgagcataatccataggcggagcactattcccagtagatgtatcttttgcttgagctactaatatcatcatgtgtcagttaacgaatatataaatatgtatatatataatgtttaatttgactgaaaatatatataatggtattagcaagaacacaatttatttttatttttaaaaaaatagatataattgccaccaaaatagtgctatagatatattatgtttttgattttataaacactgaacagtcgtttttttttttctaaaaacaaatgatgtggtatgtaagggatgaaagaacatgcacacaggaagaagctaatgacttttcttaatcaaacaaaactactcaattttgagaggaggaaaaaaataaacaaaatcaattcataaaacataaacataattcaaaataacataagtaaattataaaagtaaagcagcagtaagttagtttagttaccctcttccatttgccagtctaacaaaaaaaaaactatctaaatctatctaatatctattatgggcagtgtttaattgggagaaaaaggaaaggagtggagttttcaaataaatgagt

SEQ ID NO: 207349 - DNA, 1359 bp, Cannabis indica
aaggcaacacttataaaagtgttctcctaaagtgtttccaaaagcaatatataagacaacacttataaaagtgttgctatatgttgttaattgaaaaatacatattttcataaaaagtattacgtaccaatttaattttataaataattatcgtaaaattattaattatatatatcatatatattttttatttaaaattatatattttctttaattatctatatcgatcaattattgtttttcaaataaatttattatttaaatatatttatctaatttagaatcattttattataaaattaaaaaaataattataataatgtatttacaacaaatttttggtcattatatttttttatatatatatttttttgcttaatattattaggttgattggatttgtgttctgttgttatattttgattatgacatcacacaaattaagttggactaaactaattaatgcttattatgtatgttagatttgtgttttattaatatgagaattaaattttaaattatgtttttatatttatatatatttttacttaaatttgttactcagtcttgatgatggctaaaaatatttgatataacttaatagaaaaaacaattaagaaatttaaaggttggaactaatttaatttgatacaccaattagattggttgactcaatttgattggattggatcggttgacaaagttcaacatccaataaatattggaatgggttgagtctaaattaattagatatgatccaataaacaactttaattttaattgtaggtgtttgatgatgagtaagtaaatgcatacattgttttgtggttacactacaaaaaaatctacttttatctgcgcatttggtcaaacataattttaccagcgcatttcacttttgtgccggtaaaaattctttaccgaccaagattccctgacattttttgcaagcgtattattaagacagcaaagctttgccgatgcatttagtttactaatgcgctggcaaaaagaggttttctttgtagtgttgcatgtttgttacaaaagtacttagataaaggatttttttcataaatgtacaacaaaaacaacataattacgaaacatgtgaaaaaaaattattttaaaaatttatacattttgaaaacttattacatgaaaccatacattttaatcattaaataataaaatatgtttattaaaactcaaaataaacaatttcgtaaaattaattaaacagttttataaaaataaacaaattaaatattttttttattaaaagataaatgtttgaaatttttacataaaaaatacaaaatggcttttttattacatatatactcctacacggcatct

SEQ ID NO: 207350 - DNA, 1501 bp, Cannabis indica
tttctcattaacattaaaacctgtaagaatcaccaatacaataacgcacgttacttcaaatgttcaattttattatgcaacaaaaattatacagttaatttactgatttacattagatttagattggcgcctttaacaataacaaatcaatatgatatgcataactgaagcaaatttagtcaaacgaatatattatgtgctaatgtgggcaatacaaaatgtattgaagtctaacatgataacttaaaagtaacacgagttttcacttctgacaactttcactatatagacaagtcggcttcattgaaccaaaccagcttttaaaggtggaccaatggatcagatctacaagttatatcaatatgatcccattcataaaataaggcagaacaaagtagaagtactgttactgagccccagagataaataatattctagcgttcatgatcgaaggtttacatagtagctgctgacaattggttgccaatataactttatgccacctttgggaacttcagcatattagcggtgctcaacactacctacggatgtcatgctactattggtgcaatttaatactaagtcccacatattttaatttaataattactatgaaaaagccgctaatcacttgtaacacgcaactacccaaataccaattttcttttcttatatactttcttattagagtgacaaaaattcttcagtttcagatggcatgatacatgagaagacatattaagcattaatgactaaattataaaacccaaactggcaatagtatattactggaacccaaatatacttcctgcaactagttcttttaaggttctagatgaaagaaagaaagaatgaactaatgaaggaacgaaaaaggtgaagaagaagctcacggtctcaaaattaatgggatccatctccttgagtttctgtacatggtcattagtgtccggatcaaagacactcccgataaagctataaacttcagcaaaatctggtcctgtagataggaaaaataaaaaagatcattagaattaaacaacctaatcatcttcaacataattcgtccaatgaattgaaatttaattataatttggatgattaccgtggagcacagaaccttgtttcccatgctttggtatctcagaacctggtattgatctacttgagctttctatgccacaaatactgttgttactattccttgtagccccctttgatgcaatatcagctgaatcagtaacgttgtatgcaataataagcattggaaagttccctttaacaaaattcaaaaccacaaaactacaactaatacagaacacacaaaaagaaaataaaaaaatgcatgccttgagttgcttgaagattaccaaattcttcctgggatgttattttacttgaagtgggacttatcaacaaagaagcttcatcccatgttgaatacgcaggcaccaaagcattcattgaagaaggataaactaaggaagcttgaaggggaacc

SEQ ID NO: 207351 - DNA, 1317 bp, Cannabis indica
attttcggcactataaactattagaaacttttcaaaaatttacagagatgatgttgtaagcatataacaaacaccctcatgaaaagaaatttgaaaaaaaaaatatattgatatgtgttttcgagggtagaagttaactaagagattgtaacaggaggttgatgatagcatttttgagctgtgattgttagtttcattccattcatatattaatatgtgacagtttgtattgttggaatggtgagcgtgatcattttatagaagagagaaatacaatttttacagacagaaccagtaatgaaatagttgaagggtgcaaaagaaataatcgatcagacagagatttatagttaataaatgtgaacaccattatttttcaaagtagtgattattttcactagtattaattataatggtatttgttagtatcgttagccaatcgcaagacgatatatctaaaaggtgttagacactactagtgcccaatagcaatgcttttgatattatgcaaaagttttaaacaaagagcattacattaaactagacttgatactttattaaactaatagtaatattgacatgtaagagggtgttagggtaaacagtaaccttgcaggctctaacatggcaagccttgagaatctgttcatattacacagtttatcaatgaaccaaaccaagtactagaatatcaatagagaaagtaagatttgtcaaattaagacagaatcaagactctattaatattggtgtcaacacttatcactaccttaatgaccattcaaaaccgaaaccagttgccacagccatgtttgttgccctcatttgggcgcaattgggttatcctagctactacaatatatctttgcttccatgaaatttgcattgcaaactctatctttattattgttgcttcatttggcttccttacttcgtttgtgatatttggtcctatgttacatattctactaccgttttttttgctgctggtcacagttgataagtgggttgaaaaaaggtgggcaaattaatataaggatattcagaataatattaatgatcatcatcatgtagacgttatgtactatttagtgtcatgatgaattctactactatatttttctacttataattgctttttcgtttatatatgttgtggatattatttaatatgtaattgttgttagataatgagtaagaattttggagagattaggttaaatggaagtaagttatagttttatattttgatttggtacaaaatgatgagattatatttttattttaggactttatagtactaatctataaatatta

SEQ ID NO: 207352 - DNA, 606 bp, Cannabis indica
aatggccggcggcggttagaatagaagcggttggagttggtttaaagagggaagaagaagaagacaattcaagttttaccttaaccttattatttctttttttatttggagaaaaagatagaaatgagtttgactggtaacaagtaaaaatggagaaagatatgaaagtaattttttttttaaggtttctagcaaatttttttttagagaaagaagagtgttaaattaaacaatgaaccatatttaataataagagtattggcatctgtaatttatgtaattttcttcacaatttttttttaaaaaaaaaattgtaattttcattaataggcaataacatattacatgatgatatatgtcaaaatcagaatcaataacatatacaaaatcatgtcgttttacaaaataaaaatgaaaaacactaataatactttagcgttgaaacatttaaaaaaaaagcttttttggtttaagtttaacagaatatacttaaaaataaaagaatattctgttaaatttaacgattaggatatgaaaaatatatagttggtgcttattattaataaaaataaaaaaaatattactgttaaatattctgttaaaaat

SEQ ID NO: 207353 - DNA, 627 bp, Cannabis indica
aaaaaaatataattataattattcaaaatttaataaaatgacacattttattttatttttgatctacaaagagatttccttattatttattttttgatttgtaaataatgaaaaaaccagtgagataaaagaaaaattaatgattttttaaattacatagttatagttattcttaatgttacaaaattacaaattttatttcttcaaaaaagagatttcgtagtttttttttggtgaaattagtaagaaaaatctccattttttttttctcacttcagtgttagggattattattattagactaaaaaaaaagaaaaaaacaaaagaaagttataatgtggtgacacgtgcaaaagaaattagcaagactttttaaccataaatatctttctaaataaatcacaagaagatataatattatttcagcctataattaatgaatgcatttaatttatttctatacaattagtctttttcttaatttaaacggtagaacatattaatatttaattaatgagaattaaaaataaacaaaaagtcaaatgtttttattacacaatacttatgcatgtaggagtgataataatcaaaataaggaaaaaaatttaacctatttaatcaatagat

SEQ ID NO: 207354 - DNA, 1028 bp, Cannabis indica
agatatatatgttatgcatacatatagtttgcaaattaatcaataggtgttattagaataattttaatttttattgaaaggattgttatttgacactttaaaatgtgttcaataatactattactatatcaatgtgatactttataattaattaataatttattatattagttattaagtttaataattatgttagatctgatattaaattgtactaaaaataaaagtgtctcataataatttcttttcatttattatagattagttatatatgcaaaaatgttttaggcatattcatattaattaattctatattattcaataataaaataaatttaaatataatattttgtgtatatatatgtataatataaagggaccggttttgtgtgcttttaaaaaacatatccaatcttttttctctaagtcctactaaaattcatggtgggggccgaccgtgaatacaattaatgtactttgcattagcgtcaaagtaattcaatactagtagaaatgaaaatataatattaaaaataagagaaatattacgggacaccttaaggtgctaaacaccgacacctgtctttaggaaaataggagcccaatatgacgaaaattatagtgtccttttttttttttgaaaaaaagagaaaattgactttcaacaacattcttcgtaaattaattatatatatatatatattttgatatatgaataatataataaattgagtaggtctggtagtaatgattgataaattttagttggaagtgttcatatctcgggaaaacagaacaagcgaagaacttaagagggtgcaaattaatgtcactaggccaaggacattttatgttcttcaagagtataaaaatatatttaataattacattgaatatataaataaataaaaaaaagttacgggctccccggagccgacacaggcctacttacccttagaattggcgcttaggtgataccactattagtgtaattgaatatatacacattttaatttgataaatgatat

SEQ ID NO: 207355 - DNA, 716 bp, Cannabis indica
ttatctttatagtaaaggttcaaaatttatttttttcctataacccattttaactcaggaccaatcctgtttatagactacatgagcgattctaaagtcgctttaaaaatgtgagagttttaactaaattaataaaaaatgatatgaaatttttctttaaaaacttaaacttcctaaaaaaaattgtaaaaatactttgaaaagagtataacatgcatgccacatcattacttttaaattttcctttatataaatatatagatatagatgcacattcatgaataataccatgtaggtttatatccttccaacttccaaaacatccatctttagttttttttggggagaattattatagataaatgataaaatatttatatttttatgaatctgttgatatgttttaaggattttttataaaaatatggaatgttatttttctattattattattattgaaaaatactattttaacgctactgctataggaaagtaacattattagtttattttttgaaactatacaaatttcctaaaaaaaaacaaacaaacaaaggaaaacttgtaaaataaatcagtaaaaatataaataaaaatttctaggtgtattgtgtaatttgcttttttttgggggggttatatggtattgtttttcttttatatttattatttttatacttttatatggtgtaatttttttaatatttttactgtta

SEQ ID NO: 207356 - DNA, 1146 bp, Cannabis indica
tattaccaataaaacttatatttagaacattaatttaaaaaaactaatgctacatacacattttatgatatattaacgaagttaattaattgtaactcaattttaaaagagtaacaatacacacataaaagctacaatacacattttatgcacaataataaaagtataaatgaaaaaatcccaatattaattttgtttctttttattatgttgttgaaattaattataataaaaatctagaatacactcctaaaaataggtgtatagaggtacccttttatgtctttgacaattcaatacttataattatattttagaataattgataattttactccctgaactttcaacaatactaatgttagctcttaaaatatacggcttgttaataatcccccttgaacttttacatatatagaaatttagtccttctattaactttcgtcttattattctgtttaaatcgtgacatgcctttgtaaattagcaactttgccccctaaactttgacaactatatcaaatcgcacccccacaaaataaaaataaaaaagattcaatattttctttttagtaaatcttaaaaaattaatatagatctaaagaaaaaattattttgaatgattaagaaaattaaaaaataaattttaaaaataattaagcgatttaaaaaattatgtattttttatttaaaaattcattcagatattaaagaaatattaaaattcaatttttataaaaactaaatttacaagaataaacttgagtatattttatttttctaaaaaaatgtagatttatttaagtaaacataatatttttttagttaaatttatagctttctttttcaaaataattttatatttttattgaatttttaattatttatattatttgttaagatatgagtatataaatataaataagtttgactttttcttcaaaaaaatttagtttatttaaattatttattagattctcaataattttgatttaattttttaagatacatgtttataaataaaataaagtttgaaaatattttttaagaataatttaatattttttaagtaaaattaatatttatttaattagttttatatttttttcaagttttctaataatttattattttataaaaattaat

SEQ ID NO: 207357 - DNA, 1116 bp, Cannabis indica
cttttttctctctactatttcgaattctagcgttctcaccataaaatcgagccttagtgattgagtgcatgcccacccatagcaagtttgtcctcaatcatactgtgtaagactgtgaagaatttaaataactgaaggagtatcgggctcggatcttgattatactctggtacaaaaatgatacaagggttagagatctgagcggaatgagtcatttaattccgctgcaaccaatgtcaaagaaaattaaaaaaagtctcaattaacacgttgattcaataatggatgggttgaatcaagcaaaatgagaatataacatttaaattatattacttatacaactaaacttatatagtacaaaataattcaaacccctaataatatatcttgaatagtttaaacttagtctatatactgcatattatacacatatatacattatatatataagatatataaacaagcagtaataattaatttgagtctaagttcaataatcaatgtacatatatacaattaatcctttttactcttcaattcttatcaagttagctagttaattattttgttttaagaagctatctttgttcccaccttaattagcttttgtaacccacaagcatgtacatgtttttcgctacacaatggctggtctttaaatcaatcttactacatagctagctagctttcacactttttcttttcatcttcttttaataccaccatgagtccatgacatgaatgaagcacagtataatcctctaaattaagccaaattcacatgtcaagctatggcatttaagagagagagaagagctgatgggttttgtggcatgcatggtgatgagaatatgtagtgaagttgggaaacataatgggtcccttatgccatagccagttcacaactccattgctgaagagtcaacctcaatgctttcttttaacccctcaaaaatccaacaacacccatatcatcatttctatcaaagactcaaaaccacctcacatatgttttcaaatataaaatataaatatatatggaagaattttaatagttacactaaatattttatttatttttattggttggatcattaaataattgtgattaattta

SEQ ID NO: 207358 - DNA, 479 bp, Cannabis indica
gctccttcatactgaaataaaaagtaaccatgtacaccaatcatattttgttcaaggcgaattgagaaaactatacattttacaccagtagtaatgttatttcaacttttgatgagcaaagccacaatcacaataaacaaaattaagaaataaaaaatgtgaaacatatctctcccactaagcaatatatactccaaaaattgtccactacacacactcttcagaaacttttctaattaattcattattttgataagaggacaattgctatattcctatttaattaaatccactatcccaaatataattcttttttggtttgacaaaccattcggatagatactaaacaaataacaattccaataaaaaaaaaaaaaatattttgttagttgttaagcatctcccaaattattttattacaccacaatgtgaagatcagaagatgaatatgttgttattattattatttcaataaaagt

SEQ ID NO: 207359 - DNA, 1013 bp, Cannabis indica
tgcttaatcggtcacttctcttctccatcttattccctattttacttgctactgtgtcttgtactttatttctctctaatccatagcaaggactctctgaacagaaatgcagagggggcgagcttggccttccttccttactgaacgatagaacagaagtgttctaaaaaaaacgatagaaaaaaagggataaaaacaaatccctaaaatcagccgcaaaaaattgaagagaaccgaaccagaaaagaggaagaagaagaggttcgaaccagagaagatgaagaagaagaggttcgaacagagccagagaagagtttccttgtttgcacatgttcttgtttgcacatgattttgagtttccttttgacgaaaaaaaataatgtctttgagtttcttctttaatataaaaatctgaatcaaattaatttttttctttttttgagaataaggatttcattaaacaacactaccgattacaaggaaatggcaagtcacgctcaattgcgtgacgagcacaagggggagaaaccccgatccacatagcactaactttgtttgtcaaagcataattgggtaatacatgagctaccacattagcttcccgaaatacaaactgtaaaccactaacagaatgatgttgaagcaacctttgaatctccaaaataagaccttcctcctctcgacaacccatatcctcaccatgaagaagacgaaccgcttgcatacagtccgtttgaacctgaaacattggcagccgatgttgtatacccgcccgcgaaccctcccgaatcgccaaaagttcagccaccaacggggaccatgcaaaccgtacagcggtggccgaagcaaacctgaccattcccacatcatctcgcaccaccacacccgaagatgccccttcattttgtaaagaaaacccagcatctacattaaccacaaaggaaccaacaccaggcggctcccattgttggtgctgccgagcccccccaccacgtagtcctcccacttaacct

SEQ ID NO: 207360 - DNA, 879 bp, Cannabis indica
actctcgtgataaattaaacatacaacaagcattgaacacaaaaatcctataagctatctaaaccatacaggtactctcatcctatatcgaaattcagtatagcataattgacagtcacttctctgatctcgcatcaaattcataaaacaatgaattgatggccaggcaattaaaagtcattaagtacgaatgaaataaaatacatagaaattgagagaaaataaaatcatattagaagcataaatcaatatcaaacaatttctatctagatcctaattaactgtttagctactcatgtttattgtagcaaaatcacacatattaactttagaaaagacaagaaaatagaaaagaagagaaagctgaaaaccctctgaaaaatgcctccaatattgaattcgatctctgaaattcgtactctcttgactgcctctgatttccttctgaattgcttaccgaaatcaactgaagttcacttcttatatagccaatgagggactaaaaagatggaaaagattgcacatgctgaaaattctattcagctttgaattagatcgccaccataagcccacactgagaaaaactcctattttgcttcaaactagggggcgggccgcagcatgctcataatgcgcccgggcccgtgttggctattccacgcatccttaaggccttcatagacacaggccgcgacatggtatttccatgcctaggcgcggtccatctgtacacttatccttttatgcaatcttttatcttttttttttcatctttttttctttgatattttctaattaatcttctactattttaaatcagtgaaaataaaagataaaaagagtaaaatttctccatacacgagtaaaactaaattaaaa

SEQ ID NO: 207361 - DNA, 669 bp, Cannabis indica
tattattcattatataaattatttgaagccaaaaaaaaataaaaaaaattagttacatgttgctcttgtatgtccacaacaaaatatggtttagttttcagatatatttttgctcattttattgcaggaaaggatcatataaaagcttcaaatgatcatcaatattctcttttaggaatgtctcaacaaactttgaactctcaggtatgtataattggaaatgatttcaaagacatgttaaacattgttttttaatgtaatttatataataactacttattataactcacaggaagcaacagatgaaacaagaaggcttattgaggcagccaaagagatagtgagtctaatgcataaagattacaagggaatgggtcgtcgcaagccacccattaacaatcatgagccatcccattgactcacattttcattgattatattaggtagactcacaattttgccaaaccaaatatatatataaatatatatatataggtgaatatacaagggaatcataattaataaatatcaagtatagtctcccccttaacgtaaccctatatctatacatatttatatcaccatatataggatatgtataataatgggttttgtttcttttcctttatttttttttcttttttgtgaacttataaattattaattagc

SEQ ID NO: 207362 - DNA, 1026 bp, Cannabis indica
tcagattttagggaactaccgaagacaaattatgtgaatattaattggcacataataaagcccagcagttgttcaaaaaaaaataaaaaaaaataaagcccagcaaacccttcatttaccctttgtagaaaccctctcaaacacacgacctcgagctcgctcaaaccctcaaacccacgaccctcttgctcaaaacctcaaatccatgaccctctcactcaaaccttgtcttcgatcgcttacagctacccccgatgaggacgccgacgacgaggacatctcttccctaactcctcctccgaggacggtcctcccatgacgaaaacgacgagggttactcctctcagagaacgacgctcctcctacggaaacaacttctcttcgatcgctggtgttgtttgtgcgctttttgatcgaccgctattacaattagatgataatgtagcttttatttttttttttctcatacgaattggaagctatgaaatttttatagagaaccttttttgctgctgatatagggttaattttatgcaaaaattgaaaaccaaaatgtatgaattatataattatttatttacaattttttcaaacaaataacacattgatttgtagtagtctaatagtaatacatccatcccacaagaatctagaagtacctatcttgttctatgactgagaaaaataggactattctcttcttatttatcaaatagtacaaacaacaaacagtagttgtggtaaacaaattttgagacatagggaagcctcctctcctcctaagccaacttcaatatcacattatattatatatctattaatcttcttaggcttggcacatgcaattaggagcaggatatgtgtaaatggattgtttgggcttcctaaatctcatctccccttgtctttttggtgcccctctatcattgattgcttttgttctggaatgctgacccattaatgccatgtttggcccaatggtctttaggttgttgaaagtcgaatgtcccaccatggcatttgcat

SEQ ID NO: 207363 - DNA, 697 bp, Cannabis indica
gtgtttataaatggtataaacttaatgtttatttttttagtattataagtacttaatatttgtaaaactatcatttttttctaattttatcattacaaactctgttatataaagtacaaattctaaattattagatcatgatagaaatatgtagtatcaatttctttcaaatgttcgtttaataaatttaaacctaaaattttgattacttatgttattatttatccaattattaattatgtatagattagtttgtatagcatcactcacgttcgcatgtaagaaaggaatagattatatgtttaattaacttggaacataatatatagactttgtgaagtcaaccatatcaaatatactaaacgtatatatatgactctcttattatagttaagcaacctatatatgaatataaatatctatatatatatatatatctaatagttattggtacgatcttgaatgtcaactatatgttaaattagtgtgctatattctctcgttgaaataatttgtgtagtgtgtgtgacatttatataacatttatatatagggtttgattatgagaaatgttaaaagatttttgtggtaccttcatcagatataatgttattattagtgtaatttaatattaagtttaacttgttttactttaattaatattataaaaaatacgcgtgctaactaattataagat

SEQ ID NO: 207364 - DNA, 779 bp, Cannabis indica
atcaaaaaaaaaaaagaaactgaagaagttgttcaatatatatataagtttggtatcgcattgaaccattaaaaataaaaagttattatttttaatagaataaataatattttagtccttaaattttttatattactaaattatgctctttaaaatatacgacctgcaaataatacttcttggaatataacttttactaaaaagttcttccatcacattttattcaattttattgtgaaataagtgaagtggtggatgatacttgataaatatatgcaaattaatatctttaacatttttcacaataaataatagaataattttttcttttttataataatttatatttatattattagttttttaatcatgaaagtaaaaagtgtaaaatgtatttaacttgcatctatttatcaactaatattcattgcttcacttgttttataataaaaataaatagaatatggttgaaggaccacattaacctaaaaaattatattttgagggatattattaacgagttgtatattagaagcacaacttggtatgtagtgttaaaagtttaaaaaataaaaatactgattattctttttaataatatggacggtatttttataaattaatactttgagtgttacgtcaccaaccgtaaataaatatttattttattgaaaaaaattataaattctactaaaaaaagagaaataatattaaacactcaaaggaagaaaaagaaaatcttaaattcaaaagcactaaaactattttttttaaaaaaa

SEQ ID NO: 207365 - DNA, 1348 bp, Cannabis indica
aattaattaattaatttactattgcttatactttgatttattctatgttatttttaggtccagtttggcaaagttgtgctgtgagaaaaaacagctgcaattgtgctgtgagaaaaagtagctgcagcaaaactatagaaaaaaaactgagctgagtatttggtaaatataaatttcaaagtactgtgagttgttaatatatattataatgataacgataatgttattttttgacttgctttaccaaacacatttttatcacagctttttcaaaaagctgtgccaaacggatccttaatatcttgcgcagtgacggtggcaaatttatatgacaagcctagaagtgcttttgtacttaagaacattattgttatattagacacttttttatatatgagatgttttataattagttagtgataattttaaaaatataagaaatttgataattaattacattatgcatgacactaaaaaaaatattaaatatgaataatcttttagcaattctatgtccttaattacaacatagttcatatataaaattagagaaatgctaaatggtatcaatggtgcctagtacctttctatgtgtcaatatcgttattggttcaactaagtatcgggtctcatataatttaatataatagcttttaaaaaatatcgctaaccaatcgcaacgcgacatatcaagaaagtactaaacaccactcgtacctaacatcaatgctcataaaattaggatgagtaggtcgtattaaataataaaacagctctcgttatcataaactctttctcgatccggtcaatatggaatccaaccctcaaatatcacgtgattctctatacagagaaaatttgtattatatatggaggcaaattgtgagcaaaataatttagagggcaaattatgcctaaaattagagatcagaatcaattaattagaaggcttctttaatgttaatggagttttcaacattctcttcttttttattttcttcttttattcttaatcggtatatgtgaagttgctacgatgaacaaaagtagctaaacaatttattaggatattgatggatattgtttgacattaatttatagtttgaacgtgatttaattttctcctaattttctatatattctattttattcgtacttatttcttttaactgtctgactatcaattaattgtttatgattttgatacgaaatttgagaagtgagtatcaattatgctatagtaaaataggaacaaattttaatataggacgagagtacttaagtggtttggataatatagggtttatgtgtttaatacgtaccttttacatgtttagtttatcacgag

SEQ ID NO: 207366 - DNA, 846 bp, Cannabis indica
gtatgcaaatctttattctttgagttttgatatgcatgagtcatgagtgggtgttacggcttcgttactagtgactgcatttactattatcgtatatataatataaatatatactatatataatatattcattcataaaaatggtatattcgcatataactctaatacttaagccttaatgcaaggttttatactagggaaataccaaaaaatggatctatgttgtattacaagaaatatatatattaacgatcttatgaaccgacgaaaatagcttttcaaacaatttcaaatcgccgaaaaagacaaattttgtagtattgatccaaactttagttagaaataaatattggtgcaaactaagaagaactagatacgttgactatataaaattaaataatagtggtgtgtaactattaagggttccaacttccaagttccaactatataaatttaaattattttataaaccagaattaatttaattatattatattatttatgtttatgattagcgagtaaccaacttggtccgcaacctaggatcaagtcaaccctaacctttatgattaattaattttaatatgtttaaattaagaaattgaaaacgaaggaaatggcgccacgtagccctgttggcacgtggaatgaagagaaaagcgtaagcttagcctatgattaatcaaattattaaaattaaaatagaatatctcattcttttgtactttttattattcttttttatgatccccacgactgatccagtaacgtacgtacactgtatcagtccatgcatgccgactttttttttttattttttatttttcattattataattactttac

SEQ ID NO: 207367 - DNA, 960 bp, Cannabis indica
ataattttgatattgtattttattaaaaaaaatcttattaaattataataattcatactaaaataaataataaacatttatctttggggaaaattttgcggcataaatacctattttgttcattttgttgctaataagtacccaatttttaaaaattacggcattaatactcaaaactcattttttacactacccccgttggtaactcactaacagaagttagttggttttttttttcacctaattaattaaagattacataaaactaattaataaatttaaagaataaaaaaaaaaaaaaaaaataataataatcctttaataaaacaaaaagcagaagaaaattccaatggcaccagatgagcgaccaagagtctcacttcacatcaccatgatgagaaactaaatccccatttcgcaccttcccacttcttaaaccagattctgaccaaatattttttagcaatctcccattattaattgcaatactctgattttgagagatgcatccatgaatgataacactcgtgaacatgaccatacataggaaatatgtccatcaacccctctttcttttccaatccttcatgtgcttcataaaccaacaactgatgctcaagcccattaattcttcttaaaatgctaggaatcatttctcttcacctcaaacaatttttcatgcccacccattcaaagaaatcacagcccttcaaaatgaaattgcagcataaaaattccaaaaaatcaacataaatgactagtgcaaatcataaccctttgctacaccatattgttctttcaagcttctcatcactcgttatcgattcggttagagagagatggtgcgattaggataacagagagatgatgtgattgggtttacagagagatggtgaaattggatttacagaaagatggtgtgattgggttatagtttgtggttgtgcaattgggttgctc

SEQ ID NO: 207368 - DNA, 696 bp, Cannabis indica
tttaattaaatttttattatttttatattagtttgaattttaatacggatatattctaaatcattatatacttaagaaaatctaatggaaaaaagtcattatcattattcactttcacaaaatttttttactgtgttgagacaaaaacaaaaactcattattagtgtatcctactcagcccacactaatcaatgtgtgtaatgaaagattgaggtgtgagttttctatatccgtcttggatacaatttgtgaaaagacatatgaatacactgataggcttcaagagataaatatttttatacatttttttatttcataatttaatatatatatatatacatgtgaagataagcataataatactttccttatacatttgatttaataccacaaaataaatactacgaaaaaaatatttagtaggctagtattgcattatcaaattctattagtttttaattatttttatgaagtgatcaaatattcctatatcattgaattaatagtgtattttgcaggaaaaaaaaaagaatcgtttcgatgtatagtatttatttttctaggaataactaattatttatgttataattccatcggaaataactttgaggattcaatcataaaacctgcaataaattcacaccttgaacaataataatgaacataaaccaattaatcaacataatgaatcaaacc

SEQ ID NO: 207369 - DNA, 1125 bp, Cannabis indica
ggctgatgctgtagcagatctctctgttctacttgctttttccatcttattaaatagtatttatccagttctatcaggtaattaattatataattgttattaatgttttattattaaaagggttattttatacttcggtttagtttcgataattatataagaattattgaaattaaactaagcaaaagtataaaatgacttaaaaatataatattaaaatgtatttattcaattttattaggttttattattaaaagggttgttttacaatttggtctagtttcgataatattttgcaaaatggcctctgacactaaatagagcttgagggtcatcttgcaaagaattatcaaaatttagcaaaaatataaaatgacttaaaaaataaaatttggtaatttatatctatatttaatatataaatatatttttataattattttattgtaggtgtggctgttggtgctggtttacaaggaacagttgctatagtaaatatattttgctattatttgatttgggataccattggggagtggttcttgcttatgtgataaatcttgaagtaaaggtaattttcttaattaattttaatttattttttaatgtaaaataagtgttatgctatttatctcgagcaatttcataatttatgttggatagccagattcgtcgacattttgaaaaagttagcggttgagcaactttttcaaagttgttgactaatcaatctcatgggccatatagccgatcttaaaaattagtgggctatagaaaaaaaaaattgaattcttattgtgaaaaaatatagtattttttaaaaatcaagaaaaaaaatatgtaatttgatgaggagaatttgtttttgggttcttaggctagatgggccctagacacaggtttagcccgtctatacccaaggcagcacctgatagatcgggaatagtgaaattgttccaatcggaatgaatagctttattattatttatgaataagtaataattagtgaaaataattaatatattttaatattattttataaataatattcttatgtcgaaatagttaccattaccattatttttttaagtggaattaatcattggtttaaagtatgttaattat

SEQ ID NO: 207370 - DNA, 659 bp, Cannabis indica
tctgtctttttgcttgtttgttccgtctgttggtgtgcggttatgtgtttagtgttcttgtttctctgtgtttcctagttcgttttgtggttgagggtttctttgttcttctgtgtgtgctgtcgtgtttgtctggtgattgtgcttagtgttattcagtagctttaattcaagtttgagaaagtgggtactttctgctccatgtgtggtgttcttggccatcaaagaagaggttgcagtcttgcctcacctgtgatgatcatgaatagcgaggacaagccggttccgttgttcggaccttggctttccccgtcctctgcttatggtgatatgttttcagggtttgaaccggttatggcccgtggtctgatggctccatctcagaatttcaaagctcgggcgtctccccattctcaggcggttgacggacgacgcggaggtgaccgttcgaagcctcctggtttttcctcttcccgtcgttttcatctttctctgaaaacgattgctcggtctcttgtcgatgctgctaccgtggaagctttgcaggtggcgtggctccccatggcttcatctgagcaccctgtgcacggtcttccctttcctagtaataaggtcgtgggaagtcaggtggttgggggaaatgtatttgaatctattcc

SEQ ID NO: 207371 - DNA, 632 bp, Cannabis indica
aattataaatgtagtgaaattacctcttgagggctcatgtggtatgaaattttgcgttgaaactctttcttgataattgcactagttggaggcttatcatttccaagcccaaatcccaagtcatacacatctccaaattcagataaatctggtgcgccctgttttcaccacaaagatattaaaaagaaaagaaagaaagccagaattttcatgtccaagaaataaataaagaaatatttgaatcattgggttaatttatactttaaataaacactgttgactcaacagtagtcatctctcaatgattgaaggtacaacacatagcgaaaaaacactgtttttcttggtgagcctagtaaatgtgagtatgaataataaagtggtcttagttatttcttattgacaagacaaagcttttgtgttgatttggatagcaaaaacatgccgacaatggaagccaaaaaattattgaaaagatgattgaataaattaagaaagggggaccaaattaaaaagtaactaattattttcgtaattatgtgcctagtttttttttttaaagaagagaggtcaattcaattcaaatgaccaaaaggcctaatccatctatctccattcttcatggagatttt

SEQ ID NO: 207372 - DNA, 696 bp, Cannabis indica
aaaaagccaagaaaggagtacaatcctaagtacaccgaatacacaagtctgatagatactcggggtaatgtttataaggcaacgtgcaacatggtccattatcaaaagcctctacatatgtcaaatggcagaaggaacatgtgagatcagaacgagaaatgtgtgtatcatggagaaaagggtcataccacaaatgaatgcgaatatttgaaagatgagattgaaatgttagtctaagcgagatatctagaatagtgagtttgcatcctgattatctatcttggataggggtagtctagggacacatgatacttctgggacagcatggtgctataaatcccccacaaggggttgggctccctccaactccccaaacgtcattaccttctcttcttgctttgccaactctggctggagtggctttgcttgctccaggactaggaacaccatatccttctgggctcgctccaccacccgtggatggacaggtcgtaacaatctcaagtgggccccatcttataggaagtagccaaaatgtgtagaaaagatacctaaaagaggtggaaaagggagaaatgtgtgcaatgctatagtctcccacgcaacgtccaagaatgatgaatctactgactaccttcactgaagaggataccaagaatgtgcgtttccctcacaacgaccccttattaattgacg

SEQ ID NO: 207373 - DNA, 1234 bp, Cannabis indica
ttgccagatagctgtcaggttgttgatacaagggcagaaatgctctacattatgctgtcacaactcaagatgttgatacagtaaaagtattcttggaacattcttcacttgttggcaatgatcactggtttttgaatggaaaagatatagagggagatactcccttgcttcatatggctgctacttcatcatggcatgtcgaaatttttgatgctttgttgtctaacccaagagttgataagatggcatccaacaaacaaaacatcaatattatagatatggtcaatcgtttggacaaaaaagaagatataaaggtacgcaagtacgtacaatatcaactttgttttttttctctcttgctattagttagttataacaatttctacaatgtttttcttttcttttttatatgacagatccaagagaaattgcatcaagtcctcgttaaacacaaaatattagagaaagatgttatttacccagaatcaatgccagtaaatccttactatgaaaaaagattaacagaccgcgaagaaataatgaaagaggagagaaatgagtggaatgaaaggaaaaagttcatcactacaaaatacaaagagtcagctctagttgcagccacattaattgcaacagtaacatttacagccggtttcactttgcctggaggttattttagtaatgagcttaaaaatcaacaacaacaacaactacttggcactgctgttctcaccaataacaaagcctttcaggctttcatgataacagacacaatagccatggtactctctactacgtccgtctttatgaacctcttcctcactatattgtcttctgaaaaacatactagtgaagacttactgtcgtgctatattgggactatggttttggcaatggtggctatgggattaatggtgatagcatttgttacgggtacgtacgcagtgttgtcaccttcccctgctcttgctattgccactggtgttattggattgtctttctttggtcttatatactacacagtaaataggagcaagagcaagagcaaatgcccagtacaactgttttgcgattacgaagcttgctatatacttaaatttgttttgtttttgccagtaatacgtttccgaaaaaaatcacctgtccccaagttacccatctcttccctctacccccaataaatgatttggtttattagtactctctaattattaattaattctctctctctctc

SEQ ID NO: 207374 - DNA, 782 bp, Cannabis indica
agatactattagtgggcaatggacttaccttaaaataaaaaatagggaaaaaaatatgtacattttaatagtcaagagttcaaataccatgaagagtacttatttttaagtttacactctatcactttaaatcgtgagtcccttaatgctcaaataaatcaagcttttgttcaataaataaagctaattggggatttttactttcttttcttatatagaaaataaaagtcaaaacttttgagttggttctttttaattaaattattaaataaaaatgatgtttttttttaataattaaaatctaaattaggtgtagtagtttctttggacttggattttttttaattcattttttattttggtctaaataaaagaaatttacattaaaaaagagaggctattttgaatttcttaagatagaatagggaaaaggtttgtaaatggacatagttttcttgtggaacaaggttttataaattggaaaaagtgtttgtgtacttttattttatggtctttgaattatcacgtgaattatagttgtagttgtagagccctatagaaagaaaggtgtgaaaccaaccaattgaaggataggattggtataacattattggacaactcactttttggtttcctcatactaaattatattaaattcaagaaaaaatattaataattccatttaatctcaaatcaactaagaatgcatgacgaggcaggggcatgcataaatcatctaatttaatcataactgactcccaaatattgaatattcaattatg

SEQ ID NO: 207375 - DNA, 1720 bp, Cannabis indica
ggccaagacgaattaaattttggggccctcaaaaatatatcaaaaaaagagtgttatgggatttgaacccatgaccttggacattatgtcctccacctcaaccaactaagctataaatatttgttgtttatattacacttaaattttacttaaataaaagcctaataattttttttattttttattttgggcccccggaaagtgtgggccctaggcacgggcctagcccgcctatgcctagggccggccctgattatggggtacgtttggaccatcggcggcggagacgatggctgaaacagagagaggaaaaggacgggaacgggaaagggaaagaagagagagaatgagacttaattattagtaagtcaccactacaagatggtgtgccattgcccaacaaaaatttattaaaaagaaaacttagatatggaaattttgaaatttattttatatatgatcttgttttttatattctgaaatttgattaatatatatatatattttgaaatcaaattgattaatatattaaactcacattattattggtttttaaagttctcaaccataaaatataaatctttattgaaatttattttatatatgattattcaggttctcaaccataaaaaaaaaattacaacgattatcaacaaaaatctatttattgttaaaataaaaaaaaatgaaattaataattttgaatttatatcgaaaactaataaaaaggtaataaatcttaccaatttgtttaattaggacatattattttttttcttgataattatttttaatcatatattttgtaaattttttgatagaatatgtgggatcatatcatgagacttttagaactttttagaaatatgaccttatcaaatatgtatatattatatatgaagaaatatgttactgcagttttatgttgaataaacatttaaaggacagttatatttgacagttaaatttatacacaaagaagagtatacttagtatggatattgagtatcacttttgcttcacaagtgatgatatttttatatttttgtattttgtaatctaatggtagcaatttatttaattatagtggagtatctcatatagaattaataacttattttattttacttttccacgtacacattcttataaaaaaaacacataataataagggaaaaaaacaggaaaattccaaaaagggtaaaatattacaaaaatactgtgggccggcccaatcaacatttgtacagcccacattgaatatattacaaaaataccacttgaccttaccttcagccgcacgtcacaaacggagacgatgaaggaacctccatcgatgcagtcggctacgcaaccagaatgaaaccagatcgagcgtagaacaaccataaattccggcgaatttcgataggaaacgaacaaatccaaggatctaaacagaaaattttaaaaaaaaagaaccagaaaaccgtggagaaactgaaattaaacatttgatttcggttttttatcgtgcaatatcactcaaacgagcgtcgaaaatccagattgaagcaatgtaaatctgtattgaacagatctggagctccccctcaaatccaaaaaaaggtatgaaatgaaatttttttcaacaatgatacacgtcatttacagttgcattctggttgattcactggtgtacaacaggaaattcagattctaaaaacaaaaaacaagaact

SEQ ID NO: 207376 - DNA, 510 bp, Cannabis indica
gccaagaaatggttggcgacgcctagagaaagagaagaaaccctaatgagaattgagagaattcaattagggtaaattgtctatatctttctttgtaatcaaccggttgtataggacatcataagtctaaaatgctacttttgaagacccatgataatgagaaatcaaaatttctagattaatatttttttaatattattttattttattcttaaaaattatgtactttttgatgattgtgaatatattttttgtaagtaagattcataagatattcttgtaattatgttgtattttaagtaggatgagtgctaattataatgagaaaattacattatatatctactttacttcatttattttaatttttacctttgtttctagattatttaagatatacccactttatagatggtgcccctattatattccttaggctaatgtaaattatgtattagacttaagtagaagatgagagtatataggggaactcactcacaaaagtgagta

SEQ ID NO: 207377 - DNA, 923 bp, Cannabis indica
ttatttaaaatttcgtgtaatttttgtaatttttttgttatttttgtatatttgtaaaattaattcttttaataaacagtaagtcaaatcggtttacaaaatataagatccaaaatagtattaacctattatttaatgtccttttgttttcaagtaaataagtgtgttaataagggttaagtatgtaatttggttttattggcatatgtatttactctttaaccaatagtattttccatcaagaagtttgtattggtttatgtatttgattattcttatgttagacaataatttttttatttatttttttatcaaaatacaaacttcatcaatttgtttatgcctttgaatttcaagaaaagaatgaattaaaattttggagtgattgcacaagaattttagtttgaaagctcttaaatgtctccaactccaaaaaattacaaattttgagaaaatctattgcaacaaaagagatcaaaaaaaggttcccaaaaaattcaccaaataacaaagccaaaagtagataaagtagagaatagaagaagaaaaagcaaatgttctgcaatgggtttgatgaagagtaagagacaaggaatttaaataaagtaaaatttgaaaaataaataaataaataaaattgcacaacaaaaataggtaaccattattaaaaaaaaaataacagttagagtacttttttgccattaactaattacactaatgaataccaaaaatacatattttatgttgaaatttaatggaaaattatgtaattatgtaacataatttgccacatatataatattattttatgttatattcatatataacaaacatcttaccatagttttttttattaatttatataattcaaaataaataatagcatgcatataaaaaataaaagtaaaataaaaaacatatat

SEQ ID NO: 207378 - DNA, 892 bp, Cannabis indica
ttgccacaaaataaaagatttaagtttagtaaaatttaaagttttgattttaaattctattgatttaaattttataattattattaatttatcaaaaattaatttatattttttttaattttaatgatgcaagtggcaatgacacctcatgcttatagtgtcaatgtgttatgccaactcatagattatactgtgatagaaaataaacaaaattggagacccaacattctgtagtttgtaaagaaattatgatgacttagagagcacaatttgttatatgttaaagttcaaagagtaaaaattctaattgaaattctattaagaaaaaataccataaaatgtaaagtgataaaaaattccacatcccttttatgaaaagctaaagactacagaatcatccttaagaagattaagttgagactccatgtaatatttcaagattagtaaaatatattagcaaccctagttaaaaggaattaactataaatgagtaattatattattatataattaattataagaaattatttgagaattatttcatttaagaccccgtttatgagttaagagcattttcataattttgactcgggaaggataaaatcataattttaatatttattatgctaatagactatattattatatagtatgtttatattgtccaactgcatataatttttgacaagttggcatggtttagtcacaatcaggtattttgactcaaatcgggttcagagtctaaaattagtgaattgtgtgattgtgttataacatgatttatttgagaatatctgaatttatatgtgataacttggaaggacagaattgcccttagttgttgtcatttgtgtgaatttgatgctttgagggcaaaatggtcaattgacct

SEQ ID NO: 207379 - DNA, 2003 bp, Cannabis indica
atttttatttttatttttttacctactttttattttgtcttctttcttttttcaagttttttgtttttgatgggctttgtggcctagatggaccttacacatttgactctaagactctaacaaaaggggaataaagggatttagtattcacaaattccttttctttttagcaatataccattatttttcaaatccaaaatcaatgtggcctattggtttttttttttttttttaaaaaaaaaaaaaaaggaaaatagcagtttgcatttctaaacatatcattttgtccttggttgcctacaaaatagtttaaaaattaaacagcattgctattaagtatcaatgtttaacaccttcacatgtcattttacaattaattaacagtatttcttaaaaattattacattaaattatatgcgacccgatacttaatcataccaatagcgatattgacatgtaagagggtattgggtatgactggtatcttttagcatttctccaaaatgagtattgttattgagctccagtggtgtctactactttctaaacatgtcaccttacaatttgttaggaatactccataaagttattacattaaaaggagtgttcttattaaaacaaagagaaatatgaaatgatatttctcgtggtgttaatattattttaaaaagtattatattattattggtgtaatgtaatattgagtttcacaatatttaaaactattactattataaaatatcattaaccacttataaaatgttatattataataatattgaatatctctaatgcttaatctctaaaataaatctgtgaatttcgtaaaagcaaacaaaactacaaaatagtctttggaatctaaagaactaataaatgataaaattatttaatcataaaaaaataactcaaaagaattaacaacagacatatttgtttgcatatctagaaggattatcaagaatattaatcttcaaattaatgtaatattaaaatttaaaacaactaattattaatgatattaatctttttagaatccactaataataattatatttttcttatttcttttaggttattattattattataaaaataaatgaagagaacaagcaagctcaaatccttatagaactttctgacatgcagccacgtaagtgatattattttttcattattttatctataaaataaataaataaaaataagtttatgatataattaattttgacatgtgaagtaaagaagacaatttggagtggaattttattttcagtcaaaagatggccaaactataaatgattatttataattattcattttggtcggccaactattgtgtggatataatgaaatttaatttcccaacaaagaaaaataagaagaaattatttttttttaataaaaatgtgatataaataatgaaagatgcttctacaataaatgtctacatattttgatattttagagaattttttagtttaattttttataacgtgttgtagttatttaagacattttataaaattttgagagattgaaaattaacatgctaaaaatatgattcaaacgatttattgcactaaaattcttttattttatatgtgtgtaaaataaattatttgaactttatttttgtcattttaaatttttcaaaattttaaaagatgttcaaattaaataactataatatagataattatatgtataaaaaaagacttaaatttttttctaaatactgaaataagaaaaatgcattaatagatctctttttagaatgtgagaactttttaataataaatacatatattctaaattatagaatcctcaaccactttggtccttcacattcacagatattgtcttgatacgaatacaaatacattattattacaaccatgcaaaattaataaattatatataatatttgtcaaattttattatgtctttaattaagaatttctaatttttcaaatttttgattgggcatgtctagaacattc

SEQ ID NO: 207380 - DNA, 845 bp, Cannabis indica
atcttcaagtgaagtatccataatatgaagaaagaatcaaatttgaagaagtaataaaaatgaaatgttaatcacatttggacatgaatttgctatttgatagttgtgcttgagtagcataagggtcctttttttttggtgtaatatagtaaaggtgatgaggattgcttgcagttaccgtttgatttgaatatttaaaagtgggaataaattaaagatcatgtgaggtaatacactgtgatgtaattaatatatgtatatgaaaaatattgcaatttacactagttttttagtgatggaatttggttctttaattattatttttttagtttattattactaataatattattgtatttcacttttgtacaataatttacttgaatttggagcaaagaagataagactattgctccttggagtcattttgcactttggcttagttttggtaattttttataaaatgacttccgacactttagattagcggtgggaaacatcaaatctaatttaagtaaagcgaacagattcaacctaatttaattgtaattaaactgaatatccaattacaattgaattagatgttaaaagttgaattctaattcgactggatcaatttttgtatgtcaatatcaaattaaataccgatctaattttttttttgtaatgaaataccgatctaatttaattatatattaaaaaataatttatatttgtttttgtataataaaaatatatatttttagtagcttatcttttgagtatttatttttatgatattttgttctattctattacttaataatgttattattttagttattttaaacttttagttgcattac

SEQ ID NO: 207381 - DNA, 709 bp, Cannabis indica
agcttctttaggtctccgatcgtgtcatcctcgttacatttaaccttgaccttctttcccagtcgatcgttcaacaccacctcgatcattcttcaatcgcaagatgacgaagagattcagaagctttcagcgctgttggttggtgatgatcaattaacaatctagactccaagggtttcaaacttcctctttagggccttatatatctgcaaaacccgtaaattgttctaaacggtgccgttaagccgcactttatcttaaaatattattattattatttttttataaataataatagtaaattaaaaaattatttatatatatatttttagaaaattactaatttttaactttttttttaatttaaagattagattacaattttaattggttcgtttctgtgaatttctatataaatttttataaaaatacaaaaaaattattttaaaatataaaaataaaaataccttaatattttttttaaataaattattaatataacaaccccttttacatattggttttttttttatcaatcatacaatattatattaaaactttattattacattacgactaatactaaaaagatatattttcaaaaatttagataaaaaaactttaatgttaaaaatataccttctaagtatatattagacaacgaatgcaagaaaaactttaatatgcaaactaatagtattagcctaat

SEQ ID NO: 207382 - DNA, 1187 bp, Cannabis indica
ttttgtgatagttgaaagtgatttggaggtcactattaatgttcttagaggaagtttaccaagatgagagattgatagctctattagtaggaatatttctatttcaaaatttttgttggaatgtaattttgttaagatttctcattatgcggcccataatgtgattaaatggggtatttgctaataatttttttggtatgattgaggttatcatcaataccaaaaaatattttatgtaattaccgtgaagtttaatttcatttaaatatgaaaagttattttgtaaaagaaaaaaaaaaacgagggaggggaatgaataattattctttgaagtgatgtttacactatttgtcggtggttttgaaaatggtaaaaacttccaaatttataaaaatatcaaaaatttaaatttaatttatatataagttatttagttcttacttttttttatgggataatttcaaaaactatagagtagaatatttttagaaaataaaaaatatatataataaaaaattacaataatatagttacggaattttaaatatttttatgatttttatgcttttatttacagaaaataaggtattttgatgtagttttatgctgtatttaatttgttgttgattttttgttatttgtatgttattttttgttagtgtttgaatgctattttcttattactttcatgtagttttttgttattttcgtattatttttatagaacaccgtaaaatataaaaaaaatctttgaatgtaaaaatataaaatatataaaaaaaaacagtattttatgtaatattcaatttttgtaagaaaatgtaaaaaaaaacataataggagtaaatatctgtcaaatgatgaagcaagtataatctaggtgttttttttaatgagtataatttttatgcttcaatttgatgttttatccaatttaaaaatgctgttatttcattataaattaaaagattaattgatcttttgttacgcctacaagggccagtccaagtattttgggagccttatacaaaatttaaaattagactttttttttttttaaaaaaaaaaaaacgtgtacattaaaactattctattactaattttttttttttttttaagatttgttcatcaattttcaattataaatttttttatttatgctatatataaatggaaaaaaaaaaaag

SEQ ID NO: 207383 - DNA, 958 bp, Cannabis indica
aggaacaaatcctcagaatcaacttgatctcgcggcaaggagaccacgaggttctagaactaggagacaggaaataacaaattagggaaatcccgaaacacctaggaagagcaacctgggggtacaagggatgttccaatggataatcagacaaataatcgagagcaacggcaagacgttcctcaaggatcccaaggatttacgaaccaagggaacaaataaaatgatgtaccaaaagcttcttgcatgaatgaggacgcgagacagcctcgacctgggaatcaggggatccctcgtggcaacgaaagaaacactggaaactaacccatgacaagtgggctacctctgagacaccttcaatgtccttcttgatcagaaagagaggatgtatacatgtatctaaatatagaggatgtgtatctaacctcttttgaaggagaaggccgatacaagatgaagcaagttctagttcaggacactcaaggtctcgaggacacaatcgatcaggtaggaaaatgcaagagggaagtaggccccgacgttatgctgaccaagaaagcatgagtaatacacgaagctatcaatctgagagttattcagagacaatgtctgcaagtaattatgagtgaagacagccagatttttgcaagcacttgaatcaaagacaacccgatcttcgcgagcgactaaaccaaaatgcatctgatttgcgccatcaacttaatgctaatcagcaacaaatagatcctatctaattgcgaataattaaactggaggataagttcagaaagtatcaggatggagaacatgggcaattacctggttacgactcgaatgaggaaatcgagtcgtttcatcttgatattttaaattcattccctcagattcaaaaacccgcatgtcttgcagtatgatggaactacagatccagtcgttcacctgaacaactttaatacta

SEQ ID NO: 207384 - DNA, 963 bp, Cannabis indica
atatttgtggcagtttgaaaagtatatattgagattgtttgaggataaactataaaattttctatagtttagtatatattatatgtatataaatatggggagtaattatagacttatagtagggtaccactttttttttatctgttttaatatttttttaataatctagttatttttatatgatgacactctatagtataggagttatagtagacatcacatcctattttttttaaaaaaaaaaattataagttatttacaaagtcaaaaatagaatacaaaataattaattatacatgtacaatagacactagtaaaattaaatattccaaccatgtttggacactataaattattttaaatttaaggtgaaatatttactataactataatatatattccatatcatattaaaaaaaattgaattataatttgttcaaactcccaaaataaacaaaaatagctcctacataaggtcaaagtactaaagtgacatttaacaaaatatcaaaaatagcatgaaaactttatattgaacaaaatggagatattaactttattccaaaataccacacaaatgtgaaaagaggttaaaatattttttaggggctaaatgatacaaaaaaatgtaggtgtagaccaaatatataattatgaaaatttatccaaaatatatatatataattataaaattgttaaaaagaattagaacaaaaaaattatttattttccaaaattgctaattagagaattattttgtgatgcatatatattaattcaagttttagtatattggagatgttttaaatgaaattttttaggggtattcttgaaatttatataagttcaaggacttgaagagaaaaaagaagaagcaaagcaatgaataaagttgttatttttgctgataaagttgagtagtattaatggtgcctacataaaacatcctaattaattctgagt

SEQ ID NO: 207385 - DNA, 1361 bp, Cannabis indica
atgattcctattcagagctgtttcgatacgagaaggccgaagtttattcgtgaggtggatattccgatgagtcgtcgggatttggaaccggagaaggcgcctggtgactccgggagaaggacaaccacggtggagggaaaggacaagcataatggagatattggtggcacaaaaggtactattagtacacccagtacaagtagtgggagaggtgcatggaaatggtacaaaagagagccagaaaatgccatctgtcaaccaaaaagatgagtcctaggatttcaaattccaacaaggaacattatgacccattacaggtaatagagaatcaccctatttctaagttgggctctaatccccatgatagtaatgtaattttgagcctgatgccaaatgtgggccctacggctttgcaaatggtggagctccctcatgaagccatctccaaatcaagaaccccccacatgcatcctgagcccatagtcttaccaaagcccaattctgagaagggtgagagacttgctgcgaagttgttgggctcttctattgtctcgggcctgcctctagaccgtgaggcccattcaaagaaagaaaggctagtggaagtgtaacacctattgtctttgacaataatgagaaaactgaagtgggatctttgaatgggcttgctgcgaatctttccttctctgtgggaaaggatgatggaactcaggggaaccaaagttcagagagaagaaaagaggatcgaagagaaactctgtatctggtggatcgacacgtaaaaagtggtgggaaaaattcacactagatcttttctagctcagaaagattcaagtcattgcaacgatgcatcattggagaggaacccagtttctaggcagcagagaatggtcattgagattaatctggatcaaaattttcatatgggcgaggaggcggcccttatcaagccccctatacctaatgagagctatttcgtggaattgtcgaggttttggccaaccctcggcaattcaagctttggcggcctaggtgaagaggtttaagattgactgcatctttttgatggaaactaaagttggaaaggagcaaatggttaagattagtagtgctttgaattttgactgtggtgaattcattccttctgagggcttggcgggtggattctgtctgctttggaacaaacaatctaggattatctcggttacgaaacatcgaactggcttcgaatgtggggtttgggattctgacctctctgctcattggacgctgcttgcgttgtatggcaccccatatgaagaggagaaagatttgttttgggaagaatgctctgatgtaatcaagaattgggatgaaccgtg

SEQ ID NO: 207386 - DNA, 1776 bp, Cannabis indica
gtgcatttactaaactgtaattagaattagaataatcaatgagaaaaatgaaattgatttaaaataaaaaaaaatcgaaaaacaatattaaatatttaagatcatttgctataaaaattaagatcatacaataagaatgaaacaaatacatggtcttggagtatcatcattgtcataaataaaattttatattatcattaatttgttatgttcatatctacttaaaatttaaactttggtgtgaacaaaattgtatacacacatgaataattcaataagttagataattaatgaagttcataaaactcttcatttataatttagaagttcacacatactctgaaagagttgtagtaaatatataatcataggtaatttattatgatgatattttaaaagtgataacaataatcttatgagatatattatcacaaaaataattaagaatcatatgtgtatgagggagagacatattcatgttgcactctttttcctttagctcaggttatgtctcactgagttttcctgacaaagtttttaacgagataactttcaaatagttatgaatatgaaatatatatatgtagcacgcttttttccgtagctcaagttttgttccacttggttatcctgagaaggttttaacaaggaaactttaaatcattctaacatacttgcactttataaagtaagtagaaaatgtgtgggagcgacatcatcgatatagcatattcgagaaatatatagattgcactcagtatcaacattagcaattctctatgaagataacacgaaatccatgctcaagtaaagctataatgaagagatagagccaaagatatttttatcaaattattcttaactcatgatcttaaggagagtggctatattggtatccaacatattcaattagtgtcgatcatgcatacttattcacaaagtcattaccactattaatattcgagaagatggttcacaagattgaaattcgtcgattaggagatctccacgaatgcctaatgagggggagtttaatttatactgcactttttttttcagcaaggttcttaatgagacagctatgatagacatccaagggaaagtgttatgaaatattatacatatggatgtctaaaccgcccaaatcaattataccataaatactattgtattttcatttaatttatgaattttgtttctcattattctagtcatatatttttgtataaataaggtgtccctctattagaataaaatactgtgaaattatcattcagtttctttttcttacttttttcttcttatctatttcatattattcgtaataattttataattgattttagttagcaacattaattacaaatgtacaaatctaaatattcatatatttaagaaaagaaaaatctctcaccatactataatttaaaaaagttagttgacttgtggagtagtccgttattagttatgatattaatatgcaaatagtttctttttcttctttgttttaggctatgttaggaagttagattttgataaaaaaaaaaagtacgaacaaaaatgtagataataaaaaaaatcaattttttaagtttgaaatgaaatatttcattgaattaaatatttcattcaaatatttatggaatttaataaagtaattttcatttttaaatattatttgtatgtgtaaaacatatagaaatggataaataaagtatttataatttttttatgatgggatagatgactaagaatattcttaatagtggtatgaaa

SEQ ID NO: 207387 - DNA, 1007 bp, Cannabis indica
aaatttattatttttttattttctttccaaaatttaaattttaaaattgctaaatcaaaataaatttattttaatcaataaaagataaatttagattttaagatagtatattttaatttttgtcaattttgtttattatcttttaatatttttttttgatgaatcaggatatgttatattccacaaatcgattacaatcaccaattacacaaagctatcagttccaaaaattagcccactacaatagctcctacaacagacactgcagtagccccataccgaaaaaaaactgctccatatgaaaccaacagtcaatctctattattacttacaaagactcaaaccattccatatttatttgagcaattttcccttccctaacacttacaattctatttttaataatgaattcagctcttgaacacatctattagtggtctgcactttgtgattccaaaagcaatcatttctattgctccaacccttgtaaatcagacccacaagcatggctaaatacactttcttcctaaattttgatttttttacatctaaagatctaccttagtagcttcttcattgagtatgtacctatcctccattgcagccagtccttgagtttatcaagacatttcttgctgaattcacattcaaagaatatacgatccacttgctctgggctatcaccacacagaagacaagtatcttcggagcaaattttaaagttcactaacctgtcccttgtttggagatgattttgcactgccagccaagctataaagctgttttttggcatattatatctgctccacacctctcggctccatctcactttgatctgatcttctaacaaaactttgtagcatttttggatactataaacctaatccataagcagctggaattgagggatattcttttatttttcctttgattctaacaatctgtttccaataccaactacttacaattgatgccttatagtcccaccagttttttttttttttttt

SEQ ID NO: 207388 - DNA, 506 bp, Cannabis indica
aaaaaaaaacattaaactaaaaacaattattaactggaaaaaattaaataaaactaaatttcaaaattttaaattaattatacatgtagtgttgaataaccaataatataaacagtcatatcataatttttttttataatatgtgataaagcttaataaaaggaccacactttacaacataacaaaatttccaaggaccatttttaactggttaaaaaatttataaaacacaataatatataaatttgccatataataggaatatacccttacccttcacatacaaaaattaaaactaaaactatatatcttgacattgaaaataaaaacaaaattaaaaaaaaaaaaagtacattagtacacttatttttaaaagtaaatagtgaaccatatcattttcctaatttttttctagagtagacaacattgaaaaaaaaaaaatgcccatattttcctttctataaaaacttgcacacttgcagaaatcatttttctctctctctctc

SEQ ID NO: 207389 - DNA, 1375 bp, Cannabis indica
attattgaaaaagagtaaaataaataaactttaaagggtgtttactttttttttttgtcatggggaaacatctaactttaaacataattataattatagtaggtattttacctaattttttttttaaatttgggaaacaaaattttgttgagtgtttgttataaaaatttaaattttcaaaaaaaaaaaaaaaagaaaacaaattcaatagttgtcataattataatgcacataataattaaaaaaacatttagagttcgttatattaaattatgttaagtggtatgttatatattattatattaaattaggttatatattttttttataatgatctttttaataatatatattatagggattattttataattacactgaaataataaaaaattaaaaaaatacgatttgatggaattttaaatatttttacgattttttttattttaatttacagaaaatacgattttttatgttgtactattggtaatttattgttaattttttattatttgtatgttattttttattattattttaataatatttaaatattcttttcaggttactgtaattttttattatttttatagtaaaattataaaaatatataaaaaaatttaaaatgtaaaaaatgtaattttttttttttaaaaaaatagtaccttatgttaatattataatatataaaaattaatgctaaacataataataaaaaatagataaaaaatacgaaatatagtaataatagtaatatacaattcagtatggtatgtaccaaacggacgtttagttgtatttttttaagtgttaagaagatttctataaaaaaaacaaaaatggtggccaagtgtaacattttccaaaatatatttacagaatataaaattttgtcattttctgtaggagattattattattattattattattatttgaaaatgtaatttaccacaataaaagaaaaacatagtaaccggtaataaccggtcatcaacgacaaacaaagctcaatccttttcacactctctctctgtctttcattcattggcacttggattttctatactcaaaactttctctctctattttcttgcattttctcgggaaaatttcccttagatcgaaggaaaaacccctcactaactctcctcctctcggccattgcctcctgccataaaaccttcactctactgcattttctccggttttttttttttctctttccttttctttttctcggaaaaagtatgggaatggcaaagagacacgctatactgtcagcttttctctctcccatgtgtgagtgagagagacactgaaaacggcacagtttcactacacattcccacttttcttcttcttctttcttttt

SEQ ID NO: 207390 - DNA, 840 bp, Cannabis indica
ataaattggactctgtattctctaaaatggtacaaaatagtaccctgaactgattttttatctatataaaagtaaatataatagcctgatttacagtgattatgacaaaatttgataccttttctgcatctatttgtgttaaaatttttttcaagttggttatatatataattattaaaaattgagctcagtgtaatattttgtaccattttgaaaaagacagagtctaatttatcattttacaaaacagattgtttcggtaattttcacaaaacacagaatccaaaatagtattaactcttttttaatacaaattataaatcttattttgtagtttccatacaaaacaatctataactcttacacatatgattcttttcttttttaaataattgaagaagatattgactaattaataatatatattttaaaaaaaattattgtaattatatgtgtagttactaaattcttttattttaaaggttaattattaaataatattaattttatatgtaaatgctaattattttactaaataaaattgtaagaatttatatataattactatatactcttatatttacaaaatgtacaatgtatttttaaacataataatgtaattatgaaatataagtagtaattaaatgtttatattcaaacgagtccttataaataatatttatgtgtaatattattataaaaaatattttgtttgaactataaaattttaatagttggtccctcaagaatttaattctaaccccgccagtaggtataattaaggatggggatacttggtgtaacctgcctaattttcatccatgcacttggtgcgtagtg

SEQ ID NO: 207391 - DNA, 554 bp, Cannabis indica
agatggaaaaagaaatcagtagtttattaaagcgagggggcccggtctctgaagttttttattaccagaaggttggtgactaccttttccaattaagggcattgattaagctggtaaatggtggaataagagtagtggtcaaatttgtgttcaaaattcaaaaacatattgatgagaaagagagtatatatatatatatagtttgcttgtttattcacttacaatgacaactagtggggaacccacttatgctatacaatgatgatactattcctccaaagtgaaaattttattaattaaagcattcttcaactttgacatgaatagatcttaattaggaccctcgagcgaattaagaagagtaaaacaatgcttattattattatgggaattaattaataatttcattgaatttataggattacacatatgatcaacctcgatatacaaaaaataaaaatcataacttatgtgattgttacttcattatttttgtagggcaaggatgattgcacattcacactaacatgatatgtaatacatatatatatata

SEQ ID NO: 207392 - DNA, 809 bp, Cannabis indica
gtatgaccgggaggagcgggaggtaagatggattgagtcacattagaagatctggtggtctaggccaccttggtctgggggcgtccagaagaggagccatctgaaggtccccctgccacgtttctcatcgtagaagttatatttacaaaaaggaaaaaaaacaaagttataatataagttatctgtactaattggaagtaaaattaagaaagttacttccatctagaagacaatccggaatcctatcatcctcagaagaggaattcttagaactatctttagaggcagcaaccttacccttgtctctgggcacaggcggtggttaggtacacctaggaaagtcctattctacgaagctaaacaacacaagggcattctcaacagtgcctcctcatgccaagcattgtcgaagggtctgttccatctaggctacactcttggcaatcctggccaaggatattgtaacgccctaactcttaggcacggtacccaagatgatcaaagaaccctaatcccttaaattcagatctttaataaaacaagcgtgggaaaattaaactttaaacgaaaatagagtgaaaataaacttgtaataattttaactttacaaacaaaatttacatgtttcgggatcccaaaaatatttgacaaaatattacaagtatttacactagccggcctatgcggcaaaacagagttacaacagttcaacactggtagaccccaacccgcttggtctgtgtggcccgaacatgtacatacatcgtccaactcccgcactcatgggtgataaagacagatttaccttt

SEQ ID NO: 207393 - DNA, 565 bp, Cannabis indica
gttggtaggtgaggggtgagttgatggtgggtaggtggcataaatattagtatgaagatcaggcatgtagacatgggaaaggtcagcaacattgcttttgtgggaagcatttgtagcaatagcagagggtgtagagggtgttgggtgagtgatatgatgtggagcttgctggtgtatattgcaggaagtatcagaatgaatgtaaggtgatttcagattgctatcaaagtgcattttttgcttgcctttattaacaccagagttggccaaatgaagaggagaattagcattgatggaagaacctacaacagtgggaattgaggaagtagtaaatgtctgagttggtaaatgggatattggagaaagaggcaatcggcaagtggcagtgttggtggaaagagcaaattgaaagggagacattttctggtttgtgagtgaggacacgggtggagtaggcagttggattggttgaggggttgtgaaagaggtaagttgattattaggcaagatgttggcatggttatttggtagagtagtagtactgggatgggttgagtttgagtgg

SEQ ID NO: 207394 - DNA, 633 bp, Cannabis indica
agtgatttcacttgttgtggcagggagaggacggtattcaacttctgctgaacttcgagatatggtaggttgtttcttcgttttctaggagatgatacaatcacctaagaagatgcaaaaacaagtggttgatcttcttgtgattgggcaagatgcccaatccgaatccgagaagcctcttagatgtaaagaagagtgggaagagtgcaatattccttgtcctaggcttccttttatatatcgtattaggtgatgtaaggcctgtaagtggggagtgcgaggagacgccatgaattggctcaagacattgactgcgtaggtgatatctggcctagataatgtcagatataggagtttgccgatcagctgccaatagctagaaggatttgtgagtggctctccgtcttggtcgttaagtttgtggcgagggtccataggtgctttagctggtttactgccaatgtaaccagtttcttcaaaatgttgtatagtatacttcctttgggaaagaaataggttgtctttggttcgggcaatctcaaagccaagaaagtttttgagattgccaagggttttgagcttgaattggtgatgtaaagactcttgaagttgttgcaggatgttgaggtttgg

SEQ ID NO: 207395 - DNA, 1094 bp, Cannabis indica
agaggcaaccattctaaagcagccttaaaagcttctctaagaaagctgtcctatataaaaaaaaatatttcgttaacaattctaaatcaacttattgaataatttaaggagtaactattgacgctgaaaagtgaccaatttcgtgccgtttaataagtggtagcagcctccgaaagaataaaaaaaaataaagggaacaccacaaaattatagtacttcactccttgtgaatcgacagtatagagctacttctacttcaagcttttatatcgtcaaagtgaattttcttacaagagaagtaaagaaaaaatgattaagtgtagcttcacctcacaatatttaaagagtgaaatagtaaggagagagaagccatgatcttgtagggagaatgaaaagtatgtaaaatgagctacggcagctcctgccggaaatatctttcacttcgtgggtgagtgcctagaacttggtttctagggcgttaggcataattttagatgctcgggtgatcaccgatgacgactgaccaggttaaaatgtcaacatgggcactcatagtttgagttaggctcattcaggatgttcaccacaacatattatctcattagaggcagaccaatctgccgctaatagccccccattcggtcgcaataggctattagcgccggaagtcccccactaaagtttcccccgctaataaatagttgccaatactattattagcggcagaccattagcggcggaaccacgctgctaatacactctgtcagtttcaaacttcgaaactacggagagcattagcagcgggagcctgccctaatacccgcttctaatatcatttaaatataaaaaaataataataattttagaaagaataattttataaataatattatataaatatattaataaataattaatgcttatataaataaataattaattataaatatataaataataatttaaatataatcaatcaaattataaatattataatttaaatccaataaaatttattaataatttaaaaatgttccaacataaactactttaaccttaattttattacattattgtctcaaaattaaactaaa

SEQ ID NO: 207396 - DNA, 577 bp, Cannabis indica
tattaattggatttgtaatacactctatcattgcattgttctacccagttttcgaaattctacatccaatctaattttaattgagtatatcagatctggtctggtttagatggattgatttgaattttaacaaccttaaaagagagattaatatttaactgcaaaagcaaagctatttctgtccagtaaggaaaaccttcatcatagcttcattgattccactggctaagggaaacaagtgtccagcacctgataattcatggtagtgaatccatggaattttactagcaatatagcgttgcagcataaccgggacaagcctatcttcatcaccctgccatatatggacagagccttcattgttaggaaaagggttcttcaaatcatccactggatcaaattcccaactcccaaatccaatcatcatatctctatgcaatgactcgaattctccttgctgtttgacctgttgcaaacacaatcattgagcaatatgaattagctaaatcaacattactacatgatctagtttcatttaagactaggctaggctgtaaggataaagatgtagttcata

SEQ ID NO: 207397 - DNA, 616 bp, Cannabis indica
atatataaatgacttagatttcggttatcctactattgtctcactctcacacaagttattttatgtcaattttgtagtaatatgatcatcgattgtaaaactcacattttttgtgcataaaatgttatttacttatatttcggttattcgattaacatttcacacaagttctatgcagggcaaattctgaaatttggtgtgtcataagaaaaagtaaatatattcttggacccttgtttagaactaaatgtgatattttttaaaattagtaaaaaataataaattattttattgaaaaggggtatttttttttaacccttaaattgatgttaagcacatgtctagctcttttatgttcaggatcgggtctggtctatgtcaattttgtagtagtgatgaccttgatgttcaatccttaattaagcatttaatttttgtaataatatttattttaaaatatcacattagtcagcaaagaattagttaattagtagtgcatttttccttaggtagtcactaattaaatctcaactacctaacaaaagtaataagtaaacctaaaatatttgacaataatatatggtactttaaattttcttattggaattttttccac

SEQ ID NO: 207398 - DNA, 720 bp, Cannabis indica
atatatatatatattgtgatgtaaatataaagccatatatattataattatatattaattaattcttgtgatgagaatggccagcaccagggctgtgaccgggctcagtgggacgaaaaccatcttggtgtaccgaaacgaaacgacgtggttgggtcataattccatgtccaccagctggagggcccttacctgggttggctggtcgaaaggccttgggaaaatggtaatttatagcgataggtgaaggttgaggttgaggaggcccaacatctgaggcacttgtagaatgatcaacaacaacaatggcccttccttgtacggacattattactactccaccaaaaataagtgcaacaatcatacaacatttgcataatatcactaatatttgaacgctttccatcactactatatatatttatataacaagttaacaactaaggagatatatatatatatagagttaatatatataacttataagagacttaagaaaatatttatgtttggaggaaataataatgcactaagaaaagtaagtaagaatttataatttgatggtgtttgatactcgtatttagctgagtatttataaccaaaccacaacattattccctgttagcaccataaccgctcatttttttaattatttatatatatgtataaaattatattaattataagaattatatagcatgtcttttcaattttgaacgg

SEQ ID NO: 207399 - DNA, 838 bp, Cannabis indica
tatacaaaaatattgttactgtcaataattgcacaaaaaaaagtgccaattttgactaaaaaaaaaaaaaaaaaacattttgacaaacacttgatgaacaagagcaaccacattcacataatattaactcaattatggctaatttttttctcaaaagaattcattttccaaatttgggtatcaaaaacattctcattgtaaagaattgcacaacaaaaatacatcatttttgcctaaaaaaaaaaaaaaaacaattttaacaaacacttgatgaacaacaacaacacattcatatatacacatatagatacatatatttttgtgggaaattttgtttacctgagaaagaaatatggcgaggaacggcaatgactcgggtctcaccgccgacgtacttgaggtggccgtcggcaggtctgggtaagattcttccaccatggctacataaaaatttgaacttgttttttggggaaggtgggagatcctctggtgatgatgatgatgataatgataatgataaaccaccattaatggcttcttcttcttcttcttcttcttcttcgctcgccatagatgattagaattgaaaaccaccaccaaccgagtcaagctgattcgactcagaaaactcgacaagaaaaaaaaaatttaaaaatttaaaagtgaaagaaagaatgaagggaaggtagttattaaataagcaaaaacaattttaggccattcataatttcaacacaattaaattaatttttttttatttttttaaaatatctaaatataggacatgccattcatttatttataataataataatattatttttttctatttgaatct

SEQ ID NO: 207400 - DNA, 1011 bp, Cannabis indica
attgtgtttattgtaaaaattcaacatccaatgaatattgaaattggattgtatagggttaaaaggaattcatgaaaactcttatctagtatttataatttagaaaattttaaaattgtccataaaaaattattaacattttgtaaaaagattgactaaaacaactttatcgctaatgttttcaaaactcaaagaattgattgcaaaagtaaaaattgaaattctcatgccaaatactaagggaaatttgattttaagtcaagggacactaatgctaaaaatttttaagtaagccaaaagtatatgggctcgtttagtacgtcgtataaggatcgtattctattaaataataaataataaataacattacgtttggataaaacaatgtatttattaattattacgactaaacttcttaatacaatgtatgctgtattatttaatacataataaatagtccgcattaacttgtattataatatttacaaaggattcggggtcaacaccaatctccgacccgaacccgggacccaggaccaggaccgggacatggacccggaccccggacctagacccgaactcggacccaaactcaaactggaactcggacctggaccccggacccggacctggacccggaccccgaacctaggaaccggacccaagacgcagatctagcttcagacccagacccaaacttgaactcggacctaggacatcgacccctaccagggacccaagacaaagggacccagacccgagacctaggacccagactgggacttgggaccaagacttagacccgacccaggacctagactccggacccgaatccgaacccaaaatcgaacccggatcaagacccaaacctggggctcgggacccaggacctggactgggaccgagactcggagccagacccaagacctagacccagacccggacccgagacccaggactcggacccagaccccaaacctggaccccagactctgacccagacctgaaccc

SEQ ID NO: 207401 - DNA, 1084 bp, Cannabis indica
attattaactaaaataatacaattgttacacacaattttaaaatcaaattacaaatgatatgaaacttaatagcaactcatattagtttctattaaaaaatacaaaaatatgaaaaaaaaataccctgatcagattatttattcagtgttcatttaaaataaaataagcccaaatcagtttcaaaatattacatatactttgaacaaaataaatctaaacaacaaaaaacattcagatctaaagccagtccatgtttaaactcaaagtcctacacactgtcaaccacgaacatcgaacaccgggcccgtcaaaccctagcctttcgaacacgaatgtcgatcgcgtacccataatcaaaaaatatggatggaagggaatcgatactccacatcgaagtatgggtattgagacaaccacatcctctgtggggatgatcgcagggttagtaaaagaaagatgtggtctctgggtaggacgaggacgcagggaggcaagtcgcagcaagtttaatctcgtaaaggtggttaggtcagatttggtgacttgcgagaccaaatccttgcatgagaagggctcgttcagttgcgtgttgtccactgaatcagtcccgcttccctcagcatcctcttcctcatctacctcgcgatcaggagcctcccagtcctcacctatctcttcgacttcagcatcaggagcatgcctagagtgaacaagatgttcacgagcagacaccgtggactcgctatcgcggatcgggattgtcctcggttcagtgagctcctgaaccattctttctatatccgcggaagacaatgggccaagctctgcggttctgacaattggggtctccttctgagatcgaggttgggatgaagctatcctcctaatcttggtcaccgtcgaaagcatggcctccagagccaagcatctggctgtccgatagaagatctttttagtgtgttgaatgtgcaaaaacaatacaagtgacctcacccgcataacaagttcaaattttccttggaaggctagttcggattctctcgaaaacccaaccaaccccccaaggcataaatcgcatgtgtg

SEQ ID NO: 207402 - DNA, 540 bp, Cannabis indica
tctaaaaaaattaaagggttccgacacaatctaaaaatagtactcgatctaaaatattaggtaaattctaattaatgcaatacattattatcaatgtaatatttagatattggatatacatgaaatacatatttaataatggatagaaccaatttaattcaacatccaataaaataactggatcaatcggatgataaaatatatataacatcaaatatataattggatcaaatctaaatatatatacctaaaaaaatattaataaatatgatcgaataaataatactcatattctaagcatataatatttccacaatcgatttatcttttcattagtttatttattataatttcacatgtaaaagaattacattttacctcaccccaccagtccaccactaatcaatcagtggaaaattatatattttatttacccttggtgtgttatttcactctcaatcaacatcttatttatggcattaaataaggtaatcattctgatatgatcaattttaaaatgataaatgataaaatttagag

SEQ ID NO: 207403 - DNA, 567 bp, Cannabis indica
gttccgaaacaaaaactatcacaataatgaaaattggcctctgcagaatatgctgaagaaagttaacgaggatttccttagtcactagaggatttactctatggggctcttgactcactctcatgatgagggctctgggattcaaataattcgctgggggctttctaggcccggccggatcagagtaaacgtggactatgcaaacaaagatagaattggttcggtgggcgtcgtggccttggatggttgcaggggtgtgttggcactgtatgtttccaactttagtgcttcctctgttcttcgaggggaactggaggctatctctttaggcttggctgtgatccagagattgaggctctgtgatgtggatttgatctctgattgtgaagctcttgttttggctattaagaagcaccaatctccggcttggaatgtctccttttccttttctcatgtcttaaatttgcttttggatttgggtgttaatgttgtttggttatctcagtcttgtaaccattcggccatgttttggctaaatggaacatttctcagttgcgtcatggtttt

SEQ ID NO: 207404 - DNA, 716 bp, Cannabis indica
tcactcacacatgagcaatgtagtgttcggttaggcttttgacacccttatacactcacaagagttgcaaaaagcagtcattatgaaagaatttattagcaaaataaatggtcacagaaacgaccatgaattacactgtacgaccataaatttacactgtgcaatcatcatggtcgcatagagtaatttacgcgagattattttgtaaatttttagatttcagattgctaatttggcaaattccactccacctgagctgggatcgatccagctagaataattcctatgaacaaaatccaaaatttgaattgaaaagcatactaatttataaacctgtaaattaccaaattaccaaaatctatcaccggattaaagcttggtagctactgaatgtaatataaacattactaatcacacacatgagcaatgtagagctcggctaggctttaaaacagtcattatgaaaagttttattagcaaaataatcttgtatggtcacagaaacgaccatgaattacacaatgcgaccttaaacgaccattatggtcacaaaaggatcataggtttacactgagctgggatagacttttgacaccctttgatccacatagaataattcctatgaccaaaatccataatttgaattgaaaagcataataatttaatttacaaacctgtaaactagaggtagtggcagtagctaaagcagtggattg

SEQ ID NO: 207405 - DNA, 697 bp, Cannabis indica
gaagcaaatctaaacaagatccacgccctttttgacatgaagtcgcccgcaactgtcaaggaactacaaagcctatttggacgtattgttgcactaaacagatttgtgcctaagtctacagacaaatgcatacccttctttaacgttctcagagccaacaaaaaatttgagttgataggggaatgtgaaaatgcattccaatagctaaagaagcaattggcccaacaaccaatgttgtctaaacccctagacaatgaagacctaggcaagtacctagcagtcatagagcacgctgtgagtgctgtcctcacaagagaaaaagacggtgtacaacaccttgtatactacattagcaaaaggctagtcgatggagaaagtccatacccactcatggagaagctgttctacaacattctcttagcttcttgaaagcttaggccctacttctaggcacaccccataaaggtgtacactgatcaaccactacgataggttttgtagaaaattgaagcatcaggccgactactcaaatgggcaatagagcttggtcaattcaagatcacataccaattaagaacagtcataaagggtcaagcccttccagacttcatggatgagtgcacaactcaactcttgagacccctcaagactcaagagtacaaaaatagcaacaaaagaagtgagagcaagagcagca

SEQ ID NO: 207406 - DNA, 1496 bp, Cannabis indica
aaacttgtctcaggggttgatctattaacaccttaataagatgtgcctggaagtaaggccgtaacttgcgagatgcatggattaggcataagacaagtttttcaagagggggatacctcgattctgctcccagtaacctcttactaacatagtaaacaagttgttggtgctttccctcttcttgcactattgcagcactaattgcatattccgagacagccaagtagaggagtaatgtctctcctgttattggtttcgccaaaactggaggtgtcgataaatgcctttttatgctcttaaaggcctcctcgcactcttattccattcaaatttcttgttgcctcgcaatacgttgaaaaatggtaggcacttatcacttctaatcttctattgataacaaataaggttatgttgaaatgagttttatttagggcataaaatcccaacacttagagacttagagaagttaggattgggttaatgctctttatataggagagcttacataagaataataacctaatatccctaaaaataggaactataaagtatttgttacataactaaataatagatattaaataggttaattatcccccaagaataggagaataattgatatttctcccctatttttgttggctgctaaagccgaaatcgtagcttggcttgttgttccggatgaaggctacacaccaagtgcctgccaggatctgacaggtcaagtgcctactagtttggcaagtgttggccaacatttgcatgtgttggccagccttattaggtgttggtcagcctttgtacaactttccttgcaaaggtcaggcttccttagtcgaacaggccctctttggtctgacaatcaccctatggtcggccagcttgtgctcaaaccctggtcggccatacaggcttctcctgcccagcctatgtacttcctttgggaggccagacatggatgtgcagcttcttgacggcttacttaactcattttgcttgttgcttgatggttttgtcataccttgtaaggagactttgtcctgctattgacaaggttgtattccacgtgtccttagtcaggctacgtggacatgccacgtcaggtggacaaaatttaagataacactcataaaatagtgcaacgtgacacttaagagcactcacaataactcttctactctatccttcaaaatatatcataaaaactcaaaattatatattttacatcaaaattttaagtacacagtgcttctttattttgctttctctaaataatttaattataatattttgattaattaaaataatataaaataaatcatagaaagagaaaataaaaataaaacatattttatttggagagagaaagaataaaaaataattaaaaaaaatatctagagatgctctaaaccttctaatgctttaaaataaagaacactttagagtatctatcgcaatgagttttaatgcttctttcttcaaatttttagagaaaa

SEQ ID NO: 207407 - DNA, 656 bp, Cannabis indica
cttcttcttcctcggagtccactacttcttctctcttggtttgctcgcagtaagccagtacctcctcagcaccgtcactcaggaaactcaggtccatgttgggattggccagccaggctctgtaaatgaattttttgcaacattattgcatcaatccttagcatcagcctcagcaccatcaagctttgcattcgcctcgttgagctcttcttggagtttttggcgggcctcgtgttggtctttggcttctttttgggcagcttcgagttcagtcgtgtggttcctctttagttcctcgacatccttggttaagcgtgtgttctctttctaggcattattccattactttgcgatgaactcgcgttgttcaatggacttgcagagttcagtttccagttgttggactttttgaagacctcagtgttgtgccacgtgagacaaaaaggatgcctacaaaattaattttttttatatatataaatttgaaagaaagataaagaagaataaaaagaatgaagaacggaactaatcgaaagactaaagttgagactcctcttgaacaactcctcgaagctgccattgttaaccaaatcctagtcgccagattgaaagaattttaaatggcgctagctagaggtggcatactgtgagcaaaa

SEQ ID NO: 207408 - DNA, 691 bp, Cannabis indica
gcctactaagatgtctaaatttcagcctattagtctctgtatagtagtttacaaagtggtgtcgaagtgtcttgctaaccgtatgaagtagagtttgaatactgcgatttcggctaaccaaagtgcctttattggtggtcgaatcatccaagacaatgctatcttagggtgtatgaaagccttcgttgtatgagaaaaaggagatttggtaacgagacaaaaatggcgttgaagcttgatatgtcaaaagcatacaacagggtggaatgggacttctttgatactatgatgtcttgtttggggtatgaagacgactggataactaaagtaatgaatgaattgtgtctaatctgtctctttttctattcgtattaatggttggttagaggtaattttactcccttcttttttcttttatattctgaagggttgtcttgtttgattcatgaggctgaacgggttgggagaattcatgggctgagatttggtttattgaaacaaaggttgttccatctcctatttgcgaatgatagccttattttccttgatgccattaaggaagacgatcttgctttaaaaggggttttggagttctatgcaaacttatccgagcgatgtattaatcttgagaagtctgatctttgtgttggctgcatgataggaatggctaaggctgaagagttggttgaaa

SEQ ID NO: 207409 - DNA, 1823 bp, Cannabis indica
atcctcaaatctttttataagttccaccttaatatggtgatggaaaactcacaccacgatcttttagatctaccaccacacacaagaaataatgtgggctaattagaataaaagtgtataatgtattcttgagttatcttaatacgtgagcaagaacaatttttctctacgagtgaataataatgtaaagcttaacatttttgagtttcttaaattaataatatttaaatatttgtaatctattctgttatatttatttgaaattaaatatttaatttaaactaaatatctaataactgatcaatagaatctctatacaaatgaggaaatatctcaatcacctagagagaatatttcaactactttgagggaatatctcaaccaccataactatctataaccgctttttaaattcaaatttaaataaatatttatcttttgaattaattacttaatctaaaacaaatatagtggggcttgtcttatctgataggcgcctatcattgagtccttacacagtgactggcaccaccattgtcttacccagacaatggtaatgcctttaacctgacaaaactttgtctttttcccaatttatttaaataataaatttaaaaaatgatttattacaaaataaataattactactttaccatttcaaaatagatttttccgaacatcattatataactttatccatacccttgatagtgttgcaaggtggcgatcaggtgaccatggacctataatactaatctcatttaaattagattatttatttaatctcattaaccaattaattttatttatcaactccatgattacttcactataaatatggaactgaactcttagtaattctagaattatatttaccgagtataattgtagtgtctactgatatgataaatttgagtgatttttcctccttgtgtcggttcgtaattagttttggtcaaattatcgtttacctttctaattaattctctctcctttagtaccgttaattcactagtgaaagtataatttagatctaatctaaatttgtgcataattttttagctccagaattaatacttaaaggaaccaacattcgatctatttgtaaagacaggattccataattataaatcaagttcccatccatccacattgtttgcttcccagaataaaagttttaagaatcatctttctgaaaaactttaatgagtgaagcagggaaactaataacatgaacatgagctcatgattactgaggatttaggccgatctactattgatagtcattgtgatatgaattagttctttatagtaatcggcatgtttgataaagacatctttattacatatcggtccatgtcatataaaatatccattatgtacaacacattcacttagatatcatactacatcagcaatctgaatcaatactgatttcacggaatattaggcatcaatgaacagtactagcaacccttgattaaggattctgtaacttaatatgttactgactattttattcatggctaagtgatcttaattctccgtacaatacaagtcacaactttatatatgaataatgaattttttgatatttatatataaattatttaatattcaatattaataattttatattcaagaatatattgaaatgttcaagtaaaattttatgataaaaaatgtctttaaaggattttctaggcataaactctaacaatatcctacttgtcctaaaataaaactaggcatctcccttaatcccatattcgtaatatgacccataaaagattttgctagtattgtcttatgaatggatcaat

SEQ ID NO: 207410 - DNA, 1454 bp, Cannabis indica
caaaaggctttaaagctttgtttttaatggatctgtcccaccttgtctttgtctaggcagacataaaatagaaaaaatgacctataatcaaaaccatcattgatatttatatgtacaagaattgatgcccaaaaaaccaacggtacaaaatgcatatggttgcaattatagtctcaataagctttatttagaaaaaaaaaaaaaaaaaaaattgaaaaatcaaatgtattaggctaacttttttgttttggtatattgtcactttcatatgttcaccttatgattaattattaggaggagcaagcaattttaaaataacataaaaactcaatattatcataaattaaaattttcttgtatattgtatactaaagtttgaccaatttagtagattagtaatattcataataaattgtattgtttgagtcaacaaaaaatatttcatgtgattagatttgtacaatgttccctcctcaagaaacatgcttgttctaaggtttgatgttcaatgcaagtatccataaatgttaaaaatcatatataatggtagagaaacatgcttgttctatggttaatgctcaatataaaataccaaaatgaatcctaaaaccataataattaaaatattattattagtaaaattgtatacaccatctaatattaacgcataagttgggtttggtcgtgtatgacatcaccataataaaccattaattgagtggttgaagttttttactattcatcactttactcaaaaaaagaaaaaaataagtttttatttttaccatcacgtgcatgaaaatggccttattgaatctacttcttcttcttcttacaaatctaactcctaaactttatgtgtctcttgtccccttgtctgagttgtctcctttcgtcaaaattagcttaggttttaattaatttatttatttttacaattgtaaccacaactcacaagctacaaaaaaggaacaaatatgcttaaaataaactttaataataattaacaaaaagaaaaacaaagtttctagattacgcaaagtcactatctcttctccacattataatttaaaatattatatgataaagtcatcttcttaattactttattttgttattatgatatatattgaaaatgaagggaatgaaatttcctataactagggaatcattttacctatctaatgaacttcattaatatatgattgtactttaaccttaccctcctcctaaaaaatgaacattattaatttggtagaaatctccaataattttggcctccataaaaaaaaaaataagtgatttttctcaaagtacaataattttgttatattgttactttttgttttagttatctggtagagtagacatgattttagagaccttcattatagattggtggttaatttgttggttggtactatctatattgtgatgtgtacttgtttttaaca

SEQ ID NO: 207411 - DNA, 1238 bp, Cannabis indica
taaataccaactagatgatcactatgtacacctgtgtatgtgtgtgttaacttggaaactttccctggtgatgtgaacatcaatatttgacacgtggcaagaaagataacatctaagagttgagtagtcccaagtcatagtggttgaccttccctagcctttcccccaagttgactccgagaactttggaatgggtgttcggattctgataagttgtttctaactcactatctttcagtattctatacgatgaagacatgaagcatccaagaccaggccccgggagccgaaaatacacgaattagtacctcaaaaataaacctgggcacctaggtttcatccagcgtccaagttgacaaccccaactagggttttagttttcgggaccatcttagtgcaaatgggtcaaactttgcattggaacatgaactagaaataccacgaacatatttgacgcatcagaatcaaattcaaagaactttcattgacccagtgcttaggttgacaatttgtcaacctgggcacttccaagcatcaaatcagaaatctgactcgtgaatcttcttcgtcttcatcaaaaatggagaaacaagtgattttgagaaagaaacatcccatcctgggtgccacaacaagggaccagcgcccaagttgatattttgtcagcctgggccaatttcgaagagtttttcgaaaagtctttcgagcatattctctattttcatcaaagattaagattcaactattttggaggaccaaacagaacttctaggtggcctaaaacttgacctaatgcccaggttgactttatgcactaattctgtaaatatgattaaggtaaaataaatgttgatacatatgaaatcaaaaataaaataacttaaaattttcttaagttaaattgcaagtcaactacacccatttcaaacaaattcataagatatataaatagaataaaaatgtgtatcctataatgtcataatttactgtcgctggtgcctaaacaagcattgccgataggaagaaacctaacaacggttttagtttgtgccatagcatggcacttacgtgtcactaccgtccgtgcttaaacaagcatcgccaacaggaagaaacctaacaacacttttagtttatagttatgactttataacggttgcctcacaagaacaacctaaataccggtatccacatatcacattgtctacttaagaaaattcatgccatagcctggcatt

SEQ ID NO: 207412 - DNA, 908 bp, Cannabis indica
gatttctgtttaagtatttgattcaaaatttcaatgatcattggacaagaaagtagtgagatatcttgttaatatcatgaaatgatttctttctttataaacatttgttcattcaatcagctggaataatagcttatgaaagcaaatttattggttttgggattaagtaattggaactatcttgtgacttttctttaagcaagtagaattttgttgactcaaaaggtttgtggcataaatatatacactgatatgtgtatcttgattagatttaagcgtttatatattacaatcatgcataatttgagactcgaatccaggacttccaacacacacgcaccctcttatgaaattcccacttgataaatgggaacttcaaactttggtatataagatatgccaattatagtatttcaaggctgcattatgaccaaaaatgttataagcttgcaaattattgaaatttagtttacagaaggatgaaagtgtttatattgagacaaagaagcagttagtgtatactgtgaattggtggagaaaagaatagcttagaagaatcttgccaatctgctccagaaaaaagattttggaaaaattgttttaattaattaaggaaaaaaataatttaatagaaaatagcgttaactaaaatttaatgcacttcttaaaatacatctcttgaaatgggtacatcaatacacctttatctatcttggtattcgagaaaaaatttcggtctaaacttttttcatggtcgtgtacgttgtagttatttaagacattttgtaaaattttgagaaatttgaaaaaatttgaacacactgaaaatagagttcaaacaatctgttgacacgtgattttttttattttatactagtgaaatagttgtttgaacactactttttata

SEQ ID NO: 207413 - DNA, 417 bp, Cannabis indica
attttgatgagaattgtaaaaataattcaaatttactgaagactttttgtctttatgaaaatacatgtatattacttaagatatatgtttaatcatcatattatatatacatgtattttcatgatagatatctcatctaagttgatgaatgtttatgatatgtatttatggtcgattttattttgtcgaccaaacatatatataattttggaaacttttggaagttatgctcatggtatgaatcgttccaccacacaatttgaatttttcaatcttttatatgtctttttgttttttttttttttctaaattttcactctccatcaattgttttttgtatttaggaaaattttgacaacataatatttttcattatttaagatttttattttctatctttgattttacattctatat

SEQ ID NO: 207414 - DNA, 535 bp, Cannabis indica
tgggtactgagcttgggcctgcgttgggtaacatttagccgcaccaatcattagaaaactaaacaaaaacaaaataagttgattctaaatgcgagagtcccaaatgcactggggcaaacattgggagagttgaggaggttctcaacttctttaaatggattcaatccgagacgagatgcatgttcccatcgaaccattctgatcattctcgagcatagtccatccgccatgtctaggtcgaattgccttaacacctcttcatccttatcataatcctctatttattaaaaaaaaataatagatcacattaaatcaaatcaaccagcatcaaactctaaccctcataagtattctaagaaggagattatgagattcatgataataattaaatagtatcttgaaggtgaacattggggcctgggagagaaggaagaaggtaacttagttttggagttggtggtggtgtctcttttctttctctgccagtagaaagccttcatctcgatattttccaaatcgtcatctctctctctct

SEQ ID NO: 207415 - DNA, 1575 bp, Cannabis indica
tacttatagactaatgagattgtcgagcttagggaatgtttaaccacaatttttttaaattaagacttatccgcatgaaaataaattttttgggaacttatttgtatcaaaatattttttttgagaacttatgtcgcactttaatatcaccacgtgatattttagggaggaattaacggatctattaaatgaggaccaacagacttacaagaatgtagttttgtgacttttgcctctacttttggaaattaggaatttatatacatcaaatgaacttttttgaaacttttactccaatatttctaaattaatatttatgaaaactatctatcaaaaaaaaaaaaataagtacggtcggtgctatcgttatggcgcaacacaaaatttttcctataacatattatagaaaagacaatgggaatgataatgaagataaaattatgctaagtactatctcacaactaattttctaatgaatcctaccaagagtgaccttccttgtactcgaaagggtcccttgaaaaaaaaaactccaaaggtcgtatataatatatatttatattatgtggccaactgccaattgtggaaaataggactttttattctgagaaaatggaaaataaaataggcctttcttgatagcataaaggaccttgaacgtattaaacgcttctttgctcagtgtacagagacgcatttcggactaagtactatagttaacagttcttacaatacaattaaaataaataaataaagtccaaactaaaatctcaaattagaataacaaatgatcatcaacccagccgttccactttttctactgccgactataatatttatttattttgtgcagtctatattaactattcttttcttttgtcacagatatattaattaatttaacagcaataattttaaatattacagtttaataaattaaaatatattaaaatatcacaataacgatatataaccataaaaaatctgattcaaaaatggtaacggatagaattttatctgattttcatgattactcagctttgttgatattaaacttcttttatactcttattccctaatataattctccagaatccagataagtaaataattttgctcataatataggtaggagagcaacaggagccgataaggcgagttagtatacagtgtaaaagagttttaataattacatcaattatataattacaatagttacatttatttagtgttatatcattattagataattgtaattcatttacaaattaaataaaaataattaataattacttgtaatctaatactaatttaattttattcatttccttataaataaaaataaaaatatttataagcattagttgttgattactaaaaattgctaagtgtaatttttggagatctctaatctaaattaatgagagggagaattacaatgtacactttaaaagtgtatgagcaaaaaaataagagtcaccaccatggcgagataccactcgagagggagagccaacatgaggagaggcgcaagcaaaggtggagctccgcgctccccgtcatctctctctctct

SEQ ID NO: 207416 - DNA, 700 bp, Cannabis indica
tttagcttataaatacatttctatttccatacgaaggagaaattacaacctaaatagtcgaagctctgccaatattactctaagtcttcttcttcttcaatagaaactaagagtacaaagttagaatttcctgtaaaatattgtaaaaacactaactcgtagactaagattaattaacacatgaactacgtaaaaaattttatatagttaatttttatattttaatctttctttagtttttaaatatttaattttcaaaaatctcgataaaccattataatattaaatttggatttttttaaaaatattttggaaaaaaaaacaaaaggattcttatatatatatttttgttagtaaagtaattaagactcctaggagattaggagaaaaaaaccccaaataataaaacaaacaaagaaaacgttaggtcggttggtctttgtccctactaagcctcaaatttttatgtttatgttttataacattattaaaaagaagagaaagaattgagtgaaaaagctgaattgaataggaacgaaacaaacgtcgcccacgaaacattgaatgaaaggtggaagcaggaagacgaggaaaggtgttttgtaattggatttgtatgtatatgtatatctcctcctccttccttctcctactactattactcatccaaacccctctctctctctctctctctctctct

SEQ ID NO: 207417 - DNA, 1064 bp, Cannabis indica
aaatacttttatgttataaaattttaatttaaatttctttattgtattatttttaccaaaattttggcagcataacaacttaaaaattataatttcaaaatttttaaaacctacaaaagaacgcgaacaaacatttcattcgaccggactacatttaatcacagaacctacttcactacgaatgaatatttaagatattcaaatttcactacaacatgcataaacgtattaaataataacataaattaaaaaaaatttaatgtggaaaaaaaatactaaccgttgaaatgcaaaaacaacacaaagcctctaacaagtagcagttactcgaggcagtaaaacaaagtctaattttataaaaaataaaatcaaattaaaaacattaacatgcaatcattaatatacatatacatatacattcacacacatatatatttaaatatatttatatacatatatatacacatttttacacatacacatatatatttacacatatttatatacatatataaatatttttacacatatatatacatatttacacatatacttatatacacatacataaacagacttaaaataaaaaatgattaaaattaaagtttaatttatatatttacatatttatacacatgtacaaaattatatatacatttatataaaaatacaaatattcatattataaaaaataaaaaataaaaataccttatgcggtggtggatggtgatgacatgataggactaaaacagaaagagatttggtgagcgagagaaatttagagagatagagaaggatgcaatggtggtggtggtggtggtgcggtggtgatttttggacagccaaaagaagaggaggaagaagaagaaaatggcgaagggggagggctttgaccctaatatatagtcttttatcaacgcattttgttgcatcagaaaaaatctatattgtgccagaaaaaggtataaaacttaccctaaattaaaatgcaacgttttgagaagacttttaccggcctacatttgcgtcgacaaaagtatttccacctacacattatcatgcaa

SEQ ID NO: 207418 - DNA, 830 bp, Cannabis indica
tatatatatataaaaatattagaaatagtggccaaaggaccatttgtttatgctttatattcactattataattttcatgaaaaatctttaaaatttaattctatataatagaatttttaatttaacagtatttttttacgttaattttaacaaaatatctcaattacttaacatcatattctttattaattttataatattaatatatatatttaaaaataaaaattatgtagacattttatataaaaaatttaattttattatatatatttaaaaataaaaattatataaatatatataatcacatatatatatgaaatatatatttaaagcttaatttcacaacaaatcttttgttttaaaaatgattaatgatatatatacttctaataatttgtacacatttattataacgtattttgtcaaaatattttctagtataattattatatatagagagattaatttaaaatacgtatggcaatgaattttattttttattgtatatgtaaaatacgtatatatataattatatttaaagagcattccaatgtagctgcaataattaaaaaaaaattactcaaagatcaaattctcaaatcctatttcaaaaaaaaaaaaaaatacactaccttaaaaaaaattgaacatacatgcactttataatatcacttaattaaaaaaaaactaattatacacgtgcattgcacataacatcaacctagtatataaatatatccctatacctatttatgtaattgtttctaatatatatatatttatatatataaacgtgtatactgtatattataaaaaaaatcttattttg

SEQ ID NO: 207419 - DNA, 504 bp, Cannabis indica
ataattattaattaaaaaaagacgaaaataataaatgaaaactatattttttacgtaattttgtagttaaatctacatgatatctcaatttctaaacagggtgatcacgtgacgttatttttagtaaaacgtgaagaacattctgaggcctggatggaacatacttttcttgctattctgtctaggaggtttcgagctcaaaaattaatttactcaaaggcagcaagaagcatccggatagaaccaaagtgtgactgttcgagcaagttctcaccattcaacaatgccaaatgctccgaacaagataacacggttgaaacagatcttcaagaatattttctataaatatgccctcatttacaattcaatcaaaaccctagtttagtgggattgacacacatcagaagaaagatcataagaaaccaatttagttttctttttattcctaattgttttgggaaacttaattgatatatttctccctataaatagtgaaatcatttc

SEQ ID NO: 207420 - DNA, 1134 bp, Cannabis indica
atatttacaaagaattcggggtccacaccaaactctgacccggactcggacaccaacccggacccggacctggaccaggatccggcacccggacccggacctggactagaatccgagacccggaccccgaacctggacctagaccctagacctaaactctggacttggacccagacccgggacctggacccagacctagacctaggactcggacccgggctcgaaccaaggacccggactcgaactagggacccggaccaagacccgcacctagacccgaaccaagtttaaaacccgaacctgaactcgggacccggacctgagatccgcacccgggacccaaacttgggacccagacccaaacttagaccagagacccaagacccaaacctaggacctggacccgaactcgagacctagacccagacccaaactcgggacccaaacctggacctagacccggacccggacccggacttgaaactcaaacctggacccctaactcgaacccgaacccagacgcgtgacccggacccgagacccaggactcaaaccaaaacccggacccgaactcgcactactacaaaattgggttttagaggcaatttttaagagcttttagcgtcaattttggcaaaattcgctaccgacgatgttctaggtgatgttgtatggttcataacaaccgacgctatagggttcctatggcgtcagttttttcataacaaccgacgccatagggtccctatggcgtctgttttttcataacaaccgatgccatatggtcttggtatttttcagctttacaattttattttttagcataatttatatatatatattatttcattattaatataattaaattaagtataaattatatataataagcataaaaaaaattaaattaaaaagttcaataaatacacatttacattaatttaagtatttgtatattagttatctttttattaatattttatattgtacattatatgtttgtattttgtagtatattaatatcatttttataattgtttaagttatattttgtataataattagtatattaaataataactaatgtgtaacacttgaatttttaggtaatttaatatttatattcatttaaat

SEQ ID NO: 207421 - DNA, 1225 bp, Cannabis indica
tatttttaattatattacatgtgaaagtaatactaaccccgacctaaccccttgatttttactcttaatacttatcctaaacatattatcccttggacctgaccggaccttggacctcggtcttggcccccaatccaacccgaacatggaccctggcctcacggtgcaagtcctaaacctagacccgaccctggcccccactccaacctcagcctcgggacctcaatctccacttggggctcggccccaaaccttggccttgtcactgacctcgacctcgatcctgacctcgatctcaggccttggactctggcctaaaaccctagctccatggctatcttcgaaacccaccctcgaccttaacctcaagccatggacctagagccagccccaacatcgaccttaaccccaagtcctagactccagtctcagctccagccctgaccctgacctcgggctccaaacctaggccgggcccgagtcccactccaattctaattttaccacaattcaaacatagtttataaatattataataccggctatacattttttttttatgaatttcataatatattatgtgtttatatgtctcaatataataatttactaatttaatataattgttgaggcttatatgagtaataaacgaaccatgtgtatttattattacctgatggttgtagaggtagcgacatgcctcctgtcggtgctcatgtggtaagatcacatcaagcgcacccgtcacactcaatccaataacctatgtttatatatatatttgtatattactaactagtacacatgtacatacaaaaatacatttcatatatgataaatcaatatatctatatatatatattcatggaagaaaatagatttatatataattacaaattaaaaatataatataaatatttggaaagcagtgaaaatgttgtgagcatcgaaaaagcaaggagttgcaaaaaatttaggaggagcaagtgatgaatgaggacaagttatgatgctgatgcttccctatactgaggaggatgttaaaaatattttattctccattccagataataatttttcaagcctagatgagtttagttgtggctttttcaggaagacatggaactctacaggaaataattttactccaactatactttcagtcatttaattcaaagaagattcttaaggagataaatactactactactctaccttattccaa

SEQ ID NO: 207422 - DNA, 873 bp, Cannabis indica
aggggggacaacaaaaatcacttcaaatagaagaatacataatatttaataataatactaatatctttatcaatacatgtcataatttagtgataggacagattataaaaagaatattttattttatttaaaaaaaatatagtgctaaagtctaattatattattactaataatattttggttggaatttttgtttgtggttttttgaataattagtaaagagcccacctttcttttttctttttatttttataatatatatttaaaagaatagataaagaattatataaacgggttagctgtcaataataaacactttcgtcattttgtgtgactcaatttttgttgtaatgttttatttttgatggaatttaaattttaaaaaaaaaaagtaaacttagataagtcgtcaatttttttagttgtaacacagatgttcaaaggagagatcagatatgtggattgctccaaatgaatgttgcaaatgacaaaacaacagttcttggctacttgaaggagaggcacacaaaggttcaaagtaggggtgtgcagaaagtcatccaatctaattctaaccgaccgatccaattccaaccgatccaatagaattggatatccaatcataattggatcggatcggatgcaaattttaaaaatccaattggatcggatcggatattggatgagacatccgatccaatggataaccgatccaatccaatccaatatcatccaatgtccatccaatcatatttaatatttataattttatatatttaattattttattttaatattttatatattattttatttattttatttaggtttttaaaatttaatgtttttttctattatatatatatttttttt

SEQ ID NO: 207423 - DNA, 709 bp, Cannabis indica
catggcaaaccgctgagcatgtcttttttaggaccccctactttcatttgaactcgtgttctcaatctctgaatgctcattatctggtccagaaagttggaactcatcctctacccatgatgggaacttccgaaatgctgttgtacatggatcaactgctcctttgaacttcccaattcagtttcgtagtgattacgtacatcaatcacaacctaaaaatgtgtatgagttaaatttaaaactgagtagggaacattcagacaaccttatgggaactttacataaaaactttaccacagcatacttcaccttacagccaaatgtccagaatgaattaagaaggcttccagtttttcaccattaagaaaactaaaaatggattatattaccagatcaagaagaaatgaaaaaactcaactcttgacctaaaaataacgttctaacttctaatcaacattagttgtaattgaaaagaaaagaaacactttgattgaaagataaaacagccactcacagtttcaggatcacttatcaattcattccactcccttgggctcacatacttcccaaccttttcaataggtgatacagtaggcattccaagagaaacaatctgctccattacacagagaaaataaacccgtcttagaaatagtgtaaaattaataaataaacaacaacacagcattgagaacactccacatagttt

SEQ ID NO: 207424 - DNA, 1073 bp, Cannabis indica
ttattttttaattttaattcttattttattcgggactgcgtttccgtacccgccaaatgtgtcgcacgtgtaaagggttttgtttcgtgtgatatgggaatagttcttaaagctcctccggtccccttttggagctggggactgggaaccgacactcgacccctgaaattacgaaatggcccttgtgaaggtcatttaatggaggcggagttttggtggggacaaaaaggtctttttagaaagtggtaagtggaagtgtttttatataaataatgatactttgtctttatgttgttgaggaagcttgaagagtaagttgggagaattgattggggggacaatgggtttgtgtggtgtgtgcccttacgattttctctcatttggccaaatggaattctatgaaaaaaaaaagggatattttccttaataggctttttagatccaaaatttacatttttatcttagtatgaaaaaataaacaaaaaaggaaagacaaaactttttttttcaaaaatacggactgagcaaaacagtccccttcaccctctttctccttcgtttccagccgcaccagaacttccccatctcctccatttttgttctcaaccaaggtacaatttcagatctgaaaaaaaaaatcgttaatgagaagggtacaatcgtaaagcaaaaatcgtacaagattgatgatgtttccacgtttgagatcaggtaggtaattaatctaacaaagcctaaaattcttggcacaccttaggtagtgagcccttatgtgtgcaataagtcgattatcttcttctttagttcaagcccctttatttatattgagcaagagaagaaaaattacagatctgaaacaactagtttttttttaaaaaaaaaaaataaaaaaaaataaaaacaatttatcttctattcttttttctttgtttttgcttttcagcaagagcggcaagaaatctggtggccttttttttgtgttgctgaaacattaaggttgatccttaggggtctaattttataggcttttgacaaaataagagagagagagaggagtgatatatttaagatta

SEQ ID NO: 207425 - DNA, 639 bp, Cannabis indica
gagagagagagagactcaaaaatattgctattttgtggaaacgagagactcgaaactcttaatttttgaataagtcactttgccagaaaagtaaaaaatatatgaagtcgtgaatttaactcttctgactttatagctctcagttactatgaaaaactagacaaacagttgagacagaatcaaaatcggataagcagaacctaacgcaccaagtcatatgtcaacctgggcgatcggtgctcttttcgaagcatccgggttgtctttttagaactttcaaggttcttaatatcatgaacgaggtctcttatcccatttttgaccatttcagagagaatgattgaagtagaatttgcatttgggtgcaaaaccagcgaaccatgatgattttcaagttgggcgttgggctcaattttgaagcccctagatttgtcgttttctccctaagtttacttgtatctttgttatttataatgacagagaaaggcccaaaacacttcttcaaaaaattgattggaaatagcccaggttgataatatgtcaacctgggtgctaggcccagtgccaggtgttaacttgggcgctaggtgcaatttaaggcccttagataattctattttctcccctaaaaatagttga

SEQ ID NO: 207426 - DNA, 589 bp, Cannabis indica
tttttagtgtaccggatgatggtgatgaacgtataacaaccatttagattttaggatgagtaggatttataaagaaataagaaggaaaattggggaaaattaagagggaagttttgaaaaaaatagtatagtcaaactgaaaaaattttgaaaatgaaaaaaaaccacccacaacttgtaaacgccttagaaactagaagaagatgaacatgaaaggttgggtagtgtgtttaaagtaataattataaaacctttaatatatttaaaaataataatacccaaaaaaagagaaaaaactgccacaaaaagtgatacaacacgtcaaatttaacttttttaaagtattattttttaaaaaaaaacgtggcgaaatcccgtgaagacatgtgtaagccataaagaatatataaaccgatacccaatgacagtctactgtcgaataaaaaaaaaacagtaaaaatgtaaaaaatagtgtgagacaatatgaatgtaataaatgagaaaaaattagtactaaatttctcataatttattagtatattttaacaatgttacaaatgatacaataacaatgaaaagtacaaatcta

SEQ ID NO: 207427 - DNA, 725 bp, Cannabis indica
gtatggtatacgtactgtaaatatttaattatagtaaaattagaaaaagtataattttgatgatagagaagaaaagttaacagaagtggtggtgtaaatatatatatatatatatgggactttgtatgtttatcaccacatatgatatggtaataaacatatatatatatatatagggcgatatggtacaaacctattattcatgaggtgactacgttgcatgtagatttatatatgaactggatcactatgaatttgtaattaactgaacaattcgttgaaacccttttttgattatgattacaatatatatataaatatatccgaagagacgtacacaaataagatttatctcactcaatggaactgtctctctcattgaattaatatttataatttgacgacccatccattaaaatgtgataaagattgtatgtttatcaaaaatacaggatatatattgaaaagttactagagagcacgccttacactactgttatatttatattacaaactatatttgtataaattaatatggagtttctatttattagaatacaaaattaattgtaaaccctatgtataaatatgtcctatatatatatatatatatgaaaacatggcttaattcttgtgtttacttgtcactaaagtattagagattctctttttttcgctggtaataataattaaataaacaccagaagtttcttaagattcatatc

SEQ ID NO: 207428 - DNA, 609 bp, Cannabis indica
aacttatttcaaactcctttttccatcttctcggcgatgagtttcattcaaacactatttgatagatatatgatgatcgtgtagtacgccatctccgccatgatgatttggtacaattaagtgggagcgctaatagatcatagatacgaaaattttttatttgataattgtaattcatacatatataatacctattgaaaagtcttctatgcatatttatatgatagtgtatttcaaactttattatatatcgtattcaaaaattttttaaaataaaataattgtggtatatataattgaaatttatactcatacaataaaaaaaaatcaaattataatttcttcgaatacagaaaatgcccttacaatatataagaacaaaaatgatacacctacccaagaaactctctaggcatatatcatattaaataatttatttagctaatatttaagggaataaagttaggctgcgttttgtcgaaagtaatgaaataaaataaaatataaatggatcaatttttattaattttatttcatttatttagtttgtatttttaacattcatattgataaaatgaaaggaaagatcattccatacagatgaaaaaa

SEQ ID NO: 207429 - DNA, 619 bp, Cannabis indica
gcgacggtcccaaaaaaaattcgtttttaaaaccgtcgcgaaaacgaatatttgtagtagtgaatatttgagatttaattaattaggatatataatttgggtaactgaactaaataaaattggtaacaaaaataaaatattaaccatataataagaatattgagtcaatcaatcataatattgaattaatctgttataattaataatattagaatttccaatattacataaaaattccaacatatttgtattatggtctcaaaagtactatttagttataataataacctctaattttcaatattttatacactacttttatatctatttttaacggtgtatatatttaatatttttgaaaaatattatactttttaattattattttcttataattaaacatacaatttctaaggttgaatatcaattcaagttctacatcggaaaataattaagtaagagctaacttaattaatatataagtgttttatctatttccattagattaaatatatatatttttaaaaatataattggaagagtgacacgtaaaacatcttaattacttcaatttcaggagtctctgagtgtcgttatatcacacatcaaacattttctc

SEQ ID NO: 207430 - DNA, 1338 bp, Cannabis indica
gttggaatgtcaacctagagcttctaatttatatcttgactgtagttttagtatgggagatgtctcaacttgatttgtttccttgtttggtagcagaatttaaagtttaataaaactttgaattaccgtttttttttttttaaaaaaaaaaaagagttatagactttccaaatatactttagttaaaaggggatttatgtaattcctcacgttaatgacaaattttatttcaaatgagaccatcacattgtctgagattagacgcccggaatgaacgcactctgagactctgaaatgatgttgtccatcagggatttcatacggttagccataacttttgtgatcactttgtacaatgggtctaagatctttcatagaatccaggcacttcttcttaggaatcaaaaccacattcgcatccccacatcctacttcaaactccccatccaatttaacaatattccaacattttaaggaaaatgggcaagacggggtttatggcactgaaactagacatgagtaaggcttatgatcgtatagaatggtcttttctggaagctatgttgagaaaaatgggatttagttctcaatggattcggcttgtaatgaagtgtgtctcctctgccaactatagaataatccatggaagttacgagatgggtcctatccttccatcaagaggtattcgtcagggggatccgctgtccccataccttttcattctgtgtgcggaaggactatcagctctcttaaggaagtatgaacgaaatggttggctacatggttgcaaagtatccaatggagctcctcgagtctctcacatgttatttgcggatgactgttatctgtattgcaaagcaactttggaggaagctaatcgggtacaggagctacttggtaagtttgagttggcttcgggacaacaagtgaatttcgccaagtcttcaatttttttcagcaataatactgaagctcacatcaaaaaccaactttgctccatgctccaaatgagtgaagctgatgacagaagcttctatctaggactcccaagcacaatgtctagaaataaaacggtggttttggggtatctcaaagatagagtccgcaaaaggcttcaaggttgggtgggtaagtacctttcaagagcgggaaaagaggtccttgtgaagacagtggtccaagctttaccaagttacgctatgagtgtatttcttttgcccgatgagattagcaaagacattgagaggatgatgaccaagctttggtggcaatcatctatcatatgatggcaaaaggcatacattggatggcttgggacaagcttggcaagcataaaaa

SEQ ID NO: 207431 - DNA, 671 bp, Cannabis indica
ttaatgggaaacataaacattaagcccacgcataacaaagaaagaggattttaatatttactaggagcatttccaatggagtgttaaaatagtagtgtaattctatatgttaacaagtttaagaaaattaggtcttcaatggtgtgctaaatttttgttaaatttggcataagatattatattatgccaaatttggcacacaataaatgtaacttttataattacagttttttcattgatcattaataatttaatatacatttatgggaaattacgggaaaagtccttacaaagtttactttggtgtatataagtcatcaatctcattcatacatgaagttgtgacttgtattgtacagagaattaagatcatttagctatgaataaaacagtctagaatatattaaagttttaagaatctttaatcaatggttgctagtgcagttcactaatgtctgatattcggtgcaagtaatctcgattcggattactgatgtagcatgacatctaagtgaaggtttggtatataatagagattatatatagcaaggaccaatatgtaattaaactatctttaacaaacatgccatttactataaagacccaattaataatataataatgatcaatggtagattggcctgaatactgagtaatcatgaactcatgtt

SEQ ID NO: 207432 - DNA, 859 bp, Cannabis indica
atgcaatctttatttgttttagcatttagaagaattttttagtattatttttttttatatttatatacgttataattatttaagacatcctataaaattgtgagaaattcagaataatttattttacacacatataaaataaaatagtcacgcgtgtaatacactatttgaatttaattttcggcatgttaaatttttctaaattttttaaaattttactagatatcttaaatatatatatatgggtacagattccctattatattatatgtgtaaagttgaaaaggactctatcttaaaaggaaaaggttgaaaaggactcctttcatatttttattttactaaaagaaaagaactagtttataactatttttattttatgtgtagttttgttaattttttaaatgggccgaaaagagcgcttttttgggcctaggactgggcctggttgggtaaggttagactatataccaccatatatgtttctctctcctgtttctctctctagggcataatagaaagggaaatacagaaactcaaagattcacaatttaatcaaaaagagttcccttttcaattctccgatctcttttacacaaacagcttctatccatggcggaaccttcttcttctccggcaacccaacaatcaaatccgcctaacgaaaaccccaccaccactaccaccgctacccaacccaatcaagaagtggtctccactcaacccccacaactaccaccgccgccgctgcaaacgccttcgccttccattcccgtcgcagcaaccgttaatttaaatccaaccatagttcctcctcttcctcctcctccgtctatctcgtatgcagttccgtcggtct

SEQ ID NO: 207433 - DNA, 674 bp, Cannabis indica
ctctctctctctctctctcgtgagtttttggtttgggcttttctaaatccaaactgattaagctaagtagctacctcttggtgtggtgtgatggtagttaaataataaccagggttaaagaataataaataaaagggcgtttgtttaggttaagatttagagaattaagaattagtcggcaaagattttggtgtgtttgtttgtgtataccacctgaaatagttctctatttacttgccagtaatttaattcatgtgattaatcacaagtaaagcaatattattattaataataaaaatacacagctgctctgctttgataattttaattttttttgtttatattttttaatttattttactgtaagtgtagacacaacacaaggatattgtgaatctcgtgggaaataacataagcagtaattaatattaatggaaaggcacatgtacaacctgtgactccgtttattacttcttcccagagacaacttttattgtatctgtgttgtgttgtgtgggtgtgagagaccatgtgagtttattttgttttgttatattgaaagcaaaatctgtgttaggtttcagaatcaaacttcaaaaaagtggccattcatgtcatattctttttttacttggaaaataattaagcttaggatatactatttgttttttttt

SEQ ID NO: 207434 - DNA, 1198 bp, Cannabis indica
tattaggcataattttgtataattaactttaaaataccataacttgtataattttctcaaaacctttaatttttaaaaatcaataatatggtaaagccatatgtttatacattatttttcagaaaaaaccacatttttaaaaattctcataaaatagaaaaatcaaggtaaaatagttgaattttaatttttgtcaatacacaattcattctcattaccattccaaaaataaattaacatcataacataatttttattaggataagtcgaagtaatacctttttttttgcattctattaataaaaaataccctcacattatattttattaaaaagtacctactatagtctattgtgagtgagttgtttattatactttcactctctatttaagtctagtaagtaatttatattaatttagtgattataattaggatattatctataaaagtgagtatattttaaagaatatagaaataaagataaaaattaaatcaaatagatatattatgtaatttccatgtaagaattcgtttgggcctcacaagacccacatattgggcttttaccctattaattccaaagcccaaaaaaaccagtagtacaaaatagagataaaagaaaaggacaagggtaaaatagtaaaattgaagacaatccagttgacctttctttgaggcttaggcaaggcttggaacccacgtctctgcaacaccccaactccattgatgccctcattccaccttacttcattccatctcattatcacaaaaactctcaccactcttcaaattcacccctaatccaacttaaatttccaatctttttcctgaaattttgaaaaaaaaaatagggtatcgaaacgatgtcgttcgacgatgaagacgagtcgtttgagcacactcttctggtagttcgcgaggtggccgtatacaaaatccctccccggagtacctccggtgggtacaagtgcggcgagtggcttcagtctgacaagatctggacgggtcgactccgagttgtatcgtgtaaggatcgatgtgagatccgactcgaggagtccgaactcgggtgagttgttcgctgcttgttttgtaaaccctggtcagcgtgagcctcagttgaaaccgtgctcgattcgtcgagatatttttgttcttaagatcgagatggtaatggaaacacgcttttagttggtt

SEQ ID NO: 207435 - DNA, 678 bp, Cannabis indica
ccatcagaccaaaacaacctcctaccttctaaaacccacccataatttgaaaaataacccatcccaactccaaaataaaccacccatacctcattgctccatcgaactcgataattttctagacataatagctgatagccttctcgaatgtaataatgttctatttggagttgttgattttccattaaatcacaaaacacatccttaaccacaacgatcttcctccaataccagctactctgcattgaagaagagtaattccactaattttcctctatagaaacattatgaacccattctatccatagatcatcttttttggaagttatgacccaaacataatttcccatggctgttttgttccaagctacaatgttttggaatccatgatcacctaccttttttgttttgcacactgatttccatctaatatttccttgattagtaccaaaagactgaccctgctgcacaagatcggatctacatatcacaatggtgatttcaagatcctttcaaaaataaaaaaaattggctccaatatgtatgtattgacatgagcactgatttcatcaagtaattcttcccgcaaaacagagattccttgtgctccaccttcttatttagcccaccattttatcctcgcattcctttgccgagattctagttgaacaaattgaa

SEQ ID NO: 207436 - DNA, 1279 bp, Cannabis indica
aacgtgacaataaatagaacagaaaaaaaatacgaataattgttggatcagtgagatacgtactctttattaattattattattattattattattattattgatcagtggaaactgattaattaattaattaatgaacacacaattaagtatggtttttatatttcgattttacatagctcaaaattcagtgatacaaaaatttaaagttctagtactcaaaaatggaaaattgtactggaatctctcaacatccaatccaacctaatcataattgaatcaagcaccataatttataccatctgtttctccatttctttgccaagttcataagtccaaacaacaacataaaaaatcaattaggattattaattctaaaaagaaaaaacactgaatatatatataattttcatatatacttacttggagaaacatgatcacatacaagtggcagtaagtgcaatttagctagcaattgtgctaattaaattaaagaataatcatcctcacaaaagaaaaaaaaatacatcattgagaattaaatttactttttttttaattttatttttacttgtcattgttttctaataatatgtaatgaatttataaagctaatcacaattatctaaatagtacattgcattggattgcctacataattagtatagagagaaagagagagagggagggagatagatacatacagagatattgaaataaaaataggcagaaataataaatagaagtgtgatgtaagaatgggaagtgtggttaaaaaatgatgtcagatagtgacaaagtttaacctttttcacagaaatgtaggagaagatgtggaagcaaaaataaaaggctacaggaagaactgtcatcattggtgaataaaaaggaaagcagggaatcttctctgcagcttaactcttttatcttttatctttttcatttatttttaaatgcatataccaaattaatatcattttttggaaaaagattatattatttttttttgaaaaggaaaaaaaaagaaaagaattgtattattagtaaagctaagacaaatagaaatttcacaaacacaatgtttactttttattttagaaaaagaaaaacaaaaaatcccttcaaactactaatctacactttaattaattcacccctatagtttcccatgcatggctcaaacgtgtagcagtttattttgcaaaagaaatgaaaaaagagaaaagagaaaactttatcagaaaattagtatgaccttcccttttgctttttttttttt

SEQ ID NO: 207437 - DNA, 811 bp, Cannabis indica
gtagaaaaaattatcaaaatactctgttcagtgggaaaaggcgttgtggtttcctctagctaaaatatacactccaaaatccactcttttttctttttgaattgaattccaccgtatttattacttcctaatactatttatttgcccatgaaaaccaaacagagtctatttttttttcacacataataagttcatattaaaatatctggtgaagctaccaacaacttatctacttaaatctatttaaaaaaattatctacttattttctgaacaaaatggccccactcacaccattattaactcatctttcttcctatttttcatctcccaagggccattactcttaaaaaaatctctattttttttgccccagttttcagaaaatgttcctaaaaaacaaaattccatcaaagtactttctttttattatgcatcaaaaaataaaaattaaaaaagttgacctttttcctttcccattaaaaatactcacatgtgacttgcctcctttttttttcctcactatccccatacaaaccattacagataattatatcattattcttgtaattattgtttaaaaaaaggaaaaaactcaaccatctaatataaactgcatatcatcttcattagattttgctatgaaataaaagactatcacataataataataatagcctaaaagaggggaccctttcacttcttccattgcaccatcataaccattacacgatcaatcaccttcacccccacaaaagcttttttccctcacgtggttaaaagtacggaatcacgtgccacatttatttattt

SEQ ID NO: 207438 - DNA, 1237 bp, Cannabis indica
tcggtggtgtgtgggcgatggtcacactatctgaattaatgaaggtccttagattcctagaggatattctcttacccttcgcacaaaggttaggattcctgagggcgtcactcttcatactttgctgaatcaagatggaagttggaaaactaatgagattcttagttggtttcaccatgatgacattccttgggttcttggcactcttcctaatattcatagttcgaattcaatgacttggaacctcactcctactggttagtatacagtggatactggaacctcactccagatattgctatttttctctgataattcaactttgaaaacttggtggtcgtttatttggggatctcgtctcactccaaaaacgaagagctttatttgacgagtatattcaatcattggatcctagtcaaagtggagctatttaggcacaaaatgaccatcgatgctcactgtgactggtgtaaattgcaagaagaacctctgtgccatgccttttggctttgccctattgttcaccacatatggcagtaggttagtttctctcaatatatctctccatcccttaataaggctccagatttcctctttatgctggctgagtgtctctcaaaagatgaaatgatccaatttattggtgtatcttggctgatttgaaatggcaaaaccaatttgttctctaaaataaaacccctgctcatgtttattagattccctaggcgctggaggttttggacacccatgtgcggagagagccaatgaaaattaatttgcagaaaaaccagcagccgtgtcttggcaacccctcttataaaatcttaataaacactcatgcatctatcttgccgggtaatttggggtgtggtataggtgcgattagggcttagtataaaatccaaaacactaaaataaccgttcaaactgacctaccgaacaccgccaaaactaaaatcgccgaaaccgaaaactgaaaaaaccaccaacggtttaaaccgccaacagtttaaaccgccactagatggttggtttttttttttggcaacaaaccgaccattattttttatatatatatatatttatgttatacattatataatatagatatttaatacaagtatggaggttagatttaaatcaaggaagatacaataaatcatgcttccagttccaatggggtcaggcgtttgtgagatatcgagactagttctattttatttgtctttttttttac

SEQ ID NO: 207439 - DNA, 694 bp, Cannabis indica
cgatgctcctggaggctgtcgttatcgcacacaactctgaaggtaatcgcacacgtccctggaagcttctcgtcgactctgtagggtttctctctcctcctgttttcacgctcctcggtgtaaacacttttttcatagtaatatttgttatatttacaatatgtaaatttttgataaaatttgaataatttaaagtattaaaaacaaagttttctttttttttaaaaaaaaaaaacggagaaattccataagaaggcaccaaacctaaaaagattcgagatataaaagatatgcaaaattagacaattaaattcataggtaggttccaccaaacatgagcctcatctaaatttagagctcgttttgctaaaaaaaatgagtaacaaagtttttagaccgattataatgaatcagggatatgttattaaaagactttcaaatatggtttaatatcattaaggacaataccaaacttactgagatgaggaaccttgctattgacagcaagaactaaccgttggcaatcagagaaggcaataacagacttataccttactataagcaacaagaaaacccatgaagcaaagctttggcttcagcaacgtgaggctctaaagatcacacgcacggatcatataaacagagttttttatattctagtttatcatatatgtttaaaaaaattcaaatttat

SEQ ID NO: 207440 - DNA, 936 bp, Cannabis indica
ggtatgatagttgtccggtagtgggtatgatagtagtgtaatctggaggttagggatgaaagtctgatggtagtccgatacagactcaatgcctttctgttattgaaatgagaaaagttgaagactgatggtggtctgatgctacatataaatgtaggacatggtctaatggtggtccgatgcaagtctgatgcttatctgttgttgaaattagtgaaggttgaagacataggtccgatgatacccatttttatgtacaataacattaaaaaaaataagaaaaataggtagcatcgagcgactatcggatctacatctgacctacgtcttcaacctttgctcatttcaacaacagcaaagcatcagaccaccataggagcttcatccctaatctccatattacactattatcgtacctaccatcaaaccactatcgtaccccattgtaccatatacaaaaaatcatagaaaacgcagatttcaccaaaatttgattttttaccaaataataaacaaaaaatacaaagaaatcacagatcgtttgaatggataattagggtttaaatgtataaatttttaaaaataaactaaccttccttcgtgggtggcactcgatggttagagaacttcgttggtggtgtgaggtggttgggctgcatcatgggtggcgcttgaggtttaaatttggtgcattttagtttagggaagaaggagaagagatcgagagagaaaagaaggaagagagatgagttggggtttaaaatggagagggcatttttaaaataaggggaaagttgacattttcccccaatattggtacacataagttaatctatgtgttatactcgaaaatcggtaagcacatcaaaggaagacacgtgtcgagctgggaagaacggagaactcaaacacacaaactaaaagtatacttagcat

SEQ ID NO: 207441 - DNA, 683 bp, Cannabis indica
cagtgggaagggtacgggtctagtaacatttctgcaaaattgaaggctttacaggagcctcttcaggtgtggggaaatgatctaacaggaaatttcaaggagagaattcaaaggtgcaaaagacgtattaggatgctcaaaggtaacactgatgctaattcggtgacccaatatcatgaagcaaagaaattactggctgagatctatcaccaaaaagaaatcttctagaggcaacggtctaagcaattttggctaagagaaggcgatcgcaacaccaaatattttcatgttgctgctagttctcgtcgaaaaaacaattacattcatcaattgaaaaatgaggaggtgattgggtcaattgggattctggcttacctaggtaatggttaattattttactgatattttccattccttggggtctcatggtgatgatattcttgataaaattcagccttctatttgtcatgaggacaatgttgggttacttaagccagtggttgaggaagaagttcaagcggctgttttccagatgcatccagataagcctcctagccctaatggtatgactccggtatttttttcagaagtgttggcatatagttggtcgggatgtgattaatcttgtccaaggtttttttcggaataaagtgatgccacatgatcttaatgctactaatctg

SEQ ID NO: 207442 - DNA, 710 bp, Cannabis indica
aatcctcccaaatccccaatttacaatcttccattaataaaaggattcacactctccatcgttaattgtttaaaattataattatacccttttaaattatattaaaatattattggtaaggacaatatgataattttaaaaacaaatactttttatcctcctactactctatcctttctaccaaacagaatgctacttcattctcccttccttctattctacatatttcattaagtctacatcctctctattctccatccctacaaaaaaaaaaaaaaaaaaagaactctcttaagatttgtgtaaatattttcttttatacaagcataaattaattattagcatatgagcagtgctacataaactcgtttgggtctcttccaagttccatgtgtatacataatattctagtgaggtaatgatgttgtaataagaatactgtctttgatttttctttacttacactcaatgatcaaatcttgaataaaaacgaagcaaaaacaaataaggcacaacaaaaaggggttttatattttttgcatatagttgttgcacattcactttctcataagttggtcattcaatttattttctctctaagtttcctcctaaccaaaccatcgaatattgatgagaaagagttacaccttcattttctctctttccaaacatatatataaactatatatctcctctatattctcatcaat

SEQ ID NO: 207443 - DNA, 374 bp, Cannabis indica
atggaattgaataatagtggtcatgtagaacagacagacttataatcaaattaaactatattttattgaacagaatatggattgtagacatatttttatatattacaaatttattatacatttaaaatatttaaatattgttctctagaagagaatggatatgttatccgggtttcgacattagacacgtagaatccaggtcaacaccaaggccgatcagtgggtccttagcaaagaaaaagtggttcaagcccacttagataagttcttctagtaacgtgttaacgcagattttcgttaactaaatttgaacctcacagtggtgatttctcacagaaaaaataaaagctatagaaataaaagtagaaacaaaa

SEQ ID NO: 207444 - DNA, 1587 bp, Cannabis indica
agcagaaccattccatatcttctgcaacctgcagccgtagtctttgtcatcactaagatgcttcacaatcggtaacactttgccttccttgtctttaaccagaaacaagagagcctgcactgcagtgtgatttgagtaatggaggaaaggaacaatacagtggaaatcgacagttccattgttttcttcaaggcgataagtccaccaagccgagccatttcgatcacgggtatcaacgcttcgaagcgggacgcccaattcctttaaaactgacataatcctctcatacttgaatggctgccagttcttctcttttcggccttcgttctccacattttctggtatggttgggatcataatgtagttggttggcatatttgttgttacaaaacgaccacattgttgtatagaacagtcatacatgcgtcaacagtgagtggaactacaaccttaagatcttggtcgatttgatctgttgtcaattgatcctgagctagaatgttggatatgtgtatttcataatatcgacatcccatgactcttgcggatattggtggttcataacctagctcgttgctagctttgagcgccctaatgtagcttggattaatagaaagcttgagcctttcatggacttttgcagcctcaacaaaatggttacgagtgatcatatcatccatcttcagtttcttcccagcttcctgatcagttgtcttggatgatgatggtggttccaagcttctgatttcactaaccatcaactcggacttgctcttaattgccttcatttcctctcaaagaaaacacataaaagcttcaatcaatactattttggcacaaacactatttagaaaaagaaaaacagtaaagctatctattgttattgattattattagtagtgatgaaagaaagctcacactaagatcatttgcaacttcaccaacaatctgctgcctcataaactctgcattttcttctgcaacaacttgttccacctcatccttatgtgataattatatatattggagagtgaaaagaaaaatatgaaaatacaagaacacaactcccatcttcctctttcatgttcatatgatatatacacatatttatatatagacatgttatttaggctaatttcaaacaaaactaaccttcataatttgcttttcgcagccgagacatggttatctgaaaataaagagatatatattagacaaaatatatatgtgtatgtatatgtataaaacattttatagagacaataacagtattaaaaataataataaaaaaaattaacagtatcttctaacttggtaaaataaaaggatgttaagtatttgttttacacattcattccctaaaggtatttaaaaacaaggttttacatagtaagtgtatagtatacaaatccaacaagaacaaacatatacacataaatgcataacactttaacccaataaaagcttaaactaacatatttggatacagagaaaataaataaaagcttaaaccacccaacccaatgtggagaatctttataatgtagcataatcacaaaaataaaaaacatacaaaactcatttcct

SEQ ID NO: 207445 - DNA, 976 bp, Cannabis indica
ttttttttaaaaaaaataggaagctttaggagcgacaagtgtcgcccctaaaagtattagaagcgacaaaaaattattaggggcgacataatataagttgaaaatcaaacgttacttttaggcgggaattttcccgctcacactattaggggcgacaatgtcgcccctaatgccctgccacttgatacaatcaaggcattaggggcgacaattgtcgctccaattgtcgcctagctcttatagtgtgcacattaaaagtcacatttcccattctcgagccatttactcttcttctttccccatttttttttcattttctctaaaaaaaacccctaacccatttcaaaatattaccaatctcattcctaatccgatctcaaaacattatcaattgccgacctccgatccccaaccacccccgcacggcacacctgcaaccgccgctcctcccagccgacatttccataagtaaaaattttggtaagtttataactatatataattattaaatttttttttatatattctcactacatatctggtgtatatatacattagaaatttttcatttaatttattttttatgatattttgttaagcatgttttttatatttgaaattttgggctatagagaagaaattatagattgattgatgataataaggatggtctttattttgatacttttcttttctttttatttcttggaatttattttattttattatttttttgtgatactatatactatagatatgtacaaattaagattgtgggcaaaaatagaaaagaaaaatagagttaaaaaattatacaagctaaaataattttttttcaaactatttgttttacactttcactgtatatatatattatttgtattagtatatatttatatttatttatatgaatatatatttgtgcgtatacacagggacggacccattaagattgatgtgggggctatagccccca

SEQ ID NO: 207446 - DNA, 1036 bp, Cannabis indica
ggtttctctgataatttctaaatggattgctatatggattttgattgtgatttaagttgctccgttagttgcaatagaagtttctatataaaattctataaaagaataaaaaaaattattttaaagtataaaaataaaaagtccttttaattaaagtgtgaggtactaccaaggtcgggacagagacataggctaaaggaagtatgaggagaccaaaatgttaaaaaaaaaattaaggggttcattaaataaatttgtaaagaaaaaattataatttataactaatttttttccaaacaaaaaaaaaaagaaaattacgggtgactggccccataatccaaagtcagggttgatgtgagtgtcatttgtcgggtttgcaatctgagtgctaaaaccatggtccattctttgttgtcttgtcctgttgctgcggccgtatgggatcgagtgggcataggcacggtaatgcagcaagaggaatgataaagtttggcaaaacaagtttgtgggggtggaaagcattgtgaaatctacaacaaactaccttattcagtggtgtgttgctcaaaatttaaatgagttgtcgttcactggttacataccagggatggggctgtgcaatggattgctccaagtgttaatagtattaagttcattgtcgatgtggctatgtttaacgaaacctctaattatggtgttggttttgtggctagagactctagcggtttctttgtggaaggcgacactaaactctttcatggctcaatttctcctgtggtggccgaagctattggggtccgggaggtattgagttggatcaaaaaccattcgtggcttcatgtgacattggaaacagactatctctcagtggttcaagctattcgtagctctacggttatactttctatatttggcaaagttattagtgattgtaagagcttgttatatactttgcgtaatgtttcttttcattttgtaaaacgatcaacaaatatagcggctcactcttttgtgagagcctctatattccacctta

SEQ ID NO: 207447 - DNA, 1189 bp, Cannabis indica
ttaagtttcattttgataaaaaaaatcagtccaaggtcttatttgtaccattttagaaaatatagggtccattttatcatataactaaacagatggttcaattggtaacttttacaaaacgcagaatctaaagtttcattattatttgttccttttaatctcacatcatacattcctacattattatttgtttctgggatcagaatcaaaatttcaattaaatactaaattaaaagaagaatgatgcaaacatgagaaaactcccaactccaattcataaacttaaaagaaaaatgatttgtgctttgatttaaattgaattggactccaattcaatttaaatgaaagcacaaataatttttccctaatattttcattattgttgctataaaggaaaataaaataaaaaatcagtaccaataataaaatgaatatatataattattgaaaataatagaaatgaatctttccttaatattattttgaacttagatatcatttaaattgccacgtccttaataaaagacaaatttgatgacattcatgatttaatatttttcttaatttgacatatttttggaaaaaaaatatcagcatagtaggatactttgctcgataaaataatctgtcacttcatataaaacactctaacttttcacataattgttgagcattttgcaatcaattcttgaaggagcagacctcaatcgcagctcacatagtcttacacattcaaacactgtcttgtacgataaaattgtgcatagcatcaaaaatgtagaactccaccttgttacataatctagtgataactttttagtgtatggtactctaagttaacgagtagcgtccttaaagttttcatgtcttttttggtgtgcctgaccaataggcaacactatctcaaatcttgtcaatactatcatcaataatggacaagtcatctttgacaattagattcaaaatatatgcacaacattgcacatgcaactttcccttcaaaataaaactgtcagactcaaattgtcatttcaaaagctcaattatggcatcatttgcagtacaattatctagagacattgtactgattttttttattattattattcattaagacaagatcatagtgcctcaagtagtgttggagcatcatgaggacacgaaacatatttaaaatttaaaatctgac

SEQ ID NO: 207448 - DNA, 645 bp, Cannabis indica
ttattattattattttaaaagagaaaggtttataaataattattcatatttgagtaagtaaatttttataagcttcataaatcaaatgtttttgatattttatttgtacgtattagcaaataatgataacacacgtgtattgtctaaaatattgctttaactttatattataatcaccatgacgaaaaaaaaaaaactgtatattataatctgtgctgtaaatttattgtcttgatttaataaaattaaaacaactgataaagtagaatcattatgctcgattaactaaattttggatatataattataggaatattatgtggaaaataattaatttttaatatatttgtgcacttaaatatatgtatatttttgacaataaaagagtcttttgtttatattttggttcgttaagcgacaccaaatattttctgtatatttttaacttgaaaaatgctaaaagataccagtggtgtttagtattcgtttacatgttaatatcattattggtcaagtatcgggttccatataatctaatataataatttttagaaagtatcgctagctaatcacaaaaggatataggtgctagacaccactggtgcccaataacattgctcttttaccataaatatttacataggg

SEQ ID NO: 207449 - DNA, 880 bp, Cannabis indica
atttttttttactttctaattttttgtttttacctaaaaaatcttaatcaattataactaactcctatggtcatatctaattttcgtatattgttaaattgttttctttctttttttttcaatgagaatttttaaaataatttgtagttcttcaaatagtcaatttacatgcatattgttttatttatgtgtacatttatattattttgaattttttttataatcctgacaatgattgagaatatgttgaacataacaactaactttgttgacataagccttaggaagcaactaacataacatctactagagtaatgttaaaattctacatattgaagttaagtgtgaggcaaggaaatacttttgccaaaacgagagatgtcctcatgtatacaggggtttatgtacagagttcaccgagtgaagaaaactaactgaaaaacagttagctataacagaacataacagataaaactaactgaactaactcaactaatcctaaccaacatcaggtacagtgtttaacagctcagtagactcaatgggattaatttccttaaaactcctaagtggtgcattatgctttctttcgtctggtgtggggactagttttgattgctcaactttttaaggtcttaatgtcacaatttggttagcattttgcttctttttttttttcattttttttcccatacttttgagtgtcagcctattatatttcaaagcataaaaaaaacaaaactacagaaaggcatcaataaggacttaattacatagataatgtttaaattacacaaaataaaaactaaacaaataagcattttagttatctcaaattctatagcaaccagatatgtttttacttgaacttcgttcacta

SEQ ID NO: 207450 - DNA, 872 bp, Cannabis indica
atttttttttggggttttttttttttaaatttaataataatcataataaaagtatgaaggttgtgctaaagaaggtggtagaggaccaagcatatgggatattttcacccaaacatacccacgtacgcccctttctctatccatctctacaattttattttattagttctttcttcaaggtcttcaaataaaaataaattaataaataaaactctatttgtatatttttctttttatttgtataaattttacaatacattttttttaaataaatgcattgatgcacctttatttatttcagtatctaaaaaattacttaacttatttttttatagtcgttatagttatttaaaaaatctgataaaattttgaaaatttaacacgtcaaaaaacagtatttaaagagtctattacacgtgtgattttttattttatacgcgtgtgaagtagacggtttaaatattgatttctatattgtatattattttaaatttttcaaaattttgtaaaatattttaaataatataatgtacacgattataaaaaatttaaactaaatattttttataaataccaaaatagttaaatattgcatccacctattttgaccaggtgtgttgtagaagtactataatgaccctaatattcacgtgataatgtggtccattattcaaaatggttacttttccgtgacgtggcacacatgcattgttgatgttacttcatctttctttctacttctcaaatcacaagcattggaatagaacatattgatacactttaaaattatattaaattatataaataagatatttaattgtactaaagtactaatagtaatattaataattcgttcaaaaaaaaaaaaaaaa

SEQ ID NO: 207451 - DNA, 901 bp, Cannabis indica
gagattttcattttgcttaatcttgtaccaaaattggaagtatgtagatagatgcattaccattttttcaacttggtgtaccaaaagtctaaaaactgaatcatttgggtaagcaacaagcatgatagaaataggtaaggatagatcttaataagactagatgttaaattggattaataacaatataataccgcaaattatattgagcatatttttttaatatttgtttggtaaggtagggatgattatgaagccaagattagatagtaagaggtgctaacatcgaaaaatgcatacaacaagccttcacgatggggattttagtgactaaaattctttttgtagtagtgtatgttaatttatggacattatctacgtgtaatgtgtaatgagttgtgagtccatatattatttttttttttgctaacacctattgacatttattttttaacattcaaccaaagtagttagactgtagatttcaagacttgtaatttaatagtaccaatacttgtaattgttcaaaataaaagaggatgaagaaattgtatatctactagtatcaatttaagaatacactaatttgtttattccactaatattaatagaaaatgtacaaacaagatacgtattttttcaaaacttattaatttttttgtttatttaattaagaaaaaatccaagtataataattatatttattgtgattgaaaactgaacatattaagaatattcatacttaccacatattaaattgtaatcaatacactcagtgattgattttgtatgaacatagataattttggaattgctaatgatccaagttgtcagattgcataattttggaattgctaatgatccaagttgtttgatttgtgggactaacaaggaagatggaaac

SEQ ID NO: 207452 - DNA, 581 bp, Cannabis indica
taatcaaattcatcatgataaaaaatgatgaataatataataatattagataatgaatcaaattttcgaaagagaagtgtgacttttggatagctcaagaacaaccaatttcagtcttcctcctatagtttcacacctcaatcaggccagcagtctcaatattaacattagttcgagtcacaagattcaagatttaacatggggtaccgcaagatttctaaactcttgctcctagtgagagtcagagagggtacaaccaaagtggaggttctggtgcaagtacaagtcatcatagtcaaggaaagagaaaagcaaaagcaaaatcatctgttcaagcctatgctatttaggttgatgatatacagggtagtgcagaccaaggagtttaatggtatggttcttatctcacactcttgggctcatgtattatttgatactagtgcatcacattcatttatatcattgatgtttgctaatatgttagatttgtgttgggaaacttctagtcctgctttacagtagttgagtgaacctatgaaaggacatggtgagatatctaccatatgtaggtcaatttgtat

SEQ ID NO: 207453 - DNA, 604 bp, Cannabis indica
tcattttactttttctactgggtggactttgaaaatttgtaaggttttaggacaaaaagtattattgagctttatatttttcaaaaaagaaaaaaaatttggggctctgggctcggtggcccttaagcatgggtctagctcatcccagctcaagtctagcccgccctagtggctaggctatgaaattgttgatatcactctttgctaacttatttgtataaatgcatatatatttgaaggatatgctatagtgtgtgagtattgctattaaacattaggggaatttacgcccactaacgaaaatcttaaattatttatacaaatgaccggtaccatttaattattggaaaataacgatcattttataataatctattaatcctccagtggagtaccgagagatcaatcacttcttttttgttttcttttttgaacgcccatttatgcacacattctctctcttcctctttctttcttattttttttcaaaactttaaaaagttttctagccacattattagttatttggtactcaagaattgtaccatattctttctaaaaaaaaaaaaaaaacaaaaaataaagtactactatactactaact

SEQ ID NO: 207454 - DNA, 851 bp, Cannabis indica
acttttttagctttatcgggtaaaatttacattaatattttttaaaaatgttaggtgttattattgatatattgtattaagcattgttatattaggcgaagtggggtacctaaatggttaacgatatttataattaaattaaattatgtaaaaattgataccaatattttttaatatttctctattgtaattttgttagaaacaaggaagacaattgtatctatttttattttagatatacatgaatgagcttatataattaattaaatttacttaaaataccaagaaaaattatgaatttttaattaaaagtaataattttttttaattacaataacataattgatcatcattttttgtgtacctagctggctacaattttagtgacaacattttaattataatatatttttttaattaaatattacttttacttataataaaattgaaaaatagtatttaaatacatagtgtcacaattttgttttcgtcccattagttgcatgttataataacaatatatttatgaattacaataaattgtattttttttttctttttaagaatttttttattcgtatcttataattttaatttcatctatggtcaagcagcatacattgactaacctagctaatatttaggagaattaatggcatttgtattataaatattatttgtgtacgtacgtaataatctgaaatttgtgttgtattaactaaatccacacaacataaaaactatgacaaaattatcatcaaattatgaattgacttggctctcctcatgatataaaaagaaatagtcaatgtatatatatacttttctaagtaagatatccaatttgaatt

SEQ ID NO: 207455 - DNA, 602 bp, Cannabis indica
aaaaaaaaaaagaagtaattaaattgtatagtgaatgtatgatgacatactttaaaaaaccatgtttgcaacttattagttaatataataaaagaaagaaactttaatatattgcatctaacggtcctgaattgtgcagttcttattctcatttggaaattgtggaagaaaatgagcatgtcaatttttgtttcttcacactagtgaagaatttcagaatttaactaatattggtatttaaagtttataatgattaaaatttgaatgcatgtgcatgcatctaagatagtgctttatttattatactggtcatcaaaattttcttcaatattctgtacttgtgttatgttactgttttacctctacgcacatttaagtgttatatctaagattacaaaactagcaaaaacaggcatatatatactttcatttaatttaaacaaacaattacatcgattacttgctcaaaagaaaaaaaacataattacattgattacattgttaattatgcatgaatcgcattcattttgttctctttgcattcaatataacttgaagctaatagtttagttgaacattaatatctatcgtgggcatccaat

SEQ ID NO: 207456 - DNA, 1297 bp, Cannabis indica
acgcaacgcgacatgtcgaaggtggtagatactactggtacctatagcaatgctctttatatagtagattcttcatagttgtgtacaaaatttgacacaataataaacactaattttttattactaatttttatgaatcatcaatgataagcttaatacacaatattttatcacaatatatcatatttaatttattattattttatttttaataaaatcacactacacataacatattaaggtatttaatttattaacaactaatattttactcttattattttctttttataaataattttcatccaaagttttaatgtaaatgttgtgcaaataatatttatttatttattatgctcaagttagcaatatctcaaattttagtattatttataatcttatttaacaatttcttttatattgtaaggctatatatcaataatttttcttaatatgattttaataatcacttttgagcaacttctctcacataaagatttgaaattaaataaatttaatttttttttgctatgaatcttaaaatatattatttggtttttattttcatttctttttaaagaaagatcctatattaataatactggctataaagttattatatatccatgaattagtatatggagggttgtgtattcaatagttacaataaaaatataactatgatggttaaattattttatgacctactataacatatcactaacaggttaaatttcaaattttagacttaatttcagtgataattttttagtcataatataaattttttgtgactaaagggaatttttagttacaacaaaaacttacttgtgattaaaacatagtatttagatacaagttgtcactaatttagttttagtactttttgtgactaaaaacatattttatcacaacaaattgtaatttttgggactaatacctttagccacggatcttttagtcacaacataagaataataatttataattggttaaaatttttttatttttaataaatggctaaaaatataaccatctattatagcaagttatataataattatgattatatatttaatataactatttatcataacaagttatataaaaattatggttacatatttaatataactatttattatagcaagtgatataagaatgttgtaactattgaatattcaacctatatatattacttatcttttcaacatcaatgatgttaatagataactgaaggacatttatgtaattcaaaaatagagactcaaagaaaaggattagtatagtctttaaa

SEQ ID NO: 207457 - DNA, 1086 bp, Cannabis indica
gttattattcagaagataccctttgagaatagctgaattttgtaggtgttaggatagacctgactacactctgtctattatattattttatatcaagcataaaagtgtatggttaataaacttgatgagcaatttcgtattcgattggaaactcaatatgtgaaaataatgctcgtcgggaaaaactaaaacaggcctatctttgaaaacagttagacaggaaactgaaagcttaaacatgatatatggtttaggaattaaccagggttatgtattggatttagattattttgtctatgaaatttaatgtagggaaaaagctaaatggggggagtgattggagtatggaaactcatcacttggaatggaggtaggaattcaacaatttaaaaaaaataataaattaaattgatcaagtagatttgttagactgttattgtacttattattattttaaaaaaaaaaacaaataaaattaagaatgtgtgcattgttggattatgggaacaatgcatgaacacatgagattaatataagatttaattaaaataataaattattattactattatttttcaaaagtaaaaaaaaaaaaatgaaaattaatagaattcgactctgctggggatcgaacccagaatctctggttccgtagaccagcgccttatccattgggccacagagtcatttcatgttgtgtatgcaagcataataacactaaattattacaaagtagttttagttaagtaaatatattatatttcaaaagaatattatatgattattccattatacattcactcttcttccaaaaataaaattaagttgtccatcatttattattattagggttatcataaaataatcaatccaatctaatataattaaacattttttatacattcaatttttttctcctttacatttgttattttttgttttatttatttagtttgttgttagaagtatataacaataataatttattttattttgttgttatttatgtgagaatatttttttttaataaatattaaaaggtaacaattccaaaataactaattcaatccacatttttgttgattg

SEQ ID NO: 207458 - DNA, 743 bp, Cannabis indica
ctcagaatttccttgactacctcttccagtgagcttctaaaggtttgtgcatgaattgagaaactttgttaactacacaggcaatctctggcttgataaccattgcatattgtaaagctcctacagggttgtggattaggtataaatgatcacttccatatgctgagagattttcacctctagtcggtgtaggaagttagttggcacactccattttggctctaaccaggtccataatatatttaatttgacataagtgcaaaccattgtccaatcttgtgacctgaatatcaagaaaatattcaagtgaacctagatccttgagagcaaatgagacagtgagtgttggttgtggtactaaatcaagtacgtgatgaaagcatttataacgattatcatcatactacactcaagatctccatatgtacatatattaaatctcaaataaaagctaaaaggatatatttacctcttaaagcgaatcagggtatcctcaaatttttacgtaagttgtatccttaaaatggtaatgacaaacttacactgcaatcttccatatctgccaccacacacaaggattagtgtggactaattaattaggatactctcaacacatgagcaaaactaattcttttctctctgagtgaataatgatgtaattaacctttttatgtttcctaaattatacgcatatatagaattaagatataacgatatattaatttaaacaaataaaataaaat

SEQ ID NO: 207459 - DNA, 836 bp, Cannabis indica
taaataaaaatgtaaatacatataaataaatataatatagtagtggttagctagaacaaaacccaccagccatgacaaatttatttgcatgttgactagcttcagtgagaataatatatccaatctctctctattctttatgtaaagtcaagatcttggtccctattgaatccatttattaattgcctgtgatgagtgcagtagcattagtactacacttctattactactgtaatatgtatatatttgtgactatttgtataaccattaaaaataatttatttttctttaaatattgagcatcatcatctcacccaactactagtctaatatttactgcaccaatacattgcgctagattttttttaagggtatatatatatgctgtagcgtctcttgcagttgcactcatataattacaaccaggaattaatttcattaagtgacgacatatatctacaatacatatagagagagagggaataatataataatatgccctgaaaagtctactactaataaaatgtaagttatattcatagatatacatacatataatgatttctaacgcttaaaaagcgaaaattaaagctagcccaatatgtttatatatgggccggtctattatgtgtattatatatgagtctggttttggaaaaaaaagaaggacatttatgtaagaaaaaggacgacacagtaaagaccaggcgaaagacaaaagaaatcaaataaagtaaaaataaaggaagtaatgattgatgggtcgatcttctatcgcaagcaaagaaaaggttagcgactattgtaataatgatgatgatgatgatgatgatgag

SEQ ID NO: 207460 - DNA, 722 bp, Cannabis indica
aaaaaaataaaaaaaaaaaaaattaataatattaatttaaaaagcttaaactaataattaaaaaaaatatattttcttaattatctcatttatagaataaaaataaataaaatttaataacatcatgatttgtcacgatgtagctagtgtgccatggaagaaagaattttcgtgcgacatgtatgattaagcttgacattcgaaaagcatatgatacaatatattgtaagttctttaaagaattgctagctagatgttttccagttcccaagtgcatttattaagcttatcgttgggttaagactctacatgtttaatggagagtgaaattgaagaattcattattcatgcatgaaagatgtagagacttgaaattgaatcatttgagctttccgacggatcgatggtgctctccttttttgtaatagcgatttcatcaagtcaatttaattattatatgatgcagcttttgaagcttttctctcaaattgtcaggattgttcccaaatgagataaaatttaccatagtggtatatatggccgaagagattgttcaacgtattttgcaggccacatgtttctacagaagcacttttccttttaagtatcttggagtaccaatatactcttttaggatacccgcaaaggattgtgagatattaatttataattaaaagggtttccagaataggattattgaaagtgtaaagaataggattttg

SEQ ID NO: 207461 - DNA, 673 bp, Cannabis indica
agtttggaagtagctcatatcttctgttgtcatgcatttagtccgtttattaaaactttaagtttgtgtttttgtaaatttcatggtaattggtaaatgatgtatattttccttttttcactggtggtcattttgagtaaacatatagcaaattttcttttattaaaccactctgctcatccagttttgattatatattcattcgtatactggtgaggttaaattgctatgtctatgttcttttaatatgagcaagatgctgcttattataggacatccttagactatgttgggatcttgcaaaaaaattgaattggctaagcctatttacctaattcaaattttttgcaagacttaacatggtcaagaatttcgtatcctataataagcaaatgtcatattttatctaattaaaaatctgaaatatgatatttacaaagtggaataaaagtttgcaaagtggaattgggtataaatttaaaatttgaattgggtatgataaaaaagttgttcaggtttaagcctatttgccggtctcaagggaggtaactttgtttcgaatttgggttaaaattgagatggtaaattagtggagggccttgcaaaaattcactacctaaaatttaagttaaaaatttttcatagcaaaaaaaaaaaaaaaaaaaactaaaaa

SEQ ID NO: 207462 - DNA, 614 bp, Cannabis indica
aacaagatttagaactttcatgtggaattctaaatctaaatctgagtttaaagtggttaaaatccacaaatacacttacttgtaaaattgagttttctagcttttattatttttcatcaaaaagtgttaaaacccctcaaaatgactctaaatgcaagttaaaatcatactaattaatgatttaaaaaattaatttaagaatattaacaaatatagtttgtcatatttaattataagataagaaatctttgatgatgaggtgactcattttaactagggttttgttgttaggtctcttctctaattttataaatatatattaattacctcatcagaattgtataaatttagatttaacgagttgtttctgataaagcaagtcttcaacaaacaattagttaggatcttgtattttcttttctgttagaagttagttactaattctcttagtttttttctctgtaactatgtaatccttctcctataaatacaagttccatcaatgagtcttgtatcttttgcaagctcacttttctttcatgctctgtttttttctctgcttgtattgataagatcattcagtttcagttgtagagatttgaggaggaatactt

SEQ ID NO: 207463 - DNA, 1082 bp, Cannabis indica
agttcttgtccgtgttgatggaatctactaaggtatcattagggtttgcactttcggatttgtttccttcggttaaattattttatcagattagtcgctctaagcctaagcttgagagtctaagagaaagggcagcagccatatttgaagaaatcattcatgaacatatggagaaaaaggcaacagagaaaagtattggtgatggtgaaatagatgaagactttgttgatgttcttctaagatttcataacaattgtgatcttggattttcattgacaactcaaaatctttatgcaataatctttgtaagttgttttcaattatatactactaaccttaattattatttatttataatttttcacattcattgtgtaaataaattagttattaaaatttatgttatatatttccaaaaattgttactaaatgattatttttgggggggattttggaaacttgttaagattttgaaaaaaaaaagactaaaaagcatatatgaaaactgttataatttacataattgttatatttttgtaattttaataaagttttgcatatttctattttttggaagaaaaaaattaaagtgttacatttaattttggggaattttcattttataagggttttaaagtataagcttgtaattttatagttttttctcaaaaaaattgttttatgggaatttttttacaaaaagttgaaaaatatagaaaacaatataagatacctgattattttttatggtaactcgttacccttttgattagtacctagttacccttactgtttgattttcccatatttttcaactttttcttcaattttttcataaaataatatttgtcatatttttacacaaaaatataaaaattcatataatttgcaatttcttctttagttttttatgtatatttggtagtgaatgtaacataacaacacattgtacatctttcatcacactactcttccattttttttttctttcttttcaattttgtgtaacgattgatgataatttttaggacatttttggtgctgggactgaaacatcagctacaactgttgaatgggcaatg

SEQ ID NO: 207464 - DNA, 554 bp, Cannabis indica
aaaaagtcacgttattttcactttgtttaatttcatatagcagcaacctaaaaacaatgttaaaaaacagccgtatgtacttttataaaaaaaaaaaaaaaaaaaaatcaaaattcttacaaattttagaaaactataaatccctatatttataaattttgtcattttttgatatttatgaaaacatttttatctatatatataatttagtcgtacttagtactacttaagtagtaaatagagtttatgccatttttgttttcatttatttaagagtaatttgcggtatacatatttaaatttagctctcaattgtaaataaatatttaaatttaatttttgtcgataataataactaagttatatttttggaactctataagtacttggtcattaaatatcaagtcattatatattcaacgtgttattttcttattagtatatttaatttaatttttttttatagtatataaaaattaatgtacttgcaccaattaggaatttccacgtaaaaatttacatatttaacaatcaagtacttacagagttccaga

SEQ ID NO: 207465 - DNA, 827 bp, Cannabis indica
aaaaaaagggaaattcttgagagacttctttggagtgatgtcacggggtgccccgagttgaaatatgtcaacttgggcacccaagatggcctgggggcatgcactgggcgcccaagtgggggtccaaatctcaaaattgttttcattgatgttaaatcttcttttcaatgaaaagtgctccacaaattttagtttcatcaaattttcatgggctggacttggtgaaacaaaattgatgcccaagttgaaatgtcaacgagggcgcccaagttatgtatgggctccttgggatgctgttgatgaaatattatgtccttgcattgttccttgatagatttgaggattcgaggtccaagtatgtcccctgaaacctaaaccctagccatggtgcgcctagattgactatatgtcaacatggatgcccattaggggttccgggtgcccaggtgtcgtttcatgcagactcatcaccaaattctgaaacttggttggggcatgtctctcatgtatctcaggacaatgattgagcatatcgcccaaaactaatgtgagacggcgtacatgatgtcaacctaagtgcccaacactaatgttgatcccaggttgagccctgggatgtccacgtgacattctcaacttcatgattcttcgtttagggtcatggcgactagtttattgaaggatagcactcagaaacgatttcgttggatcttggtgcttattttagtgcctccagtgtgaatgtaccactatcctatcttaggatacaggacttgagattatttccttcgagtcacgtgtcaaaaaatattatttatgtcatcaag

SEQ ID NO: 207466 - DNA, 574 bp, Cannabis indica
aatttatgaagaaaataaaaattataagtgaaaaatttaaaaagaaattggaatcaccaatatacctctctctatcttaactcttcctcctttgtaccaaacatagtcttagtgatgtttcctaagaacatatggataaggaagaaggccatggaattttcaattgtctcatatctcatttataataataataataattaataataataatctcactgtgatttaaactttcatcacaggatttcctatatagataactaaacattacaaacattataacaaaaatgataaccaccaattatatctacaaagtagtagaagaagtagtagtagtagtagtagtagtacatgtatatatacatgccattatacataccagatccaaataattaagtagagtctggtatgacatatgaacaaaatgatatatgtgatcatgtgaattatattatatataggtaggtgtattaattactttattattaggtaggtaattatgattaagaagatgtaattttaaagggtgtggatttggacttgtcgagaatagaccacatcacttgaacatcttcat

SEQ ID NO: 207467 - DNA, 1194 bp, Cannabis indica
  modified_base (1061)..(1061): a, c, t, g, unknown or other
ataataataataataaaagtattctctatatatgtttgtatatcaaattatcaatcatattatagcccaatattataatgtaaaacactaatcatctcaaataaacgagtttcaatttcaatcatccaatactctaatgcctagttatactcaatcaaaccatgtgaacccaatggaaaaaagtcagccaaaaccaaaaccaaaatccaataacccaagcaaccatacaatatgacaaattaactaataataacggtgaaaaagaatatatgttatcataatttaataaaataattggaaaataagtactagtttgatgtttgtaactttcatcaacttaataattaattttattgtaatttttattcaatttcgttaatatagatttcgttttaaatttattaaaataaaatttagcaccaattcatattacatatttttgttcaaatcctaataatttagtatttaagttttgaaaagaaaattacatttttatatatatataactgaaaatagaatcacaatcatttctctatttttttcgattactttaacaattttgaaatcacgtgttagttataagagtcttgcatttgttttaattaggttattcactttaaggattctcagtctattaaaaataataccgtcgtagcaaactagtttcctaaaaaattaaacataattacacatacttccgctaaaagaatcattagattataaaccgaaacttagtatagttatgagactaattatcatattttaatcgcggttagtttagttatataattaattaccttgcaagagcgcgtgggtcccacgaagaaggaacagagtcacgaacttcaggagagagaaaaagtgggtatcgatcgatatggagattgaacagaattatgaagtaaccatctaaaccaagcttcttcacatttgcagcgtccatagcccaagacccactctgaaatccaaacatcgaattgaactgtcccgacggtatcttcccccggcaccgatgttttccgattaaaaaactccgtacatctgtaattattaattcattnttaacattaattattgttataatttacgcgtttatcaatcggacggacctgattgaagtcgagaatatcggattggtatcgaacgcgatcgccttatcgcattttacatcggaggagacatttttcgacggtc

SEQ ID NO: 207468 - DNA, 1546 bp, Cannabis indica
attttccttgaggaggtttctcttgagctttgaaagttgtaccaacagcaggcatttccatggtctcattctcaataatcaactcctctttgttagaaaatatcttataaatcaagtgaggaaaaatgagattgagtctaggtttcttgccctttctaagagagataatttgctcccaaatcatgtcaaccaaataaattttagcaccaatataaactacatacaaagataagggaatttcatttgaaacatttaccggatttgagcaaggaaaccaattggagagggcgaacctcataagagcagcatggtgatggtgagttgagacatatgcattgtgtcagagagttccacatcattatcaccaatgagatacccgaatactttttgacaatcgagttccacttaagtttgctcatttcccataggtagattgagagttttagccagatccttcacagtaaaggaataccattgtcccctgacaaagactttgccaacaataaaagagtcctcatcgaggcactcatcagtgatattagcataagactccttgatattttgatccacatagccatcaaaactgattaaagtatcaacccattgtctttcattcaatatattatataccccaaatagcttatgaccaatgacattgaaatttttgtcaacagtaaaattcatattcttataatatttcatatctctagccttatcattgtaaaaaaaataatgagaatggggcttgaagttttcaagagtaatacaagattacctcttccttttctgagacagaatagggctttgagtaacaatgggtctttttcctttgtccttctatggaactgtagcagggacaacagctggttctgcactgacgggatcatcttcaggcagttcactttcagacccagaatcatcaccaggtgaatgttctttggggaaaaattcttcactagaattagacacaccctttgattcttgatcaacatcctcagtcttttcttttgctataaaatttgatgatgaaacgcaagaagtctcttttgaggttttttccctttgacgatgaagtcaccactttctttcctttgagagctcttttgggctgatcacttcgggtttctttcctatggacatcgtggaccgggtccgagagcttacggtaggcaagggcacaatacctttcttaaaaatttgagcaccattcgaagaagaagacttcgacaatgagtgatcagatgaatgggattcttcatgattactaagcccaagatttgtggttgtaatcgaagaagcagtgattggaagagagctaagattgtaggtcaatttttaagcttgagattttgacttcctgaaattttttgtcggagctgacaatgaccctggagctccggtcactggaacagttggcacaggtggcgagggtggagaagcaaaggcagaacctcgagcaggcgtcttggaaggttgagccttttttctcttggaaatttttcttggaacactagaaaaataatctctcaaacttgaaaaagattag

SEQ ID NO: 207469 - DNA, 1695 bp, Cannabis indica
aagggcttgtggtttattaatttattttatttgttttaaataaaattccatgtatatttacttgtcgtaatctatatattaattactgtatataattgatattaatttattgggtaataattatgtatattggatattaatttattgtaataactatatctaaatgtattatgaaaatttattttatttttatatttattaatttatatataatactttttagtaatttataattataattttaactataagttatttaatatattttttttaagaaaattaagtttatattttaaatccagctttgtgtttgggttggggtacttagaaatgttttttagtccaatagtttgactacaaaaatagacaagaaagtttttgtatatagtcacgttttcatttatttaattatattaaattatttaatattgcatgcatgcagatagagagacaagcgtacgaagtaatagtggaaagtgggaagcttctctacaagcaaagtggatgccacgtggagactgatgagggcaccaagtggatcttgtgctgagcacatcaagaaaattatacgtggctaaaaagattaagggcatattccaacactcaagctttctagcaggtgctgccaccattgcagctggaagattggttacccataatggcattcttcaggtttatataaatatataattaaattgttttgtttacatatataatcatacaacatctaattataattattaatttaattaatcgactttttccagggtatatggtcctatagtggtcattatcgcccaacacaagaaaatttcatggaaataattagctatttggagcaacatcatgtggacttaacaaatgtcaaggtgattaaattattatatatattatttaagtacgtatttaattataaatttaaatgaactgatcatgagtttatttggtaattaataatatgatgatgatgcagaaatgtcctatggatgatgacgttccacctagtaataataataataataatttgacgaagtctgaaagtggaaatagtctgagtgtcccaaatggtttgaaacgtagcaatgagaccaaaatggaattgagtatgggttcctcttcgtccaaatggtgcactggggctggaccacgtattagctgcgtcagagagtacccttcacgcctccaatttgatgccccttcaacatctaactatatcgcccaggacccaggccccaattcaattcttatcccatctcctaggcccatcccaaatttccatctctcatctacgcttccacatcttgggcttccaagcccaaagactgtataaagcttcatcaagtcattcattcagtaacatatagattaatctattacatttttgagtaattcgtacttttaatatgtttgtttttgtttcaatttttctttaacagcaagagaagtaaatcaaaagtaatgttgttttgttgattttattattaactatgtgctactataacaaatcaacaattaaaattatttagtagtcaaacgagagcttattatgatggttaattaagttacaaatgaattaaacactcttgcatatgtttttttttttttttttgtgaaataaattttttgaacactatgtttttatattttaaattgttcagaattctttaaaattttacataacgtatacaatattaa

SEQ ID NO: 207470 - DNA, 619 bp, Cannabis indica
ataaaaaaaaaacaatttcatgtacaaatgtaataagatacttaaaaggaaaatagaaaaaccatgggaaaatctgcttttttttttttagtgttgctttatatgctgtccctatttttaataaataaataaatatatgatctcttaatttcttatttttgatgtcgtggccaacccaagccatggaaatgtgttgcgagatggacggtttctgattaaatgggccagctcccttaagaaaagttaaaaaacatggccacgaggtgaagactaaataaaactaaaacatttctggaccagtggttgacgaatcattatcaatacaatatctccttcccccaaaaccaaatccaataaaataaactattctaaaaaacaaaggaaaataatatctatattctttaagaaataaatatgagaagattgaatgacgtcaacccaaagaaaggcacatggagattcagactaaaatgaacagagatgagattagatgagggcatctggaggagttgagaagattgaccattattattgttaagtttgagaaattcattcattatgagctatttcagaaaatgcttttcaattctattaaacactttttttatatatttatttt

SEQ ID NO: 207471 - DNA, 1004 bp, Cannabis indica
atattatacggtaaggcaaaacaaaatcatcattatcaataatattataaactagtgactagagctctttaatttcctcttttgtgtgtgtgtgtgtgtgaatgagagtacttggatgcaatgcattgcagttttgttgtacaattactaaagagaaaaataattgaaaacatatatgaatggtgggcatacataagagggttatcttttttgctttgatttaagtaaaggaacaattattaagtaagttagtataaaaacttgactctctcgatcgataaggatgagaaagaagatgatatatatatatataaacaacagctaataataaataattaagaggaagcatatcacaccgtcttctctgaattagagagaatagtggggaaaagaagaaccactttgagttctttttatctttggaataaaatttgcaatggacccctttgaaggatctgattaatttcttgttggcccttggtatcaaatccaaaaccccacttttaaattaaccctagctagctagtacaaagagatattcgatactaataataatattaatatataattaagagtttaattgctttttgaaaagatcattaatattatatttatttatttgttgtatatatagatatagatccaaaataagtaagagtgtatatagtactagataatgctatatgtacatgtacattttatataatataatcattatttatgtctcttttgtttttttaggtgatgatgatcaaatgttgtaacgtcttgtatgatatgataatcatgtttggtaaaagagtttcatccgttggatcaagatgattacactcaattacctagctagaatataatcccttctacacaagtcaaaagtgtaagagagaataaggtaattaattaagagatgatcgagcacaatattatgggatatgatcatgatggtaacatttcatccgactggtgtgtttggttgatgactgatcatgatcgatggcttgggg

SEQ ID NO: 207472 - DNA, 1618 bp, Cannabis indica
ttagttatattattgattattaatgtaaataatataaaatgtaagatttttaagcaaaatatatttatttgatataatatttagtacaaattagtgaaacaaaaaaaatacagtacaaccaaagatgatcttagtgatgaataaaattaccaaataaatatttttcagtaattatgtgaaatattgaaatataaaaatatttacatatcttgttttgtcacaaattgaaatgttgagtgttagatgtaactctagtaatttattattgtttaatttcctttatcttaatttcctttaatttattatgtttaataatagtaaacaaatgtaattctaacaaaaaatttaaggaaattaccccataagtataattttaatctatataaaaaaaataataaataaaaaataaggagcttaagataataccagtgatattttatatagttgaattaaaaaaattggcccaccttacttattaaactaggcataattgggattgattttaaaattgaaaggataattattattttggactatgtgttttttaaaaaatcgattgaattatcaattttattaaatgaatttaaattttattttttaaaataatataaaaataatactttaaagttaaatttttatcaaattaaaacttgatctaaatgtattataatagagtggttattttttttttcattctattcatgctagaaattatatttaggctaattaataaaaaaaaattgataaaaaattaagtttaaaatattattttatactactttcaaaatataaaatttaatttattatttaagaaaatagaaaatttaattcgtatttacattaatttaaatcacacataaaagtggtagctatgttggcttaggttggtgtcttctttacataaacaactattgtattgtatgtgatgactactgaaagaaagaggtttggtttgggttgaggattgtcaaaattaaaaatagtagtgataaaatgtggaagatcttttttttttttttgatgaaggaatcttttattgaagagggaaaacctcagaaaacaaagttcaaagtggcaacaaagggtgccacttcccatccgacaaagctctaaaacaactgaaattggcagcccaagcagcaaggtcatgagctgcaacattcaacctgcgtgggatccaaaccaggccagaaataggggctgtcgacatggcctgcaaagaccgatcaaagcagcacctaactgtccaatccgggcatctcttggccttcaaaccagcaacagcaacttgacagtccgagagcaccaaggagttcgcccagttgcgtcgatcactcaaagcatacgcctcacggatggctaccagttcagcctccaaggccgaaccgacttcatgtctcgaggtcgcagcctccaccacctggcccgtcaaatcaaacacaatcaaagccacactccccaatcggcctcgaaccgcagcatccacaaaaatattaaagttactccacggatactgcctagtgtcgagtcccaaagccatgtccgcaacagtaggggaatgtggctgcaactcctccacagtctccaacgccgcaagggagttagcatccgcaaggat

SEQ ID NO: 207473 - DNA, 762 bp, Cannabis indica
cttttctttttcgttttttttttgtttgtttttttgtgcttaaatttccacaattttttgtccaagggaaaaaaaaatctcaagcaaacatgtgaatgaagcaattcgaaagctttggtggtatccttaaaagaaaattttaggattggatgaaagacacattagaaatccaactttgtacatctcttaaatatattttggcatttttcatttcattttatttcataattttggtaaaatgattaaattaaataacaatattattaagcacgatagttgtagcattcaaaattttagtgctacgtgcttcgaattgccctattttgattcaaatattttgttaaattaaaatatattgttagagacttagagcactccaaataatttttttttctttattttttaaaatacattactaaaattttactttatttattttatattacactattcatcaatttttctatttttttctttatattttatcttttaatctattttattcattttaaatatataatattaatatttatacatatactcagacataaaaaataatttaaaactaataaaataaaggctaattaggatttttgcctcctgaactttaacatataccaaatcataccccctgaacttttaaggtcgttaaaaatgcccctgaactattgtgattattggatttaaggacttttgtccaaatttagtaaaaaagtctaacatgaatgaaacttcaaggggtatgatttagtacatgtcaaa

SEQ ID NO: 207474 - DNA, 516 bp, Cannabis indica
agattgcagatgaaaattgtactgatttaggtctcccaggcacgatgagaagaaacaaaaatacaatcttgtgttttcttaagtaaaaaatgcaaaaacaaattcagagctgggaatggagactcttgtcctaagtaggccgcaaagtgttattaaaaactgttgctcaagctcttcctagttatgcaatgtctgtttttcttttgcccttggagacatgttctaaactggagggcatgatgtcaaagtactggcagagcacttcctctaataccactcgttgaattagttggatgagttggaagtgtcttactcaacataaagatgctggtgcaatgggttttcgtactctcatgactataacctgtcgcttcttggtaagcaaggatggtaccttttcttaaatgagaactttcttgttgggtgtgtttataaggctcggtactatccttgagaaaactttctatcggcttcccttgtgggtaatcctagatttatatggaaaagtatttttga

SEQ ID NO: 207475 - DNA, 851 bp, Cannabis indica
tcttttgatttaaacaaataaagtccattaaacatgagcccaagctagttagaaatatgcccaattaaaaaatcactaatcaatttgggcttttggtgaacacatagtctttgaatgaggcctcaattgttctttgatctcctttaattttaatatttacatttaagttgctaaaaatacacaaaagtgagattaataattatagataggaaactaaataatttcaaaattaaaatttatttaaaactaaatcaaactaattaaaagtcactaaatttactaaaaatatttgagaacaaaactaaattaatgcacaaaaagatataaataactctatattcatagagttatcactttcgcgcattgtcctcttcgatcatctcattctttatctccattctccattctctattcacttctgcttgcttcaatggttgctccaacaaccgcaaccttcaatcctattatttttgctgataaagtatcactgaagcttgatgacaacaattttcttctctgacgtcctgaaattctctcagctattcgtggtcattgacttcaaaacttcatctctgattctattcagcttctgtgcaagtttctcactcaagaagatgaagattgtggatagatcaatcccaaatttctagaatggggggtttaagattaactattgtactcatggttgctctctttgatgtctgattgaattttgacaagaatcgttggagctgaaactttaacacagatttggaaaacacttgaggtatatttcgttactcaaacctcaattaagatagatctatgcaccactcaacatcaaaattgtaagaaaggctctctctctctct

SEQ ID NO: 207476 - DNA, 1102 bp, Cannabis indica
tctcaacccaaacatcaaatcagcctaaatgtgtatttagtttatttatttatttatttatttctaattatgtaaattattcctaaagatatgaacaagttaatttatttattatttttattatactccatccaattactataattatgtttttattctcatttctatacataaatcatctttctctattcacctcataattaataaacatgtaataatgatattcttcaaaagcaaaagaaaaaaaaagtaattttatttaaggtaaatttaagataaatgtatttatttaggtaattttgttgcacttaaataaaattgtaatatagttcattttattgcacttaaatttttatgtaaattttgtagtagtgaaaattctcacgtagtcattttgttacaatattaattcagtgacaaatgttacattaaaggtgtaacgattgtaatttttattgtcaaatatgaactacataaaagaaatttacggttaaaaaatttatataaaaatttaaatataattaaataaataatgtaaaaaaatttatcgataaaaaaattatataagtatttaagtgcatgaactataacaaaaattttagaagaaattacactctatacttattttttatttcttatttaaacttttatctttattttactactttttaatttatacccaattttataggtcatattatgtacattaagaattctaattttgataaggttatatttgagaggatatttatttattgaaactattgtgaagttatatttgattaatatataataaaaaatgatagtttttaacttatcacaaaattttgctacaaatatccctgatttagtatataccttcaatttagcaatgtgaattaaaaattacatctttaataggaaagaataattgttaaatggtcttaaattattactccaaatgaataatttagtttatcaattgagataatataaatttaatttttaaattaaaaagagagaaattgttaatggattttggagggaatagagttatatgtactctaacattagcaggtcaggtggcgatgtgcagcagcatgttatggtgtattaaaatatg

SEQ ID NO: 207477 - DNA, 1418 bp, Cannabis indica
aataagtttttgtactaactcactcactcataatcacataaataaattattttaaaaaataaacagaatgtaaatattttacaacaatttgcataatttgagaaaattttttagaaaaaatttatggggaatgggcaataatccagtttactcattaaaatataaagcctttaacaatgctgaaaacagccgcggcacggcggcggtcaacaaagtcaacgttatggaatcccacatcgtcaaaatgcgcgtccacttgtacaccgcacgtgaccaacaacgtcaccaattggttttgccgatcgaccatggggtccccaccgaacccaatcacgagacacctccccagccgtttgatcaactccttttgaccatcgtcagccattggattacaataccagtggtcccggtcaacgcctttaggcaaaaccaggtcccacatcagatctaaaacaggcaaaggcaatagctgatccgtcgcgaaattcaattccgactccgttctctcaacacctccgaacattggctggttcattacaatccccgccattttcaacctctgcaactccatctccttcactcttaaacccacaaaaaagacgatattacccccgcacccacacccataaaggtagcaccgagagaagtcgccgtaatctttgagccacggctctccttccggcccggacgcctggcagtcgacccagtagacggcgtcggacccgtcgtggtattgctccgggagacggctctccggagccaaccggtagttgacggaaaccacgatcgccgggatctcactggcaatttgggaacagtttcggtgggcggcgatgtcggctgcgcttaggagaatccaaccaccgtgatggaagtatatgacgatgggtagccttgcgacggcgttgtcgttagagggaagcctggttgggcggtagaggcggacccaggttcgggtctgggtgttgatagttacgtccttggatactaccgcctgacccggcaagggattcgggtgcgattcgatcgtggggctgtcgagtcgggttagtgtgccgtctgggtttcgagttacgttgaggtgactgtacggattgaatttggacatattaagagtaataatgatgttaattaattaagatttatagaaagaagaaacagatattgatgagaatgtttagtaaatataattttcattcacgatgattgtttttgttttcattaaaaaataattagtacctatctatgcattaaaactaaagcgagtctgattagttaacgaaaacgtaggattcttatgtatattataatataagtaaagtatgcgtgggatttgcgattcagttaattcgtggtcaaagtgttacggtttttgttttctttcttttcctttttctttttttttattttatttttac

SEQ ID NO: 207478 - DNA, 694 bp, Cannabis indica
actacgtaagttagtcaaattttcgtaccctaccgttggacccccaattcgggtaggttcggttcgtcgactagtaccccaagtaccttttgggacccgacttttccgttcgttaaccccgtaaattttccaaggttagtactttttccttttcgtttaaaaaggttttccccgtttaaacgaaccggtttaactttgggttaaagtaaggttcgacttccgtttttaaaaacgttcgtccttaaacgtaaaccgttttaaggaacttaaaaattccttagtttaaacttttaccggttcggaaccttttaagggttttaactttagggttacgttagttaacttaaaacgtttacgaacttaaaaaacttttaagggtttacgttttggtaaggggaaaaaactaaacttaggttttaagtaaggttcgaccttcgttggtttaaagttgggaaccttagggtttgggacctacctaggtccctacttaaggaccgtaaaattaccgtcgtactaggggaacgtagtttcgttaatttacggtaaaaggccgttttactaaggttttaggtcgttaccttaaaaaccccgtaaacgttaacctttaaactttaaccaaaaggacctaggtagttccaaaaacgaaagttaaggtaggaaaggaccgaaaagttaaacgggtttaaattttttt

SEQ ID NO: 207479 - DNA, 1287 bp, Cannabis indica
aaaagttgagtgaataatggtcgctttactaaaagcaattcaggtcctagtgcccaggttgacatctcagcgcccaagttgacatctgacgtcaaccttgacgttgtataagtgtagaaacgtcaaaggggtgtcctttgagatgcctaagtgataatttgacactacttagtccatttatatgctctggcgaagctggttaccagttcccgaagatattattgttttgtggaaatagaagactcaaaacttttgatttgtgagtgagtctatttgtcaaaaaattgaagttgtgaatttaaatattctgacttcatgagtcattgtacttgtaaaaaactagacagacggtcaaaacaacatcaaatttggataagcataacctagtgaaccaggccatttgttgacctgggcgctaggccctttaactgagcttttatgattctctttgtaatacttctaaggctttttaacttgaggacagggtctcctcccctatttttgaccatgccagattcaatggtcacatcggatttggcattttagaaaatgaagccagcgtcccaggttgattgtcaacttgggcactgggcccagcaccaggtcaacctcagggctaggccctatttttagggactcgagtttgtggttttctccctgagtttacttgaatcttcattattttttatgacgataaaaatacctagagtactttttgcttaattgaattggaaacagcccaggttgacaaaatgtcaacatgggcgcttggtcaagccccaggtgtcaacctaggtgttgattcctagtttttcccttaaaaaatttggtttagtccctaaaaatagttgactctcaatattttctaaagacatagatgatactcgaaagaattcttgaaaaattccattttttatggcccaagttggaaaattgtcaacttgggcgtaggccagccctaggtgtcaacatgggcattgggccttgttatttgtgcccacaaattgttgtttttccttatgaaggacctattcccctattttagatgaaggcagattcaatgtaaaagtcagatctttgattagacacttggaaagcgcccatattgacagattgtcaacctgaaagcacggtgcttggggcctcaggccctaggtgctcaaaaatcaacttgctccaaatttgattctaatgcctcaaatatgtttgtggtatgtcttgttgatgtcccaatgcaagttttaaccacttgcactaagacgaccccaaaaattgaaaccctaattg

SEQ ID NO: 207480 - DNA, 804 bp, Cannabis indica
gaaaaattcaagttttattaaccatcaattttaattactaaacacgtaataaattagttgggattagttttactcatatgttatttaattggcaaaacataatgcatgcaacctaaatatgtacatatgtgtatgttatattatttcttacttcaattttgtagtcggtgtgccggttaacttgagtcaattatttatgtagtatatatttgcggaatgagtatttaagatattcaaaaaatactaatagtgcgcttagcatccttcaatatgtgatatcaatattaatgtaattaagtaacgaatcttacataatttattaaaattacttttacgctaaccaattacaaggtgcaacctctcgatagtactaagtaggtaccacttgaactggtgtctaagagcatctccgatggaagttgcccattagagtgatcttgttacatatacaatgtggtatactggtataatttttaagatcaaatttatgtaaagtgttgctgaatatggaccatgatcacatgtcatttttttaatttatttattttattgagaaaaagttattttttactaattataactcaataatttaatgtgatgtccgattatagtaaataatttttagagttgtaactattaaggtatttttttagaaaaaatgaattaaatctagagttgtaattattaagatcttatgtgaataaaaagaagtaatattttaaaataatgtgtatattttttataattataaatacatcatctaacagtaatgtaacaaaaagggttatttcacaaatacacaaa

SEQ ID NO: 207481 - DNA, 1389 bp, Cannabis indica
tgtcatgagttaagaatttggaccatgaatatgatggtcaaaatatattgtgattcttatctgtggactttagtaaatactacatttatttttaagagttagaatacaaaaatagtgtgttctttcttactttgataagataataatacttaatttgaacacaatataatgctttcaactctctcactaattatttaacaaatatgtggaataatttgtttatattgctttgtcgatatgtgacagtcagttatcatgtgatctgtaaggagaagtatcaagtaaattgtataatcttacatctggagaatgtcaagtgtaataattatgtgattgtgtaggtatgagacttcagatttgaatatagcttaaatatcctacttatatcaataaggtacatcttgttttctggtagtccatcacctaagaactctaaagtttagcatgcttgacttgaagtaatcttaggatgggtgacctgttagaagcgtgtgagtgaggacaaaatacgttagaaatactcatgttagtttgtagggtcagtcatcactctatgaaaagacttaaagcagaagtgttacacgatcccaattaaggggtgcccttctcttgcttttgtagagttagatttcggttattattacaatttattatgtagaaaattaaaattgaagctattattttttatttaaaaacgtatagtttaaattattatttaacaaaataaaaaattcagtcaataacttttataagaatacaagatataaaataatatttatcctatttaaataatttgtaattttataaagaaaatctaaagtgtaattattattttgattaaatgagtgtaatacatgaaactcactatgatgaagattttgaaaattgtaatgcacaagccaaaatggaacaatggtagctagagtgattatatatcttaacctaagactttattattagggatgtttgaaagtcactgatattaattttacagaattagtaattatactatatttcgaaatatattgtatgttttaatataacgtaataattatatataaattacttaatatttctttgaaattacataaatagtagttagtaattacatataaaataataatttttagttaattaacacttaaatagaagttataagtaattatatcgtgttattactactcaattactcagacttaggtccaacttgatttgtcttttcttatcattaggtagaaagaagcaaaataataattaatatagattagagcattttctaatattggtcgtattttgtacctccaactactccttaacgtaagaatatcaagattcattatcgtgtacgatgctcctcgtatcgaaaaatacctgtcacttttatttagc

SEQ ID NO: 207482 - DNA, 1192 bp, Cannabis indica
ggtacctaaatttatcttttataatcaaaatttaaatatgatttatcttatttaagtttgaaagatctatagagtatatatttggtgattcgaaaatagaaacctagatcaatgtatatatattaggtatccattattttttttcattgtcattactaactttttgtttttgaaagcgtaattactaacttttaagtctcttttataaattaattaatcaaatatgaataacaacaacagaatcattcataaaagtagtagctacacaaattcagtaaccctaacagagattatccatctaaataaccctaacattaacaattaccaaaaccaaaaagaggagcccattacacaattccagttcaatatcacctaccgcaccatagtcaccagctgctacggccacgtgtcaaacgaagacggcgactacacccccgacggaaacacgccggacgtggtctactacccagcatcagaaaccttgtcagaaccattaggcgttgacaaaatgcatagttttgaggcaacttacaaggctctctcacccattttatcaactattggagtcaaacgtcgcagtgccagaaccgacgtggcacaggctgttactgagttctgtaaatggtttattaatgccaaaaacaagtattcaagattggttgtgggtgcagtggcgatcgagagacaggtagagcaatgggagcgtagtatggatgatgatgatattaatgatgaattttattggatggataatatggagattgtggatttacatcttgatggttacagagttggagaggatgatgatgatgagttaggaaagagttgtgcggtgtgtttggaagaatttggagtgggaacaaagggtgcgaggatgcctcactgtttacatttgtttcacgtgaattgtatttgtaattggcttcgaaagaatttatcttgtccagtttgtcgatctcagttagatattagctctacttaattttataatttggttatttctcatccattatatgttcttgaatgccatcttcaaatttagtgagacattgaaaaaacaaaattatatatttttaggcccagcgaaaaatatagtattctcaaaattaataaaaaaatatatatacttattaacggtattcattagaccacattaggggtgtatatttttatgagggaaatttatatgcta

SEQ ID NO: 207483 - DNA, 534 bp, Cannabis indica
tgatcttggtctgaaagagttgtggagtttgggatttagggtttgcgattgggtttaaggaaaataactttatagcccttttaggtaaactaaaggctaaaattaaattgaccatcaattaacgacaaatacattaaaaacgacaattgaggtcaaaacgaccttgtttgaataatgacagtaatgttgttgtaaaagccaaagggaaatttcatttttttttgcccttaataaaactcccaatatcaaaatttagaccctccattaatttgtataaattaattccattgattacataaaacttcccattttaatccttttattaaaaaaaaataaaaaaaaagggttaaaaactaaaaaaacttaccccctctctcttccctctctctctccctctctcttcctctctctcttcctctcgtgcaccctctctctctctagaaaattagaaaaacttacctctctctctccatgtgatgttattcttgtggtcggcggtagaaaccggagcacacccaactcactcaagaactc

SEQ ID NO: 207484 - DNA, 1291 bp, Cannabis indica
atttaaatttaaatttatattagatatccttacaataataaaaaaaatctatattataagtttgtataaattatttagatatttttagttgatattataaattatagatattttttattattattaattaaatttagtctaacaattaattttttttttgtttttttcaaaaacaaacacatcaaacaaagcaaaacaaagttgtaaaaatttgtatgatttctttgtttggtcaagtcattcaaagttgtaaaaatttgcttgctgatttgtgtaccgttgaggttatttttgttaaacgatctgctaatttagttgctcatagctttggtagagtttctaagttgtatcctgatcgtaccttcaatataaagtctgttcctactaatttgttatcttgttttgttggttaatgaagttttacatttttcattcaaaaaaaaaaaaacaaagcaaaacaaataattatttagtgtcaaacaatttattagttgactaattccataaaagtaaataaatatttaatttcaaaaacccatttaaaaatctttaaagaaagaatcatgattcttggaaaaatgtgttgaatgctacaataaaatttatatcatgtgattataatggagaaaattatattttcactatgcatattgaaaaaaaaaaaaaaaaaattaaaacaatctgttattactacttgtacattaaaattttgtcatcgtcgtattttaattatagtcattactacattaaagattgttattatcacggaatcaaaaattaaccaaacattatcaaaatcaataataaaaataaatcaatgtacatataaatataaacatatattatgacataataaataaatgtatacataaatatatttatcatgtatgtgacatattgcttttagtaataactatttcaagctttttcatgggcaaaggaaaaatgaaaaaagaaagaagagaaaacataatgcttcatgtcgaccaaattatgcaaataatacatgatatttttttacaagcaaacatttaaagaaaatatcgataaaagtatatgaactgttactaaagtatcacatgagagaataaaattcaaaacatatgtataactatgttgtatacctagtacaaaatgaaaaataatcttttcttagaagaaatttgtacttgatgatgctcttccatacatcatataaaatcttttttatatatatatgaaaatataatgaaatgcatgagggaaacaaagagaaaaagaaagctgatgtgagattaatagagtttaatat

SEQ ID NO: 207485 - DNA, 957 bp, Cannabis indica
gtagaatggtagattaataattgatctagttataggcctctttctctatacgtacgtactcaatactcatcatgatcacatatataatattccacaaagagtaatattatggtttctttgaaaatattgaacgaagcaataatattattctcttccatatattatggctgcagaatctcatcacttatattatatgtctcgttattcgtgcctagctagctagcccttcttctcatctgcatgtttccatgattatattattttgtccatacacaacaatcaacatattaatatatctatacatatataaatatatgtgtagaaagagagagattacatattaataaatatataccatgaatttccaccatcgctagcattaccggttaaattatcctcattaatagctttaggatccaacgttcccacctgatcattcatttaattaagaacttaattagttaattatacaatataattactcaattaattagtaatttttttttaaaaaaataaatagaaatttcaagttagaaaccctgcaaatgagaaaaaaaaagaattatatattatggagacatttttttaatcacacacagagataaaggtaatttattataaattccctcaaaacaaaaagtggtttagatttttaattaccatttgttgttggttaacattattattattattattattatcagtagtcgtagttccaacaaactggtcaccatggcaaaaccccaacccagaattcgatccagccatagccgtagctgcagccgccgtagttgaagccgagccggtagtagtggtggtgttgtagatcagctgcctgctgttgagtcgacgcggctgctggagccaagaagctataaatgttgtgatgatgattatgatgatgatgatgatgatcttggaagtgaacaaaacccatgtcgtggatcgggtgccgga

SEQ ID NO: 207486 - DNA, 733 bp, Cannabis indica
ttttatataagtttgttaggtagtatttagtggcgatttaaattatttcgatggttgctatgtgagtttctacgtggaattccattattttttttatgtttaattaaaaaaaaagttcaaacaatttattaatttttgcaaaaaaaaattattttattttattcgtgtgaaataaattatttaaaggttgtttttatattgtaaattagtataaatttttgaattttttataaaatattttaaataattataatatatataataataaataaaaaaaatagactaattttttttttcaaagaatctaaatatttaaagatgcatctttctttagtatatattagagaaacaccctacaaaatttacttagtatattactattatttttttttcttttaaatgaaaatagaaaacacgagaggagagagaaagagaaattgaagtattggtcgctggcatggttgggagggtgttaggtgggatctatggactaacgttggcttgacttggaaatgttaactattttttcacttcatagttatattataccttccttcattatctttatgtttttttttataaaaatattaataataaaatcaaagtgttggtgtagcattggtgaatttatgggtgtttttatctaattcaatcatattattttgtttgtagaccattccaattacaagttgcatatttcatatttcggatctaaccaaatatattcaaacct

SEQ ID NO: 207487 - DNA, 639 bp, Cannabis indica
attacttttgggtctatcttggcagatttggaacataaggaataataaaatttttaatcacagttctaatagtttttttgatgcagagaacctggttagaaatattttacaggagtaccaagaaactcagcaagtcacttccaatccaacaccttggaagataagtctctggaagatgcgcacacaccaatcaacagctcttccaactgctctcttcagcagtcaggctacaagttgcaagtagatggtgccttcgatccccatcattttaattctagtttaggagcttcaattgttaactgccacaactagaaaattgcaggaatgtcaatctcaaagtggggagcttccttcccatttatgctgaagcccattctctccttgctgctctcaattggtgtttggcgatccacattcctattgtttgcattgaatctgattgcttgcagcttgtaaccaagaccaaacagtaattgaaaaagataactcagctctatctagccttatccagttgatccacaagtcctgtctcctttttccaacatgcacccttcgctccccatccagggccggccacgtaggtagtacggcggggctagggcccgtcggcctaggggccccacgacctttttcgggggg

SEQ ID NO: 207488 - DNA, 1276 bp, Cannabis indica
aatggttttttgcaaatttttaactagacaaaagtttcttcataattatttggttaattcgatgagaagcttcttcatcttcttgtggatttaaatgcaagattacattttgtacttttaaatgttaattttattataatatttctaatttttgagcttcactttaaatatcgttaatcatttataaagtatcacctttagatggtattagataccaataattgatactgtgtcactttaaatattgttaatcatttgttatataaggataaaagaattaaaattgatattgtgctaaaatttaaattttatttattttaaatttttgtaaaaaaaaaaaaagatattattttaaattttactctaagtctctcaatacctgaaaacggttttagtaatactcaaaacttaattttaccaatagatatatgacataagtgatatcttttatcattttattttttaatgactagctaatttggacactgtgtgttaagagaaatatttacttatttagagacacttatagtacttagcatgaatcattttattattactaatgtaatttaatattaaattttatttatttttcttttgagctaatcaccataccaatactccttacgttgcttataattataaagaataaaacgaaaattaataataaaatttaaaaattaaatttaaaaggttttttttttctttcaaaatttaagttgtctttttctttttttttcttttattctatataacgcccctagaatttagtcattcacgttataaaagctgtactgtagttatataaaaagcttttgaggaaaataaggaaaagttatgactttgcaggtaaagttagtgttgaacttaactcaatctcatagtacacacaactactgttatttttattttattttaaaaaatatattatttaaatattaaaataatttaatgttgttaaacttgacacgtatttagagaagagtagtgttatcttcaacatgattctgaaaatatatgttagaattattttttttttcaattttttttcatggttttgttatattataattacaacatcatttctataaatttttaaatttttttaaatagtttacagtgccaaaaataagtttgaaattttttaaacacacgtggtaaattataataacaagaactgtgcattcggtaatataaactattcgattttttttttaatttattaaggattgacattgtaactataacgatgacgaatactactacaaaaaaaatattc

SEQ ID NO: 207489 - DNA, 697 bp, Cannabis indica
ataaacagatcttccccgccattggaaaagccctgaatgtcaataagatcttctgaccaaaccaaacaccctattccatttacaaaatcataagctacgcaagaacaattattcatgcaccatttgtagcaattgttggcattaataatgttcacaaatgtatacaagtctggaagctttatcatactcatcttgtaaaatccatctgattctcttccattgaagattggaatgttgtttttcccacaaagtaagtcggttctcctcttgcaccctctccactcttggtctgattttggtacaaacccttttaagcacttgcaaattggagattgagattttgtgcataccccaaactctccgcaagttccatatacgtcgcatcgactgttcctccctcccaggtaggataccaagagccactaacattgtatttgttatgcaagaacaatcttagaagaccttgagatgaaacaaacgcttttgtgaccaaggattggtccaacaaattgaaatgtagaaatgctgtttccttctcaaagtcttgttcaagataaaaaaactttggtatgatgtatccatatctggtactcctacaaacttggatttgtcccatggtccacttctccagtaaggcaattttccattgatccaaaggtaaacttgcgggggtaactgtttcgagattccaagtgtg

SEQ ID NO: 207490 - DNA, 668 bp, Cannabis indica
ttttttttttttttgggttaaggatttcacttcacttgatttaatgcttatcattgttttcacatatttgtagttatagacatagacataatttagtaatttcattttcacatatgagattggccttagataataacaaagttatagagctctctaaaaaaatagctttttttaaaaattgctaagagaagtatgtatttttaaatattgttggatctcaaggcttagtggaccctaggcacaggcattggtcgccttagccagcccaagaacaatcctctcatcctcacaatggggagggataagttaaaaaataattattttttgtatctattaatcaaaaatacccttatattatattttattaaaatatacccaaattttagtgggttgtccaatataccttcattctctacttaaatctagcatataatttatattaacttaaagggtctaatggggacatcatctataaaagtgagtatatcttaaaagatataaaaatgaaggtaaaaatttaaacaagtaaaataatatagatatacaatgtaatttcctctaatgaggaggtctttaaggttccacttaaaagataaaataatatataatatgtatattcaaaataatgttgtttcctccaaaattagaataatgggcctgggctaagg

SEQ ID NO: 207491 - DNA, 1792 bp, Cannabis indica
ttaagtttttttttttttgttaaaaaaatattttataagaaaattaaaaaaaaatagttaaaaaaatatgaaaaaaatatattttacataaaagaagtaattaattaattaccctaaattatttttcgcatattttttaattttttttttttgcataatttttattttttaaaaaataaatttatattttgtatgtaaacttcataaaatttgtaattttgactagtactcaccaaaaaaaataaaataaaataaaatacaatatgtttggccctcaacgaccctttgtctggttccgccagtgggagtagtgaccccaaatagtgcgacaaaattgagtcgtaattgaaggttatatcgcacgtgtgaatggcagaggaggagcttaatagtcaaatgaaaggcacacacacatgataggtgggtgagtgtggcgatgaatatggaatggacagttagtgtaggtcaaaacgtagagtagagggtccccctttctggttccattaattcctagctagtgtatagagacaacgacaaatgatgttcaaaccttcaatttgtggaaagtgaaacaaattaaggaccgattgggaagtgttcaaaagaaaccataagtccatatatgcatgcatcttaaattggtcaaatctgccccatgtgacatttcttgtttactttctttaccactgtaattaattaatttagttttattccttaataaacatgacaagaaagccaatcacccaaattcttttctacttaagataagccctccaatcttttccccaaggcctactttagggtcataggtaaattatattatggcgcatggttgttaattcaaatgaacatatataaggagaaatagcatttggactcctcatatttgatcaacatatattacttgtacgacgtgatcttcggggcaaaatatattatcaattatagaggaaagaccccaaagtttaataatatattatatacaagagaagagataacgttttgaaattctgtatggagagcgacagaataattaattaactgtcaaaagccgaaacaagtgcgaaaaaacaaatgtcaaaagcttaaaactagagaaaaccaagcaatatgtcaaaagctgaagagaaatattctttgtgaactagtactatcagtgtgtacataaatatagatgacgcaaatagattaatttaccacccttaatttttttttaatttttggacaatgacaatgtttttcatttaaaaattaataatcatgttaacagcgcttaatgtttaccacttcatgtctttttcaaagaaagcgaatacaattgactgaatcaatattgaattttttttttttttttttagaaaagggaatcaatattgaattggtttaaaacatttcatctctctaatctatctcatatatagcatataaattttggtttatagatctacctagtaatgtaaaccttctccggcctagagtagagacttcacacaaatgaaatttaaaaatttttttagctagaaatttattggtatgtatatatatatgttaaattagctatgttacatttttacttactcctctccatctaaaagatatatcatgttaaaaaagaaaaaaattatatgctaataaataaatgatatatgtgctaaatttaaaatataattactatgatataattcaatcaaaatatttaaaaacacatacttcctgtcttttctttgtcaatttttttaaagacatactttaaactatataaaattaattacaattaatagaaggtttttct

SEQ ID NO: 207492 - DNA, 528 bp, Cannabis indica
tttcttagttgtttccattattcctccaattggcaaggaaatcagtttaagtagctaggttgacatgcatatatacatgattataacatgtgtatgtaggtaagaaataattgaaatgaaaaggatcaataaggaaagtacggaattgcccttgttactgatcattaaattattaatatttttttattgaatgattaattttagcttttacagcctcggtaccacttccattaacatgtcgggacgtgcttttcccactatctcaaaaaagacttgaaagtgaacccaaatagctggcccctctccaaaatataataattttatttctaactttttttctttctttcttttcattataaataataattcattaatctttataattataaacgtatatttttggttcaaggaggtaattgggtaacagagatatgcatacatgtattatagtattatacccacatattatatagctagtgtatctccgacccgacccgatatcgaattataatatatagtaaaatatat

SEQ ID NO: 207493 - DNA, 704 bp, Cannabis indica
tttgtttttgaattaaatagtgtaaagtattggcagtaaaaaaatgatgacttgttaaaacgtatttttctagaattgaaggattcattgataaaaaaacctcttataattagaattgttgttacagttacatatgagctgtctcagtcatggacccaaattatcaaataatcttattagtgaaaatgagcctaaaaaaaaaaagtaaagatcgaataaaccgaatagctcatagttagaatttcctaactctcccaaagcctgataaaaataaaagaaaaagaaaagcagtagatcagtttttcataagtttagaaggttcagtttttgaaaatttcatatttcactttaatttaatgatcttttgaaaagaaccaaaaagaaaagtgaccgtagatcagtttttataagtttagacctatacggtcacttttcttattggttcttccacctgtttacaaattagtttttaattcttctttttgaattttaataattaattaattacttggatttttgttaacgaaagagaaatttcagttgaacttgaactgcactcgaaattttttggatttatttgcaaaaaaactatgggaaaatgaaatgaccaagaaaactatttgcttttgcaaatatatttggttaattgtttggtgttgtggtctgatcaaactcgtttgttaggattagatatggtattatca

SEQ ID NO: 207494 - DNA, 1357 bp, Cannabis indica
acaccttatgaaatgtggtacaaaagagcccccaaccttacacatttaagaatatttgggtgtacaacacatgtacaccaatctattaacaactaaaacctagaaccgtgaagggaacttttctatgttatgccttaggtaccaaggggtataaaatatatatatttctaagaacgggtaagccaaaggttatcattgctagaaatattattttcaatgagttggaatatcctcacttgacctctgggaaaggtagtgtgtctccgcgtaatgaaggaaaaataaaaataagaacactaattgcatggaagtggattacagaatgaagctactagaagaaggttcacatacgaaagctagtgtggaactgaaaggtagtgcgtagatgaaagctgatgctgagctagaagataacaaagaaaaaaatagaggttttaaaaggatttggacatacagttttaggagcttataagttggcgcgtgatagaacttagagagagattcaccctccggcaaggttcgtggaagtaaactcaatagcatttgcactggcggcagtacaacaaactagaattaaagaacccggaatcaagtcgaacaaagtcaaaatggctttaggccatggatgaggagatggattcactttggaagaagaagacttgggttgttgtaccaaagcagacaagaaaattgtgaagtgcaaatagattctcaaggtgaaagagggaatcaacgaaaataaaccagtaaggttcaaagccaggttagtggctaagggctttagtcaggtggaaggaattgagtacactgaaatcttctcacttgtggtaaagtacaaacaataagattgatactatctttagaagctcaaatggagttcaaagttgaatagcttgatgttagactgcctttcttaatggattcttggatgaagagatctacatgaagcaaccacctgggcttcaagtggaagggaaatgagttgaattagtgtgcaagcttaacaaatccctatatggtttgaaatagtccccaaggaaatggaataaacactttgatacttttatgcaacaaattgagttcaaacgatcaacatatgatcactgcttgtatttcaagaaatctacatccatgttcttatttctctatgtggatgatattctcatcctgagcaaggataaatatgtgataaaaactatcaaagccaagcttaaaagagaatttgagataaaagagcttggaccaattcaaaagatacttggtatggaggtttcaaggaataataaggagggaaccataagattgaagcattccaggtgcatagagaaagttattcagaaattcaacgtggaagatg

SEQ ID NO: 207495 - DNA, 1016 bp, Cannabis indica
atagtcattattatttctcaaaacagacccttccactcaataataaagtatttctacatcggataattcaaattggtataattaatttaatatcataaaattctcacctattattttatatatttatattgttactttttgcataatgaaaatggtacaactcgtatttgaaattaatgcaaaccacaaaagacataaaaactaatagatctcatagtacatactaattaattttatttgaaacatgccatgatgatacgatgcgcttctcactcaatattcttaggagacaagagtgagagaaactctttatcaacttcaagtttagccattgtttctggactgaaacatgcataagcctctatttgatcaccattcttgttgtctaaaaacccaaatatgttaccaaaacacctatgagcagaactcacccaaatgggctttccatatccaaagtcagcatcataaataggaaacctacacaaactactgaacacaagcgcactcacttctcctttctccaaactctcactacctttcttcagtgattctaagtactcatcagatttctcaactctttgaagatcttccacaaactttttatcgatatttcttatctcatctcctatcaccctagccagctcgcaacacttgtcatcatgatcttcctcagtagtaatagtagtagtagtgttaattatggacaaaggaaatgtcaagctactgtgatagtagttcccgaaagagttctccggcaatggttctaaaaacttggaacgaatattcactgggtgaaagattataactaattttgtcttaacgtctaagccacttgccacagcaaaacggctatataagaaagcagataaggcctcaacacgagaaagccgtcgcgaccacttggggtttgcatggttttctcttcttgttttttcctcgtatttggctctgactgcttcaaccttttttgcatcgaacacaaacaactttgctacgtttgtgttctttttggggag

SEQ ID NO: 207496 - DNA, 537 bp, Cannabis indica
aaatcaaatttccctttgacaaaatagaatttgtaagaggtataaatttaaaaatattttgtagttagataaatatttaatataaaattataattttttttttaattttgtaagtagaaattttatttttatcttaaacatcatacctataattcttaaattttaaattatttagtttagactaaaaaaatgtaatactaattacttttaaatcttctattataaattcaaaatagaattttgaaaaaaatagagaaaaattacagtttaataaacattgagtatttatgccaatttatactactgacaaactaaaaattttaagatatttttactactatttactctattaatcacatctttacaaaaaaaaaaagtacaaaaagacaaaaaatatatttttttttttcattttgtttatttttttacaatttttgttttttttattatttgtttttattaattttttcgctataatttttttaccagtaatttttttttttaaaatattctaattttttttttttttatttaatt

SEQ ID NO: 207497 - DNA, 1028 bp, Cannabis indica
tagttacaacaaaatttgtgaataaaaatgaaaatgttatgactaattataaattatcattcttatattgtgactaaaaggaccgtggttaaaattattaatcacaaaaattataatttattgtgactaaatgtaattttagtgacaatacttgttgtggctaaaactaaattagtgactatttgtatctaaatacaatgctttagtcacaagtaatattttttgtgactagtcacaatcacaaaaaaaaattatgttgtgactaaacagttgtcaccaaaattagcagtttttttttagtgagtagcaatattcaaaaccatatatgttggtactgtagaagttgttactttctgagcaccattgtcaccttcaatagaggcctctagtgtcttctctcttggagccgccattgatgagaaaggttagtgaaggctgtaataccaacttaaaatcagcaagaaaatgtaattaatgagattgagatgtattggtttcattatataggcaaataccaattacaagaatatatatatattctaggtggccacgtatacaaaaggtaatggtacaatgcatgcagggagcaaaaagaatattctcctaacagaatttgttatgcaatcattacataaattgtgagttgtccaaatgattgggaaaaatgatactttaatcttcttcaatataagcaagcacacaccaactatgaaaataactttgaaatatggtaaacaaaatgtgtattattatttgattgttttgtatatgtaatatctgttgatcatatataatcaaccaaaccaaagaaaaaaatagaacaaatacaatcgaatatatatctgtgttatgtcattattgaaattaacaacaaacattaataattagtttgttaattattatttttatttgtatttcttggttaattaaaccaagaaattatattattagttgatcaatatattgtttcatcaaataatgatcactttttgcagacaacaccacgaccacccattccactaccacac

SEQ ID NO: 207498 - DNA, 1675 bp, Cannabis indica
aacccctagccgaccatagtgaagcatgggccgaccagcctcctgtaaatggtaggtcggccagcttccttcctagcagacacagttgatgtcgctgaagctttcaccctggatagacaatggttcgttctcagctacgaattcactctaacaacccacgaaagtaggggttcaacttcagatatttacctattctttaagaataattaataggttactttttatatatttaatatttttaaaaagaggtgatatctcctcattttaagggatatcaacctactttggcttagatcttctgtaagctctctcctatataaagagcactagattaaaccaaaaagttctaagttctcattcttaagctcttgagttcaagctcttgaaaccctagctccctctctcctacatgccacttacagtgtgtgtaagagactaagtctttctcatctcacttacttgggatctgctctacattctcactatagtaattcaaagagagccactgtagaactcacaacacttgtgatctgagtggtactatctctcatatcaatacaactaaaagaggagtacgccattacccattatccaagggagttcaatctctgtaaaattattgtgtatattttatttacttgttctaattgttcacacgtggtgattctaatcgtgaataagactctgtcgttagttgaccgaatctaaggtcaacactgcccattgatttgtatgagaaatagaagagtcgtgtattgctaattttgagttctgattttttacataataatatttgagtagcataactatcaggtaaatgataaacaacgtatgtacaactatgtatgaacattgtatttggacatcattaagaaaatttttaataaagttttattgcactgatgaacaatgacttgtgcgttaagaatattttgtgaagaaagaaccagtaagagcattgtaaaccaacatgaactcgaccaatgtttgaatatgaaaaaactcatcatattataatgttttttataaaagccttgtgttggattgtcactttgaaatacctataagactaaaattattgtagcattattcgttcgtaattatcgatacgttaattatcagagcgttaataaaactaaaggccaactataatgcaaccacttagaaacaaaaaaattcaaacaatgttgcctgattcgttgcacgagatgaatgcgaatttgaatgactcgtcgcgatcggaactgaataaattcaagattgaaattctagaaaataatataaatgcaataagtataatattagctactaatattttgttggttatccctgatttggattgatcggaatctcgatatctacttgttacaaatctacattttacgaatctgtatattaaatttaggagaaattagtttatgcaatctgaattattttacagggttgagtttatgtttcaaatcaggttttcttttctgcggaatggttcatgaattggtaatggttaattcttggttttgatattttttctggtttgattcgccggaattaataatattcttcatctacgagcgttgctttctcgttccagagctccttctatctcacttaacttcgtttctcgtttctcagaggtgactttgttgtcgacttgaattgtaaaaggtaaagaggt

SEQ ID NO: 207499 - DNA, 871 bp, Cannabis indica
aattagaaaattgatttccaatctatgatggtggtacgagggttatggtgagaattcttaaggctacaaggattggacaaaagagagagaaagagacaagaagagttcctaaagcggcaacaagttcaattagtagtttatttcttttacttcaagtgttgtaattttagaaatactcaaaatttacttagtttatatattatttaatttttttaattatttggctaatagttgattagagcatgaatatatatattttccatacttaaaattccacacagcttggctttatgattatcatggatgttatttatagaaacatgattatttaggattgtcctatataatttttgtgtattgaatttagtgaaatggataaacataaaatattaggtttcattttaaatagtttaaataacctggtaattcacacctcctttagttagtcacaatgttaacccactttattttgttaaatagtttttcaaaaattatttatgtaatatgattttaattaaactattttcaagcttataatatattaatttaattaatgtattacaagtggttaaattttagaaattaaaatctttttgaaacaattttaataacgacaaacatataatcaaatagtgagtgggagagggttgtcatctgttatgaaatctatggtctccactattagtccaatattacgcgtatggggagggcctcgagatgactttgtttttgccccccctaaggaaggtgttgaattatacatcatcaaggttggcttcctctttaggataggacaatgtgatgtattttaatgcgatattgttcctaaagcggcgctactaagttatgtcatggaatctaaaataatggg

SEQ ID NO: 207500 - DNA, 1036 bp, Cannabis indica
tctattcatatactaatacaagtctttttagccaactaattaaacccaaattaaaagaaaaatctttacttacctttaattgtttcttcttacttaaattaaactttttttgtacctgtttagtctttatatattatgactttaaatgttatgtcactgagtcttatacaatccagcaaccattaacacttaccttaaaaaagttttttatttgaagagataaagtatcaaactttttttttctttctttcatagatctcaaaagctttgattttgaaattctttgtactagtacatatctagttgatttttcaaagatttttttttcaatacaacaaaacaaaagcattattattatttaggagaaaagaatatgacaaaacaaaacaaaaaaatgaagaggtttttctagagatttcatgtgtaaaaggcggtatagtatagggtttttttgtatttattgtagtagttaagtgaagaagatgggtacgtgccacgtggctcacatcatcatcaatcatcatgatcataattttctaaacatagaaaaccctaccctacccatatgctcttctctaagatctaatgcattgtgaagagacataaccatgtttgatgtaatttattttcaaagcccattccactcacttccctttctctctgttgtattctacctatatatatttgaccacatattccattgttgatgagtcagtcaaaaaatacaaaaaaattatatataaaaaaaaacactaaatttgttttcttttgattcactcaactcaaagaagagggagcttgttataggaagctatagctagtattgtattgcattaaattcccacatgccatgctattttggtcagcattttggctgagatgagccccccctataatctatatatacatacatatatatatagatatatatatatattcacaaaaacacatgcatatgaatttcccatgtgagtttcttttatctgatcaaacaacccatattacgtagcatcatatttatatatgtataaatata

SEQ ID NO: 207501 - DNA, 825 bp, Cannabis indica
ccttaatatttgatagagggacaatatgttcgggaactttcggtattaagtagggctggttatgtaatatgtattggtttagttcggatttttaaattattcaaactaaactagtcttatatatatggtatttagttttaacacattattaatgtaggactctctaacattccattttttttctcaatcttgcacgactcaatctttctttgttcgtctttttggacgagtttttggattttcgttagagtttagtttggttctgataccatattagaatgcaaaagtgtatagtaatgagagaaatagctcatgcatcttatatatgttatttaatttcaaacattattaatgtaaaactctctaccagaccaattaaataatttaaccaaaccaaattaatccactcacaaatagatttcgcggtcgttttaaactttttttaaaataattgttcattttttcgataatttttcttttttacttctaataaatttatagtacaaataataacaaaatattctcaaacacagtattaactcaatattaatatttttattttacttaaaagttgtcttaaatatcaatattccatccaaaatacatattattattaagtttaataaaaaattatacgaattggttgaagggtcttggacaacggcccggccaccctaggccctgactgatcgttatgtttgaccagagacctatgtataactttccaatttatgatgtcaagaaacagctacaaatttctctaaaataaaatcttaattgaaatatataacaattaggaaccaaatgatttttgttttatttctt

SEQ ID NO: 207502 - DNA, 953 bp, Cannabis indica
ctattagccggcctagggccaatcaccttccccaccaaacacaaatccatcttcttcttcccttcttcaataccaaccttattcaatgagagaacagggccatcaccctcatcaagaaccaaaacctcagagagtctattcaccaattccaaatccatggattgcacaataagaatcacagaaaaacccagcaataataatcgtggcaccagaaaaaataaatttaacacagaaccgcaatcaacccgccacccagaaaaaatagtcgattggcagaaaatcaatccccccagaaatccaacccgccgttcaagccagaaagtccacccacccagaatttcaaccctccgttcaacccagaaaatcgcaacacccagaaaaaataattgtaacaccacccagatatacaatccgcactgcaacccaggaaatcgcaaaagaaacacaacagaacccagaaaatcgtacctcaactcaagaaatcgcagaaaaaacgaaccagaatcaagaacatagacgccggagatcgtcgactggacccttcccatgaagggactgcacttccctgttagtttcgtagctccgaaaccagtggaagactttttaaaactctaagtaaagatacttatttccaaatacgttattagaagattttactagatcataatacttcaaaaaattttgttaaatttttaaaatagtttaatataccaaaagcaaaatataaaaaatttatcaacacgtgtacagatagaaaatttttagtaattcacgtaaatttaattattacaatattataaaatataatttttttttttgaacactataaaatataatttaaaattataaaaaaaatctattttattttattttatttctttttttttctcctgaacaaaacaaacactaatctattcagagtattaatttacataatttataagaatataaaa

SEQ ID NO: 207503 - DNA, 673 bp, Cannabis indica
acagtaatacatatctttatattataattaatttattagttttaagaatttttaatatatatattaaatacttttatctttacaagcatgaaaattgaataaaaaaattaatgtatttgaaattatatttactgttgttttaaattaaaaattgtgattaaattttttaaatttgaggaattaatatttataattgagagtactaaatatttaaataataaataatagaggaagaaaattattttatttaatttaaaatattatttgctcatagttttgtccaaaatatattttaaaagatatgaaaggaaagtttgagaatttattatgcatttatttagaaagggctgttaaaggaaaaagtgcaaatgtataagcacccaaaaaaagtaattactttgaacaaaagtttgaaattaaagtaaaagaaagaaaacaaaacacaaaacacaataacctgaccaaaacataaaacaataaacaacacaacaacagaggcttaactaaagttgtgctagtacaagatgtttaaaaataatgatattatgaagaaaaaaaaataatatagttataataagaaaatttttaaagtagtgattggttgtgtcagagtaaatataataataaattatatttttgttaatttgaattatattgtttgattaaatatatg

SEQ ID NO: 207504 - DNA, 714 bp, Cannabis indica
ttgtattttaatgttattgtgctcaaattctgctaagagattgtaattgtaaaattatatatatgcatgggtgcactatatggttgtgttcatgtgctttgtattttaatgttattgtgctttgtatttggcacgtatgagtattaatattagaaaatttgagaaataactatgcttaattttgctatctatttaaaaaaaaaattatttatttatgaattatatggttgagattattccatcgggttaagagagaaataaaaaaagttggttttgagttaaaaattaagaaagtgatttatgatttatatatattgtatgttgcatgttatattttgtatgttgtatatgctatttcaggtaaagtgaaagaccatagtgagttaattaaaaagagtagtttatatataagttgagatttgagaagttcttagtaggggtgctcatccaatccaatccgtcctattttgctcatagtgcatccgatccgcaaaaagtgcggatttcatattttggatctaatacgcacagtagctcaaatccaattcaatccagtccgcaaaaatgtggattggatcagttattttagattggttactttaagtatataatatttataaaaaacatattttttttttcagcaaaacaataaaacatattattattatttcatttctctaacaacaaattcaaaaaaaaaaaaaaattagtatg

SEQ ID NO: 207505 - DNA, 1170 bp, Cannabis indica
gtcaacggtcagaactcgctaatgatataattagacttttaaactaacacttaaaagaaaacttaattcaaaaatgttagaatatggatctcataaactttttatatctcaagatgttgctatttcattcctttcaaaaaactcaaaaatcctccctttacaatgaactgaagggtcatatttataatgagcccttctccctttacacccccataatatcccaatacatactgtgtgaagtcactttaatctataacaaaactgtatcctaagtgatcggacacatctgaaatcctaagttacactaaaaatacccatttcattttgtaactcaaacgaaatgaactttgtcctcattgtttatactcattgtgccgtcattatatcatctgatatcttcttatatggtctgcttgtgtctaaagggaaaggaagatctgaagtgtacgaggccaagtgtggggatacaggtgcaagatgcggacgcgggctacgagcgagtgctgcgagcgaggtgcgggctacgagcgagtgctgcgagcgaggtgcgggctgcaagtggggcgcgggcatctacgagtgaggagcaagcacatgcagtgagtagggaacgcgggctacgagcaaggagcatgggctgcgagtgggggcgcgagcgaggggatgcgcatgtatcaaggggtagcccaatgttagaaaaagaagatttgagggcaaaagaggcgggggccatccattgtcctcttatgcttgtattgggcatcttaactatttcacccacacatccgcttttcgtaagagtactttgcttcttagatttttgcggttaacaacaaccctaatctttactatctcctattacatgtttttatcatagcccttcattcaatttgatctgatggtaaaaaaaaaaatgtaaaaaatttagtgaaaatttgtatccatcaaacttatcccatatatatttatctactatatatgtagattgtagatatattgtaatgctttaggctatctttaacttttgtgctgcaattttttgttttatttttgtttttcacacttactctcttactgttccacccctgaatttatgtataaattgtatgttttttttggtagcgtgtataaaaattgtatgttgacatacttatacaaaataatatatcc

SEQ ID NO: 207506 - DNA, 954 bp, Cannabis indica
acaacaattcaggttcgagaacgcatggttgcgtgaacctctctgcttccaggtggtgaaggaggtctgggagcttcataccgactgctctatacttcaaaaaataagtatctgtggggaaaacttgtcgacatgggggcgtgaatatactggcaacttcaaaactcgaattgccaagataaaaaagtggaagagagggcgtgatgttgagtcggtcagaaaatataaagaagctcaaaatctgctcactgaaattctgaaccagcgagaggtgttttggcgtcaaagatccaaacaactttggctccatgaaggtgatcaaaacacaagtttttccacgccaaggctacgtctcgtaagaagcataacaccattcatagtcttcaaactgctaccggttcttgggttaattgggacacgaggttagactctcttattgttgattattttcagaatctctttacttcatcttctactgattttaatgatgttgttatgagtattgttccttccattaacactgttgagaatgaatctttgcttgccccgattactgatgaagaagtgaaaaaggctttgtttcatatgcatccggataagtcaccttgcccagatggtatgacccctggtttttatcagaaatattggtcaatagttggttgtgatgtgatcaatcaagtgaaggaatttttctcaacgtgctctctacctgctgggttaaaccgaagcaacattgtgctaattcccaagaaaaaacagccttgtacaatgagtgatttgcgtcccatttcactttgtaatgtcctttataaggtcatctctaaggtacttgctaaccgtttaaagattgtgcttcatcatattatatctgaacatcagtcagcttttatcccaggcccgtactattttttgaattaatattatgatagctttttgaagtttatgcactatttg

SEQ ID NO: 207507 - DNA, 1019 bp, Cannabis indica
ttgttagagctacatagcatttagaaccaaaaaaaaatccaaatattttagttttaattttgtaatttttttttgcactttggccctccatacaagtatttttaccccccgtccccctttgtcactaatttgcaatgtctcttctctttgtctgcatttgtataaactattaaccacataattattatatttatgcatatataatatataactaattattagtgatgagaaataatttaatgagataagtttgaaaatgcatggtggagtgtaaattaagtatatttatatataatatatgtatgtataatattagaaaaaacatagataccctgtacctacttgccaatataatttatttatacaacattctttttgtttttagtataaattaatttattgttatttttctcaatcatatatatccatatgcatatgcatattctcatataaatccaaaatatttattatgtatatatataaaataaacccaccggcgatttattaaataaactcgcttctgatcaatgcaatcacctccactacattcattttcatttaatatttatatattataaaattatatttatctactaatatatttcttttgtatatatgtcttttgttcaatttaagtatgtattccatttcatttttataaattattggatgattgaaaatttacggggtgtttatataatctgtaatttataattttaaattttaagataaaattatttaagatcagattaaatgaatttaatgtgaataatttgatcaatctagaccgttttaaattttctggtcacaattttaaaaattttggtaacagtttaaatcaaaccaattcatataattattatatatactttttttttggataaaattttaatatataggagcaactttagatagaatattgatattgagtttatattgttataataataattttttattattatttatgtattataaacttattaaaagtaaaaaaaaaaatacgaaaaaataaataa

SEQ ID NO: 207508 - DNA, 607 bp, Cannabis indica
tgattattactcattccactaaaattatagaaaaaacatatgacagattacaagtaattcattttagttttgatttttgaatatatttgaaaatttcttaataaaatcttaaaaatattattaaaattaaaattattttaaattttaattataaatatctaaaattagtttaaatataattattaaagtcatatattttatttaattaattttaacttaatgcatataaatttttaatacttcattttaatatgacaatcaatataagtggggtcataattaacagttaactattgtttttataaagagaaaaaagttctctctatgtacatagactcaggtatgacaatttatagttcataaataaaatgaatcgaattgatatgctagactgaatttttgtgaaataattttttaatattactaaatctgagatcgtcatcggtttagatttaaagcttgatatcatgatgaatttgttgaattctttttttttttgaccaaattaaccttaggatattaatttaatgatctatttttaaaatacaagttccaaattattattaaacaaagtataagggctaattgtatattaacgctaacataa

SEQ ID NO: 207509 - DNA, 750 bp, Cannabis indica
aaaagaaaatagaagaagaagaaaaaaaaaactgatagtagggataaattgagtcgatggagactttatgattgtgttattagaagatatatataaatatatatataaaatgaaaggtaaaagacattttgcctctcaccaacccaacccacattttgtgatgcccaatcaaaaggggtttgtgattatggctgttggggtccttaatttcctttctcataaagaatcttaagccttcttaatcacacgttaatatgaagataatattagttgaaataaaaataaatgtgaatatttttgatgaataattgaaaaagctcaaatggtattgtgttagcttaaataaggaaatattgtgtatatatatttataagttgatgcgtgcaactgaccaagaagattcgtatatataaataaataaatatattcttttgcagtgatgaaaagaatatgataaaatctttgtttcaaatagagtaagatgcctcattacattggaccacaacatgtctattctaatttttaaggatcattccacaattattgttactcatctgcaatgtgtagccacacatacacatttacatatacatattcatacatttatatatatgcatataataattaagccttcaaggatttttttttttttactttttgttttcgtactcccacctttcctttttcctttttactttaggtagtttgtttttgtgtatgagaattaatatatatatatatatatattat

SEQ ID NO: 207510 - DNA, 896 bp, Cannabis indica
caacaaaaaatataaactgaaaaaaactataaaaacataacccatccattttgtatattgagtgtgttgatcaagataaagctaacccgccaaatcgactcgaattagctcgaccaacccaattaagagattacttttattatgttttattatgtataataaaatttaatactattttagatcttgtgttttacaaaaattatcaattggtcatctgttttgttaaatgatgaaatagaccttgtattttttaaaattgtattaataggacactgaactgattttttatcaaaataaaatttaaaaataatccgatctagagatgttatgacaaaacttgttgcatttttctatatatgttcgtgttagaaattgtcttaaagttggttatattaataaataaaattgttgaaaattgagctcagtgtcttgtttttactattttagaaaatataaggtctattttgtcatttaacaaaatagaggatctaatcggtaatttttgtaaaatacaggatccaaaatgatatttaccttataaaattgatcgaatttgaaaatatatatattggtagtcagtttggtaggttaaactggccaactcatcagacgagttactttttttcatctttatttgttcaagttgcacttatatttttgtaaccatttgactttaacaaaatgtggtatataaaaacccatcgacatacacccaaagtaaaaattattacaaatatcatcctatagctacattctgctcaagtatttaaacaatttgatgatgaagcatgtgaagttatacatatagatgccacataggaaatatgttcgaattatgaaagtttccttcctagactgttatagaaacatgctcagactgcttagggatcctagga

SEQ ID NO: 207511 - DNA, 1178 bp, Cannabis indica
ttttaatattacctattcatgagcaatacacattaaaattacacctatatatatatatatatgcaattatatatttggaaaactaccaaactagtgcacacgagtgtaaaataaacattgcccaagcctagccactagagttgtatgtagatggatgaagagagatgagagagacctttgagtcgagatgctacggtcaaaggcgagtctgcaggtggatttattatagtttcccttttttagtgtctcctagcccttctattgtcttaccaagctagtcaaaattaatttttttaatgtcaccaattgtgtcacccattaaaatgagtcattgaaaatatattttgtcaactattttttttttcttatctttttatgcatttgatatattaaactacactgtttaattaagtacaccttatttttagcttaaattaaattaggattattttaaaaatatacaaaaataacaaaaaattacaaattttacttatagaaaataaggtttttttatgttgtttggatattatttttctgttacttttatgtgattttcttgttatttttatgtaacaccataaaaatgtaagaaaaaaaaaatgaatgtaaaattataaatttctctttaaatttatataaatttaatttttaacttcacaaacgttgtgcccaaagtgaattcccttcacgttttggcatatgaatagtcataattctaattttattttttttagttgtgtacattgtatttatttaagacataatttaaatattcaaaaaatttattatataatttagaatataaaaaataacgttcataaaatatgttttatacgtgtttaaaataataataaaataaaaacacgttgcaataatctatttaaactttattttcgacatttataattttttaagtttctcacaaaaacttttaacatatatgaaataaatactatgaacaacttcatataaaataataaagattaatgaaggttctccatggaatttagggttaatttcacaaatgcacaaaaataacaaaaaaaaacaacaaaaataaagtttcacggaattttaaatatttttacgatttttttgattttatttacataaaatacggtctttttatgttgaaattttgttcatttgttgttaattttttgttatatgtatgttat

SEQ ID NO: 207512 - DNA, 1203 bp, Cannabis indica
gttttagcaacttcaatgccaagaaaatatttgagctctccaaggtctttaagggagaatgtattgttgagagaggtgatgagtgatgctactgacttggggtcacttccagtgacaagtatatcatcaacatacactaaaacaagtgtagttgatgaagtgttatgaagaataaacatggaatgatctgatttggatgcagtgaatcccaaagacagtaagcacttatggagcttctcaaaccaagcccttggggcttgttttaaaccatagagagccttgtgtagcttgcaaactaaattgggctgagtggtaatctcaaaaccaggtggttgtgtcatgtatacttcctcatgtaactcaccatttaggaaggcattgttgacatccaattgtctaacaatccatcctttcgaaatagccaatgtcagaacaactcttatggtgattggctttacaacgagactaaaagtctcagtataatcaaagccaggttgttggtgaaagcccttggcaaccaaccttgctttgtatctgtcaaccaagccatctggattttcttttattcgaagattccacttacaaccaattagttctttgcctgctggtagaggaacaactgtgtatgttttatttcttgcaagagcaaggatttcttgtgacatagcctgcctccatttttcaaattgcaaagcagatttgaaactctttggtattttctcagtgagtaaaaccttgggtttgtggatacccaaattagccttggtgaccatttgatgagtgttggttggaatggtaggattaggtgactctggtgtgagagagatatgtgtggatgaacctggatactgggaacaaccaggttaataggaggaatatcaactggtgcaggaataatagacacatggggatctgatggagagttagtgtgaggatcagtagagtcaggttgaggtgtaggctcagattgtaaaccaggttggacactgatgctagattggaaaccaggtgagatgctgattctagattgagttggtaatgaaggaggactgtcattattggagaactgagttggtgaatgttcactgtgattgcctatgggaatgagagcagatggagaatactcaattggtggttcagatgagttgaattcatatttggcataagggaacacaagcttatcaaatattacatctctagaga

SEQ ID NO: 207513 - DNA, 613 bp, Cannabis indica
ctaattaagtttctatatgaatatatccatgttaaatgaaaccttgtttttgtagtatcccgggtgttgttcttattattagctagcaatacgtaatataatatgtattttctttatcagaagaatacgtgtgtattttttatcaaccttaataagctaagaaaaaaggctgttctatagctgcgtatatttatttatttattgatcttatcctaatctggtatattttttttagtcgtcattctaatctggtatataaaatataatattatattgattgcaagaaaaatgacaaatgtcagggtctataaacaaattttatgatctgggtatgttatggtttgacacgtcattgtcataaggccacttttgaaaacaaaaataaaaaaaaataaaaatcgtcccatataatctaggactacccaacttcgatttatgaaaatttatataataatttaaatttttatattcttcgccacaaaatataggtgtactttgaatatagaggtattattaaaaaaattgaatttttattcttaattttttttaaatcaaaataaatactactatttttacatatagactgttttgaaagaaataatttttaaaaaaa

SEQ ID NO: 207514 - DNA, 630 bp, Cannabis indica
ttggataccttacctgctgtggcagttatatacaagagaacagacctcaattattactgatcttaatctgcaaagctaatttcacattaataattattatatttttctttgaagaatgaagaaactaatcattctcttgtcggaaataacaaacaacttctaaatttctatttatttaattaataagaaaataaataaaagaagaagaagaagaagacaatgtatgagtagcccaggtgcttaccaaaagagccagagggcaatggtggtgattatagagtgggtcttcttctcttctcctatatttatatatagtttttttttcttttgtattggtggatccttctttttgttttgttatgtgtattttttgtttgtctggtcctaatctatgtgtgctcttgtgatgtgaagagactttcttttttggtattttttggggtttggaatgtgtgtgagaaagagagagagaaaaatgaatgaagagttgatggaagaacgacttttatggagaaacaattaaagggtccctataagccaagagtttttggtcccctttgtctacgggtagtacatccaaattttggaattttactttctattttatcttatttttggtttttgtatatg

SEQ ID NO: 207515 - DNA, 837 bp, Cannabis indica
aaatttaatttatttaaactaatcgaagtagaatatctacttaataaaatgttttatttaaatggaaactcatttttaatttgataataagtttactaaacattatacacgttatttcaaattaattaaataatttcgcagagtataatattccttcaatttaacaatgagtttagtaatccatataatgatccaattagtaaatttcgcagagtatttctaataaagtttactaaacattatacacgttatttcaaattaattaaataattttatctcctatccagaatcataaattactataaactttatttagtaatcaacataaataaattctcattaaattcaaaatttagaattgaaattcaaaaaaaatgagataatgataagtgagtaaatttagattacaatatattgaattataaaatacaatcttatcttaaattggaatattggtgtttttaagaaaataagatgataagtttttaagaaaatttataatttatgatatagtgagtaatcctccctaaattattaatcatttagggaggactactcactatatcataaattcaggggaaaataaggtggagtaatatacacaaggtcaaaaaaattagtttaaaaattagttatacacttttagtcacataaaacataataattgaaataaaagttactgttattctcaaaaactactcaaaaaattaagggaggactactcacatggcagttatttagtttttaaataatttttatttaaaaacatattaacattattatatattagcatataatagctaatttagggaggactattcaaaaaaatttaggaat

SEQ ID NO: 207516 - DNA, 1018 bp, Cannabis indica
ttttttttctattttttttgtaaatctaattttttttttaaagttatatatgtttttaataattattgagtaataatattagtaaagaattaataattttaaaaatattttatttataaattaaaatataattttaacaaaaagaaataatatataaatttttttattctaaaaaatttaaaatcctactttcacatccattaatggtggactagaaacatttttctagtccaacaatgttggactaaaaaataacccccttttatgtccccttgatattatgtccaacacaaaaatagacttgaaatacttttctagtccaactttaatggacttttgtcaaatttctaaaaatggtgatctatagaatagagaaaaattttcaagaaaataaagctgaaacttcaagtctaaattcaactatgttctgatccgatttttgaaaaagtccaaacacaaaagtttaagattttttttttagctttccaacgtatcttgaaaaatctaattaggagtttatatgtgaatgttatgcatattttactgagaatgtcaaagcaaaaaagtgggtccagtggttgtggtgaggccgtcaaagcgaggatattggccgccgcagtgccaactccgtacgattcaaggaaaacttcatcttttcacattttaggctggaaaactctatttaatgcaaggggatcgctcattatagagggagagaccatattaatagtataaacacaagaagaaggctcttggagcgagcatgggcgattcgcgacaatcctccatctggtttctttctctcctcttaattttttatgtttttatttgtctttagtttaattatggatttaattatgatctaaactctctatttaggaatttgatggatattggctgagattattctatagattaatgctattttattgttctttctttctctattatggtgatttattcatatttgtgcttattgtatgtgtttggttggacaccttatgcatgatctatgatc

SEQ ID NO: 207517 - DNA, 913 bp, Cannabis indica
aaaaattaaaaaatagttggagtgaagaaaattagatgttgggaagaagaaaaggtacccaaattgtagcccaataacgctaacttaatacacattccacactagaaagaacagagccatcgtcgtcgtcgtcatcatcagcaaaactaaagagtcaaagcccaaggcccgagaccctcctccttcttcattccgaaatctcgaatctctctttttctctctgttcttctcgtcatcgcaatctaaccctttgttcccattctaatctttcccccttttttctagttaaattttatctttttaaattatgccatcaaaaccctagctcaacttcctgcttaaaactcaatctgaagctttgcgttagctcgttccggtctctgaagaagtttccatattgaatttgttcaaaaccctagttgcggttcgtatttcaagttttttcatttttttttccttttcggtactctattgttgttattttattagatttggtgatttgggggtgtggatttgtgtttaataagctgttgagtttagcttgggttttactctggggattgtctgctgtatgggatatttggttgtagtggtatttgggggtttggttctgtttattttttggttgctttagttgtttagtttttctttttcttttttcttacaagaattcaactggttttagatacttgggtgacttgttttttggcaaatcttttgaatatattgtcgcctgtttacgtgctgtggagcaagtaattttagatcaaattgctttatggacttcatgctaattgggctgtgaattagcatgtatataaaaacaaattactgttcaagtttgaagatttgttatagtttatttgttcccctttttgctgctaatgttgtctttgcaactctatgctaatgt

SEQ ID NO: 207518 - DNA, 1038 bp, Cannabis indica
tatactcaatagacactatcttattctaaattctatcttttacaactagaaacttattaatgtctatgtgtttagactttaataaacttctattgctatttgaatatatagaacttctgaaagattgtcacaatatacttttaacggtctttcaattccttacacaacttgtagctaagtgatgaaatttcgcagttatatcacattattggttgcctctaacaagcaatgaattctgttgccatgatatgatgagctatgagcatctgcttagcacttttcatgatatagctcctccagacaataagtagatatagccagaaatggacctcttagtttctcaacaacacacaacattagagtcagaatacctaaatgatctctaaatttttagacttctgacaagtgaacatataatcatttgttctttataagtacctcatgactcatttgactaccttccaatgattcatactgggatcacttaagtatttgctcaacatagtcactatgtacgtcaaagctagatgcgtgcatacctaagaatacacaagacctccaatagccgaagcataaagaatcttcttgcatctttactctttaattctcgttcatgagacactatttgagactaaacctgtggatatgagatgagattgtgggtatatgatcttccatagactaatcttctctctgcgttcttaattgatttgagattagccttggggaccaaactcttatgttataaactctaattaggtttactattaggtattacattacaaagtccatcagaataagatgtttattggactcatttaattagatggaaaaatttaataaatatgagaattcaaattatagttaactttttaatggcaaaaaaggtaattagaaaaaaatatggaaatacaaaatattcaatgatcaaaatgtggaaaaccaaatcatatatgaagaaatttacttttaaaaaacccataatttcccaaacataacagaatgtaatctctcttcaatagtctctccacgagtcac

SEQ ID NO: 207519 - DNA, 801 bp, Cannabis indica
gtggcaggtagttcatggcaacttactcactagagacaattttgcaaaatttcacattactcttgattcttgcttctgtccggtgtgtggcttggaagaagaaagccatagccttctattcttcaactacaggttgtctaaagaggtgcttcagctggtgtggggctgatctttggccttcggacttcaccagatgtaaggtgtggctggccaattcaaaagctagtgtgaaaattcttattactgctgccactgtgtatatgttgtggaaaaataggaactcgtgtgtgcataataattgttgctataccaagttgagaattgtagtattaaagatatagtcaagtatagattgtatagtttaaagaataggaggaagattcttgctgaaaaagccttggttatgaggctcattgattaggaccggctggtttttttgtgctggctttttgagcagatgtagtgtggagccggttggttgtggcttgggtttgtattggttcagtattgattaatgaattctcttctttagtcaaaaaaaaaaatattaataaatgagaattagataaaacataaataaaattaatataatgtacttttttacttcgttacatccttcttatataatataagtgctcgtttattattaatttagttgaaaataatttttgttgaagtatttcctaagggtaatatgtacatggtcggtcttgagttgaaatgagtcatagaaaaaaaaaaatgggtccttaatataaagtactcaaaatgtttgacgtgcaagttaatattttaagtatt

SEQ ID NO: 207520 - DNA, 568 bp, Cannabis indica
ccctcttaacttagtttggtttactatacactctccaaagactagacttttatgtcccaatgagccagatttcgggccctccgaataattattgttagcttatatatgtgtgcattcaagaccttcatcattgcattgcacgatattattatttactttatttaattatgatatgtacaaaattgttatgtaatttgtagctgtagctaattaagctctaataatctccaagagataatttcgtacgtacaatctgatcttagatctctgatttcctcctgtgccaaccacacatggttctctctctttcctctctgtctttctcttgagcatattttcattattgtttagtcacacagcagtgatttcttgtctttctttttccactaaatttggttttttgtttttggttttttttaatgataaaataaataactttttccactttaattttgtaacagtacatataaccttcttctctctttcgcttcttccttacacctctttcaatttggtgattttgttcaatatccacctccattaactttttggttttctctctctctct

SEQ ID NO: 207521 - DNA, 2315 bp, Cannabis indica
gataactaaatttaacctaaattaactcatgcaaaaattaacctaaaactaaatttttcttcaaaaaaaaaaataacataaataacactagggttaccttgagttctttcaactcaacaccacttttaatagaaattaatggttgaattatgaggtttgctttgattttttttttttttgttttgggtgggtttttcttgggtctaagctagttgagagtgagagaaagagagagaaggaggatgattgataatgaccttggttttagttttatccaacttagtaaactaatataatataaaaaaaataaacttaaaataaaacattttctaacataagacttaacctcaacccaaattctatagaagctactaaaaataaaaagactgaaacacaattaattaagtgttaaagaaatgaccataataccgtcttacttagctcttaagtaatctctaagtctaggagtaaattggtcataaccaattaccttgagacaacccgacaattcaatatcctctagaacccccagtataactaaatctcatatctcatattattaacatcatgatatttttggccagttaatcgagtttccactgttatcgaattcaaaaatattttttctcataaatagcatgtatactacccatatatttcaataaaattttcgtaattaataaattatgcttatttattcgttcttattaaaactcataattatcatataattagcttagtaagattataatcttactcatatatgttctaagtacacataatacttcatatttaataaaatatgtcttattaaacataattaattttttaaaatattacaatttaattagtatagatttcaatacatcttctccttacacgttctcgtaaattgacaaacttactattaatttacttatgagaaatagttggaaggtgctgctaaatttttcacaaaaataaaacaatcttaagagcataaattgcactgtatgtatattacaaacctcaatgggataggttatttacccttttagtaatggagtgaaaatggggattaggacacttccacatttttgttgtattttgaattatttgttcattactttatagaagaagatattgaccgacagaagttggatgactgcgaaatgacgctcagtcgagttttgaagtggcaccgacgaatttgttgcggttgctaggaaccacataaattctgtcaaattatctcgatgtccttgcatgaggtgtttgaatatgaattttcacacaccaaaaaatataagggttcatttttttgtcagcgggatccaaccttcatacaacactagattttccacggggagccttttctcaacctgttgttcaattttcaaaaaatgacgaagaagaaatggaaaatatgttagcggacatgttaagaggagatccggagtttgacgactgcacaagcactacatattctttcaatgaacccccgatcaatgacaacatcaaatataatagataatttaaggagatggtgtataagttgtatcctagatgcaaaaaaattaacattcaataatgctttagtaaaacgtatgtgttgtaaaatttaaaataggttattatttaaattagttataatatttattataatttacccaaatatatatttttaataaatacacttatattggcaaaaatttgcgctaacataacttaacactcacacaatttaatttaacaagtaacagttttataggagaaaatatgcacgggcaaaaatgttgctcaccaaatttaaattgtgtggctataagttatgccagcgcatatttgcattggtaaaacttttacccgccaaattaaaaaaaaaaaaaacaaggtaaacttctaccgatgcataattatatcgataaaacttttagtgaatattcagccgacacttaatagcggcgagtcaatttttgtcggcgaagaaaagcactggtttaaagtagttttatcggcgcattttccacttgcaccgacaaaacttgttttaccgactaggaattgcaggtgcaattatgtgccagtaaaagtttgttgcgtaaatttgcaccaacaaaaaccttatttcctttagtgtctccataggagataatgatgatcctttaagcatattaagagattgtgattgaagaacactattgaggcattgtcataatttttgtttcgcattttacagggaggaaacgctttcattttgagtgtaagtgttccatagatgagcctgaaatttgttacttgagtttgtaacaatattggccattaatggcaaaaag

SEQ ID NO: 207522 - DNA, 1419 bp, Cannabis indica
gaagataataacaatttccaactactcatagtaaattaatatattattactacaattattttttctatttaacttaatttttggtagctagtgatgttagaattctttataatatgtaatatcaagattattattttatatatatatatatattcgagtcttatattttgtataataattaatatatatatattcaataataaataatgtgttatattttactttttgtgaaacttatttgatatttttatacacttaaatttataatatgtgtttatatttttccagtatattagtattatttttataatattttagttatatttttgtataataatgagtatattgaacaataaataatatgtaatattttaatttttatgtaatttattattttatacatttaatttttaaaaaagctttatttttacattatgagatttttcgtcctgtccccaccctattagaggattctatgccctgccccgatggggacaaggggaacactccctaccgatttcttgctccatgtgcatccctatgtataacatcaatattattctaaaattactctaagtatttaagggttatctaaaaaaaaaacaaaattcttataaaagtaggttaaaagcatacaattataccaaaaattatatacttgacttccaataaagccacataacgccacatggtgtagagctacgtaccctagtaataataatgtgtgtacgagacgtcagaaaaatatattgtactgaaataaaagaaaacattacatggaatgaaatgacagaaaaagttatgcttttagtagaaaatcaaaaacccaaaagttgaatattgtcctttgattacctttgtgataagctccatgaaaaagtgaacatctttagtgtaaaatgtaaaactcagctgataaacttgtaacaacatcatggaaatcttgggtataatgagtttgattcatttttactaatagagaacttttgggacataatctctttaatatggcgcttagtctctctccataacaaaaattaacaaaaaaaatcataacaactataaatttaagagaaacttaaatgaaatatttttatcataattttacttaaattttagcaacataacgactataattgaatatttttaaaaatttaagctattaataacaacaacaaaaaatctcaaacaagataaaacaagtgataatgactttgtatcgcaccattgtcgaacggaccttctcttagtctgaaagttagcttttggaccgccagcttgtgcctagatcctggccggtcatataagctcatcctagccggcctgtagaatcccactggtcggccagatatggtggtatgcatattgacggatcgcttaacttgtttcgcttgttacttgacgattttgtcatgcctt

SEQ ID NO: 207523 - DNA, 546 bp, Cannabis indica
aaataaaatcaaaacgtattttcatacattttcatctcctcctttcagcaaataatctggaaagccaggaagtgtgaaatctaagcagagatcttcaattggagccccacggaaacgtaaatcggcaattgcactgccactgacaccatttgattctaaatattgcttgcgacagacaaggacatgcagttcttgcaaagtcctccccagctcggcatcaaaggaaataatatcgtgcaaatcaagatcctgaaatatgtttaaaaaaattacagtgaaaatcagtaaaatctacacaaaaaaaagaaaaaaaaaattaaaaggctaacaaactaaaaacatacacttgtttctataattataagagtacatatatcttacctgaccaagtataagtttgtaaaatgctgtggacagaggaaggtccaacagccgtccatcttgaagagccttagccataacacgcccaactaaccggaaatactcgatcactttaaaaactgactcccgtcagaagtgtctgcatttggaggccatggacgaggg

SEQ ID NO: 207524 - DNA, 871 bp, Cannabis indica
cctgtgagatgtctcttgacaaaagtggtttttcctgtaaaaatcaagaaacgcaatgatcaaatgtaatggagaaaatcccaacaacaagaacaaccagatcgaaaagacaaaacacgaaatgaatcttgttaccagttccaccatcgcccacgataacgagcttgaaactggggtagtcaacagtctgctggttcggcaaagcctaagagatgataacaaaaacataaagaatgagttggagtgatggatctaatataatctgtgtatctgtgaaaataataagaaaccctagaaccaaaagaacaaccaaattaagaagaaaaaggaaactttaccatgaaaaatgttcttgaatcgacgcagagagagagagagagagagttgcgagagagtgaaagtgggggtttagagaggagaagagaattaagggaaagaggggtttatatatataataataatatttatatagggatttgctttatttttacgcgatgaagagttttattttaggcaaaggaaatgaaatgaaaccctatcaatatcaaatcaaaattcaaataaaattggtggaatctgatgcatttcacacactagcgtcagaattaagccttcacaatactatactctataattttattttgtttttttttaagaaaatatcactattattataaatcaacaatcatttacaaaaatagtgaaaataggatcacctagccaactctaaagtatgtttagccaaactatatacagcatggttagcgtttctcctaacataagagatacgtgcttattttttttagtgtagcgtaatggtatttttataattaattaatagcttgtaccttaaaagtcttgggttcgaacc

SEQ ID NO: 207525 - DNA, 755 bp, Cannabis indica
ataaaacttgaaccagtatatatgttttactgcattaattgtttctagttttagataactttgtttgtttctattttttcataattattgtttgtgttttattaatattatcatagctaattttttattcatcaagttttagttaatttgattctggacaatagccctaattttccacatatgctgccccaatgattttggagtggaattttctttcttttattcatctctaacagttgataagaggataaggattaacaatgtgagtcataataccccccacaataatcatgaatattaatattttattatgcaattgatgatctatgtactaatttttaactaaggtgccatctcacttattatttatttataaatagaaaaagtttcgcagcttagggagactttggctacatttcacttgattttatttacttttaatttagtcaaattttaaagcttctgataactgtttaagttaattttacaccaaattaaaagttattgtaaaatttaagctaaattaatatttatttatttttgaactaaatttaacataaattttacgataacctaatatatttatgatttattacatggtatttatagagaaaaggtagctaggtgagtttagacatcaaattaatgtaaaatctgtgcataacttgactcaaaaaataagttaatgttatatttggtctaaattttattaatatactctaatgcacttataaaaaaaatttattttaataaaa

SEQ ID NO: 207526 - DNA, 637 bp, Cannabis indica
tatatattgactgctgacaataaataaagacatcaagctagctactattctatatatatagacccttttgatatttgttagaatttgtaatgtgatcgatcgatctagctgttgatcaataaagaaaattgtaagagtgagtattcgatctaatttaattttttatattattctaatgtaatttgatttatttagtaattaaaacttgaaaaatcataattctatctaatttaattaagcttcaaaggtaattattagatttcaattcaatttttaatattaattaaaaaagatatttaaaaacaaaactatacgtgaataatttaaagaggtttataaaaaatttaaaagtaatttaatttttttgcttaaatcataattttgaatattttctgttgttaaaaattctcccaaacttgtaaagtttgattcaaaaaattttgtccaattaatattaactaaaaaaatatgcataaaaactacaaaatatttttttaattataactaataaaaaaaatggtttcaatacatgtattagatgtaattggagtaataagtttttttattaaattttaaaaatattacccaacaacggatacaatctaataattagaatctaactatttacatccaattt

SEQ ID NO: 207527 - DNA, 681 bp, Cannabis indica
aaaattcaaaagcacaaaacccaaaaattcaaggtcgttttctccataaattaaacatcaaattccacgccaaaacctcccaaaacaacaaagatgcatcaagcataaacacaaaagtataaccataccaaaatcatcgcaattcaccttattttcacaaacatgcaaccaccacacctaagaacaccataaacaccattataaagcttaaatccataaattcaaacaagcaaaagagattcaagatagctacctatgttcttcaagctccaagcaagataacacacaagatcaacactagatttcaagcctttttcccaagcttgtgtttgaaattataagatagagagagatatagagaaagagaaagagagtttggacggtttgggagtttcaaacccagaaaaaatgcttctctttttggctgaaaatttagtattaatgaaaatagaattattggccaaaataccattttgccactaaagcacacacataagcataaacacatataagggcaaatttgtcatttccactcatatatatatatacatcacataattcatactttctcatttaacacatataagccataactaaatcctaaaaatatattttggaccccaaacccggttcggcctaaaatacctaagtgtgactataccgtgtcaacttgttagaaat

SEQ ID NO: 207528 - DNA, 633 bp, Cannabis indica
tctaaccaattatggagaaagaatgtgtcggcggtttggggggtttgtgaacccacgtttttctcactctgagcgatcgaaaaacacgtgcatggtttgtgtgtgctgttctgtatctatctagaaagactcattgggcaccgactaaaatattaaggtgtcatagcttctaatatgatgtaactgacattcaaaagttacctctaattcgatccgatcataattgaatatctaatatttagtcgttgattgtaattggatcagtcgattgtaattagattagtcggttatcattaaatttaatcgatttatgcacactctaattgtagtaattgtaggggtcgattatagcttctagtaacatgtttgtttgtgatctgaagaattgtgccaatgttgtgattgaagggaaagaggagcgtgagttgatatgtgattttcctaaaaatgaggagtgaacgactgatgagcgttggtgtattgttggttagttttttttacaaatagacctaaagaaagcgacatgatgaggcacatgatagtctcgttatagcagtttggcaagagaatgtatgtgaaagagctgaatgttaattgatatttatttcagttttatcatgatttggatctcaa

SEQ ID NO: 207529 - DNA, 775 bp, Cannabis indica
aaaaaaaaaaagtgaacatgtttttttttttgttctttgaatataaaggggatcacgtgaatgctcattcattcttcacccctcttcaattttaaataaatttggatcattttggtagctgatttgatttaatgaaagttaattttattgattaaaaaaaaaattaaggatcacgtgccaactctaaagactccatacctcattctcttgattggaaatacaattatataaagacaaatattttattgaggcaaaagtaaaaataatcaaattttttatataaaatataatttgtaataaatttagtggatcatgtgtgcccccacataacccaagaaccccctaggtaccattagaacaggcccttaaaaataatgggcctaacaatatatttgaagatggagatatgggagaaagagagctaacactatgattggttagagagaaggaaattaggaaaggagggagagtttacaaaagatggagagtatatccttcatgttatttagtatagaaagtaaaattagaaggatgaaaagataataatttattaaaattattacattatttcttaaaatttatattatttatttgttatgtagagttgattttaagaatttaatatacttattttgttatttctctttcctttcactcttgaaggtattgaattttatacatttggagtagaaaatgtatttttctatctttcatctctcttcttctttctccaacctaaatccctctccttcactcaaaaatctttcctactaaa

SEQ ID NO: 207530 - DNA, 1482 bp, Cannabis indica
gcacttaggaaaggtgcataccagtgagaatagtttcgatatgtttacaaagactttgcctaaaaagaacttaaagcttgtaggcgaagagcgggcttagtagagcccaccaacagaggcggagggggagatttgttgggtccgcccattattgttgggcttggaccaattaagggcttaaggttcaaattagttgaaacataaaagaaacaaaaaaaaaaagaaaagaaagaaagaaaggggctgaaggtatcgtgagcagccaagagagagaaagaaaaagagagggaaagaagagaaagaaagctagagagagaaaggggttttgccaatttttttgaagatcaagtggttgattctcatctattttagctcaaattttgggtggtgaatccttgcaaggtgctcttcaaacctacttgttccgatttggcgatcgtcctctctaaggtactcttctgtaatacccacttggtaagacccaatatttttctatttgtgtatccatcttttgagatgaagatgatgattgtattggtgatccaagattgtttaatcttgatgttgttgtgagcctctagttttactagagaagaactttgtaatctcatgattaaactttaatgatagtggatgatttgagctacggtcccgtagttttttccgtattgggtttccacataaaaatcttggtgtctcacttttatgcttgatttgtatattttatattgtttgtggtgctttagttgatatttgataagtatttcatttttgatatacaaagaaagaatatattgtagttaatttcaatagattttcctaagagaatttgactctaagatgttagttagtaaataaatagcaattatatgggtattcagttctgtttgatactattaggaatatttgtaattccttatcttattttcctttagtcttagacatgtctttagataaaacaatgttgatgctcatattttggcaaaaaaaaaaaaaactttagggtgtgatgaagagttggtgtgaaatggtatttttctacctcttaatcctttgtaacttgtactaattgcttcatcttaatgaaaagttacattttcttaaaaaaattgttacttccctctcaaaatattacattttgatcaagttaatttgtacaccaaatattaattggtcaaacatattttataatgtcacgttattttatctaatattatactatttatttcacaaaatattataacatgatgcccacaatttagaaacacaataatcttcttttaaattcaatcttcgagttatgaaaaagaaacttttttttcccttctttctaaagtcttcattctaagtgattggacatattattatttataatatttctcttaacaacactttgattggaagggagtaattataaagtacaatccaataagagagaaagagagatgcacataacagatagataatttttttttttaattt

SEQ ID NO: 207531 - DNA, 561 bp, Cannabis indica
cttgaaacggcagtgacggaggagcatttcttggggctaatgactgggtggaggctcaccggccggttcaggggctggcgaagatatactgccagggaagccaagatgggccggcgttcgtggtgtcatccgggcagcgttttccggtgaaggagattgatttcgggtggggtgaaccggttttcgggtcgtaccatttcccttggggcggagattcggggtatgttatgcctatgccgagcgccgccgggaacggtgattgggttgtttacatgcatttactgaagaagcaaatacaagtcattgaaaaggacgctgctgatgtttttactccattcaaatttgattacgtcattaatattaaaaataagtaattattaaacaaaaaaatttaatcaattaattatgccgttttgtttttaattacctatacaaaatgatgaataggtgatgatcaatttgctatagattatcggtattcattaattttgtagaaataatatgtattgaaatggatcattgttcacaaaagaaaaaaatcattgaaatggatatatatat

SEQ ID NO: 207532 - DNA, 2002 bp, Cannabis indica
ggagaacaaatccagtgaaaccgtttaataaattgcgattatttggaaccttggtaataacttataataatgcagatgtggccatacttgattgaaaaagccaaagagggaggagttgatgtgattcagacatatgtgttttggaaccttcatgagcccaaacagggagaggttagtgatcaatcatcagcttaactactcaaactctcactctcacatctcactacttttaagtagtataactctttcataattttgtattgatttattcatggcatgtttatttattaatttctgatcaaactaacagtacgatttcaacggtcgatacgatttagtcaaattcataaaggaaatccaatcacaaggactttatgcttgccttaggattggaccatttatcgagagtgaatggacttatgggtatgaactttactctaatatttatacagaatttttaaaaaatatcactaatacttttttttttttgtgttaattaagtattaaattttatataatttaagaaaaattattttaaaaaatattactaaataattatagggcgcaatttatcaaatatgctggacaccactgatattcaataacaatactcaatatttatgcaacatgtcatcattatcagtattatgagagtgttacagttaatctattttttcaattttttttttctctcaatctctgatcccaataatttgaaagttattttttttcttcataaaagtgtacattgtaattatggcatcgatcatctatataaatattattaaaaaagattagtaataatttacgactataaataccttagtttaaactttccaattataaataaataacctaagtatcaagtcaatggtcacatgatagtccatgattggtctaaatcattaaatcattaaattttttattttaaaattcatttaaatataccaataaaaaaatgacacgtaagtacctataaaagttctagaaatataatttaaatattatttccgtcaaaaaattaaaaaattaaacttaagtatttatctataaccagagtttagattaggtattaactaaattattccaaaaaattttaaatattttataatacaaacaacaaaattgtttttgaaaaaattactgaaaggatatcgtaactataatgaatactaccataaaaaaaaaaaaaaaataaatactcacatggttatagattgagaagaaacataattaatattaaattcctaattccaaaatatatataagtaagtacttaatgattatatttaaaatgtaattaagatagtcataatttttttataacctattataacaagttgcaactaagttattattaaaaagaaaatatttttagaattaaataattataattagctatataatttagataaagtaattttttaattcaaaatgttaaataattagatccatttatgaactaatatttataaatatttaatccttgctgtacttttttttacctttcaaatttcatttaagttataatataagttctaaaatttcacatctccatcacattcaaaataaatcgggatttgatttttctttttttcttttgggaagggaagggaacaaattttgaaacctagttattttgtattttaatggaactgatttgttatttgagattgcgagaatgaatctatataaatagaagatgactacgaatggaagaagatgaaaacatgctttgttaattttattttttcttactttgctttaattaattaatttaattttaatatgttttattgtacaataatatgtttaaaaatgagattttagtcttttaaataataattattgttatctatatttaaaaagtaataattatattttactattaaatatatttaaatgagtacataactctcttttttaaaaaaaacgtaaaatagttctattagaaagaaatttaagacttcacggtacattacataatatgtttttaggaatt

SEQ ID NO: 207533 - DNA, 1119 bp, Cannabis indica
attgtatctcacttgtcgttaccgattttttttccaaataagtttgaatataaaatttatagaaaacttcatttatataatttcaaaatcgcagtatctcatttgtagttgccactacatctaactattgtaactgttattatctttcaaagtttcaaataaataaaatgctatatttgctaaatagaatataaatataataaattataaaaataaatgataaagttttttaaaaacattattaattatcaatactattatatatttttttttgaaattataaggatttttattttttcttaaaaaaattaataatagattagctagttaggatatttataatattgaaattatacgcatctttttataaaaaaattaataatagatgaatttggaaagaaaaaaaataaaagaaggctttttttttatcataacaaacaatgtacaaattttgaatagtttttttttttttgctacaaaagtgtattacaataattcaaaatgttccaatcgaataatattaaaataaattaaaaataacaatactctttttattaaatactcaaaaataataactattatattattttcataccgtttgaatttttttttaaaatttcttattataatattaatattaatattttcttattagatatatagctgactaactacaaaaaatttaaaataattttaccgaaaaattaaaaatcacataaaatatatatacataataaaaaatattaatagatttattttaaaataattaacaaatcaatagtttgttgtgataattatatattttatacaaaaaaaaattgtttaatatatgttaaaaaatataatgaaaaagtgaactaacacttcacataaaatatatatatttcacatgtgcaaaaacattataaataaaattttccttaaataaatatatagaaaacacataaagaaaataaaattttcaaataaaaattcataaacttaccataaaaataattttaagtgtgaattttaatcacataattatttgttcaaatattgttaaaactaagttgaagcaaacttgtattttgtggcaaatcttgtactttgagtggtagcttcttcttcttcttttct

SEQ ID NO: 207534 - DNA, 884 bp, Cannabis indica
agagagagagagagtaaaaggttgttcctaattttatttggttttttttttaaaaaaaaaaatgttaaataggattatttcacatttttcttatgagaccagaaaatatgcagaaatgaggtagagaagagaattaaaattgttaatatagggataccaataggaggatccgtctataaaagtgatgtttggctacgtagttaaacattgtaatcaggtatattgagaaaaatattcttaatttaattatttttaattttcaaattttaaataaaaatttaaaaaaaaattaaataaaaattaaaaaaaaggcaaaaaaaggtatttcaaacaatataaacaatataataatctttacattagttttgtaatgtaatgagaattacatgatgtaatggctattataatatgtaaagctattataaacctttaaaaattaaaccaaacaatatattgataataataattctattacaattcctattatatattaattaaaccaaacatcacctaattgtaaaagttttttggcaccaataactggatcgaaatatatacatatatattgacaaattaaaagcaaatataaagaaataatacaagaagaaatctgttataaaattattattacacgtattaaagtttacaaccttatggtataccaattaagtaatgataattaaatcaatactcatacacttgtacaaaagacacacactatacgtacatgacacgttatgttgttattcattactatatgtgatgatgcatcataatatatataaatatatatatagtggcacatcacatataggaactataggccaataatcacccactatatcatgtgacattatttacccttcatttcatttttttttttt

SEQ ID NO: 207535 - DNA, 618 bp, Cannabis indica
aaaaactaagtaataatatgattagaaaaaattgagaaatttcttgaactcatataaaagtgttcgtaatgtttttgaactattatcacatttaaatgacgccttcaaatttttgttgtcgtaaaaattattttcaaatttactatttttgttattgagttgtgcttatttcgttaattttagtatgaacaaactacttatatgctattttaacattgaattatctttaacaaccataaaatctaattttatttatatttataaatgctacttttaaaaataaaacattaaataatctcgaacaatattcaacaggaaacaattgatatgatgattagggttcgaatctatctattcgctacaacaaaaccaacaataaactcttaacacccgaaccatcaccatcttcattggctatcttatagccattaatcatcttcattgatagttttaggaatttaaactacccttagcttgctacctcactcttgtagacgttgcaaaacttaagcgacattcccggggctcttgaaagaccatcgaccacaaacaaaagcaaaatcccctattgtcgagcttccccactgcccaagtcccatgtcaaccatcaggctaacc

SEQ ID NO: 207536 - DNA, 1260 bp, Cannabis indica
aaagcaatactcagtatagtgaggaagattgtgatgaacaccatcgaaggagaagaagattcagattcaaatcttgatcatactctgcaatagaaagaatcaagggttagagatctaaacagaaggagtcatattattcctttgtcatcactgtaaggattacttaatccctaaaacttgtatgttttgaaatttttcaaaatcgatctgaccaaaacattgacgaatttaggcttgaagtttaagctttatttattcatttttttttttgcaaaattttctctattttataaatcaccgtatttccaatatttgaccaatttgtacattctaagtgtcgaaaattgaaaccaacgaaaaaaagcgtaattctattccgaaaactaagaagaaaatatacactaaaattttacaaacattaggctaaaaatagcctaatatttgggtctaaggtccaagtccggatccaggtccggagtccgagccccgattcacctctaggtctggggtttggggtttgtgtctgagtttggaattggggttcggaatctggatctgggtctggggtccttatccgagtccgggtctaggttggggttggagtctagatcaggctctgggttcgagttcgagtttagttttgggttcgattctgggtctcggttcgggttttgttttgggtccgattctaggtctgggatctgaggtcggggtcggggttagggtccgttgtttgggtccaagtctgaggttcggggtcggggttgaggccagaccctttgtaaacattatactataagttaatacatgctatttattatgtattaaataatacggctcacattttattaaaatttatggtcataataattaatacaatacaatgttttatctaaagataatattatttgttatttaatacaatacgactcttatacagtttaccaaactaaccttatgtagactaattattatcgctcaaagaaggtgaaaaaactataaaaatcttgtgttcatcattgttaattgtctttttaataaattgatttactttgatcgtttacgttcttcttagacctattaacaagaaaccacgtcaacagtaaactatagagatttttcaaaattgacagggaggatcccgtaactacgtcatgtgaacaaatcaataaaaaagaaaattctaaaaaattaaaattctacctcatatattttttggagagaggtgatgtatgttggattaaaaaatcttttgtgggc

SEQ ID NO: 207537 - DNA, 593 bp, Cannabis indica
tttaatatatttgatatagttgactttggggaatagtagtagggaatgtatgttgaaaaatcatcccacacaaaagcacttttcacttataataatttttttttaattatttatgtgggggatagctagctaggtagctatagagagagtgatgatgatgatgataagttgttttggctctattctcttaccactcacaataaaaggagacctaactcacatcactccaatatctacatatctactatacattcaatctcaatattcttcatcaaccaaaaaaaaaaaaaaaaagaaagaagaaaaataatcaataataatacggttcctcaacagatcaagatcttcatcctcatgtaccttctactcatcaactcatctttttcaggtaattaaaaattaattaacaactctttaattaattgttttcctatattttgaaatatatatcatcacaaacattaaattaatttatttataggagcaaacaattccaagagtattattggtatggagctcactaattacacaccaaataatcaagatgaggtatatatatatatatatagtctctaaacaattttatgaatatt

SEQ ID NO: 207538 - DNA, 1283 bp, Cannabis indica
ataaaagtgtgatgagttgtttcggataacatttgaataaataaataccaataaaaactttaatcaagaactcttaaaaatctttagttgtgcaatttcactacctacatttctcaacacttaatcttcaagacagagaatgattattatgtttctctccacactaaatttctctatgtccaccttgatagaagtcattttcttgattcttcaagctacgtaatgctttcttcaattatgttcttcgattcttgataaaagtactttattcttgatcttcacccttgtgataattatgttgctctaacctgatctctctgataccactgttaggatcttaattctaattcgatctctgtgaaacttggagtgaatacaatctatgtataatagagttctctcttcactctttcactattttcctctatctctcaactcaccaaaacaaaaattaataaccaactcctaacaacaaacctaatgagttgtcatatggacaaaacaaaggttgccaacatggcataacaaacttaacagaaaagtgaaaggagcctaactaataaaactaattgtagtccaagttgccaatctgagtgaatcaaagtagaccaataggctatgaacatggggcaaagttactagctaggatgagctaaaaactaatagaattaataagttccaattataattacaaaatcatacacaaattcctaaactaatccttatcttttgagcttacttttgaaggtaaaacgtcactcacattcctatggtatatataccatatattcactctatttacagatatcttttccaataaactttgttacgtacgagtgatccaaatttgataaatgattacagatatcttgattgtttacaattttttatccattttaggaccccaagagagaaaaatcaaacccaactaaaaatttataataatattttttccatattaatgtaatattgaatataatatatttagtcccaattataatattctttccatatagatatcatgacaaaaagttagggtgtcaattcatgtttgcgggtcgtattcgtgtcatgtcgagactcgtgtattataagcatatgctcgacctgaacatgacccgtttaacaatcgtgtcaaaaaataaaatctaaatacgatccatttataaacgggttgacacaacacgacctctataaaacatttgtaattagaactttttttttttgaaacttgtcaactttaattaattaattaatgacatgttaatacgtttatgacatat

SEQ ID NO: 207539 - DNA, 864 bp, Cannabis indica
aaaaaactttcggggacttaaactcataatatgaactttctttatcgataaatagcgtgacaataccttaaatatcgagaaaacataaaaattggagtacccaaaaatcaccccaaacgggtaactggatccccaaatgggcaactgtttacccagggtcttcctggattaatgattaattgtttcttcagaaacgatgtgcagatttcaccaactcgatcttatcttccttatttctaccccaaattcgctcaaacttttcagaacaccctataatcatgttctaaacatattaaatgcatcaataaatcttagaattaaaatctaccatgttgagctaagtttgagttcttaaactcaaactacattttctatttctttttcaaaaataactacaaacaatttcaaaccaacccctaaataatttctaattcacatacacacagaactaaatttactaaaacacacataaagcacaaacttttcttacaaatttcaaagagaagagtataacttaggacttattttgatctagattctaataaccttttgaattgcaagctaaagttcttgttgaattgtagttgctcatgattttttctagggccgaaggtgagaaattagtagagagaaaatgacttagttttagttatgtttatcttatccttcattaattaaaataatccaattcagcatataaataaatccatcttctaataaattcactaatggtttctagaataagcttagatggaaaagacaataatatccttatttcatttttaagtaatctttaagctaaggggtaaaatggtcacaaccaaatgtctcgcataactccgatattctaattatctataaatc

SEQ ID NO: 207540 - DNA, 591 bp, Cannabis indica
aaaaggctcaaagcatttgaaaatttggccaatccaagtgatatgaccatatttggagtggataccacatgggatgaccttcctaattcatatctctgaaactgaagtggtactcttaattctcttctctattatattaatgaaataattatatatatgtatggggaagaagagtgtctgctcaacaaagacaggtagtacaagtcaattattattatatatataattataattatatattccacacccaccactaattaataccaccacaaacgaatgaagtaagtaaagtgttaattgatgcataattcatacttcaataggagttttattttttaatttttaataaaaaataaattaattttctctgttgaaaattatatcttgcattgcattatagtatatcataaatgaaaatggtattggtataataacttatatgtttcacaaaagttgtactaatcatatacatagtatatatatttatatatatattcatatatatagtgtattcatatatatagtgcatattaattccaagttaggtaagtgttcaaatcttcaaactttatatatggcactaaattttag

SEQ ID NO: 207541 - DNA, 1680 bp, Cannabis indica
gtaaaagatcgttaaaccaagaaatgaccgttagataggcacttttaatatataaagataaagatatatatatatatattttatattttagctaatgagacgtgaatgttctaaatgaaattatgcactattaaacttttccattatcggtaaaagaaaaatagaagaatcaaaatggtagcaattatttggtttttttttttatcatgtaagaagtgtgtgtaaattatttttaaaaaagtatatgctttttctttttggttttgtttaataactagttaatgccataaatcagggtggaaagtaaaccaattgatattggaaaaaagtgcaagaaagaagaaattaaggaggagacaaagagacgatcgatccatttgtcgatgccaaatctcataaaagtatcatcactccactctactttgactccactctactacactcaccacactccacatcgttttctatttttagaacaacatacacactaaatattgctacaatcacgctcagctatggtaactaaatacatataaatatttattgtttttatttataaccaaaaaagcacatacaaacacactgccatgtgaatctcacatgcataaaagagtcccatggagtcatcaatactacaatagacaaagttttcattttttctcctcttctttttttcaaactcaaacaagagttttctttcactttcacttttccttttcctttcccattctctgttttttttttccctttggggaaaaataatagacatggtgaaggaggaagagaagaagaagaagaaccactaccttcacaattctaccaaagtttcaaaattttcatcaaatcccattttcctatcacaatgtagtcttgtactatttctttttcaagccttcattttggccaaagtggaagctttcaactatggtgatgccctcacaaaaagcctcctctacttcgagtcacaaaggtccggtcgcttaccgtacaatcaaagggtcacttggcgagaccattcgggcctaaccgacggtctggaacaaggagtacgtgcccaaatctcagccctccattctctccatttgtccaaaattgccaaaagaaaaaaaaaacaaaaactatttttttatacgcatttaataataaaaaaaattgtaccaaaaccagttgtacacataattatatttagtattaacaatgtgggcactttttgattttctgtttaggtagatttggtaggaggatattatgatgccggagaccacgtaaagtttggtcttccgatggcttttacggttacaatgctctcttggagtgtcatcgaattccggcaagagatcgccgccggtggcgagctccggcacgccatggaagccatcaagtggggtactgattacttcatcaaagctcacactagcccaaatgtgttgtgggcagaggtatgtatattatgctataatatatataattaaaattttgtatgcgtgacaatttagttaatttttaatttttttattattatataggtaggagacggagacactgaccactactgttggcaacgcccggaggacatgacaacatctcggcaagcttacaagatcgacgagaacaatcccgggtcggatctcgccggagaaacggctgcagccatggctgctgcttccatagttttttaag

SEQ ID NO: 207542 - DNA, 1102 bp, Cannabis indica
atagtaagtgtgtagcatttattattttttaaatatatttcaagctaatctccattctcctctctcttctgcaaattttaatttgacttttcactatgatcgttcaaataacccacacactaataaattagttttaaatctatttaattatatgattatttattgaatcttcttaattaattatagaacacataacataaaactaaatatacgtgtcttgcacgtaactttcttctagtatatatatatatatataattatttctttattttttagtgtatatatatataattcggagtgcaaattaattagaagagatattaattaactatgatgatgatgatgatgatgatacatataaacatactttatatttcatattgtaaatttgtaataattaggcataaaataaattataataattttttttattgatcatagcaaggagagagatatacattacaactattattcaaaatgaaattaataaataaaataagtaattaataaaacaacagaaactagcaaaataatcaaaatgagattactttctttccccataaatatatgtaaatatatatatatatatttaataatgagatgtagtggatggtggcctctttgggttgggaccaggagtttggctgtccaaaagtactcttccaccttcaacggccataattaaactacccataatcaacacactaatcaccacaaacaatacaattttcctactaattattatcatgttatgcctcataattaatattattcaataaattatagctagctaggggttaattatataattaataattatagacaatataactatagggattaattaaatatactagtaatactggaatgaagaattagttataatgccaatggtttatatagtaactattagggtttgaaattcaatatatttcccaagaaaaatagtatatatatatatatatatatatatatatgatctgtactttagaaacgaaatactacacttgtacttttttctttttttctttttgtctatatatttcttttacgtatactaaaattaattttagttgtatgtactcttgtacttattattttg

SEQ ID NO: 207543 - DNA, 971 bp, Cannabis indica
ttttttgaaagaacctcagttcaaattagattgaaaaagcaaaagaactgggaatcacagggggaaatccctccccatttgtaaaattacaatcagccaaacatgttctagccaacttggctaagtcatccacaacagtaaagtgttctcttttagcaaaaacaaaataacatgcagaaaaaaaggaaagcttcattaaaatcaaaaaaaaaaaggacagaacatttccaatccggagttttttttgtaacggatggcctccaccaacaccttcgaatcagagataatggtgaaattaatcccaactgttgcatctcggcccacctgcaaactcagaagaacagcttgcatctcggcatctaacgcggattcccccacaccagaggaaaggccgtgccaccattccatagaagttatatccatggccaccatagcacaaccttactttccgtccttgaaagaaccatccaccataacagacttgttggttcttatcctcggctgggactccccttcatggttgctagaccgacttacattctccccaactataagttgtaattcggcaactctgctggagatttcccctctgatcatgttcacattcggaacataattctcagtatggtgcactttgttcctagtgttccagatgcaatccaaaatcactccaatgcagttgatgaatttggggcgattagaggaatcaaccgagctacagagattgtgaataacctcctgcatattagcgcccaacaccctctcgatcctaataggccagggactagaaaaccatacagccatagcaagactgcatttggtaaaaagatgtaaaggtgactcagtggcattatggcacaaaggacaggagtttactctatagaagaaaatttgtcccccgtaggcaatacgttcgaacacaccctccaaagtaacaaactcatcctaggatgtaccttagagttccaaat

SEQ ID NO: 207544 - DNA, 1114 bp, Cannabis indica
acgtaaaagaacaacaatgagctggagtgttcaaattcccctctgcaaacacaaagcattaccaaaataatattctcttgccactaaaagtagatccaatgttaaacaatttctagatctataactaaatcaaattgtatgtgtttatctatctgtagctgtagggaaccaggaacaagcccaatcccatccccacagacttgcttcggggttgtgcggtggcttcagcactttggggctgtgctgtggctacaaggctttgccggagttgaatgttcatttttctctttagtgttgaacggagagggtgagagagatcggtattgcggattaggttttttttctttagtgaaccgagagagtgagagatattggtgtgaattaagttaatatgagagagagaatttaataaagaattaataagggaattattatatggtacacgcttgaaatagggaaatttagttttttttttcacataagtttatgtctagttatgttttccctaaaatatttctaaaatattcaatgaaaataaacttgttttaaaaatatatattttatatttattacggattttctagtccaacaatgttagactaaatatgttggactaggaaactccctaaaatatttttctagtccaactgagttggacatgaaaataaatctatttttaaaaaaataaaaaaaataatatcacatccactaccaattttctagtctaatattgttggacatgataatttttttttcttgtccaacaatgttggactagaaaattcctcaaaaccttttcatgtctaacaataattttgttggacttaaaaaaggaacattaaaggggtatattgtagtagtgaattgatgtatagtgttatataaaaacttcaagtaaaataaaaaatataaagattttgtaaaatattataaagaataagctaattaatagggtactaaaaaaaattaagtatagtaggaaaacgaatagacgtactgattccttagtcagaaatacttgtaaaggaataagaatgtactttgtataagacacttcctacgtattgctcttgtattagtaagtagcgcaagcaattctaggatgtgtcctaga

SEQ ID NO: 207545 - DNA, 578 bp, Cannabis indica
aaaaaaatattatcttttaatagacaatcgtaaaataataaaacataataatcaaaacaacacttcaacaattaaaatacttcaatgaaacaataataaaaatttaatatagtacacattataatatacagtgatattttttaaaaaaactaaatatttatgaaaaaaattctgctcacaataaaaataaaattgaatattttaatatgtagtataaaaatcctttttgcatgatgtgtaattttccttcaaatagcctcaccaaaaataacttgaataatctattataatttgaataaatttatttatactatttttataaaatttatataatatattatatagattatgtttaattgttgaatttattattatttaattttgaatttcttggtgtttaatttgaaattaaaacttcataaataaaaataataaataaattataataaagtgttaattatttggtaaatggattaaaaattattaggttgcaaaaatttattttttaaatcagccaaataattatatttatttaggtacaactcaatgtgtatacactgattttcttcccgcctaat

SEQ ID NO: 207546 - DNA, 914 bp, Cannabis indica
cattaaaataggtgcaatggtacaacttttaactgttttgatatctaaaagaattttttagttcaattttttttatagtcgtgtacattatagttatttaagatattctgtaaaaattttgagaaattttaaaataatttacaatataaaatttaacgttcaaacggtctattttacacgcatataaaataaaaagttatgcgcgcaatagactctttaaatcctattttcggtgtgttaaatttttttaaatatcttaaaaatttacaggatgtcttaaataactacaatgtatacgatcataaaaaatatttagactatttttttagataccgaaaaaataagagtgtaacgatacatcctttttgtagagttttcctaaattaaatattacgaaatagattaataaactatttaagaagtttctcagctactattcaaaataattgtaataaaatgctaattagttacaagcatgaatgaaatgtgctatttgaaattttaagttgtctaatattatattgatgtgatactttataattattaaattaaaatatataagatctgatatcgaaatgcatcaataacagtatgttacttcttgtagtgttgaacacttgaaagtatctccaatgaaaatgtaaattagtgatcaattgctaaaatgtaattcatcttgtaaatacttgctccaatagtgtagccaaagttaatccaaatttatcacatactaaaaattgaattaaatttaaattataatatggtatgatgtaaaatttatatcacaataaatgcattacttctattttattgttaatactttattatttaatatagttattacattaaaatataaattttttaaaattattttttattattttatgcaacaaaataataattaaattaataat

SEQ ID NO: 207547 - DNA, 730 bp, Cannabis indica
acatatttttatataataccaagctgaataataatatatttatatcataatggagtatcttaatttataattgcatactagaggtcaacatcatatttttattttattttttttcgacaatgatcatatttttattgttatactaaatatgtatataccttttagtatataaataaatttatataatgcattcaaaattattattacttaactacttcttggtatatatgtcacccaaagctttatatactttttgtatctagtatataaatttaattgtataactacttgttagtatataattattatattagtatataaattcaattatacactatctacttgttggtgtttattttttttctaaaataactacttgttagtatgtatttcaccaatttagtatatgaacaaaataagtaataattacaaatattttcaataaaaaaggcttaatatttgatcaattttatatttttttttcagcctatttttgctaatcatgaattggatgaatcacatgttcctactaaattaaaggtaatagcttatcttgataatatattttatactttatggtattcacttgacatgtttcctaataagtattcttgtgatttagatatttggtttgttttgaccaattaaacttgatctttgttctactattttcagttatgggacctatttataaagccacaagatgtgattgggagtaggtataaatttg

SEQ ID NO: 207548 - DNA, 844 bp, Cannabis indica
tacgtggttcggcacgtaacttttatctaattatttatataactgtgtatattatatttatttaaattattttataaaatttataaaaaaaattagaataatttgatatacccaaaaacaaagttggtatggtgtagtacatgctttcctcttttaattgtagcggggttttgtaataattttaatttttaatattttaatcacaaaaataaaagtataatttttgtttataaaaattttatttttgaaaaataaaaatatgttctttaactattttatttttaattttaaaaacgaaaaaaaataaaattgtattttgtaaaatttatttttatttttaattttatttaagtcggatttggggcttggaccggggtctgtgtccgagtccaggaatgggggctgggccttagtacgggtcgagagtttgggtttgggttcgagcttggggtggctttaggtctaggtctaaggtttggatccgaggccggagtccgagttcgggtctaggactagagtccaagccccgatctgagttcggttcgagttcaggttcggatctggattagggatctgggttcgggtccgggtctggtcgagtctacttttttaattaagaaaacagaaaaactaattaaaaggatattaccaaactgtcactcatatgtacgtgaaatagaatgtttgatttgaacattatttttatattgttaattatcctgaatttaataaaaagtaatttacggtataaatatttaagtttaatttttttacagtaataatactaagttatatttctagaactccataggtacctgactgttaaatgctaagtcattatcca

SEQ ID NO: 207549 - DNA, 582 bp, Cannabis indica
gctccgtcccgcctaatttttttctgaatcagagcttattcgacccgatttaatttattaaaaaaaaacttaattcaagactcggaccccagactcggatgtcttgggacctggacctggacccggactcggacccggatcgggactgagacctgggacccaagaccgggactcaagagccgaacctggcacctaggattcgagactcgagactgggattgggacttgggacccaagcccaggacaatcccaggaccgggatccgagaccaagaccgagacccggacccggacccgaacccggacccagacccagacccggacccgatcccgaacccgaacccagacttggacttgggacccagaccccgacccgaactgggtcctagacttagacctagactcggactaggacccgagacccaaacctggtgtgggactccgacctcggacccggacttggaccaggacccagacccagatctgggactaggacccgggacacgggacctggacctggacctggatctagacccgaacccagaccgggattgtgatcgagaccgggactcgggacccgata

SEQ ID NO: 207550 - DNA, 1160 bp, Cannabis indica
tgatataagagagacattcctttcaaatttattaattgttagaatattatgacaattaataaggaaataaaattaagaacaaagttaaatgatgaccataaattaaaatatttagtcaattaatcaaatactgactttgatatattaaatcaattaaaatctattaactgattaattaccaaatttaatatattctaatactctctcacttgactaatattgaatcaatatatttactttttttttttggaaagaacaaaagttccattaaacagatagaaaaaaagggaaaactagggattcccctccccatgagatacattcggaaaattgtctagacaatctagcattcttagccagtctatctgcctctaaattaaaagtgcgattaatgtaaaaaaactcacaacttacaaactatttactacaatctaaaatctctaaggcaacattaaaggtcttccaaaatggagggaattgctctgctcttaaagcctgaatggtttgagcacaatccgcagcacacaaatcctatcccagtttttctcccacgcccactgaagagctaaaagaattgcttttaattctgcaatgagggctgactctgctttggttcttgaggtcttgtgcgcccaactctctaaattcttcattctcatcctctcaaccatgatgcatctgtgcagatgactctctttccatccaaaattctctgccaatctgcctcctccagtctgttcttcggaggatcagagaagatgtccacaaggtcatctttacccgaataagtagaataggattggaaagccatctcaatattccttttcatcatatctagattggctcctatccctctcctacataagtcatttctagatctccatatctgctcccaaacacaacccatgtaggttaggatctctttcctgtcataatttgagttttcaagagatgtcaccatgttttttgtgaactgaatcacattttcgccaggaatcttatccactaacaaaggaatcttccctgagaaccataacatttttgcaaacccacagttcttgaacaggtgtagacaattttcctctgcagagttacaaaggggacaatccttatcaaggagaaacctcaacttttccctgactggaagagcctcattcagt

SEQ ID NO: 207551 - DNA, 1388 bp, Cannabis indica
gtcccgatttgggccaattttaaataagaataacctcttaattgtaattaattatacattttctaagtctcgtattaacaaagtatacctctatataagaataattacatcttaataaaatatatacatgtattttgtaaatttatttatgtaaaattaataattttatttaaattataatacatgtatgaaattatatttactctaaaatatttctattatgatatagtattaatgattattttttgttattattgttacattgatattttttagtttttaattttttttctagcgccactctatttagttataatctatttttggatagatgttttactggatcatatcatgtgtggtaaagtgtaaaatcccaaacataaatactttctataaatggaattcgatgacttttcataaatggtcaaattcaatactgaatactttattattattattattattattatacaccttcagctaaatcaaatggagaaagtattattcattagaaagagtagagagccttaactaaatcaatggtttacttgcaagataatatcatcttcaattttgtttgagaagtagaaaaatgatgtcctttaacttaatcatctcatatgttgacttattttcattggttcacataatctaatttgaattaaattatctcgccaaaaaataagtgaatctttttcaattgaacttgaatgcttcaagacccatatatgcactgctaagatgaaacattggatctttttcggggtgtttcttttgatctttgggttacatgaaaaagtgtagagagaggaaatttagtgaggtatctaaacctttgtcaacataaggtttagttttttccaacccactaaaaattaacacttgctcacccttaaatctaaaccaaacaataaattgtgtacaagcataccctctaaatactaggggtgttcatccgattcaatccgcatttttttggtcaaacacatccaattcgcactaagtgcggatttcatattttggatccaatctgatccacgtaagagtttaaaatccaattcaatccaatccgcaaaagtgcggattggatcggttattttggatcggttatttttttaataataaattatttaatatttcatagaaaaaattaaaaaagactatatttctaatatcataataatctattccatctctatttatatacaaattaaaccaatatacatatggaagaggtttcaatggttacatttttattgtaaccatcatggttacatttttttaagacattggattactaataaatggttgtgattaatttggaaattaaataaaaaataaataataaataaacttgtaacctgaaagtaacctaatcacttatttcc

SEQ ID NO: 207552 - DNA, 1084 bp, Cannabis indica
tcaaacatgttttaactgtatataaacaaattatacattagtaaaattataaataaaaataataaataaatattgtcacaaatttttatcaaaatgccaatcaaataattcttcgttcatatcataaaaattgtgactaatttcactacaaatttcatcactctatataataagttgttatcagggttaattttgaattttagtgggtataagaaaaaaaatatatagtatttttaaaaggaaaaaatatttttttgggtgagcctaataaacagaggcctaactcgtctatgttcaaacttaaatgtgattattaatgttatgattaaaataaaatgatatacttaacataacgattttcttgtgtcttctgtcattaaattggtatctctgcagcttcataaaggttcaacaagaaatatgaaatggaattgataggatttttgttgtttgccgaatttattgtttctaattctatgatacattaaaattaaaaggtttgattgatacaaaaggcaaaataaaggactcattttagcaccctttttgtctccaaagagaattatacactaatacacaactctcaaaactagacactgttttttccaattatcataaaataaatatacatataaattatcataaaataaataggaaaattctttatataaaataaataggaaaattctttaatacacacccttcaaagagacatatccgtacttctcctagaaagcaatttaattggttacatgtcagaaatgaagagagaatattataggctttggtgtattgaatcaaacttagattatagggggtgcactgatacccatcctaaattattatttgattggttcaattactttaatttctttttaacaaaatgaaaaataatcccctcaccacccctatctaagctttccttctcagtcctctgccatttggtcatttttttccagcgcggccatttgatccgactcatgcttggtctgtcatctcttttgtcttcattattgcaatagctggtaaactactcatggttcttttaggattattgaagtttttttattctctaggtgaatag

SEQ ID NO: 207553 - DNA, 735 bp, Cannabis indica
cgaacacgagacggagacaccacaggacttgccacatccaccagcagcgccacaaacaccatcgctatcatcagtggtaagatcatcatcgttccccaaccccataggagccccaaatcacgaaggtcaaaaccgtaatcgtctcaaaacgtattgttcaccaaaatcaggctaatcagcacagataacgtcaccgcgaaacgagagacagattgtctgattctctattgtaagaaacgaagctaagaaatttggaggagatgggtcgttttttaatttttttaattattgaaatttatataaatatatatatatatatatatttaaaaaaatatattgtctgaattgggtctctcttagttttttttggtctatatccgtaagcaatagattttgcaccgtcagatttttttcttttattattattattttatttaagtaattgacaataactgttttaccaaatatggggatggacggctaagattcattcaactttatcttaatattttttttttattactgaacttctttatcttaatattataatcatcgattttttttaaacatataatcatctagttttgaaaaattattaatcttattacatattcaaatttaaataaaatatatatggactacatttacctaccataatttgggaaatatacatattttatttcaaaaccatatcttagaaaaaatcttaaaaattggttgtttaggatttttttt

SEQ ID NO: 207554 - DNA, 821 bp, Cannabis indica
tagttttttaaatttcatgctcaacctagagcttaggcctccaattacatactaaaaaataacattcaatctaattataattaaatatataatatttattgttcaattgtaactagattatatatattgattatacaccccgagttttaacatccataaaataattgtgtgtaacattatttgatggtcaaacatctaaattgtaggaccttgcatagataattatggttttgctcgatagaattgtttttaatgttcatatcctaaaaattaagcaaatatacagcaattgaataaagattttttttagttaaaacattctatatttctattgatattaattattagttaagtccattcaaaatatataaaactaaattaattgttgcatatatatatataattagtttaataatacatatttgatatttttgaaaagtgtagattgagattataatatgactaatcgtaattttttttaattagtaaaacacatgcaactctaaaataaaaatcaattatatatattcaataaccaaaacaattcataggttgagctctaaatagagaaaaacacaaatgcctaacattaaaaaaaatctctaaaataaaactaagaaaactttttaaaaaagaaataagaaaaaaaaactaaactaaacaagctcaactgatagagatgtctcatcagtgatttttgcaaaagtctttgcttcgcgcaaaccatagtggtcgtgaatcccattgacattggtcgcccacatcgagaattgtggcgcaacatgtagagttgattgaactatttgtccaaatatgtgcct

SEQ ID NO: 207555 - DNA, 648 bp, Cannabis indica
tgggtgtatctgaactggggcgtaccggaggttgacatcggaaatttcgtcggaatagaagagctcaggaggaaggattagggttatgagaaagagggaaattgtgtttggatggtgagaaaaggtgtagagaattttccgtcaaagtatgggaaaatgattggattgaattgaatttgggatttgtaacttttttatttatttatttatttatttattttattgagaaattattagatctgtggctgccgggcgcgtcttgctcaccgcatccggataataaagtaaatatattatcttttcatttcacttttattttattttttaaaaatttatttttatgaactttttcactagaaaattagaaatatgtcacctaaattatgctttagactttggctataattttgttaagaagtttggattttagtgataaaagaaaaaggtaagaaaattgtaaaaataaaataaaaaatgtggagaatgaataaaaaaaattaatatgtttggtatgaacaaatttttttctttacatttttttcttaaaattattgtagtggaacatgtttgattcatgctataggcaagatagaaatggagaaaaattctattgggattaatttgatacgtcgtattacaccgtattgt

SEQ ID NO: 207556 - DNA, 541 bp, Cannabis indica
tatgtattcaatgaatgcaccaaattaatcatttctcccacaaaggaaaaggtccttgtggggcatgggcttgttttgttttggcatataggggaggtgggggttgggatagtagtgactctttttcccattttgtgtcatcaaaaaaatatatgtgaagtgaattaaggagaataataataaatatatatattgtatgtatatactaaatggtagatatatgggcaaaatttgttttgctttgaggtatagggctaattaatttttccttagtcaccaatgaacaaaaaaaaagaggatagctattattaataagagtaactatacatatgacttagtttgtggacaagaaaaaaggatatttagaatgggatgggttgtagtggtggtagatgtgtagggactagggggagttcccaagtaaatgttttgtccaaaaactaattatagaataatagatatatgggtttgtgagagagagagagagagagagagagagagagagagagagagagagagagagagagagagagagagagag

SEQ ID NO: 207557 - DNA, 876 bp, Cannabis indica
atatacttgactaaaataaaaattaacatatatatataactaaatatacacgtgtattatatataatattaacataatatatacacatttatatatgtagaaaaaaatgagattttgaacttttaaagattcatatatattaatataaaaaatatatctatttttttaaatttttataagggtttttataaatatatgaatatatgatttgctttactatcactctaagaatttcccaaaaaataaattctcctgtttttcacgtggatgtacggtcttatagtataggtacagcatcaaaattattgggccattttcaaaactatggtacttttgaaaattactaaaaaaatatgtgtattttaaaataatttttcttatttttaggccctagtgttagcgagttccacgtaaggtgtgaaaactaaatatcatatataagatgcataaactacttcttttatagtcaattaattttgagatagaagctcattttatcttaaattctaattagagccaaactaaattctaacgagtatccgatccaatctaaaaattagtcctagaagatgagccaaaaagagttgcttatgattcggggatagtgagccaaaatagccacttgtgatcgagctgtgcaagattggtgagcaaaaaatagtcactatcataaggggaatattagagagttttacattggtaatgtacgtagaaactaaataccatacatataagatgcatgagctactcctttcattaccaattagttttctggataaaactccatacaccttaccatataccaggcctgaccttaggctaaggcaggctaggctcgtgtctagggtctactcaaactcaggacccaaatttttt

SEQ ID NO: 207558 - DNA, 1361 bp, Cannabis indica
gtataatgatcatctacatccacattaacaaccatattcatttgtaaccagttttagttgatggttttggtcttgtacttgaaatgcatttcatatatttagcacatgaataagttccatatttttacttcatgccatcatccaattttctagttttccttatcacacctaaaacctttaattttttcatattttttgtaataatttaaagtgtcactatctgatttaccttaggtgtttttacctttatcattctcatttcatgtattttgaattttgatcaagtacctctatttccttctcactaatttcttgatattattgcttccctcaactgttatgagattatttctatatttttcgtttcctaaaacaatttataaaagtaatgaacaatagcaaaatagattaatctttaaaaaatctcaatttaatttatgtaaaataaattatttaaaatattaaataatcaaaattattaatatatatccccttcgattatgctcatttttttttttaattataatttgcattatgtatagttgttgtacgaggttctaatctactcaacaattttaatgttatttacattaaacatacaaaattagttctaagaatacatacattctcataattattcattagagtgctatttagcatttatacatttatttttgtctcacacttttaaattttaacaaattaacgtcatgttagtatacatcaacaaattattttgaaaaataagtacaatctaacaaaaaagggaatatttatagcaatttttttagttgagtcaaggggaatatttgcaaaaaaaaaaaaaatagttacgggacaaaattctaccatgatcatatttcgtgaagaacaaattctatttatttttagttatttgtgactctacaagttcattaataaattaaaaacaattttcatcttcttttataggagtttttaaatgcataacttattatggataaaaacagtttttggtaaacctaatgatggaactactaactcatactgttgcctttgggtattttaatctttctaagctcatcagctcatcattgctcttcaagaattcccataagctcttgctttgcttcaggctcttattcacttctttttgataagagaaaattgcaagtgacaataacttagcaatgaaagttactgatgaactcaatgtatcaaaacatagaagatagaaatgaaagacaatttacaattacaaatcttttaagttaatgtcatcatcaagagattaaaaaatgatagtgtattggcaaaataatatccaaagagacaagaaactagatatactcaacgcagccacgcgccgtgagcacaaagcg

SEQ ID NO: 207559 - DNA, 690 bp, Cannabis indica
ccatatggttacaataaaaatgtaaccattgaatagtcacccatatatatatatatatatttctttttctttcttaagaggttaatatcaatcaactcatctatttatataaatataataaagttaagtacaaatgagtgatttaaaccacgtgatgctagctcaagtggctatagggcttattggggtgcgtgtgggggagtcctacgggtggtaaaacaggttcaatatagtacacgaacacgacacgaattttacgggttaggattgagaaaattagatgcgggtaaaaaataagtccacacaagttgacacgaaataaaaacgagtcaagtacgatttttaaataaattaaaataaaaaattattaataataatataacaatgtaaaattttatatttagtgatttaatgttttgtcaaaaaaataaatactttataaaggagtttttcgtggaaaggaatagaagagtctaatgatgcagagaaagttgtttggagtaagctttgcattccgaaatcaatgggtggattaggattcaggaacattattacatggaatattgctaggattgggagatttgtgtgggcattaacttcaaagaaggacaacctttggattaaatgggcgcattgtgtttacataggcaaggaagattagtgggcctataaagctcctggaaatagcag

SEQ ID NO: 207560 - DNA, 634 bp, Cannabis indica
accaaaaaatgtcaagagtcacaaccgagtcgccggtcaccgttcggagccgcttagccgtactctcagctcatctagatgctgtttccttcgaacccaatgacctctcctcatctctcgagccacactgcgtctcctctcggaccccaattcaaccgcctgggaacctcaagggttccttgtccatcgttgacgagagaaccggtaagaagtacctggtccaggtctctgaagaagggaccatcaaagctactgatctcaagaaggtatgtcatgtcctctacggagtatgttttgatgatcatatacgattttgctttgatttgggttttgttgaattttcatttttcttaatcttaattttgttttgtagtaaaaggacttttattgttgcggatctttggaatttgtagaaaattaacttgtgctttgtgagtttttcagataacgacaggaggaaatgacaaggggctgaaattatatgaccctggatatctaaacacagcccctgttcgatcatcgatatgttatattgatggtgatgaagggatccttagatacaggggctacccaattgaggaattggctgagagcagtacctatttggaagtggcctattgcttaagtaagtatt

SEQ ID NO: 207561 - DNA, 865 bp, Cannabis indica
ttttattctaattctatcatgagctggatattgaaagagttatcgagggcagctcatgaacatttgatagaactccgctgatttttgaacgtgtgaaaacataggagaatctgcagctggtgccattaacgggattggaattatgggttcagttgcataatatgacaactaactttatgtctgaaagaatcatataaggcattgggaattatatgggcacgtttgtcaaatttgatcctaataatttttcgggtgtttggcgggtctacctagagattcgtgttaagcttcgagtagatacaccattaaaaagaagaagaagttagagatacaaggggtccggtctgtcatgtgttattcaagtatgaggattagccaacattttgtttcattttgtaaaattcttggatattccgagagattctgcaaaaggttatttgacacacccaaagaccaaattatcaagaactatgatttggagttaaaagcagcgccacaatgacgtcaatatgcagatggatccaaatagctgaattcaggtttggctacaaaaaccggtgttgttctggtcaaaggctctaccagcaataatagtgtgcaaggtgtactgtcggtgacagttggatatgaggatcaacaatctttcagtacaacaaatcaagaatttaaattattactaaataatcaagatagtatcaatactgataaggatagggagagaatggatataggtaagaaagtggtggcttataaagggaaatccaagattcaagagagttaaatgtgaatgttaatttggccgcgcctactaacagaattttaaatgatggacttatattcttgtataataaaagaaaaagaatgg

SEQ ID NO: 207562 - DNA, 599 bp, Cannabis indica
atagtatttaccctatttatattaaaaaatttgtattggttgtttttgattttataacgtgtggagtaatgagaatatatataggaatagagaatgagaatacaaagaaataaaactcaattaaatttaaaatatataaaaaaaaaattataacaaaaacttgcaaggctaatatccaagtttagtcgacgattaagcactagatcgacgcacgctcataaaatcgctctgaatgtatggtcatacatgtcatgcacatgaccctcaacatacaggctactcgattgccatgcatgcaaggtcattcgaccaacgtgcatgcaaggccactcggccagcatgcatgcaaggctactcgaccaacgtgcctgcaagaccacttaagcactgtgcatgcaaaatcacttaggcattgtgcatgaaagaccactcggccaccgtgcaggcaataaggccacttggccaaaatgcaccgcaagcttcttggtgatgctccgagttctcaacgccctttcccatctcctctgtgctctgagttctcaacgccctcccccttcgatactgtcattatgagctcgtcgtcaacaaagatcgcccca

SEQ ID NO: 207563 - DNA, 735 bp, Cannabis indica
tttttttttaaaatataatattttgagtaaaagccttttaaatggggatctttcatggttttttttttttttaatattttttttgttatatttgtgatttgaaattttttccatagttacaagtaatttaatgtattacacatatttaggatgcacattttccccatgaggtagggattccccatctaaatgggaaacggggcagaaacgaggattattttttgtctccgaatattaaacgggatagggacgtggatgatactccctgctctgacgagaatccgtttagtattttattttatgtatctaatagtattttataatttataatttatgtttgtattttttaatatattagtatcatttttatgaattttaagttaataattaatgtgtaatattttaattttatgtagtttaatattttatatatttaaattttatcataattttttattaggggattctccgcccatctccaatgaaaaataagcgaagatgagaattaaaatccttaatagggatgaagataggggagactccccgccaattccctgccctttgtgccacatctcatattttaaatttatgcatcaatgtcttttttcaccaaataaaaaaggttcaaataagaaatctaaaaaataagttgcagtttaaggcaccttgtatttggtgccatactcggcccctattcaataaaggagttgatatgtgcacatatgaattatatac

SEQ ID NO: 207564 - DNA, 803 bp, Cannabis indica
ttcagatcaaaaaaatcaatacacgttctccaaattccattaggctttgggacaagaacaagattgcatatccatgagggataaaacacctcgcatataaagtcattgactaacagcttgtccacttccttttttagtgccccttgcctctcggaatctaagggtctccttttctgtctgttcgctgggtaatttggatcaacatttaagttatggtagataatgttagggtcgatccctatcatatctccatgactccagccgaattgatcctggttcgcccttaagaaactttttagcttctatttgagctgcacgtctaggttcttcccaatgtatacacactttgtgggatttctcggatcgagaataacttcttccaattcttcaattggttttaataagtttctttcattttgaacacgggggtcaagatcttcgtccttcttatcactttcttcttccaagatcgccattaattggtgaccagctttcctatggtgtaactctatgagataacaatcacgagctagcatctggtcccctcgcaccactcctacaccttctggtgtttggaatttcaaggataggtgcttgatcaaactaactgcccctagtccgattaatgttggacgacccaacaatatgttctaggtcgatggcaggtcgacaactaagaaatcttgcataacagtggcagataggggtgcctcatccaaggttaatgcgagctggattatgccaagactggcaatattgtacccagtgaagccacaaaggttaaccatacaaggcctcaattt

SEQ ID NO: 207565 - DNA, 1165 bp, Cannabis indica
gtgtggatttttcaggtaaagacatgctcttgtaatatagcaatcacagaagtgatattgagttggcttgttggagtgggtttttggcgcaggtatgtagacagatacttcagggtcataaatcacatccttacactattactgatactgacattatcaacaatataacatcttatgaagtgacaagcatatgtttttatttactcaaaacacaacttgtgcttctatcgttctttcttatgaggattgatatttttggtgccatcttgagtttttttttctaaatattgctctagttgattgctgatttattcatgcagcgatcgggttgccttgggagcacattagcagtcatgaagaaatcgtcaaaatttctaccggtatgtttcatttcgaattgaaatgtcttggcagcatgcttagattatctttgagtcctgactggttcttcttatatagtccttcaacattgctgaagtatccttgggttttactacttgagatattattgccctgtcatagtttcatcatggatacaatcatacatcaaagttgcatctttattcttcttagaaacttaactttattctggcacttcggtgtcattcatcttatgagaaatgttatggacaaatgtcatcttgttctttattttcaatttttaatgactgcctactaacatctgttaatcttatggaatttcaatcatctattagcatttctatgccttatttctaaacttatacctgcatgttcatttagggtaaattctatttaatatgttcaggtgataggttggtcaatgtggttctctgaatacctttttctggaaagaagctgggcacaggatgaagccacattaaaggtattgcttttataaatacgtgttaagtacatacgctttgctcctctctgtgatgcttagcacatgtttgcatttgctttgactagtctcattaatctcattgaacctttggagtgtatttgcagtcaggaattcgacggttaaaggactatcccctaccctctggctggctcttttgtcgaggggcacgcttcactcaggcaaaacttttagctgcccaggaatatgctatctcaagaggtctgcctgttcctagaaatgttctgattcctcgtaccaaggtcaaattttcattccaac

SEQ ID NO: 207566 - DNA, 760 bp, Cannabis indica
ttttttttctatgacctactaaaagtcaggatcggccctgcatgtgatcaaatttacaaccctcatacattctggtttcttggagaaaattagactagggagagttacatagattcttctaggtgctgagttagttcttgagttgtatgtgttgatgtttatttataggtattggagttagttggtctaagagagtaagaggaagttaactatccaactaacttgttatccaaagtaggtgttgttggcatcatatttgttttagtgttctaattgtacaacaatatcacctgaattagatcagtaaaacagatgagagatagtgtgtagtgatgcgtattgtatgccacattaaatttactattattttgactctaatacttctaattattttagtataaatgtaagtaaggatcgatcatacgaggactatgtttattcaattatttaaaaattagtaacaagaattaaaaaatgagattttgattatgagaataaaataacataaatagaaacaaaaacgaattaaatgtgatactaccatatgagataaatagtagttaaaggttattctccaccctcaataattattcttaacttttattaatgaatgtaattttagttctctaatcaaactattaatcgcgcagataaaactaaagtaatcaaattatcccaatctctctgttacatgtaatcaaggtaaaacactcaataattaactctattatctaagtagtaaattcacgaagtatgcaat

SEQ ID NO: 207567 - DNA, 561 bp, Cannabis indica
gttctttgttatctggctctaccaaaccacactagtcattaatttgtatgaattattagtaattagttttatatgcaattttgggaaagagcaatgttgaaaggagaggaagaaaacaaaacatataattccatattaattgtttttagtagagatggattggagatttccttaatgatgttttgtctattgggccattacaacacttgtaaattgggttatacttataatacatagctagtgagttatgactcatcatatactgtgactctgtttgataagaagatgaagtggacttgatacagagtccttgctttggaccttaggcacgtaccaaagaataggtcaaccgttttccatcctagcttgttcaatttttttaaaaaataaataataattaatgaagaataatatacttatttatgtaattctaaatagatctttatttaaactttctagaaaaaaaaataacataggatagagaatatacaatgcatacagaattacatggacaaaaaaatcaacatgtagtcaaataaaatttacaagcacgctcaaata

SEQ ID NO: 207568 - DNA, 655 bp, Cannabis indica
ttttagaataaatataaattttaaccattaaactattattaacattctaataactattttttttaatgatgataatattttaaggggtgtataattgtttggtgataatacttcatttattctttctttaaatattagattagtattttttttacttttaaaaaataattacaaatacaaagtcttactttataaagacacaagtaataatctaaattattaagtactctaatgatccaaaatgatgtttttttaaaacaaaaaaaattagacttgtattttcttaaaattcatgaaggattcttgttttttttcttaacaaatattggaatatattcttatattgaatcaatgcaattcattttcaacccccaaaaatggtatacatgcctagctaaactcaagttatgcctaactttttagtgcacattttatgaaataattcatggtcaattattaagtgcacatgattgtacttactaaaataggaaagaaaaaaagacacttatttctaatatgtctcaaagatagtatgattgtagcacaaattgattagataagagataaatgattacttcataacaaattaatagtgtaagaatttgagttaactaattaaactatttttcaataatagctcaatcatcaaattaaa

SEQ ID NO: 207569 - DNA, 714 bp, Cannabis indica
ttgtaataatatttttcatctttgtaatagatatttgtatatagtttttttttaattatttgtatataatttatgtttatagattctaaatatttattggatagcatataattaatttgttgaataaataaattttttatgtcaaatgttcaaatttatataaattatacatcatgttatataattttgttttaataaaacacatatatattgtataatgatatatatatatatattgtataatgatatatatatattgtatatttattttgttagaattaatatatatatttatttttatgtataatatatattaatagtctttcgaaaaatatatatttttttatttaaaaattattatgaggccgatattaaatgtggtgcccataactctctttaggcacgacagaataggtaccacatatcgtgtctaaaagtatattagcaagaaaaatgaagtttttagacacgaattttgtagtgtcaaaagacttttttttcttgtagtgaatgtgcttgcattaaatttttaaatattaatattttataataattttagtagaaattgatatataaggttaattaggttaaagaagagtatacatcattccgaaaagtatttcctagtttccgatgaagtcacataacgccacctgctgcaaatcttctccagatatcgtgatctgggtacaaggcattgttatttagttattc

SEQ ID NO: 207570 - DNA, 934 bp, Cannabis indica
cttctttctcaagattccttaacttcttccccaccaaattttgtgctcgaaggcatccctccatatcaacacctattccccaaagttccatgtctgcaagaatgttaaccttgacatacaaaaaattattctagtgtcagagattagtaccaaaagaagaactaatataaatttgtaacggatcagatgaaagaattaccaaaggaatttcaacattcaaaagtgcttcagtgagttcatcagacacaatcaacttccagagaacagaacacaatgctcgtatttgtgcaactcgacgacagcaaccattatgagcagctctacgcatctgattcttccacctaccattttgattagcagcagtcgcagcctcactagataaccttttctttacttcctgtcatcacattataagaatcccaattatttaataaaaaaaacagacaaatagttgagccttttttttttctttcggtgacacagtttaacttttaatgtcgaaattcaggctgtcatgatataaaatatcttaacattttcttatgtaaagtatttccaaatacatttgtttataaatttattttgttaccttctccaggtttggactagagcttctctcctcatcgggccaaagaatccatgccacgatgcacatgtcaattccataatttacacaataggtgtcaacctgaactgaaactgccggacatttaagtgcctgaatttgaactttcaaattccaagtatactttctaacatctcttttccccattatcctacttatcctctcccatctttgtctaacaatctccaacccatttccaccaggaaacatactatttttatcaccggatgctttcacatgcgagcaatcgtatatacttttgtcagaccattgtagatctttagggagattgacataatacacagcaga

SEQ ID NO: 207571 - DNA, 599 bp, Cannabis indica
taaatttttttgaataaattacaataccgaaaacagagtgtgatattccagtttatcaaatgtgttcaaaaaacttcaaatttattttcgacattttaaactattcaaaaaattaaaaaaatttataagaataatgttgtaattataacaaacacaactttaaaaaaaaagtatttcaacatatgtttttcagtacaaaaattaattaacaagttataataaaaggttaatagtaacactctctttcaacaattcaccttttttagaaagtaaagcattatttataatataatgtaacattgaaaatgtttagtcagtgcaacacttttaatataggaatatggtgttttcaaatgcctaataataataagttgatcttattagtatagtatattagtctcacgatcacctttaaaatttagtggactataagaaaaaatatttttgatttaaaaaacaatacaataaaaaattgtgtaattttaaaagaggacaaactttttttgatccctaagctaagcaggctctaagcacaagcctaccccgtttatacctaagacctggcctaattagtctgtgcactgacaccaactcagaaa

SEQ ID NO: 207572 - DNA, 941 bp, Cannabis indica
ttaacatttgaaggtaatagctttaatttctttttttttttttttaatttctttgtcattcctagttaggtattttaaatatttccttattaagttttggtttagattttgctcctagaaagcttgtgaaagaggtaaagaagttttggttaatgaaaaccttgagtttcttatccatagaagaaagactctttaagaccaaaaataatgttccaagtaaagcttctgaccccttaaactttaacaagatcctggcttctcttcaaagccttgtttgattatcactatcctaaacaataaaagtgattttcctccctttgcattttcaaaaaccacagccaaaccatatttctttatgaaagtttccaatttagattaaattatgggggggagtgcattagtaatgttccaataattatcgtaaattaacattttacattgcaatatcgtcaatgtatgcagagggatgacttgccttaaaaacataatttttgatagatcgttgtcatatggaaatatcatctggaaagataaaatgcaagggttgtgcgcatgagctcataaatttctcttgtaaattctctttgacgccaccaagtgtgtttttatggctaatgtatgaagagtattgttaggattcccaacctgcaatacacaaaaccagtagcaatctaatctgaaaacacaaaccagaaaaacagagcacaattcaaatactgggtgatcaaaaagagtaaatgcaagaaaagtaaaacagataagaactcaaccagttttacttggtttagatccgagtcaatgagactggtcctactccaaggccaaagtagtgccttgagtcgaattcactatgtggaaatgtgttacacacccagatcagaagtgatcttcctcactcaagctcccattacacatttctctcattgatacaagttctctct

SEQ ID NO: 207573 - DNA, 900 bp, Cannabis indica
gtattctcttagatacgactttgcccctagcgtgactacacaaaatccatcgtgaactttaaatagagccgtacagcttcttcacttgttacacaccttaacaatggtcgtcgagaaacctcttttacacattacaccttcaattattatgtaccatatagcctttctcatcatttttcctagcttcatcctattgctcggatattctccagtgttaaggtaggcttctatgggagtcatccaatttggtttgtcatctatcatcttgatttcctccatgtaggtgatgctgggttcttttagaaattgaattggaactaggttcactttatctatcactgtgttgatcgctagttgggctagtgcatcaaatgttgcattttcttctctaggaatttgctttaaggtataacattttaattgtgtgagcaagtcatggatctttcctagatatgccactattttctctccacaaggcaagtattcccctgaaacgtgaattgccacaaactatgagtcactacagatcttaatgtactcagcacatatttctcgaacaagctttaacccgacgatgagtgcttcatatttttcctcattgttggaggctttgaacccaaattgtatttctccgtgcaagggttgccccccttgtgtgatgagagcaatccttgcatcaaaaaactgatcagtggctgatttgtccacatgaaatttctagataggcttgtctttaccaatttcttctagtgggggtgtctgaactagttccttgtctggctcaggattactttgtgaattgtctgcctctttgccacttcattcaacagcaaaatctgccaaggctagccctttcatagttatgcgtgactggtaggttatttcatattgtcctaactc

SEQ ID NO: 207574 - DNA, 734 bp, Cannabis indica
caaagaaggtaattataatacaaatatataaaatctattaaagttagtccaacattcttaacgtgtgaaaataaaatgtcaatttatgtgctactcctcccattttcaaatggttttgagatgaacccatcaatattaatcacaccttaccttaccaaattctaacatatattagagccacaaactataaattttgctctcctttagcatccatttaccaaattttaacagaaacataagccctcttgattagttactatatttgtttgtaatcaaagtgtttgatgattttgttctgtgcagattgtaaaccattgtgtgctactaggtgttcagcacattcaaggccaaatactgcaaaagggcatgcgaaacatgttgtgacagatgcagatgtgttccaccaggcacgtacggcaacagggaaaaatgtggtgagtgctatgctaatatgagaacccgtggcaacagatacaagtgtccttaagaatgaatgagatggtgtttggtgttacccttgtactacaagaaatggtttaatctttatcactacttttgagatgagactagtttctactagtttaacagctagcttggtcaatcaagcctgatagtatatgaataaagactaaagtaaatcgatttgtaatgtgtctatttattaaatattattattatatgtataatttttcacttactagtagtcactagtcaatatatgtggatttgtttac

SEQ ID NO: 207575 - DNA, 552 bp, Cannabis indica
agtggcctccactgggactaagggatatactgtcgtcggtttgacccattccgctacagcatccatggacgatctcgtagaaaccatcgagggaatggcgcggatcattgcccgccatcagcctcgtagcgtcacaactccttcctcatcaacggcgccgacccagaccaccgccccgaagcctcaggccgtcggagatgatcacgggcacgtttcctttcgagcaccgggcacccgggatatctggatccaagcgttctgacgcgatcctgacctcatccggccaagcggtcgaggagatctcgccaggatctcaccaagtcagcatccacccacgctttccatgacccttggggccgcgcagggccaccgatgtggaaggcccggacgcggcccgactacagccatgggacgtgttcagcgcgcaacccgccaccagccataatgaggtcggctatccgaggatccgctgaagctcgggcaatgagatcgtccaggccgtgctcaactcctcgcggcgatcccgctgtcagcacctggtcaagcccatgc

SEQ ID NO: 207576 - DNA, 937 bp, Cannabis indica
acgccgtagcagcgcagaacgagccataaccggatcgacttgaacctccgacccgtacccacttgccagtctttaaaatccaccaccgagtcggactcactgagtttgtttctcaagtactcgggatttgtactcaaagctttcaccaacacatcagacctcttaacccataagcaacaacagtctaaataagtgagtagccacttatgcgggctcatactcagtgagtcaactcgctctattccgttcaaatagtgtctgaactcgggacaaatgcatgcactgccaccgtaagcagcgtccacgtggaaccacatcgaataatctctcgccacgtcagctaaaagctccagtggatcaactgcagttgtagaagtcgttcctaccgtagcgcacagatacagagggaccaacccttttgccacgtcatcctccacgacctgccggagcttttccgggcacagggagaaacctccgtcaagattcgtttggattgttcttatgttggaaggggaaattcccgcaagcttggaggctttactgaacatcgaatgggtctggtcggagctgtagacgacgagctttcgcatgtggtcggcgccgccgattctgtcgagcgtttggtcacgtgccgcaatgagtgtcacgaggatcgattcgctcgttgtattctgtataacgccgccaccatttccgttttcagaaaagaagaatgaattgggaagacagagcatgttggcgagccagtccatgcgaccatttcgagctccgtcacggctggagatgccaaccagttgaatccgacggcgttaaaaccagtgcagagcatttcgccaatgaaggcggcggtactgaatgtggctggaaaaaaggcgaagaaattgggctgagccaatgggtcatccggggattatgatgctgtaatgtctttataaat

SEQ ID NO: 207577 - DNA, 577 bp, Cannabis indica
ttttttttttttttgagatggcagttggttgagcccattgttatcatatcatatatataaatatatataaataggttacgcctgtactctcttaggtatcaaattcaaaacccatattcaactcaaggaattgcagtaccactgtaccagacaggtagtctgagctttgactctcattttatatttaaagaaaaaaagattctctattcattgaagtcagtatgttttgctgtggttggatggattgtgacgatatgggttcttttttaatcggtgggaaattattagtctcgtgagtttggctgttgtttatgctcgtgattcatttctgtgtggttttttgtgaattgggcatcaggatttgagcaagatctgagcaatggcgaaggaagcttctaataccaatagcagtgtgacgacaaaaccacctccatccccatctcctttaagaaatgccaagttcttccaggtatgccacaatcccacattcccacatgattttttttttttagttgacttttcttaccatttgtgtccccagttcgatctattatcagtctagtcatgtttcatgttt

SEQ ID NO: 207578 - DNA, 1509 bp, Cannabis indica
accgtcttgacaaaggctgacaacccaggaggttctaacaccaaaagaaaagatgactccagagaatcatctaaaaataagaagaatcggaaaaagcacgataagtatgtgccaatttacactgtttatactgagcttgatgaaactagggaaaacatctttctcgcaaatgagcacatggttgcattccgcaagcgtgaaccaatgaaacatgcgagaaacaaaagagattcaacgaaaatctgtcgatttcataagaacatagggcatacaaaagaagaatatcgtcagttgaaagacggaatagagagccttatctcgcacaattattttcgacagtatgtcaaatgacatcgtaatgagcaaaaccagccaaatccgcccaataacccaagaactaggattgcaacatcctcctattgaaggggaacacattttggtaatctagggagggccgcatctcactggagagagtagtagtgcccagaagagatatgtcaatgaaattaaaaacgagcaatcagtgtttgctctagaaccatcaaagaaaaccaaaacaaaagaacctctaattgtattttcggaggaagatacaaaacacgtgagatatccccacgtcgatccttttggtgattacattacaactcgccaacaaaagaataaaaagagtgttggtggataatggaatcttggtaaacatcctttacaaggatacattaaagaagatgggactacaaaatacaaagttaaaaccttgtatggtaaacttatgtggatttaccggagatagtgtttccagtcaaggcattattgaactcccattaactgtaggcaagccaccattatccacaacattaatgcaaaattttctaattgtggatctaccattggtgtataatatattgatgggtcaccctgcgttgattagactaggggcagtcagttcaatcaaacacctatctttgaagttccaaacaccgtcaagagtaggtgtagtgcgagatgtccaactattggctcgtgaatgctatcgtgtagaacttcagagtagaagagctaaccatcaattaatggtggtcataacagaggaaagcgaaaagaaagaagaggatctggatcctcgaatccaagacgagaaaaaccagttaaagccaattgaagaactggaagaaattattttagatttagacaatcccactagatgtgtgtttattgggaaaaatctgaatgaaaaactaaaatagcaattaacaaattttctgaaggcaaaccaagatcgatttgtcaagagccattcaaatatggtagggactgaccctaaagtgatttgccaccatttgaatattgaccgtaattacccaactaaaagacaaaaaagaaaacccttggattctgaaagacaaagggcatttaaagaagaattggacaagttattaaccaaagatttcatacgcgatgcgttctacccctcgtggatattgaatcccgttcttatcccaaagccaaacg

SEQ ID NO: 207579 - DNA, 583 bp, Cannabis indica
gcattcttcaattgggttatttttttaagttatatttaacttgatacttaattacacgaatagtaatatgataccgagtgttaggcatcaatagtaacttttagcaatttctttataaaaataattaagtttaacttccgtttatagattattaattaattttaatttttaacgataataatatttaaattatatttttgaaactttgtactgtcaaagagatgctaataataccaaaaaaaaatttcttcaattttttacttataatttggtaatatttttaattctttttaatatcccccttactttttctttttacaatttaccttcacatattttctccatgtctccatttcgccactagtgtactgatcgttaagtgttaaatcaatatttacgtatcatttttatgagtatatttaaataaatttttacataaaaaataaaatttaataatttagaccaatcaaaaattattacgtggccattaacttatagtaagatacttacagaaattttaaaaatataattaaagtattactgtcataaaaactaaacttacgtatttatttataactaaaaa

SEQ ID NO: 207580 - DNA, 1085 bp, Cannabis indica
aattttttaacgataataatatttaaattatattttttgaaacttttgtactgtcaaagagatgctaataataccaaaaaaaatttctccaattttttacttataattttgtaatattttttattcttttttatatcccccttattttttcttttacattttacctcacatattttctccatgtctccatttcgccactagtgtactgatcgttaagtgttaaatcaatatttacgtatcatttttatgagtatatttaaataaatttttacataaaaaataaaaatttaataatttagaccaatcaaaaattattacgtggccattaacttatagtaagatacttacagaaattttaaaaatataattaaagtattactgtcataaaaaactaaacttacgtatttatttataactaaaaaataaacttaagtatttataccgcaaattatttttaaattaattttttttctttttataattttacccaaaataatttatattttttttaggattcttttagttttatacttatacgaaacctcataaaaacagtatgaaagtaatttgtaaagagtatagtacaactataaaaacaaaatatgtgaaagaaaaaaatcttagcataagctatggtgaaaataacggaaaaaacaaccacccgtatttttattaaacaaatccaaatcagtaaatatgttaagaaaacggtagatctgtatttttttccctcttaatccgtaagttgcatacttaaaattttgttctttcactattttgaccatattattaattttttggtatcaaattaaattgaatttagtaaatttttatatttttctcttatataaaattaaagaaacaaaatccataaaatttcatggtaagaagaaccacaaatattcttctccactctttcaattttatcatctcatttctccctaaccaaacaaattttaaaattttacttaattttcttttatttttggtattgcttttctccaaaagttgtgtaccatatttgaaattcacacttggttttatttttcaaagctaataaattttagctatgttttagtcaaatc

SEQ ID NO: 207581 - DNA, 745 bp, Cannabis indica
tgcgttatttcataaaattttgggaaaccatcagtggttttttttttttttttcaacttgtgtctctgaagttccttctgattcttaaattttatggagtaaccttgacaaaccgaaaaatttggaaagacctttgaaattttgtaaaaatgatatgaaattaatcaaaattattcttcaaagctaagctatcctaccccaacatttgatgataaactgtagaattacaagtaggccaaaggagtccatgatctattgtgctcatcctctaatgtaaccacagaaacacaacaaacaaggctattacaacacttggtttaaaagcactagatgaataattttcatacaagccacaaagagctgaaagataaaaggttagctttgaagacaagaacttggtgcaacccctcccaagctataaccatgagcattggtgcaaatagaggtgagtttatgttcaggtttgacagacttgagctgtattttcgacaataaaattcgtacaagcaatggttcgactgcatttgagattgatagccacatcagtgcttgatgtcccataaaagtcactgaatgacacattacttatttgaactcctctttgctgtgtgattcagagagaagcaagaaaaaaggacttgactgagtgttttccatatagagataatgatttttctttttgggaaatttatatagataatgttttaagtttcattcagaagttcttaccagttcttgacaggca

SEQ ID NO: 207582 - DNA, 1802 bp, Cannabis indica
ataatagtattcattatagttacagtatcaatactgtaaagtttaaaaaatttcgaataatttacaatgtcgaaaacaaaattcctaatatttcagtttaccatgcctgttaaaaaaaaattcaaacgtattttcggcactgtaattattcgaaaaatttacagggttgacgttgtaatcataacaaacaccgccattaaaaaaaataaaaaaatattccgacatgtgttttcaagcacgaaagttaactaagaagttgtaataagaagttgatggtagtactcgtcatatgagataaggatatcagtgatgctcatcagtttttatagatgacattttacgattggttagtaagattccctaaaaactatttttttttaaattatataatactcgacacttaattgcatcaatagtagtatgacactgaagagagtgttagacacttataatatcttttaacaattttcatagaagaaatgctaaaaagtatcctttgtagctagcactcttttaaagtataatattaatataatttaatattaagttccacttattttcctttaataaaaaaggtaaatagtggtataagtacctaaagttttaagtttgtaagtgacataatctcaatgtttatttttagcggtataagtacctaatgtttgtaaaactgtaattttcttctaatttcatcaagacaagctctattatttgcttaaacaaaccacatataaggtcaagattcttgaccattgggtttagacagaaacatgtagtatcacttacttccaaatgttcttttaataaattcaaaacggaatctgtactgacaaaaactgaaggaaaatttcagttttacaaacattaagtacttatactgttaaaactaaatattaaatttatgccgcttacaaacttaaaactttaataaaactttaataagtacttatatcgctatttaccctaataaaaataataaaaaatcttttatacgctaccacttcataataatatttcgcaccttaatattccatagcaatggccggagtataaatcaggcctattatagaatcatcccaaatatatgcacaagtggagaaagaaagtctctgtgatggttttcactcactgtcagtgtcaagtttagaagtttgaatagtgattagtgcttgaattttccttggattatacatataaattcatataatgatttcacaattttgaaaattaagagtatttggggcagaaattaaagtaccttatagcagagtcgtttggtgttgaaccttaaaccctttgacatttcaaacttggaaagctcaacagacaccaaccataatgaaatctgaataaagaacattaatatatcatcaaagactaccttttttctattaaagcaacaattagtattttcaaccttattgacattttagctctgaaaacttaattacccattactctaagcagccttataatcaaaaccaagttcagaaaaatgagttttcaaagagctttagtaaagtaatgtcaattagtctttttgaggtgagaaattatgagagtgaaaaaaacaagctactgtctttgtcttcatggcaggtagagggaaagtagggtaatatcatgggcaggaatcagtccacgtgtcaaagatttacatgttagaagacattaaaagctgcttttcgctaatcgaatcacacaatttgtcgttaccatatgtgaatgtggctttccgtgaaggaaagaagaatcttgagaaaaaaccattttttagaccaaaaatagtgaaggctattata

SEQ ID NO: 207583 - DNA, 641 bp, Cannabis indica
tttttttttttttgaaaaggaacatattgataatttaaaagtaatttttctttcaactaaagtgataaattttcctacaattatatttatccctttaataatccaatcaatcagattatatattattattttataacttctaataccaaaaagatttatatttaggggagagaacaggtgatttttcagggtgggagtagagtaaattaattatataattattaatagattagttgttcaatatttgtataacctgttttgattatgaattaaatttttaggcaattttataatacaccttttaaaagagtcatcttatagtacattatttatttgtttagacattcagaataattatttgtcatttttttttttcaataatcatgtatctttaattatttaagattatctgaaaattaacaaatattttgctaagggataattttttttttcatatacctatgacaagtaaccaaagaaacctataaaaatataccaaaacaatctttttgaagaatgtactatagatttttcctcaaagttttagaaacattaagctgtttgtttgtttgtttattaatttagtttccagttaattaaggaagaaaaataactgaaatgaccttacaaaaaaaaaaaaa

SEQ ID NO: 207584 - DNA, 705 bp, Cannabis indica
gggtgttgatggcaaagctttgacactattcaaaaattgagaggattctgagtgtagaaggagagcaaggagcagaaggcactggtagaggactccaaacagtgttctttctcttccatctctatcttttatatttttcattgatttttttatttttattttaaaatgtcttttattagctaagttcttttaaggatttttatgtgaaccacttaattttattttatggattaatgtgatttattcaatttcttcttcttctctttattcaattctattcaatctgttttaattttgcaattattgaccgattaactttaatttttacttataaattcaagtcaaaattttgaaaggtgaaatttaaatatgctctgattgatatgaatgtaattgatttggaataaaagtacttaagttgtttttatgattttattagttgttatgtttaatactatttgtgttattaaacttaccataaaaataataaaaatataagaaattttcacatagattaagtttataactcttaatcagattataaaaaataataataaaattaaaagaaaacaaagaaacacaaagataaggataagcaaaaaaaaaaaaaatgcatgaggttagcaacccaaggattgtcctatagctaaatactccaacttgaaacttgaaattaaatggcatatctatatataaatagatgtt

SEQ ID NO: 207585 - DNA, 843 bp, Cannabis indica
tattagatgtggtttaataaatacccttaatataaaataccaaataagcatttatattgtgatcaaattgcttctcctctcctctccaaccaccaaagctcactttatcactatttattattggacaacactatttattattagacaacaaagacaatgacttctctttcaacaaaaattggttgtcacattgtttttctacttcttctttattattttttagttgaatttatgtattaactttaattaatacttaaatattattagatagatggtatctcattaaatatcatttatactaactttttgaatatgaagtgacaaaaacttgccaaagttttaaatacttaaaattggcaggtatgatcatattataattaaatgtatttatatgtataaatgtttggttgagtcacatataggaaaaatattatatggtttggttactaaaaccattaataattattcaacttgtgaaattttactaagtgcaatacaacaatataaattaatttgtgaatgtgattggttgaaagtgatagtcataacaatttaaggttgatacatattatgttttttcataaagtagaggattaatacatttattatattttatttttaatttttaaagcctatagaatatataattgatatgttaattattagattttgccaaaatggtctgaaatttattatcttaaaacaatgacaaagataaaagatctaacactcaatttaatttttagttaaatatttttcaaaataacaagatcaaatctacctttaatttttttttaccttgtaatatttgctatttttagtttatttaagtatatgtgttaa

SEQ ID NO: 207586 - DNA, 540 bp, Cannabis indica
ctagttataggttgtaatttttattttactatacatatgatctctactatcgattgaatatatatcggttataactttacgctaattattacatatcacacttatgctcgctttatagctgtatttgtgtacattattttcatgtttcttacaaaattacatttgaaacatctacttattactctctaacacttaatatatattatatcttataatgatattgtcttattatgctaattttatccaaacgttatgatatcatcaaatcaaaatttattaccattcttaatacaaaaaacatgaatccacatttttaagcaataaaatagaagtactctattattataaaacaaagtatacaacatattctagcatcatatatttatattatataatttaaatatatatatagatatgtatatgtctatatgtataattagtttaagtttgaataaactttcgttaagatgataaaaaagcacttgagttggtagaaaatgttacgaagggaatatctcaaatatgtcatgtacatgtgtt

SEQ ID NO: 207587 - DNA, 901 bp, Cannabis indica
aggcatgttgtttaccttatttaggaaaatgtgtttacctaataaggtgtggcgtttacctttttttagacacgtagtttacctaataagacttgttatttaccttatttctcacttccctaataaagttgagttgtttacgttatttaatgcacaaaattaacttaataagatgtgtagtttatcttattttaaggtagacatttttagcggtatattattttttgtttaccttatttaaggatagtgatttacttactaaggtgtgttgtttatcttatttagggcaatgtatttattagtgtggcatttaccttattttgggcacgtagtttacttaataagacatgttatttaccatatttagggcaaggagtttacctaataaggtgtgctatttatcttatttaaggcacaaagtttggttaataaggtgtgtagtttaccttattttaaagtaggcatttttaatgatatattattttttttgttaccttatttaaagataatgatttatttaataaggtgttttgtttacattatctagggtaggtagtttacttaataaggtgtgttgtttaccttattttaggcatgtagtttacctactaaagcatgtcgtttatcttatttagggcaatgtatttacctaataaggtgtgttgtttactttcttctaggcacgtagtttaccgaatgaggcatgtcaattaccttatttaagacataatttatctttaaaagagtaaaacactactttaaataaggtaaaaaacatgcagtcaattctgtacactaataaaattaactaaaacataatttatatcattaacgtttttattttttactttatttatttttccagtcgctatgatcaattaggaatgaaaaaaaataaaat

SEQ ID NO: 207588 - DNA, 581 bp, Cannabis indica
taataaggtgtgttgtttactttcttctaagcacgtagtttaccgaatgaggcatgtcaattaccttatttaagacataatttatctttaaaagagtaaaacactacttttaaataaggtaaaaaacatgcagtcaattctgtacactaaataaaataaactaaaacataatttatatcattaacgttttttattttttacttatttatttttccagcgctatgatcaattaggaatgaaaaaaaatgaatatgtagtaatgaacactttgattttaaaattaaacataaaaccttaaaatttaaacaattataataatagttttttcttaactatccctatacatacaaacaataataacaataaaatcattccctaattctacaattaaattacctggtatatatataattctcaaagatttctacttaaattagaaatccaagcttactattcatattatgcacagacacaatttatattgtgacaatgacactataccactagtagtacttgctaagtagctagtgatgttcataagtgaaatcaagctcaggcagtctctaaggtagcaaaggcag

SEQ ID NO: 207589 - DNA, 684 bp, Cannabis indica
tacatgcgtataaaataaaatagctacgcatacaacacactatttaaacgcagtttttggtgttttaaagtttttcgaattttttaaaattttgcaggaatgactatgaaaaaaaattttactaaaaaattatttcggatactaaaacagataaaattgtattagtgcatcccttgtaagggggtgcgttataaaatttttctatacttaataaatttagacataatattgatattaacttaatattattttaaaaatattttttattatggttatttatgtcttccaaaccaaaaaaaaaagttaaaagagaaataattatttaaaataaataagaataattaagtaatataaacgataagtttgaataattaacttgaattatttaaacaagttaggcagtattgtccaatctatagaaataaattttctctggtttccccaacctattaacaacatagcatctttacctaacaaaaaaaaaaaaaaaaaaaacaaaaaaaaaaaacaacatagcatcaaatattaatagcttttatgatttgaaatttcttattttttatttattcctagagcaaagatgtctcacattacatagaagctaataaagttgcacataatttagctcattatgctatttggttaaataaaattgtatttagttggatgccatttcattttaaa

SEQ ID NO: 207590 - DNA, 688 bp, Cannabis indica
tttggtcattcatgattttttttcttttaccaattcaacatacgcttttgtttataggtaatttaaattaaacatgtgaatgtgatgaattgaaaggtttaatttattaattattatttatttaggtaaaaggtgggaggatttgaaccttaaatctgaatcatgtggttatcaaactgattaagataactacttgcaaataacttatgttaaccaaaaacttttagataatgacccttgtggaagaaccaaaaaaaaaaaaaacgagaaatagaattttttacataaatacaaatgacattttatttataaaatactttcataagatgtggataatatttatactttaatgtgctttaattaccaaatacctcttatactatcacttacacacattaatacattatcacttacacacgctatatgcatgtcacctcacttgcacaatttttcttcttttttttttacctttttcttattcatttttatttttacttttagtttttaagttagtgttcagtttatctttcctatttctttattagtttttctattcaaacctagttagatcaaaccaagaagcctcatctctgatgagttcttccatatagtgaaggacgatggaagtttgaggacctcaggcctttggggtttcggggtcgtcgtggaggtcagccatggcctccat

SEQ ID NO: 207591 - DNA, 735 bp, Cannabis indica
aaaaaaaaaaaacaactacactgttaatcatattgataaaaatataatattattgtaattacttattaagttgatctttttgatatgtaaatagtgtatattttttaccatcaccaaataaagatatttaaaatcaaaagtaatcattaattaatttcctttataaattattcaaacaaataataaaatttttaaactcaaataaaattaaatatgtaccatactaaaaatatttcttttattttgactaatctatctaaaaatatatttattttatattatttaagagttactagatgttatcaaaaagtaaggtactacaatattaattttttttaataagttatactttgaaataatagtatctcatatgtatcgttgttatctaccaataaattacttttaaaattatatttttttttactaattagttacttttaaaactataattttattattaaattatattattgatctgtatttatgttacttttatatatactagaagaaaattatgtgcaatgcatgtatacttagttttatgttaggtactttttaatttaattaaaaatgatacaataaataattatataatttaatttattattatagtctaagtgtatttttttaataaagtcattaataagcctataaaaagaattagaaaatgaggtaaagaatcatgctaaacaaaaggtaaggtaaaagaaatagtaaaacaactatgcccctgta

SEQ ID NO: 207592 - DNA, 1350 bp, Cannabis indica
ctctctttacagctgtcaggttatctatctaataattatataaaatcatcactatatatatagtattaatgaagtagaagaattaggatttttgtctcctaattttttactcaatcaattaagttatactctttataatatatgattctatcatttgaaatacaatttttatattaatatggttcttcaattatattttattgtaaaataagtgacataataaataataattgatagatgaatacaaattaagtaaatgcttttcaccctttttacattaataattaaataacaaaaagtagaagtataacttgtttttgggaaattacctcatgtatagttttttaattttttttttcttttaaatttatagtttgggttgctccagtagtttttatgtgggttgttatgtgaattttagttgcaatttaagttactttgtcagttactatgtgtatttctgttggttgctatgtgagttgcaatattattatataaaataccacatagcaatataggttgatcgatgtgtcggttgctatgtgggccactcattttatgataaaattaaataaattgtgataaaaaatatatagaatatgttactgtataaaagttatatttcgaggattattactaaaaaaactatatactataagggacataacttaataatataaatagtttagggagcaaaaatgtgaagtattgaatatttattggttcgatgatgatcgagtttattgtaaaataaattgatagttttgttgttgtaattgggggaatggaaaacaagtgtgtatgtgatgatgaataagaagacaaggaaattatccaagttcattgaagaaactagacaagaaaccaagcctttatttatggactactgtgatccaataatcaacgatgccacaaagttaagggacttggattttgacactcctcattatgttattaaagatttatcggtatgaatcatatataaattggttaattaaatttattaattaaataacagtaatatatataaatacactaattcatttttgtcagcctaagtggactgatttggatgttaatcaacatgtgaaccatgtcaagtatatcaactggatccttcaggtatttaacacatgtcatattaataatatcattataatctttatcaaatataataattaccattaatggttaattatattaaatatataatgtgtgatcatatcagagtgctcctgagtcaatattggagactcaaaagttatgctctttgaaattggaatttcgaaaggagtgtggaaagaacagtttgcttcattctttactctgccatctccaaaaaatctgatc

SEQ ID NO: 207593 - DNA, 505 bp, Cannabis indica
tttttacccatgtgttaatgttgtttgattaattataatataatgtagtaaataaaaggtttattatagtagtacttcaaggattctcattttgatagaataattaatgatcatttaattcaaaaaagaaaagtgttatattcgaatatgttgcagtgattacaaactcattataaaattatttttcaaaaatttggagaaagacataataattaactggaaaataataatattctattgaataaataggctccacgcaggtgtttacagggtcagttaggttaggtccttatttagggtctacatttttttaaatccaaaatataaaaaaaataaaaaatttgactatatttctatttaactaaaattaagtgtattgtataacgcatttagagtcgagtccaatgatattcttttttaatatgcattttttatgtatattttaaaaaatgagaactccaaaattcaattgacaacatacatatttttcagagtcatatttatt

SEQ ID NO: 207594 - DNA, 2354 bp, Cannabis indica
ccccattttaggcatatataaatccttatccttggccaacttcaagatgccagtatggaagatgtataccagacgagaagacccgttggtgcacatcaaatactttgagatgtagctcaatctccataaggttactggtgatgtgtgatgtcgcatattccaagccactttgtcgtaaacagctcaatagtattactttaaagtggcctcgggaaggttaaattcttgggctgagttctctagataattttacacacaattctcgtcctcaaggcttttaccatcacaacttgaagatcttgtcaaagtcaagcaacaacaaggagaacctttgaaggattacatctagaggttcatggctgaggccacaaaggtcaaaggccttacagaagagggccgatatatagctttagtgggggcatactcccactgagtgacttctggaaagacttccaaaggatctcaacaaacaatataaggagttccttgatagagctaatgactttatcatacttgaagaagctatctgacaggcccagacatggtatgtcaacaataggcgatattaagacatcctacagtctcatgacttatcgggcgcttaggaagatacgagcaactctccccaaacctctagtggcaagaacactagaaacaagcaaaacaccaacaactctggaggaaatagtggaaaaaacagaactttaacacttctcccatgccacaaaatcaaaagtacaaagaggagaagtatacctacttcaccctcctgaaggagaaacttgaagccatcttcatggccactcaaagaagagtcccctacagaaagccatttctcatcaaaagggagttgagcaagagggacatgttgaagttctgtcagtttcacgatgacttaagccatgacaccaatgagtgtcagaatctaaagagggagattgaatacctcataaggcagaacaatccccacctgcatcgttatgtgcaaagtgaccaaactcaagcacaaggtgcccagaacggagatccaatgccacctccaatggtaggacacataggttcatcattggtggaccccacattgtaagagagactagcaaagctagggagcgctatgctcggacactccgtcacaagcctgaaagtgacatcctcgaagttgaagacaggggctctaagcaagcaaagcttggagagcctgtaatatttttcacagaagaagatggtgctcaagtcagtttgtcgcacaatgaccccttggtcattactgcacatattaggaacatgactacagcaggatgcatggtggacgatggagcctccttgaacattcttctcaagtcaacgtatgaaatgatggggcttcaactcagcgacttggcaccctgcaatcaagggatgcatggattttttggcaaggcatcgcacccatcgggtatataagattacccctcaccgttggagaaaatccaaccaccaaaactctaatggcatagtttgtcgtaattgttgttccttcggccttcaatggcatgataggtcgacaatcccttaatgacctgaaggcagtaacttccatctaccacctatgccttaaatttccaacatggcgtggagtagaatatgtgagaggagactaatagtctacgggtcacggttacaacttggccttgtccaaggccaagtaagagaagatgcctgctaagagctctgaagaggagcccaacaaagggcgatgaagtccagcctaaaaaagggacacactcatagatcctcgctttggggatcctgccggaagctttggagctgtaggacagttggaagaagtggaggttaatcccattctcccaacaagaagacttaagatcgggaaaggtttagcacaagaaataaaattattattgataaaattcgtaagggaaaatctagacctatttgcaaggtcatatggaggcatggtcgaaaatgacccctccatgatgacccatgcactcaacatcgatctaaacatccggcctattcaacaaaagaggaggttgctggatgaggagtgcacctaagcactcaaagatgaggtcgagtggctacaagcccatgacttcatagcggaggaattctatccactatgggtatcaaccaagtactggtgcccaaacccaacaaaaagttgagagtatgcatcaacttcaccaacctgaacaaagaatgtctaaaggactgcttttcgcttcttagaaccgaccagcttgtagatgccatagctgaccatgacatgctgagtttcatggacgcatattcaagtaacaattagataaagatgcatccaccagatcagcagcacagtagcttcatca

SEQ ID NO: 207595 - DNA, 1017 bp, Cannabis indica
tgtggtgctatttctaatgctaagttatttttttctttttttttttttttttgaattaaataagtaatgcaagtatttgatttttttccaaaaacaacaaaattccaacctgcattttatctaagttattataaaaagtaaacatattcatttcagtttgtagtttttttttttttaacaaaatatcagttttctaaatattttacaaaactgttataaagcccttaaaaaaaataaaaagaaagaaaaaaaaaatattttacacaaaaaaatacgcttccattggtacaagttaggaatatactaatttggaaaaaatacattttagttaatcttttttacaaaataagaccactgatttatttattttaatctatcagctttgtttggaaacaaaagtcactttcacttttaatgaatattttaaataaaataaaagattggatggagggttctgttgatgaaaataattaaattaaaacaggagagaaaaggtgaagaaagttgggagaatatgccaacgcaacttatccaatgtaaataggccacgtcactaattatatattaattgtccaaatctctccttcagaatcattattaataacactagtaaaaatttggcttcgtggatttatattttatttaatgataattaaattataagagtataacaaattttaaattttgatattttttatatatattttaataatataaatcataatttagtaaatttttatacaaatgttatagtaaagaatatattaaaaattgataaattatccaaaaaaaaaaaaaatagagatatacaaaagatatttgaatataaatttatatatataataaaaaaaaaactctaactactattttaaaatcgttatcattattatatttgtagtcgtcacaatattcaaaatagatgtcatcactaaataaaagaaatataccaaataattattaccaaatattgaataaagctattttagaacgcgccataaaaaaatatatacatatata

SEQ ID NO: 207596 - DNA, 1281 bp, Cannabis indica
catataaatagactaagtgttgtaaaaatataacttacgcatctcaaagtacatccttggacgtttttacacttacccagcgtccaagttgacgtcatatgtcaacctgggcgctggatgtcaagctgggtgttgggtcacagactgcttttagtaaaacaatcataactgagtcatttttgatctaattgataccattcaacttgtgttttgaagctaattcaattctctatcaagccctatttcacactctagacgtaattctgaagctatctttgtcaaatttcaccccaaaatgagttatgaaaataagcttcgagttacttgcagcgggacccgtcagggtttgaaaaatagccatcaccaccaagagctaatttttactgttagatcatcatcaacggtcaaaaacatcttatttaatattttcctatttttattggcctccttcacttataaaaaggagagctcccttaattcattttacacattcagaaaactacccacaaggtgagaacttctctctctagattttctctctctaaaatttggagcttctgacacttagtgtattgctgcaattaccatctgtgagaaataagaactcgaagtagacagctctattactatagcgatatagcgagtgaactactataaatttattgtctctttcttataattacttcactacttattcattctcgccaatctagtgagcgggtgtggcttagaattttagttcatatttttgagtcaacaataattaatacttaagttgttgtcgagaccgtataaacatggagtcaaatcctatgtcctagtttttcctatttccccgtcccaagccaattaaaatgcgccacttcaattaaattgtcatcccctcatttaacacatttatcaaagttaaggattatttattccagtttttgttttatgatattttgttttgaaatgtgattatattttattattttttttatagagttatattgttttatttctatgttatattgaacgtggctatattacaaaaattgttgttccttttcagaacatacaattcaaatttaaattctaaatatctcttttatctattatatttattgtgtcttttttaacattgcatttcaaatttaaacccaacatatctaaaaaaatatctttctattattaattttttatcccatccacatatctaagaaaatatatatttctattatattgttttctttctaaatagtaaaataaaaaaaatgattatgtttcttaaaaaattac

SEQ ID NO: 207597 - DNA, 769 bp, Cannabis indica
acaaaaacgtgaaattacaaacaaaagatacctttcttataagattactatttttatgcattgagccaaaattaagagcaaagatgtttaaggggcctatgtttcgattaattctatcacttaaataattcactgattaacagagctaattattagagcttaacgcgagcttcctcataggatcttctctgtcagcttaaaagagcatttccattcggttattttcattcttttagtctttaggtaaaaagaaaaaaaaaaatagggtaataaatatactggatcagtgacggactcactgatgaaggtgtggccccgaaaaaaattgcattaaaaaatatttaataatttatactaaaaaaaacatacaaaagtataccaaatatttttatatgataattaagttctcacatatcaaaaaatttgtatatttcttctgggaaaatggtgaggatataaatgatcttttttcttcttttctttttcgtcttcctaaatttttctaaataaataataagttaattattacataaataaaaactaaacgtgattagcaaaacaaaacaaaataaaaagagagtaaaggatgagatttgggaaaggaaaggatgaccttgagtatggaatccaagcatggagaggccacaacctccgcagacaagactaggacgaatgtgcgacccatgtgcgcaaatatgtacggctgagcttcacgcaaagcttccacaaacctcttattactattatcattgccttcttcatgatcacc

SEQ ID NO: 207598 - DNA, 735 bp, Cannabis indica
tccgactcccattcagttaacacttagacaaccaacaacaagaagtacattatttttttattatagtttcaaaatttattatctgcaaattaaactaggttattagtagttagattgtatattttgtgcaattttataaataaataaaaccacaaaatatatatttttaattaaaataaaaatcaactcgccctccccgggcccatgaacccggcctaaccctgttatcacacagatgggtatggatgctctttttctcacataacacgtaaacccaacacccgtgaaattgttcagaccaagtttcacccagtgttcaaccctattggcaagtttgattttgaagtagaaatattttccatttttaacttttttggatgcagttgatcttaggggatcttcttatctattgtcaagtttctttataggtttggagttgctaaaaaatgtgcttagattctcggtgggaaatggacaacatatatgagcttttgggatcctttgatcccttacctgatgacgtttaggcttttttttttttttttagagtcgtctgagtatgtttgttagctcattttttcttgatggtggtatgtgagatgttacaaagttaaatcaatatttcaatcccaaggatgtggattttgtcataagtattcgacctttggagagaaatgtgattgattggtggtgttggcatcataatatggtattttcttagttatccaacttgtt

SEQ ID NO: 207599 - DNA, 765 bp, Cannabis indica
ccaacgacagttgacgcttcacctgccactatcaacagtacgatcgtgtacggaaggcagcccatctaacttgggtctcacctacccaacctaatagctcaaattatattgataaataactatattttaccccatcaatgtgctttttatactcaaataaccctaataggtccatattattccgacccattaaggatatatgcctataaatatggcattatccttccatgcaaagggttggaattcttagagttcaaaaccaaaaaatacatcaatctttatagccaagagcttaataatagtgacttgtgaactaagactcattaacactctagccacataaaaaaacttgtcttattttcttcttaatctttctttctttaacttaatctttgttgactcagaaatctgaacagagattccttagccacactcgctagttagattggcgagaatgagatatatgttaaggataaatagagagacacatcaatttataatagttcactccttatatccctacagtaatagagctacatctacttcaaatttttattctcacgagatggattacagaaaaatagctaagtcaagatgcttaatttctagagacagaaactagagagagatgctctgaccttatgactaattttctgaatatgaaaaatgagctagatgagctctaattttatagttgaatgagctcctattaaatgtgaagaaaataatccaaaaatatgacaaaatacaagttggctatttttg

SEQ ID NO: 207600 - DNA, 868 bp, Cannabis indica
gagaacatcgattgcttccaaaagtattgtggtaacagtagctgaactaagttgatttcaggggtaggtatgggctacaatttttcaaaaaatttaataaagaaggcttgctttatcactaacaagttttttaatgaaaagaactcaaattttaaactatttaaggggaatgcatctataaagtataatggtaaatgtgaaataattctatcatgatattgcctgcctttgatagatggatgaaaagcattgtattgatgagaaaacattatgggagtaaaattattttctcctggaaccactttaaaaaattcaaacaatttccatcatctatagcgcataaattctataaatccatctaatcatcagcacatattaaccaggcttatcatcaacacaatcaaacgttttaatctactatatatatgaaaaaaaaaacttgaatcaataatgaaactgccaaagacattaccttctgatagtccatattcattgtttcccaaatgacccttttataagatgcaaccttattgctgttaagatatctaaaaacctataaaatagagagtattgtcattagaacattcatttattgagggaaaaaaaaagaaaactgaagcagaagaatctacatacataattcaataagaaaacaaacccggaccataatcttaggacacaaaatccttcttaaatcagtatgaattaactgactttaaaaagcaatgaaaaagatctcggaaaaaaaaaaaagcaaatcaaaatatagtaaacatcacattcaacaacttacaaagtttttaatcacaacaatgtaatcatagcatgatctaacaactaaaatagcttattttatttatttactata

SEQ ID NO: 207601 - DNA, 607 bp, Cannabis indica
atactgatattaatgctcttgtttggtgtagggcaatttgtaaaaatcctacaagaaataacaaaatgacctttatatatataggtcgaaaagagtacaagaactggcacacaaaataacagaaataactgtcaatacccaactgtattaacaacctaactaatacttacaccagtaaataaacctgacaagtaagatatataattataacacacatttttttaacgggaattacgtgcttgtggcacatcctccacacctatatcatgtatattaataacatcgtgctcagtaccttttatgagtttcaattaaattacgccttatgatccttttttatttgtgttatcgattttcttggttgacataagtaatttaaatttgagaataatactatgtattatatgtttatgacttattctctacttttaaaaagatcattaagtgatcagaaaactaacaactataaaataatatatatactcactacaccaaacaccatatcaatatatgataatcgaaattaatgtttgaaatatatatgatgcttatttttggacatgcatgttcgaagtttgctggacaacaaaatgttggtatcctatgc

SEQ ID NO: 207602 - DNA, 857 bp, Cannabis indica
  modified_base (62)..(62): a, c, t, g, unknown or other
aattcaataaatattaataaaacaactaggtggtagtagactaaattataacaaaaaaaaanaaaaaaaaaaaaacgaatggtgttgcggatatctactttacttaagtcctttaaaccacttcaaaatacttattgttagctcaatcgacaattttagctcaattaacatttaatttgcacaactatagattttagattttctaatctaatttaattagcacaagtacgtacatttgtactttgcatattagattgaattatatcatttaaactgaatattttattgacatctctactttttatcttaacttttcaaggttaagctaaaaagaatatattaactatgaagaaatcaattttgatactaaaatttaaagacttaattagcaaaaaattagatacgaaatgacaatcgtatttaattttgtcttaaaaatattattattaatatatgtacgaggcctttataaggtaaaaaaacaaaaaataaaaaaaaaaaaaacgccctcataacaacataaaataatttagatagtgtttaattgagtgtaataaaatgataatggtaacaatataatgtaataaaaataataatgcaaataatattatgatgtctaatttatttttggaatagtaattaaaatgagtagtaatttaacatcaattaaattaaaaaattcaaggtttctggtttttaaatttatagctataagagattatcttttttctatggttaggccacgcaactttctttagacataggtgcggtttggtcgggattatgttaacaacaatttaattttcgctactgcgattagtattgtctcttagatatgattttgattttagtcttgt

SEQ ID NO: 207603 - DNA, 661 bp, Cannabis indica
atatatctatcaaattatttattaaggatcaatgatatctttataactgtcaacacttataataataaaactaatgtaaattgccttttcattttttttatgtttttgtaatatatagataaatatagattgatatttatgttaattaaaaagtttaaataattaatattacacaagtggaaatattattaagtataaagttataataatatgatgttaaaaattaaattataagcttttttagagcgttctataaaaaattactaaaatataatcactaaacaaatagatttaaaagaaaaaaaaaatataaaatatgttactttatcacattagtacctaatcattctctaaactgttaatacattatatatgaatttctcaagagataaatattgaataataactttatcttttaaattatagagtatatcactacctttaagaattaactaataacatagtcaaatattcaatataaaaaattaaaaatgtgtcattaaataacaaatatacaattttaaaattatgtatttataatttttttaaacggtaaattttacgtgcatcattatcaaaaataattgtaaatagtgttaatatatataaggataaatagcggcataagcacctaaagctttatgtttgtaagcggcataaa

SEQ ID NO: 207604 - DNA, 696 bp, Cannabis indica
ttaacaagttgtatattttaggaagcagaatcgaaagtttagagtttaaaaattactaattattctaattaaaataaacaatgtagaaggcttaacacaacaaataagtaaaaggaatatggctaaataagccaaatacaaaacaaatttataaagccaatatttctaatctactaattgttaaatatcatttgaagttaaactagagaactacagactaaagcctatcctccctttttttgatatgccctactcaagcggctttcgtcccagggaggaatatccaggatgttatgatgcacaaataatattttactaaattcattacaaaattatgtctctttaaaacaaaatgttgtactacattcttgttgttagcatctcacactaacattaggtggccgcacgagattatttgaaaatcttcaaaaaactttccgaccaatctcgtatgactacatagctcgggatattggattcaatcaaaaaatatatttatttaacaaactataagtattattgtttttatttttgttcacttttatcgtgaagagattcgatactcttttcttatatatataagtgaatctaatactcttcaagaattatagataaaattaagaatcattaatattttattattctataaatgtaataaacatgacataagttttaacatataatattttatttttt

SEQ ID NO: 207605 - DNA, 432 bp, Cannabis indica
attttcattttatctacatttcaaacaaacaaaaaacaaaaacaaaaaacaaaaaaaaaaaccatttatcttgattcttgaagtaaatttaagtgtatactagtggtgactaatctattattcatttaagagcaactctttgttaattcatactagctagaaaaaaaactcattttctttcgagtgcagtaaatttaagggtatatttagttagaagaaacaaaatttaatacagacaaaaaaattattgttattattattattcatcttgtcttttggattaatattattgtacgacctacattcacgatgataactctaattttaattataactatatattaataggtaattttttttgaattaatatcatacaatctaattaggacatctccctattagaagcaccactaagattaaaattaaaaaaaa

SEQ ID NO: 207606 - DNA, 700 bp, Cannabis indica
taaccatttttgtttttccaagagggatattgactcttaaataataatatattaactccatttttgtaaatgtacaattgataaacattaaagtatttgaacgtttatattcccttaataattcctttttaataaataaaataataatagtaaagttaattagagtttttgtcccttaaatttttactttcacatgtattaaatcatatcttttaaatttttaaggtcattgaaattctctcataaactattgatattattgtatttaaaggttcgaaagacataatttagtaaatatcaaaatataaggactatgatttagtacataaataattacaaaattaataaaagtgaatgaaattatataaaagttctaaattcaacaatatcaataattgaaaaagaatttaaaaatataatttgatacatgttaaatttagccaataaatttttaattaggctaataataataataataataataaaatccaaagacaaaaaaaggaaaagaaagagtccttatcctgagacacctacacacacatgtagagtgtaaagtgtgaagagaaatataacggctctgattgataggctgtatttaagtgttcataggctgtatttaagtgttccctactccctaccacacacaatcaaatcaaatcaaatcgaagacccttttcttctctcttctctctctctc

SEQ ID NO: 207607 - DNA, 907 bp, Cannabis indica
aacgacacaagatttatagaagtctggccctaaaatcggtaatgacctagtcccttttttgttgtatttttctagagaataataagatcacatgaacctgatctagtgactttcttgctattttagaagattataaatattttgacaacataatagctctcctgagaatacaaaagtcggtccatgaatagtgaatatgatcctttatttatagggaaaaagtgttaaaatttttacatttaatggcagaataaataatttaatatttgattgagtgaatctcacaaaaatcctctaaatcttccttgattctcgcaatccctcaattataggagtgttgattgacctattttagcgagatacttactaatttaccactaatgtgatttaggcttctgatcgttgagtaaattttcattcaggttgaccggcacgcatgaatcaagaatcgaaggtaaaaaaattattcagatgcacatatatgcacatgtttagtatacatgtattatatattgccatgtaaatagtatattagagatagcggtatttgtgtacatagaattgtactaatatatcaatatctaatatgttgggcaatgttgaataatatgtattgatactaccaacaccagtacgactagaattgatgcctttgttattcaaatgcgagattcatggttgcctaggtatcaccctgattgtggtgaagagtattggtgtgatttttcacctgacccaggcatccctaaggttttacaattcagtataattgccaatatccacttggggctctcaagtattcaacccaatctctccaatgtagtaagtgttagtaattccagtctcttgtgtgcccagggtcgaccccgaacccataggggattgtcactcccgatctactgatgga

SEQ ID NO: 207608 - DNA, 937 bp, Cannabis indica
ttggagagaatcaatagattcctattttggataaaaccccgtatttagtaatttcgaaactctttcttctgtattgaggatcatcaaaataagcaagggagattgcctcaatttagtacagctctcgcggcccgcaccgaaatagtgctttattcctagatgtccaacaaacctcatggctgtctctacatccctacctccttttatttactagttatatcatcctcaatgacctgaatctcaagttcatgagcccatgctaaagtttcaatcaattcatgctctgattttttattatttaaatgaacctaaactataccatgggaagtggtttaaaaattaaactcaattttatttttagagatgactaattaagactaagaattttattttgattatgcttgtgatacataatttatcatgtagataatttcttgtcaaaatagctttttgatctctttgattggtattgtttacaagtaatattcaatttataatccatccatgagaagggacctcatgccctttagcacgagattttgagtctggtccgcaattttgattatgattttcctacccctaaagggaaggatccttcctttttggccagttgtcagttgtgggcgaggagagactcaactattccacttagcagaactagaataaaaaatgttagcacgatacggcacaacccatatttttttatggcacgacacaacctattttttaaaaagcacaaataaatactgatcaagttagtacgacccgcacaaacttacagcatctctactctctctttttctggactgcatacatcatatatgatatactgagtgccaattgaattacaaatttaaaaaagaaaatattataaaaacaatggctgaaaacagttcatcaatttgaaacgatagagacacagctaagttttgacctc

SEQ ID NO: 207609 - DNA, 919 bp, Cannabis indica
tttgaagatgtgaacaagtgaagtgattcaaattcagaatctatttctatctatcttttagttcttgctcaaattgcagcagcttctcacgcacaggttgcaaaaattgtttcaaatcttgcttgatttgcatcttgtcttgatgagaaaaatccttttcttcactcaatttcacttccacctgcaaatttttcatcataatagtaaacaaacttgtcctgtttttttggttttgttttcattcatcgaaaaacaccacttcgaaccatatgttttgtaaaagtgattaatcggccactctgtttcgttcaatgacaatttggacctgtactttgcaaaaaagaagataatgatactctgaatttgattttggtcgaactacttttcattctaactctaaaattatgttttcctaaccctaaaacttcctattctattctatttctaacccaaaaaatgtccaaccaaaatccgactcagggtatcattatgttcttttttgcaaattacaggattcaaattgtcgtttaacaaaacagagagatcaataaaagatacaaaataatatttacccttcattcattgattgtctatttagaattgaattcattcattgtgtatttagaattgaatatgatacaatagaatagaatatacctgcaactcatctagctcaccaaatgagaactctgggatttccaaataccctttaattgtttttttctcctcacccacaatccactctcctaattcacattcatgcaaacaaaaatttgatctttcacttaaacaaacataaaaaagaaaatggtttataatgaaaaacaaagacaaagagagtaacataagcaagtcttagtattagtagtacctttaacatttaaggttatctcataagtatagccaacacgtttcttat

SEQ ID NO: 207610 - DNA, 805 bp, Cannabis indica
tatgccgctaaaaataaacatttacaaacttatgctataaacatttgaaatcttaaatatagtgaaattgaatacatacctgaagttcttcaatccttttcagctgggcttcttcacctccatctgacaacggaagtgctgccaccaaagcatcaaactgcacagcaagcatcattatgggatttcattataaaaggaaaaaactatatatactattcttacttatatattatataataccgaggaggaagcacctaattttaaaggaagcaaactattaaccaatctactcattatttcagttcaaaaattcctatctacaaatttatccaaatatttgcagtcatggattgatccacacttttcaatttcacccaaattgagacacatggcataataaccccaacagtatacacatatttcttaaatccctaacaatgattaataaaagaaactccagaaaactcgttctcttctaaaacaaatttctgggtgtgactacaatcataacaacaacacacggactgatgaattgaaaattgttaatgttattccaccgacctgtttagcagccttgacgagagcggcgctcatgagcttgggttggtcttcgaacttggtagcatcgtcaggaggtggaaccggagcaggaggcgggtcagggtaattgggagagagtttgactggagtagcgtccctttgcagtgtcccaaaggtgttgaaggtcaaagcagctatcgaattcacttgttcctgcaactgcgatattatgtccatttctctctctctctctctctctctctct

SEQ ID NO: 207611 - DNA, 506 bp, Cannabis indica
tatatatgaacatgcaacaaatagaaaaggatgttaattagtagttggccaacttgatccacagaaaataataatccattagtctcataaaatttactactaataattagtactatccactttgtactcgattgtaaaatttgtcatttgctcataattattttacttcgaatggatgcatactcggatattacacttgtagagttttgatgatgatgatcaaataccaaagaagcccttagaagaaactaactttatatataagtacgtactttaataaagtcacaggtatatataaatttaaaagtctaaccaagtccatctctatagctttttcttccctcgtgtggaaaatacgtacaagcaattactatatccccaattattttaaaaaaattatactctatatataatatattaaattcatattacgtttaattcacgtataattagttttttttttaattagcttcaattaggtgatttaagtacaatacatgtatgtt

SEQ ID NO: 207612 - DNA, 1205 bp, Cannabis indica
gttaaaataaaatagttccctggtttacattaactgtatcaggtcttgaagaacaactttaactttctctttgtgtctttgcatttttagtttctaagttctgcaacttttccggttaagagaaatggtttttggttgcttgcttttttaagtgtgtattgattatttatcatttgcactatgcagacttaagtctttttattccgtaatcatgtaggctcaagttatgttatctgagatttatccaggtgtctctcccaaaaaaaggttcaacatactgggatcaaattcttgaagtaggtgttatttctgtttcacgaagggtccttaagcgtctaaacgagctcttagataaggtatcaaaatttttatttcctgctgttgaattaaaagctctcataggtcaatgaaaactggcctgactttgatagtgtcatttcactttattattatcttaaaaaatgttcataaaagatcgaggacaaggttggcttgaactccaaggctgggagagagcctacatccaaaatagtaaagccaaagaagatcaagcagatgtctactatttcttgtaattcatagaaagagaggttaatatttaaactgaagatacccaaaggaaaacttgaagccgcctctcagtcacaaatcttttggtttttcaggggtactttgtgagagttgttattcctctctcttcttttggttgtatttctcattttgatgaatatatttgtttcagacaagtgaatatagatttcatagagctctttcctcaaatatgtatatctttctgcaactcatattttaacctccctcttattaattttaagttgatcgtttcatctccttgacacttccatactatccagctccccgattgttttagaaaagcttgttttcttaaatcgccaaacacagccacatttcatctattcaccttttcttggatcccctgtaatttggccaaaaattcccaaccttgaaaatgtttctccttcttatctaaatggcttgttaacattcaaatgtattaagactgaaaatacatcattaattgcttttttctggctatttttttttttgcttgtcgagcaatgaacatttgttctatcactgtcttactgttctacctacattgttttagtagcagataatatttgaacttctattttgatgtttatagtttcagttcttagagttct

SEQ ID NO: 207613 - DNA, 1006 bp, Cannabis indica
aattaattaaatagaaaaaaaaaacaatcaaggcaatatttgttgagacaaatatcaataaccaaattcggttataaatatttatttatttaaataattaactatgatttaattaataggaatttaactactataaatagaaatctgatttgagaaatcaaatgatgattttcataagctaatttttgaaattacctgagaaaaagaaaatagtttgctctctcaaattattcttgctcatgtgttgataatttcaacaagaacacattatacacatatttgtagatccattgagttgtggtacaatgataatcagataatataaattatttcattatgtacgtacctgatttagtaccataaaaaccaacatgggttcgggtttgggtttgggttctgatccggtgtctaggtctgggtccggggtctagttcaaggtccggggcatgtctgggtcctagttcgagtctagggtctgatttgggtcgacgtacggagtttgtaccgaggtaggggtggagctgagtttgtagcgtggtgtggaatactaaagtattattcttttcattaagaaaaaatctaaaaatagttttcagaaaacattagtcaaacacttttaaatttttaaaatgacaaattttttctttctattctagattttaaaatcacaattaattatgaaaattaaaaactaaaaatactgtcaaactgcctctaactatcgatgataacacaaatattaccacaaaaataccatcaccacatctaacatcatctccattgattcgcattgtttggatccaaataaaaatttcaaggttgtcaggatctcacaatgtcgagttctagaagagtgagtcactagagaagaaaatcacctagagtgaaggaggaactaggccgcccaagtaacaattgtccattagtcactaccaagcatccaaccaagggcacgtcggagcccagagatgagtctatgaagcctaatcctagaggaaatctaaaa

SEQ ID NO: 207614 - DNA, 674 bp, Cannabis indica
caatatagagtagaaaaacaaataagtgacataattaaataatagtagagatgaaatgattaaaaagttaaaaaaaaaaaagaaatactaaaaaaaaacaccctacaaatagaaaaaatatgtagagaaattaccatataataccaaatttattatcaaagttatagagaagaaaaaaattaaaattgatatatataaagatattaagtaatttttttttttaaaaaaaaaagtaataaacaatgtctctatagagaagaacaacaaatatgagatatcaaattaaaagaccagtataagaatatatagaaggattaaaacttaaaaattttataaagaactcacaataataaaaatttataaaaaatatatcatagaatgtgagatctgaaatctaaaattaaaaaatctcatcatccaaattccaatatcaaaataatgcaaatatataatgtaggaacgcaaaaaataaagaatgatctttcgatgtatgcatgtatatacacgaacaatttatataaaaaaaaaagggaaatttgatatattatgctaaaaaatagaaaatggtgtttaattataccaagaatttacacataaaaaaaatatgccaattttttaatttccttcctaaattacccctatcctttcactttccccccattctctctctctct

SEQ ID NO: 207615 - DNA, 888 bp, Cannabis indica
agttgttgggagatgagattagatttaatcttggaactttatgtgaggagatgtgtgatactattaactaggatatgtcttgagcactttaaacaacttacttatagtaaatttaggataaatttgtagtacaattatcattatttgttttggtcttcttatttttttttctagtttatatatatatatatgatagtgtatattataattatttataaattaatttttagtattttttaaatggtttatagtataaaaaaataagattcaaataattacttatcacatgtataagaaaatcagtcatacggtgcaataaaatatttcactcgtattattttttgatattgcatattattcatcaaaatttttgaaaatttatagttgttctcaaataattacaatacacacaattataaaaccaaattgaactaaaaaactcttttgaaaaaaaatagagaaatatataccgtaacatctcattattaagtagtgtgtactataaacttaccctaaattttaaacaacattatttaagaataaaacaaatataggaattgatgttttttaaatgtattcaaattaatatatattataataataataataattagaaataagatattttttttttgaagaaaaagagagaaactttattagatgggagttgtgattagagaataagaatgaatggcttgtaattaataaagggaatgggtttcgtgtggaatggagcaaaaataggggaatcactatcataagagagtgtatggcacatggagtcgtagtggcaaaccacatacctctaatcttctacttcttcaatacccattacaatttcaattcttgacattgactttaatagctatatatatatatatatatata

SEQ ID NO: 207616 - DNA, 658 bp, Cannabis indica
catagataagttcacattctacactcttgaaatttcagaagttttcacatgttctaaatatgaagacttacaagcttcatcttcaagttaacacacaaaagtcaagcaacagaccaagtcacaatggaggttgctaactaacctgtccactacagaaaggcccagctccaatgccgatggtaggaattttaagagcagaagtaactgcagccgccactggtgcaggcacacattccaaaaccacggcaaaacatccagcttcctgcaaagtcaatgcggtttccacaatctgcaagaaaaaacccaaagttgaactaaaccagcagaaccaagatttaaaaaaaaaaacggatctttgcttacagtttattaaatccggttttctaaaagtatccttaattcatgctcgcgtgaacctgtatagatggattttattctattttttatttaatgtattattatactcttattatttttaaatgaaatgttcattttttatatatataaaaaaacattaaaaaatcatatcaaaactcaaatgacagacctttacagcactagagacattcctcccttgaggtttaaatcccccaagaacactaatggcctgtggagtaaggccaacatgccccatcacagcaattcctgactcaacaat

SEQ ID NO: 207617 - DNA, 687 bp, Cannabis indica
ttattatgccatgtgaatctctcactagagaagttaagtttcagtaaaccacagtagtcaaccgtgtcacgaaattcatcaatttatacttcaaaactcaaaggacccctaagtttatcagagtgagaaataattttattgaaatcgcccataaccagccaaggagacaaaggagaagtgtctctaagtttacgtaaaagacctaggtgaaatgcctatttgaaatagaaggagcaccatataaacttgagaaatggcatgaaggaccatcagcaaaagccatatgccaatcattaaagttcattccatatttaaggatagttacatttacatgagacttctaaaggaaaagtaaactaccattaagacctactctagggacctcaattccattaggaaaattaaaagcattggaaaatttagtaatagaaccaatactaagtttagactccataataaataaaacatcaagacagttttctaaaatgagaaaatgatgttatcggaatgctcttggatcgctcaagccccgagcattctaggtatgatattcacggtgattggcgaggctgagtagcagcctgcgccaagaagcatcaatattgtctgccactagagaaatattagacagttcagggatggtttcaagttgttgatgctggaatgtatttgtagagtcaatgagtg

SEQ ID NO: 207618 - DNA, 853 bp, Cannabis indica
caaaattttatatttgtaattagtagaaactcgataatttatttaacggcaaaacatactctcaaagttgctaaatttataattcattatttttttgaacaattaacttctattaaatggtgattatctgattaactcaatacttatgaagtggcccaactaagtggtgaaagtatcattgattttgtgattcacattggaatcaagccttaataaagaaaaaaaaacaaaaatagaagaaaggaataaaatataaattgggtctattttcttttttttttacttttggaatagatacgaggggtacatagtagtaaggataaatattgagataattattgtaaaaaaaaaaaattaattaagcatttgaactttttaaaaaggatgatactttaaacctattagataaatcattacttgtgacctcaaaaaagaagtaacatgtttgtgtttcatgcctctataacgtctttatataaaacaagtagtttttgaaattaatttggtaataaacaaaatttaatttattatttattaggacttaatttttgtccttaataaaaaatattattgcatttgtaggagcaaagtgccaaataagacggccattcatagagaaatggcttaaagggatgagttggaggatccgatcaatatcaaaactagtgaagtgtctttgcaaagcaaccatgtcccaagttcggctaagagtaattaaatcagaaactcttaaaatcttacaacggtacagataaaactcaaatatgctggaaattaggatcttgagcacaagagattgaagtaccattaccaattttccaaacaaaaacctttagtgatcagcagatcacga

SEQ ID NO: 207619 - DNA, 1394 bp, Cannabis indica
caatttcagcatgtggaggggtttttacaaaaatcagaccaagacgaatgggcccgatcaataaagtccacacacgatatgagaagtgatacataaagcaagcccaactagaaagcccatggaaggtagagagggtagagtggtaatttaacatacatgtaactctctctctctcatctcaaatctcaaatatatatgcggaactagggtttacactcatcttctccaagaaccctactttcttacagtcagcggcgccaagaggaacaaactgttttaggtacaattctactcttgttttcatcaatccaattcaattcaattgtgttcttccaaagatgtgtactttattgtttgtttagttggtttctgagaaaatctatgtgacctaattaatctgcatctaatttctttcttgtctggatctggttgagtcccatttacatattttaaacaagtacaagatttcgttgatgaaattccaaatgtagaaatggtgattataatttccccatttcctttttttttttttttgctggtttgaatcgcagagttcgttcccaagcaatcgaaaatggtgcagcgtctcacttatcgttctcggcacagctacgccaccaaatcgaaccagcaccgaatcgtcaaaaccccaggtttttattttttcgtagacaagcccatttctttgtcgaaatgtttcatgaatttctgggtgtttctgggttttgcttactctgtacttttccgataatttaggagggaagttggtttaccagaccaccaagaagagagctagcggcccaaaatgccctattactggcaagagaattcagggggtatggtgattttttgtttttcattgttattgaacgaattgctttataatgtaataatacctttttgattgagctttaatatggattcgtttttaggtcatgcatgataatgctaatgtacttatttagtatcaatttgctatagtaggtttcatagctatatatatacgattacaaccactatattgtaagttttgcttaacgaacacatagggtatatttatgttctaggaaccgaaatgaagaatttggaatttgggttttagacttgtgtgtgtttccattgctcgcatttgaattctgtcctaggaactgaaatgatgaatttagaatttgggtcttagattgtgtgtcccattgcttgcatttgatttctgttctaggaagtgaaatgaagaatttggaatttggaatttggaatttggactcgtgcatgtgccatttcttgcatttgacttctgctgttttagctttttggtgtttagtttctgttttattatcatcttattggattgcgacttttcctttacatccacaacttgttaaagtctaatttat

SEQ ID NO: 207620 - DNA, 822 bp, Cannabis indica
tatcattatcaacaactaattatgcacccttttcttaatgactttttatctacttataaactattttgttgcactttactacttgaattttgcaagttttgttacataactccttgcacattgcacaaaataatttgacactttacctcttaaatacaacaccaaatacaaatctagtataacacactctttctctctacaaatatatttataaatttagccaaagaatctagttaatcgagactaaaaatctaaataattaaatattcaaggctcttttgaaaatattgaaaataaaaaaattaatttggataaataattttttttaatattgtgttcagtaaaaattattgattggattttttattttattaaataataattttgaccataacttttttaaaataataaataataatgcacaaaatcaatttgatcaaaataaaatttaataataatttaaattaaaaatattataactaattacaaatcaaactccattcctattcattaataactcccaaaaaaaaatttaaaactattttaaaataaatatgcacataccaaaactcaaataaaacaaaaatactaacagattttgatttttttaattaaatattaaaaaataagaacaaatattggaaataaaaaaaaaagaaaaatctaaaatttatagcagaatagtgtaaactcagttgtttaaatccccagacatgacagaagggagagaagctcaaataggctataaatgagagagaaagagaatccttaaacaaactgatacccacttacctctctcacacacacacgtcttctctctct

SEQ ID NO: 207621 - DNA, 1353 bp, Cannabis indica
cgatttagaggggaaaacatgcatatctaggagattcgagttgacaggcatcccatgtagacatgtcttagctgcaatctggttttgcaaccatgaatctcatacttatgtgcacccttggtaaaaaatagaggctttcaagaaattttatgaacatacagtttacccctgtgccaagccttgacaagtggcctaaaataggttaaaatccaatctttcctccaggtgaaaacattttgctaggcagaccaaagaaaaagcgaagaagagatgatgatgagccaccccctccaaatttcacaaagacaaggagaactggtgcaattatgcattgtagcaaatgcaagcaacctagacacagtaagaggactttcaagaatgatgcagcacctgctccaactcaggtaacacatttttagctacaatttgttatacatatgtcctttggatacttatgtcaataaactaacaatcattgtttttgtttagggcccaaagaataaaggaggcaagccaccaatccaaaatccaaacaaggaaacactcagagaaggataagaaaagaaaaggaaaaaagctaggaaggctaccaactttacatttgtctttgtaggtcattgacttatcaacaacttcaaattacactttgttggtaacaaagttctcaacaccttcagatagcatgaaaacttatctctttaaattttgaatcctccttaatagccaggaatcacatccttcgatcattgacaaatgggtgggttgtaccatatccaaaagccacacccttctacttcatgccacaactaggaataatatgaacagaaggaaaaaaaataagagaaaaggaaataaaaattagggcaaaaaaaactcagatcatggaatgggcatctaatgaaccttcatccaggattcatatttgtccaagatgttatcatctgtgcaactcaagggggacaacattcgcaatagtgaggctctgcaaacattttttaacaggtttgtgatcttcagcttcgacaatgaaggacaaatataggtacataataatttaacctttcattctcttctcttcgacttcgattggtggatgaaaataagtcagagaatttttcctcctttgcaagcccagatcttcgtgactgaataactatagatctaggtttggaggttttaatgtttctcttaattttaatgtgttgtttttttcttttattttcctattttattagtcctattagttacaaaaaaaaactactaattacctttttttttttttaatttcccttacattcattaataattaatgactatggaagcatgagtctacctggcattggatagagtgag

SEQ ID NO: 207622 - DNA, 755 bp, Cannabis indica
aatctaataaaatctttctcttcacttcttcttgtttctgttaatataatttatgtgtatatgaagtgttaataaagtttcttaatcaaacaaaatgcatggacatttagtagattaataaacaccctacatcaaaatgacaataattaatataaattttattagaaaacaaaaacaagttacaattaagaatttatgtatttgtattgtttattgtatatattggcttagttggacagaaatcagcttttatacaaagccagctgatggtttgactttcagccatgactatggaaagaaaatggctaattgtgggtcccaccacgaccacaaccaaaaatcaaaaaccaacctgaatttttttttttttaatttattaaaatttgaaattgtgtgaaagaaaacaaaacccaaaaaataataaaaattaaatctttgattaaaagggaacaacaaaaacaaaggaatcgtttacttatttacatttggttatgaaaagtcaatgtcctttgttatactgttaaggaaggggttagtgggtagagattttagagagagaaagagaaaattagagataaatgtaggggtcaaaagagaggaggagagagagagaaagaaaggagttatctttatctatcatattttatcaaaaatcaaaacttgtatgattttcctttttgtatttaccattgttgaaaagtaagttgaggaaccattgatgagttgggtttttgctttttttctttttttttttt

SEQ ID NO: 207623 - DNA, 1295 bp, Cannabis indica
ggtcaagacacctccatgccaatccaatgaccaatttcacagaaaggttaaagccacaacgtagaaaaactcaaacagtggaataaatctcaatttttgcacctcaaaaatcaggttcaagaggccacttttaacttgaagttcgccgaatgtcatcacccagataatgtcaccgagattgaagatgcgaagaataagttatcggaagcactacttagagaagagattcattggaaacaaaaatcgcgagtccaatggatggccgaaggagataagtgtaccaagttctttatggcttccacgatcgttcggagacgaaggaactttatccaagtattaaacctggacctggggaagattggattagtgaccaggacaagattgcatcttgttttctcagaaagtttgaagagctattcaaaaagaactcaagttgtgatccttccatacttgcctccctattccatcaagagatcacgaacttagacaacaggtggcttaatgctatcccggataaagatgagatctcttctgctcttgcagaaatgggtaaagataaagctccaggtcccgatggcctacccccaagttttttcaatcaccattgggatacgatacatgctgatctgatcgagatggtcatacacttcttcagaacttgtgaactccccaagttcataaacgacacatcctttgtccttgtgccaaagaaagatggccctgctttcaccaatgactatagacccattgcgctatgcaatgtggcctataagatcatctccaagacaattgctaacagattgagaggctttctacctcaaattatatccccgaaccaggccgcgtttgtcaaagggagacatattgctgaaaatacaatgctggccaaggaaattgtgcactctatgaaccgacgaagagggaaagggggctttatgatgatcaagatcgacatggagaaggcctatgacaagttagattgggacttcattgtctcggtgttagctcacttcggctttcctgataagtttattcaatggatcaaagcttgtatttcagtggaagaaatcaagcagctacttaatggggttgcggtgggacaattcaaacctgaaagaggacttagacaaggtgaccccttgtcgccatccctctttattatggcagccgaaaccctctctcgcctcatccttctcaaggagcagcagaggttgatcaagggattcaagatgggtcgaagaggaatttcttaagtcaccttatgttcgctaatgatttagtcctatgggtcaagc

SEQ ID NO: 207624 - DNA, 1062 bp, Cannabis indica
atcataaacaaacatcgtttgacttcaaactactcaaaacaaacgacacaacaacttcatcaagaggacttgaaccagcagaaatgtagccaagtgatctttaatcagttctcactgctactagacccgccaccatgtttggccttatccatctacgaaaaagtttcacaaaatcaaagtcaaaatgagaaaattcatacaaaataaataaattctataatagaatgaagtttgaataagtattatcacctggcgcatttgagtcagtgtgtcatgcaagatcttgtactcttgtttgacctttagaaagattgagagacacctaataacagtaaaatcattagttattagtaaaatttatttataaaactttcaatatttgacagtatatattatgaaggaattcaatatattcgttactatataaatttggaaaatattagtaataagagaaggttaatatttactcttctttgcttttatgattacaagcttggtggaactcctgacaagcaagggcaacacggcaacctccaatgctacagttccaaaacagttaaaaattagtaaatataatctattatattataataaataccatcaattatagaaagaggatggagaagttttggtacactaagggtgcatttgttttttttttaacattcagacccttgaatctggatgcacgtctgaataataagatatcacttctaaatctgaatattaaaatatttaaactatttgttttcttacctctgaatgtattttttagtgtgttttaataatatttttaattgtataatattaataaatttattaaagtatatattattttaaaatattttcaattattaaagtatagaatataatttatttaaatttaaaactaataatatgtgatagtatgaaattatttttttttttttttttatttaaaagatgactattatcattttattactattatagctattaaattaataaataaaaaaagttagaaaaaaagaacattcttataattctataaatttacacatacattataatattaaaagtcat

SEQ ID NO: 207625 - DNA, 1599 bp, Cannabis indica
ttttaattattttttgggggtgtggcagctttttcattaagcattatacatgtattgttgaaatcgtaaggtattattttgtcttttacagtttttggatttttacttttataaactccctctacacgagaatcagaatctgtcagtttcattactactcttttttattttattactatttattatttatttttcaaacaccaaatgcaaataatttgtatagttgatattggaaaataatattacatataattataaaaagaaaataataataataataataatattaggtcgaccggcaaggcaaacaaacactcctgaaaaaacaagaataattatctatatctctgctagagaatattaataatgatgagtatatatataaagtgataataataatttaaatatttatgtttttttttttgttttatgtgttatagtacttatacatatttacaaactaatacttatttaatagtgttgtaattaaaaaaattatgacattaagtgttggtttggtacgccgaattatattatattgtattgtgtttgattgtattatattagtattatttaatacagtactatgtttggtattgatttgtattaataaatattgtgtaaagttataatatattttcaatacacttgacctcaacactaactacaggtccgggttcgcgtctgagtcctgggtcttgggtcccaggtctggggtctggggtattgtggatattgtcccactcattagcaattggttttgagatggaaccccatgattctcaacatgacatcagagccatatcccatgcgggcaagtgatcatatcagattcgcacctataaagatagtgaccatgtccactctgatacggttcaagattggtgagcaaaaaatagccaccatcttgagggggaatattgtggacattgtcccacataaaataaatggtagagaattatataagaacatgggctactccactcattaccaattggttttgaaatagaaccccatgattctcagtacacggggtcgggtccggggtatatgggtcccaagtcccgggttcgagtctaggtatggatccgagtctgggttcgggtccgggtcccaggtccgagttcacggtccaagtcttagttcgggtcccaggtccggatctggatccgggtctgggtccaggtccgagttcggggtccgggtcttagtttgggtcccagcacttgggttcgggtcggagattgtgttgaccccaaatcttttgcaaatattataatacaagctaatacagactatttgttatatgtattaaataatacaacatacattgtatttaaaattttagttgtaataattaatacaatacattgttttatccaaacataatgttatttattacttaatatacaatacagcttttatacggtgtaccaaacgaggcctaataaaataaatattctattgtcgattatggttttagaaagattgtttaaacaacatatagagtaattaaaaaagttatcattatgtgatattaaaaacataatttttctatcctatatttgatttatgatcaaagagaacaaatgcatcttt

SEQ ID NO: 207626 - DNA, 685 bp, Cannabis indica
tgtgaaaaggtctttcttatcttatcctgcgtgtgtagggacggagccacaaccatagcaagagtggtcatgacctcctaataaaattaatgacgaataacacataaaacataaatagtctctaataacacataatctaaagtatatattataaaatataaattaattatttagaaagaattaacactttaaattaaatttatacatttagaaggtaaataaaataaaataaaatagtggcttattaattatttattttctattacttaaattaatattttctttaattgtttatcaataatttattattattactacaaataagtatatttttctaagtaccacctattacttgttatatttcttatacattttgcttaaaataatttaattatagaagttaactgagatttgtctcctttaagtgagtattaatagaaatagaaatattttattcatatatattttctttgcttcataaaatatttaataaattttacaatttatttttcgcgtgctaactttatcaacatttacaatatgattgatacaatttttttaaaaaatttaacatttccttttaaatatttttttaattttttaacatgttatgaaatttttgtttaatactaaaatttgaaaatttagccccctttacatttaatttgttacatgaaaagttata

SEQ ID NO: 207627 - DNA, 972 bp, Cannabis indica
ataaaaaaaaaattaagttggtctaccgagattggcaaggcacaaaggattctaaattttaatatcatatgtaagaatgacaacaaagtcaaaagatgatttagtgttaaaaaaatatagtcggtatactttatgtcaaattttgcaccaactataaatttgtcacaataggttttttgtgttctataataaaacataggcttactcaaattcacctcaacacaaaataataacaattaatttgtcaatttaagcattagctatgtggattgattttgacagaaatctaacaaaaagaagtttaaaaagtgaagtaatgatcagataatacctacctgctattattgctgcacatctctataaatgaaagaaaacaaaatgtaaatcaaaataaaagttgagtggtattttttttatttttttgcttaactttctttttttcttaacatacacaaaatttaatatttaattaaattaataatttataataatatgcattttatggtagtgttagataatacttttgtgaatttatttttatcttttataaaagaagattactattaggtattatttatggtggttagtacttgtagacttatatagagcccggaaaaaaattaggaataaagtgcacaaaaatgatagttttgtattttaattagttataagatatttataattaaaggtgtaatatattatataatattaattttgatttaataattaattacctattataatatttatttttcttgtaaaagtgatgtaataattatattgtaataacgattacattatataagaaaatctaatttatttttttttttaatttaagcatttatatattacaacaataaataatttgcaactcgaactcaaaatctacaccaacacacattcttatagccacctgaactagaggctcaagtagttaaaaaaaagttaggtaaagagtattacataactaaa

SEQ ID NO: 207628 - DNA, 1228 bp, Cannabis indica
gtctgatagtaagagagctgcctgttatatatatagtattaaattcatacaaggttagcttttcaggtatatatgtatcacttttattccgaataatttttagcacgtaaataaaattatatctatgtttttataatatgaccgtacatatgtttgctgttatatcatgctttctactaataataaattactttagactattctcataaattaaactaattattaaaaaaaaatatactcctaatttataattttagtcaaataaattttaaaaagagttaaataactttattttattcagttttcatttatttatttagtttattttttctaaaaactcttaaatatataattaaaatgtataaaaattttaaattatttaaacttttttcctgaagaatctaattatcatctcaggaacagaagaaaaacctctagaacatgatcataaacacagaccgcctaatttaccagaatccttcgcttgggtttatcaaaattagcaaactatcatcttagataagttatacttatatatttaattaattatttattagttttaaaatagaaactaaataaataaattaaaattttgagaaaaaatataaaattaggaattctagtatttttaaaagtatatttcactcctttattcaaaaaaaaaaaatgtatatgtcactccttataaaaaataaaattaaacatgactaaaattataattaggagacattttttactatttaaatgattagatggtccttttaagtatttatgataacaagggatccaaattagtctttagcaaaattacagggaattaaaacggtattaattaaagttcaaataatttactttgttaaaaaagagtccaaacaaatatttagttttacatgtataaagcagaatattttgaattctaactttggtcacgtcaaaaaaaacaaattctaactttgacactctaaattattattattattattattattattattattattattattattattgaaattggtgccatcatattgtaacaacactatcttactaagaaataggtggtgaccaaaaaattaaaaaaaaaaaaaaaactaccctataagcaaaaggcaacgcaactatataggttagcttaaattatatgagtataaatgtaaaagaagaccttcatagcttcggcagtacagtcagagacaggccaaccattgtcaggagttgagaaggt

SEQ ID NO: 207629 - DNA, 672 bp, Cannabis indica
attgtagaaccctctgctatacccaacactaccgtgaggtctaattttatggctttcaatcaacgtttactttttttttttaaaaaaatatgtatagaaaacttgatgataaaagtatatatagaacatttttttttagaaaaaagtatatatatatagagaatattattaaatgtttagttctatacacgttgcctctatgtgagtattatatatataaatataggtagtcttcaacactgaatatgcgcatagctaacttatttcaaatttagaaagactttgagatatatataaatataacagcaatgaatccagaaggatatcatttcagtcatccacatcatacattttatcaaataagggattatcaatatgcaccatattgggcttgcggcttgtgcaatcaattactcacacgggaagataagggttacgaatgcagttggtgtccgtatcgtatgcataaagaatgtggtgagttgccggagcacatgaacaaccacaccttgcacgatcaacaccccctcacccttcgaaaaattcacaacaacaacatcagtagttcatgttgcttttactgtgacaaacccttcggagatgaatatgcttacagctgccaggagtgtgatttctacatgcatatcaaatgtgcttcaatcccattgccca

SEQ ID NO: 207630 - DNA, 525 bp, Cannabis indica
atgtgtataagaaaaaatagtcgcttgtataataaaatatataaattcaatttttggtattgtaaactgctcagaattttctaaaaatttacaaatagtcttaaataattataacatacacgatcatgaaaaaaaaaaattatactaaaaaatttttcgtaaaaaaatactcttttgaaagggtgtactgtagatttatccaatattatatacatacaaaaattctttggtttccaaaaataataggtgtatggtgtactttttctttgtttttatagcttagatgattataattttcatgttatttacaagtcttcaaaataaactatttgatttttttttttttggatacattaaaggggaattttatatatattattttttaatttttttttaaaatttaccatttgagttatttcaatagttgctctagtagtttctatgtaaattgatatgtgaatttttattacaatttaaattgttccgctagttgttatgtaaatttttatgtgaattttcataaat

SEQ ID NO: 207631 - DNA, 744 bp, Cannabis indica
tatgagaaacacatgagtgagttgggactgtttcatgatcatcatcgatctcttaatattgatttgtattattaattacacttagttattaattggttcgatcgtcacaatatatatactggtatataaagttatagttatatagttttgaggagtaagaaagaggagaattatataaggagtgtgtagagggagagattgaagagatgaggttagagtaatggacgtatgtaatatgttatatatctatatatatagaaagaccaagcatgaggcatgcttagtttataaatactaatatgcccctcatgcctcattataagcatcataattattcataatataaaataaatattttatttatgaaaaaattgttgggtaataattgtttttagttaaagcactctcatcagtttttgttaattttatctgaaacttttatataattacattcaccacaaaaaatatatatatttagtgataattttttagttacaacataaaattttgtgactaaatgtgatttttagtcacaacaaaaaattacttatgactaaaatatagtatttagatacaaatttatcactaatttagttttagtcacaacaagtactgtgacttaaaatatatttagtcacaacaaattatgagttttgtgactaatatatttagccacggattttttagtcacaacataagaattattacttataattagtcataatctttttatttttaattaca

SEQ ID NO: 207632 - DNA, 742 bp, Cannabis indica
accaaataataaggcgattcatactaaagcagtaacactagatataaagcctaatatttcagtcacctaggcagtgaatcccaactaaaccaccaaacacatcaatattacccagggaaaaattaaagggaaatagtgtctcatcttgatataataagccatctagttatataatttcaaaccaaataaaaacagatcagatttagagcatagcaagcaaaacttcctatgattataacatattgatattccatggtggagttgacaaaaaccacaaaagctaacagagaaagaaattcctggacaaaaaagactcacttaggacccctatgatcttcattcttcgtcttcttcatctccatctccacctgaagccttcttggcagctgccttttggttctttcgcttcacacggccagggcgaccacctccgaagggacttgtgagggagaaatcaatgtgcttctgagagtcaaccctcaccatgaatgaggggatgttgactacctgccttccaactctgagaaaaaacaatgctaactaatttacatatgtgcacataacgataaaaacaaattaagtaatacaggtgtgaaaccaaccaattgggacacaagtaattaaagttactcattgaaaataaaatttcacaaagcattctagtgagatgaaatcaaacaatagagaatgctgtgacataaaggcactaaatacacaaacgctaagtcatccacacaatgaa

SEQ ID NO: 207633 - DNA, 684 bp, Cannabis indica
atcatacatataatcagtggcaattcaagatttaagttgaggggcgacactttctttttaagtaagagggcatcttttttttcatatatatatcacgttaacaattcatacaaatttatattttagtattaaatatagtataaaatataaaaataacaataaaactattatcattattattattataccaaaatttattttattagaattagaactaataacctctattataatattacttttatttataaatatatattgtaactcataacctctattatatatatatatgttgtacgttcgtccctgcatataataatgcttctgaaatttgaaccatttgtaattagtacttgtgatttttataatagagatgctaatttttaccacttatacagtgattgcatatactatttactaattaatggttttctttcttttccaatttgaatgtaaaatttttttttgagtgtagcgtaatggtattttacaaccagttaatagcttaatagtttcaagattctaaatttaaacccatgactctccctttttttcattcctccttcaccactaagctagccttagtagcttcaactgagattaagatcatcactataaataaaggcttaaggatgatttgatggccatgttattatggaactatggaagttgagacttagataa

SEQ ID NO: 207634 - DNA, 995 bp, Cannabis indica
atagtcaggtagctacaaaaattctaaaattataatttaagtattattaccgcaaaaaattaaacttaactatttatttataatcgggaattaaactcaaacatcaatatcacaaattactcataaaaatatcatagttggcaagaagaaatcatatctgttcttctaaaaaatatcgcgatgttttttttttctttattccctcgaaatatcaagtatattattaactataaagaaaccaagaaattatggctctagacattagcacatgggatcagggaatgaaaatagaccaacaagtacaagtaaaagatgcataagatacaactacaactccattagcaagtgccaagtggcattaatgcaaagcaaatcaagaaaattagaggtagcaaataggagtgtaaataggtcgcatcgaatctgatccgacctgatccagatcatgtaaggatctgtcccgctcgccccgttagatcagatactcaaatcgaattagattcgacccaacttattcggatcagatcagatctgacccgactcttttttttttcttttttttttaaagaattttaatattaacttataattttatattagtattattaaatacaatattatatttagtattgacacgaaaattaaatacttttcaaaataagtcttgacacaaaataaaaaaaagtcaaacacaacaaaactgcttaatacgaatttaacacatttttttttaataaaaaataaaacattattaataataatataattatgtaaaaagtatatatggaacctaaattaattatttcttctacaattttaataacaaaacgagccaaaatatatatttattagcaacaaaaaaaaataaaataaaaatattagtggtaaaactactttaattttatatttttttaatacttaactacaaaaaataattttttaacagtaacatctactatgtgtacacgtgacaaaattttaataatcgccgtaaa

SEQ ID NO: 207635 - DNA, 901 bp, Cannabis indica
ttattttataaaatgttactaatcagtaatttttaggatacttaagggtgtcttagattaagattttgttattaaaatacaatcacaattctttaaaatatccacttattaaagactcctgtcattagttttataatctagcctagacataattactggttaagcttagagcaatacaacggacaatattaataaactccaagtgaggactgttatgtataagggatcattaatattaaatcgccatcatgaactgttatgtatgttaatataagggttaacttctaattatcattaagttcattcgaattaagctagcaactcaaattttatgctggaagaaaataaaggaaacattaataaaacataaaatccacatttaataatagagaaagatcttcattcaatcaaaagaataggacagaacataacatgacacataatggggaataagctaaagacacaataatagtgaaacacacctaactcctaaacaacccaatggaacataataggaagctagactcataagaaaaacaaatccctatattctagacacaaaatggcaacagaacaacatcgaactacttcttagatttcttaacgagataaatatcttcagtcgcagccttagcccttttgctccctccaccttgaagggaagccatagcagttgtgatcttagtatcctccagctgaatcgcctttcctttatcagatttagtgggaaggctcatcacattagaggagaaactcatagcatgagaactactcggtgaattttctatcacatgaggggatagagtggaggagccattagctaataacggtgctagagaggtagcatatcctgattcaaccaaatcaccattgtcatgagctttctccttccctttaggag

SEQ ID NO: 207636 - DNA, 2015 bp, Cannabis indica
acagatgccctcttagttgctaatgctttgcaatttggatctactgcagtttcttcatatcatgatattttactagatgttactagtcttctttcctttttcccacaagtgaatgttgtacatgctaaacgctcagccaatatggttgctcacagcttagctaaattcgctttaggggtggaagagacttgcttttggttggaggatttacctcaacctttttactctgttgttgtaaatgacattactgtttaatttataatgacaagtaacttttcctacaaaaaaaaaaaaaaaacgaaagaggaatttcctcacaccatgaacaattaagactaaatttggctaacaagtaagccgcatcgagatctataaatatgagagatctgaactttaaaaaaattgaatgctacaagaaaaatgttgtttaacaagcaataaaaatctgaaatatgtgatttagtagaatgcaatgctttgactaccaacagcgaatcgaattcaatatagtgcactagtatttgaaggtctttaatccattgcaaactgtgcataagggccaatacttgcttcacttctggtttaaagcaaccttgagaagatataaccatagcagctacgatttctccttaaactattacgaaggacaactccaaaactagacttgttagttaatgagcacacaaatgcatatgtgtttaacttcagacgtcctgtaaggaggtttaaccagtccatatgttgcatcaatgaccgtggagaagaagcttgagatggatttgtgtacatatggttttaaaattaaataagtgttgtcggaggaatttagacaacaccagttttgtgcgagtattcaagggttacttggataccaaaaaatagatatgcgagtactcacttagaatagcgagtactcaaagaatatagtgtataatatatgcgagtattgtaaatagtataaaatagacacagaaaaatatagtggttcagcaggagcttcgggcttggcctgcctaatccactgttgaaaagagtactctagctctgtttctttattcagatcagccccctttgaatggagggggaagcccctacttataggtagtaggcatcggttacaaataatggccataatgagaccgttacaaaataataacaataatatgcttattaatcaaattaattacaacggttataaatatatgtaacgtttgtcatgaatgctccttgaatgtttgactgttgacttccgttgattggtgtatgtatttgcgccttttcctattgatactgcgagttcaccaaatatgcgatatatgtctttcttaatatagcaaggtctctttaagttaatattgtgagatcctttctttcggtactgcgagtattataatattacgagccaccttcaatacagcgagttttctatagacaagtctttctcgcggggagggtaaatttatgcctatagcaataaggttattctttctttttattattattattattatttttttcattctagatagctaagctgtaatggccggtttgatccggtaggcacgacatgtattttaaaagggaattttaaataaatatacattaaatttaaaataattataaaaatgtttcaaaaaaaaaataaatattaaaaaatatcgtgtcacataagcatatatacttaattatacaagaaaaaaattaagaaaaaaaaataaatttctaatatttttttctaagtattattttacagtaaaccttttagttattaataatattaataatattactaatatactaattaattatttttttaattataaaaaaagttagttttaaataaatacgtatattgaatacttatatatacataatctaatataattaaaatataatatttttgtaagaaaaaaatataaaataaattatttagaataattttctaaaaaaaaaaattaaataatttaaataatgaaaagttaaaaaggttaactattaagtatataacatattaa

SEQ ID NO: 207637 - DNA, 1138 bp, Cannabis indica
catctcttagactcttaccaacagagaaccgtccacatagatatagaagtccaaaacaacacagtaaacatcattggactatgctatttcgcatatttgaaactaaaatgcgttctttccaatatcattttctgatccattccattaataattcatcacataatgacaagttcatactaaggtcttcggatagtaactaataagtgaaacctatgggtgcaagcttctccaaaggctcgtggcacttaaaacattttaaacccactcatgtattgaagcacatgtatgcaggggaatctttaagaaaatgacaattgaacaccaaatacatggtgatacgttggctcacagcatattaagaaatgaagaaaaagaatatggaacaaaccatatatagtacaagccatccaattcctgtgtctgtatcctacccagtagctcaatttgcaaatatccaccaatgcaaagtactggttttggaagcttgaacatctgtaagctatttttctgtaaatgtgtggataggaataaaaaaaaaacaaattaaacaggctaaacttatgataccaaaaaaaaatcacagctgcataaaaatgacaaggcaaaaaaaaaaatctgtattgtctaattcgcagctacatttagacaggtgttcattatcttctaaaattgtagaactgtattgacaaggccaaaaaaaaaaaagcagctacataaaaatgatccagcagctagtttcatgttcaaaaggacaaaggacacaaaaataatgacctacttgtacaccaaaataaaaaaaaaaatcaactgttcatcagagaaaatttccaaacaatgcacgttgtcattctcctgctgctttatttttattttttttgtagcgttttgttcattcagtcattctaatgggaatggtgaaaacatgtaataagaatagtaacgggaatggtattataaattttggcttatttttggaatggtattataaaagtttggtttatttttggaatggcaatggtgatcaatggtctatgtacataaatatccttactaaagtataagcagtggcggaagttttgaacttttgataaattactcttatatagaaatttctaaataatttcagtttggtccccat

SEQ ID NO: 207638 - DNA, 534 bp, Cannabis indica
aaattgtggccttcttttcataagtaactcagtgaagtgtctcttctgcctgtataattggaaccttgcacatctttgtatgtgctgttaatattactttcagttttgtttgacatgtacaatgttgtttaaggcgagctgatttatttatcattgcatcattgcattgtttgtttgttttgaagtgtattttacgtttaatgaaatgttgttgaaggactgtatgcattatgtaatgtctgaggaagaagttttactttattgttttccgtagaagaattaaagcctgataaattataatgattccatatatttaactaaagacagaaactcacaattaagttggttacaggaatgggaatagttgaacctctatcaatcaaaacacacatgtatgaatctattatgtctaatttgtgaagactagagaaccccttctattccttgattatactgctgccaaaggacttgtaatatttagctacagtaaagtttattacattgatcacgagttgtggatttctgtccaattat

SEQ ID NO: 207639 - DNA, 707 bp, Cannabis indica
aattggttttgagatgaaatctcattcatcttattcccaaattctaacacatctttctacaaaagaaaacatgatgaacatgtttcacttcaatttattaaaataaatttatttacttgtagtgcattgaagtaatagtgtaaaatttgggccaatgataatttataatcttttagaaatggtctaaccatttagatttttgtttttatttttttttataaagtttgttgtttttgtattattttaaatatcatgtgatctgtaaatgtatttatggtgtctaatattaaaaaaatatatattaaaattattcatataaagattattattttattagaatttaactaaaatgactttatatatagctatttgagtggggcgtgttggtcgatgcttaacagatcaagtaaattaacaccaaagccccatcgacgatttcaactgctctcaagtggtgctatcaagaaaatatttacattttgtcttttaaaagtggttgtttgaacgttattttatacgttaagcttcatcaaaattgttcagtagatgacattattgctcgaaattcttatgcattttttgccaaattgattcatatcattttattatcagtgagaataataaggtggctcattctttgacaaaacttaatctattagataattatattttcatttcaccataaatattcttaatcattgtattat

SEQ ID NO: 207640 - DNA, 1596 bp, Cannabis indica
ctatttcacacgcgtataaaataaaaaaatcacgcgtgcaactgactctttgaattctatttttcgtttgttaaatttttttaaatttctcaaaatttgttaggatgacttaaataactacaacgtatacgatcataaaaaaatttatactaagaaatagataagagtgcatcggtacattgtaaaatttttcaaaaatttataactaaaagcttaggatttttttttttaaaaaaagaaaaaaactggtaacggaattgtggtcttaatgtatatggtttgtttttatttaaatggtccaattttaaactatacgaaaaatataagtttgaacacaacatagtacgatttaaattagtacgacacgacacaaataatattaatttaagcatgatacgacacgacacgcaaaatatgagctttaacacaacatgcagtgatgaagttagaacattattttaggtagggtgattaatatttaccctaaattaacaaaaaaaaatatatttaaatgtatatttttttaaatagttctattgaaatatgataaatttttgtgggatacatgtatatattactttggagatatatgaactatactctcgtaaagagtgtttcgaaagatctctatctgtttgcatttaaaagagttttatattctatgttttcgcgtatattgtagctatttagaattacctgtaaatattcataaaattaataaatagtttgcaatataaaaaataaagtttaaatatttgctaactacgcgtataagaaaaaataattatacctgcaacaaaatatttggactttatattcggcactgaaaactattcgaaatttgtaggtgatcttaaataactacaacatacacattcatgaagaaaaaaaaaatagactaaaaaagctctcttaaatgctgaaatagatccgtatttaccgaaaccgcaatttaagtggtttactataaacttactctatataggatatacattttgtaagtgtttaaaaagtaccccatctcaaccttcctaacttcgtccttaacgacacgacacgacatgataagattgaaaggtatgatacgtaaatacgaataatttattttaaaagcactaccatattaaaaatcttatatatgataatagtaataataataatttaaatatttattagtaaataatcaaattttaatagttgtaatgaattttttttatataatttgatgtgtaaaattattgaaaaattatataaaaataattgaaattctaaaaagatagataacattagtaattgtctcattaattgtgaaaataaaatgtataaaagtaaaatacgaatttaagttggtataagaaaacgagtcggtctaagtaaaacataatacaaatttaaacatgggccgtattttttttatagtacaacacggtatgatttatatatttattacaatataatactatataatatgatcaatactttttttatagtacaacatgacaccatcagtatttttttattatctttttatagcactacattactatatgatatctaattttgtattttttttggggaagaaacatgttcctattg

SEQ ID NO: 207641 - DNA, 1072 bp, Cannabis indica
cattaacaccctaattagaaattgcattaataccctaattaaaaattacattaacaccttaactagaaatatagccactcattgtcattgtgaacaattgaattaaactaactagacacatgaaataacttgtcaataaacaatggtggtatatctccagtcgctttttgcctctaatttcgtatcctaaaagtctcaaaattcaaaagctcccctctctctttgaaattagggtttaaaaaccctcataagtgcctaatccccttagcaggcagtggcattggtaaagggatgtcgcggaccgtgtattctaattaatttttttaaggttgtcaacaatattttttgatgtctaattaatttacatattcaattagtgttcttttgtagttgtatttttgttgtatatttaattaatttttctcgcaaaattgcagtaaactgataaaataactacataattcaaacgatagatacaactacattattaatatgcaacaacacacgtacaactatattatcaagtaaaaaagctctactcactattaaaaataaagtatgatagaagtctcatgctttacatgcaatcaaaaatcaatattttgtagtaacattgtttgttgctttatagttgttgtaaagttgtaatcacgttgtttgattttattaattttttaaacacgttgctttcatgttgtttatatgttgaatttcagtaattaaaatttgtagaattcttaaattttatgtactcttgttttcatgtttttatatagttgttaaatattataacaaaaaattactaaagtttatgatcaagtattagtttaattgtaatagttaatgtttgtttatattttttgccttcaatatatatatttatatagattgaaaaaaatacaatagttacgtaatagttaaaatttaagaaatttttaaatttcaacaactaaaatttaacgtaaaaacaacacaaagccaacatattttcaaaataaatgaaagcatacaacgtgtttacaactctacaacaactactatttttttttatactaattttcaactgcctgta

SEQ ID NO: 207642 - DNA, 502 bp, Cannabis indica
aatttaacataataacttttagagagatcgctaaccaatcataagacgacatgttaagaagtattagacactattgatgtccaataaaaatgcttaaactaggaaatagatagattgtcaattttctttataattcaaatatcactttttcaacacccgcgtgcacacaagagacaactactttttaccctttttaatataattaaaaaatatatattatacagtctttcaatatatatgatagaaagtttttttagtttgtttttgaaaggaacaaagttttttagttatttggctatcatttttgttcttaatgtaaaaactattttttgtattttccatacgtagagatattattttacttttatagtgatagtgggtatattgttaacttttagaaaatttaaaataattaattgcacaaacataaaataaaatagacatgcctaacactaactatttaaattctaattttgataaggtaacttataggggggatttt

SEQ ID NO: 207643 - DNA, 1129 bp, Cannabis indica
ataagtcaatatgtaatgcataatcggaaaggaaaaaaaaaaaaatatctatattgttgtgttgtcatatttatagcatgatttcatatttttctttgattcattaaatttcaaaaaataaatcaaaatgtagtatataattacaggagaaatacaatctctatgtaattgtgttgtcaaaattattttccaaatactatatttaattgaaagtagtacaataaaaaaaggattttggttggtgtccttcatttggattaatggctctgtcactaaattttgcatacacatgcttattattattatagcttggttattaacttattgtaaagtttaattattttttggttaaaaaaaaaaaaaaaacttttaaggtaacatttggtatcagtaagatgtgaaaaatcaactgaatttttgtgcccacatcattgccaacaagttttgggaaaatttggattggtttggatattattcattcatttagtttctatttttgaataaagtaatttgttggaactttgtatgaaatatgtaaaaatagaaaagtgaagtgtgtgagtaggagtcccacatgggatagaaacactacattttaagtgtatatctagtgcaagtttgagatatgggtttgggccccaaggggtacccagttttgcgcgcatgggtgaggactcacacactggaccaccacacacgcgcgcgcgccgccgccgtccgaccgagccgggttggcgggtgaggtgtcactttattttttgaagaaaaattatttaattaaataaagatttatttttatttatttatttattaattaatttttaacacgtgatcagaagaggtaaaacgcgatcagtcaatgatccgccttttcctcccacgatccaactcctcccacgataatattaccgttttcttaccgttttttttcttcgatcgacttctatataagtcgtatcagaacaacgtaagaacacatcttttctacattaaaaaaaatttcttttctttctttacgatttttctgagagcaaacagtagggtgttacagagcgatacagttcggtgcagaacgtatcgtacttatacagaggctgtttatcctggggacgccgtggttgctagactg

SEQ ID NO: 207644 - DNA, 1289 bp, Cannabis indica
gtaaaaaaaaaaacatttgtagggatacaagtttcttttttttagcaaaattagatagttgatcaactaagactgccactccaaccaagaagaaagaaggacaaaaaaaattgttttgaagcttcttctacggcatcatcacttttggattcggtaaatttttgacaacaatttctgaattaaggggtgttcgcagtgcaaaaatagtgcaggttgtaactttttttcaaattaaaaccaaaccgcatatgcagtttttgtaatttctcaaaccgcaaccacactgcaagattttttttttttttttttgagaaaaagacaatttattaaaataaatctgtttatagagaagaattcaaaaaacgtagacaatcatctatccaaatataatctcctaaactaataacatatgttgttagtgtgtaggcaacacacagaatagtgctgcaagaactaccatcaacaatagctaataaagaatagacatctaataaaatagaacactaaaattcatgtgaaacttattaatccaaccaattgtcattgtaggatcactattaataatagagatattgaaaccatattgatgcacaagagacaggcctaaacgaatagcaagcaactccaccacattaaaagataaatcacctaacacaccagatgaccacccacctaaaccacacccgtaggtcgatttacaactgggtttgcaaggcccaaccataatcgaggcacagcaaatacatatcaataattcaatcatattcgaggcactaacaattataattgtttcttttctaaccacttagcggtgcttaaaaacttttcttacctcagtctagaaatcacgcgtgcgggtcaacctgagtggaaacaaggcttgacgatcttgagtctgtcctatgtcacgataataaaattcgataaatactttaaaccaaaactccgagaacaattcctaattcccataaccagacaaatcctaacttccattagctccaaaatatgctaaacaattcacaaataccctaaactaggtccccaaaacaccccgagcaaaaatcaaattcaagaagaaaaccctaggatctcccctgcagacccaccggtcgatcggttctacaataccagaaccaaccggtcgactggttctagctggcagaaaattctaagttttcaccccaaaatcaaaccaaaaccttaccaaacctgtccaacagctccagaacagtttgttaacataaaaaaaaggtatccaactcatcgattcacaacaattcatcaaattt

SEQ ID NO: 207645 - DNA, 1280 bp, Cannabis indica
tcacttcttattttagctaaagaatatatttagaaaacacggttaaagatgttattagttattttaaacctaataaagccatcatccgactaattagacttacacttattacattaatcaacattcaatataaaattatggattctaatataaataaatgtagttactagttggtataaaaaattgtcacattacactacgagggtgttcggtatggtctaaaaactgttatagtaaaacagagaatataattatttataaatggataatatttagttagattacggttaattaaactatattgtattttggattcaacatttttaaaaggatttaagatcttattattaaataataatttctctacatttgaaataataaaaataccaaagagaatatgaaagattaaccattctaatgaaaatattatatcgtattcagaaagagaaatgctaaaaggtactcatagtgccaagtatttttatgaggtgtaatattactattagtgcaactcaatattaggtctcacttgttttattttaataaatattaaaaaaaaatcgctaatcaattttaaatcgacatttcatcgtaatattagataccataggtgtctcataacaatatttatttagaaatgacagaaaaaaaaaaatattatttttgttcctactactaacaagccaaacacatatttttgtgtatttccctaagaaaatgatttataacaatatctaaagttttgagtttataaatggcataaactcaataatttttttagcgctataagtacaatatttgtaaaattatgtatatatattttttaattttgtcagtacacaccctgttattatttcaaacaagacacatataagacttagattctacatcattgagtttggacggaattgtatagataaattcaaaatgaagtctgtattgatactgaataaaaattacagttttataaatattgggtacttatgctgctaaaaaaatattaggtttatgccgcttagaccatctccaaagaaagatgtaaaaattatgttatttttgacacaaaaaggattgcctttactgacatccttccttgcttaggtcaagaatttgaaatccaccatagcctctcttgaaatggattaaatgcttggtctttttgaaggttagcttgatgtaggtggtgtcatttgtgtgatgggaatccttgaaatgtaccgatgaccattaagcaaactgagtaaagccccaatagcttacacatggtccccaggattgtc

SEQ ID NO: 207646 - DNA, 1039 bp, Cannabis indica
gcactgacggttgaggagtgcagcatgcgtgacgtcttgtcctttgtaatgagtacttgaacttacactttttgggggaaaactcaaatttcaaattactttactcttttaggtgcttataaaaggggtttaatccttcgtgggaacctttttagccattttcattctaaaagaatcagaccaaaaaaattcttcatatttgtcgctcagatcttcgaagaaggttgctgggaaatccattgacgctaccctcttagcagatcaataaagctatgaatagcgagtaagttacttttccctttactttatggaattgcgatttaatgtacgaattattttttgggtttcttgccacaactttatctattcttgaactgttctgactgatcgtagaatagatgatattagggcttgtaactttaacaaacatttaattataacttctaattcttgactacgtatcgatttttacgtaatcattgatttccactcgttcatgagactctaaagattttcaggtacctctcaaagttttgaacttctaggtttgggaattccatttttgaatgaaaccctttctttttatcctgaatctgatctgatctaaaatttgtttttcatcgatctttcactccgtcaaactctcagtttcccgtctcccatcttttgtagatgaaccctagtaatttttggagaggcagacaccatattgaccaagacttactacaaattttatatgaagatcatcatcggctctgtgcaagttcatcatcatccaacgatgatctgtcaaactctagttttgaagcctggggagataagtagttaacaacgctatccctagagcccgaggtgcaacatcactggtaccccaacctaatatgtggagaaggatacaaacgcttcatctgagagttaaagaaaggttagaggtgttatttgcctactttttggacgtacagagtctagcccagtattgttgacactctgcgtaaaggtcgtgcaaccatatcttctaagggaactgtcgttgctgagt

SEQ ID NO: 207647 - DNA, 1308 bp, Cannabis indica
attacattaaacaagggaatccctattatattagaaaagctatgtaatgaggattacattataaaagactaaataaaataaagctaaaatgactctaatatccttttttatataaatataaaaattaaagtaaggggtaattttgtcaatttatcatttattctaataacaaaccaaacatcttaatcaattcctattactattcttattctattatattactattacattccaccaaaccaaacatcaccttaactaattaaatatatacattgatgtttcattgttctctatattttttattttctaacatctttgctttgagaggtctagaccccttaactctacaaataaagaaacaaaacttgagccgattccattaggcccgaccctggatataggcgagctaggcttgtgcctatgacccacttaatccaagagcccaatattttttttatccttttaaaattacacgttttttttatttattatatataagggttccaaaatattttttttcttatgacctattaaatttcaagatcgaccttccatcctcatattttgctatgccttgtgccttgtttacaaagatgaatgggtttaggtatatgattttgtgatttattggtgtaatgatagagtttttgttttctaacttttggtacgggtttgtattatgaaatgaaatgggacaattggaagtgacaatattggaaatggattcaattgatgtggttttctactttgttgttgtgttgtctagtatttcttgcaataatagtagacactaatatagtagtgaaaccctattattttggagtttggaatatttatggataaggtattagttgtaccattattggactacttgttgaaaatgagtctttaataagtcttcatcaatgatatataatcatccttttgtgtcacaccactaagtttagcttttcacaaattaatgtctctaactttttagatttattgctaaatcatttttgagtgatgttatagtaattaaggtgaatttttatttttatggagtttttttcttaataaagtttacaaaaatatgatttttctttttttttttaaaaaaaattactctatagaattcaaaataaaaaatatatgaaaacaatttagttactcttaggttaaccaaagagtaaccaattattttatattattttttaaaattttttttctaataatatatatattttttaaagagagcatatttttgcacaaatcatataaaagcccataaaatgtgtaatttcacttaaataatgtatatgcaatttt

SEQ ID NO: 207648 - DNA, 1543 bp, Cannabis indica
cttcttctctttctttacttttatttatgttcttattttttattatgaatgtaattgtgatgaacatgattttcatgcactgattttcttatctaggggttaatagagtcactttaatttctattttacttttctatgatgttttatcgatttcttcctctttattttaatctatataatttatgtttaatgcttgtgaatacttgatcactatttgtatatttttatgatttcaattcgagattcgaaagatgagagttcaatatgttatagttatataaacataggttatatattggacgagagtaaccgtatgacttgtgtagcaaataaaattttcattcttaatgccttttatatgtcgaaatttatcacaaatacatacaaaattttcatatagattgaggtcttatatcttgaaaaagaataagattcgttttagttaacctgctattaaaattgaaagaagaaattgtagaacaaattgacaagttgataaaactaataccctaagtcctatttattgatattcataatcattgtttgtttactttaattttatagttaaattattttcctaaatttaataatatttcctcaatttttatttaccaaatagaaagtagaaaaataattattggtactttgtaatagttttcgtgggacgatactcgtgcttatgcactattattacttgaaacgagacgtatacttgcgttataaattttctctatcatgttttagcgtcgttgccaaggactaaattaccaatatcaaaattaattattttttgttctactttggtttattctaacacattctaatttggtttgcttcttattttattaatttttaggattaataaaaagtttatgcgacgacaaggtttggagccactagtgcatgctgatcctgaaattgagaaaacttgtaggcaaaatcaaaaataaaaatagttagagagaatggctaatcatggaggtgatggccttcataataacaataataatgtggttgatccacctaatttagccaatgccgccaatgcttaaaatgcagctcaagctaatattcctttgagagattatgttctcccggctgtcacaggggttcattcatgtatttgtccacctactgtagaggtgaataactttgaaatcaagccaactataattcagatgatgcaaaattatattcaatttggggggttgtctaatgaagatccaaatatgcacatcactaattttctggagtaatgtgccacattcagaatgaacaaagtaagtaatgatgcgattcgtctaaagctttttccattctcactgcgcgaaagagcgaagagtcagtttatctcactacaagccaactcaatatctacttgggaggaactagcccaaaagtttcttgccgaattcttccttccatccaaggctgcatgtttaagagaaaagatcaataatttatgtcaattggatggagaataactatatgatgcttgagaaagattcaaagaactactcagaaagtatcctcatcatggcat

SEQ ID NO: 207649 - DNA, 1395 bp, Cannabis indica
attaaataacttttagtattaatttaccacccaatggctaacccgaaaagtctgcatatactatgtagacaaaacttaaaaataatattattctctcaaaaaataatatacagaaaaatctaaatgtgaatatacatattaaagtatctttcaaaaaaaaaatatacatattaaagtaagagtataatacaaagcttaaataaaaatcctttttttttttaagaaaatacaaaatcaatatggggtacgttgtccctacttaattatcaacatctaataagttccagtgttccactgcaccctcacagcgagaaaggtatcttatggtttcaaataccacaagagatgatatatttttatctgtgaaaataaatatttaataaataatataaaaaattattaatttattataatatgctacattgatatagtattaggcatcatatggtacccaacaatagcaaaatatacaaagggacatcttatggtgccaaacaccactctcctcaagtcaactcgaataggttgttcatatagtaagaaaatgtggatcatattgtattaagagacaaaagaaagaagaaagagttagtaaaatgattttaaaagggttaattgcggcaaaaccttagtttcactttatttgtatttaattctcaaaactcaaattttagcagtaaaatctctaatactcgtgttgtgttagcaatttagcatttttgtttattttacgtgttaagtgctatattgaaatgcccacgtgcatttacgtgaacacaatgtacacatgacacaattttattggttcacgtaaaaaataatttaaaaaattaaataaaattaatttaaaattaaaaaaattgtaaaataaaaaaataatttctttttttttctttcttttccgtttttttccatttacagctttctctcccctagacaccaccatcacctaaccaaaaccactagcaccatcaaagctcacctgaaacagataaaaaaaaggtaaatcacaaaacattaaaatgcaatttcttaaactaaaaataggatggtgaaaatctgtaaatcagctccctctcgacctagatctagaaaaatgaaacaatattttactgtatatgataagagaaatgacgaggagaggacttatgagagcaccgagagggagagaaccgtcgaggtggcctgggggttgtcaaagaaccgtcgaggtggcctatggtggttgcccagtgattttgaaaactctagatcaagactgaaagagagagaagagatcacgagagcttgtgaggtggcctgtggtggctgcctaaggattttgaaaccctaaatcaaaataagagggagagagagagagaggagatcgagatacaagtagagtagaagagatac

SEQ ID NO: 207650 - DNA, 1157 bp, Cannabis indica
aaaaattatttaaaaaattaaactactattcttaaataaagtaaacaacacaccttattatataaacttcattcctcgaataaggtaaacatgtctttttatataaactgagtgccttaaataaagtaagcaaagcataatttattattaaaatggtaaaccactaccgtaaaataagaaaaataacatagtcttttagataaattgagtgtcttaataagataaactaaaatataatttatcattaaaatgataaacaactaccctaaaataaggtaaacaacatgttcttttaggtaaacttagtaccttaaataagcttgcttatctcaccctttacaaattccaaaaataaaatgctagaataaatgcattactaacttttttttatgaataatagtatgaacaaagtaaacaatgtgccttaaaataaagtaaaaacgtgtctaaaataagataaacgatacatcttattaggtaaacaatatgctgaaaatatggtaaacgagatattttattaggtaaactttatgccttaaataaggtaaacgaaaattactatcctaaaataaggtaaatgatacactttattaaataaactacagtaaatgatatgccttactaggtaaacaatctgccttatattagataaataacatgtcttattatgtaaacttattcgtgtcgtaaaccaagtaaacaacatgtcttattaagtaaactcgatgctttaaataagataaacaaaactataatgtctttttaagtaaactcggtgccgtaaataaggttaaaaaaatataatttttttaggaaaatcccttcgatatcacatttcaagcttatgtattattaattagttaaaaacactcgtacttagatgaaccatttagcaaatttgacaaataaaacaccttaattattaagtaaatttcgtgcctaaaataaggtaaaagctatgccttattaagtaaaatttgtgccttaaatgagataaataacatgccttattaggtaaacttacataatttattactaaaaaggtaaacgactacccttaaacgttagtaaactctgtgcataaaataaggtaaataacacgtcttatgtgataaactttgtgtcctaaataaggtaaacgataagccttattaggt

SEQ ID NO: 207651 - DNA, 1210 bp, Cannabis indica
aaaagctgaaactttatttaagataattcttgcacaattacattactaatgttattcgaaatagtgtcaaccgagtaactatgctcagcatataaccatgaaactcgggcaagaccatgagctacacgattagcagaatgtttaacaaaacgtaaacaaacatcattcaaatctgaaattgttctcttgcattcaacaatgcaacaacgaaaggagaactagtattcaccgagctacgaaaagcttgaactgttatgaggctatccgtttcgacggtgagttgagaaacattagacgccttaatccatcttagcacctctttcacaccaaatgcctcagcaagagtcggattgacacttccactccaagacccctttcttgcctccaatacatggcctctagctagaatcacgaagaacccagccataaccaaacttgtctttatcctcaaatgttgctgcatctacattgatcttgaatttatttatatcattattattgattgatgagttactaatcaactaaaataaggaattcaagaggagtgttaattacaatcttatattataatatatgtcagagtattatttttttgaaaaaaattcacagtagtatttgttatagttaaaacattaaccctgtaagttctttttatttttttaatagtctatagtatcgaatttttttttgaagtttttgaaagcgtgtagtagactgaaatatcaagatctttgttgtcaatattataaattatttaaaaattttaaaaaattacaaatttaatattaagtaactataataaacattgccactcaaacatgtatattttttgacgtacgtaaggattaagaaaagaattgaaataagagaataacggtatatattaattgagtattgctatttagtacctatgggtacccaacaccagactaatatgacacatcagaaatggttaacaattttctatattttttattaaatcaatttgtgtgaaatccaatattaaaatgtacgatacgtaacttttgtgatattgagcaccttaacatgccttttaacatttttcatattaatttgatatgagcgccaccatagacgaaagacaactaaaatatttccccgcaacttcttggaactattacggttgttgtggccattaattattcaagacaaagaaaaagtgatatcatatgaataaagagttgctatt

SEQ ID NO: 207652 - DNA, 774 bp, Cannabis indica
aataaataataaaacaaagagactagaaggttacaaagtcaaaaaatcaagtaattaatacaaataataaaaaagttttatataaactaccaacatatagaaaaaaaaaaattcagctgtcctcaattttcctatcccaacctcttccaataaataattaacttaaataattttgaaaaaaactaaaaaaaattcctaaataattatttaacagtgcattatataatttataagctggggctgcgtacttgctaccacatctagctagggcgcactaattaaccagtggaacctttaatttttgttaaccacaataggtgatgacaacttcagtatgtaaatttctaacctcattcaagcgtgcctatgttttgtccgttcaaaattaatccctgccgataaatgattttatagatagattttagataagactaattattgggacaaatatagataagtgattatcaaaatagaatttggtgggttaatatatatgtgttttttttttatatatatatatataagaatcgatcagtacctaaatacatgagatgagttcaaataaatatcattttagacaaatgagatggcgcaattgtaagagacatatatatatatatgtacatttatatgtatataatttcgaaggacctattcaagctagcaagatcaggtctcatcttctttactctcgtagaagatacccaatattgtttgtttggcaatccaccaaaaaagctatagctctacaaaaatggaataacatacgccgta

SEQ ID NO: 207653 - DNA, 918 bp, Cannabis indica
aaaagaaataaaatgaaaaaaattaatataaggtgtaaattgcccttaaaaatatatattggataaaccgcccacagccctaattgtggctacccacgatatagctgcttgggctgctccctttgtttcctcttcgaactagccttttagagccttgttgttgtttccttgtcttttcctcgtttaatgaagttttccttatcaaataatgaaaagttttttagattcccctaaaacgtctcatattttaattacactacatcttttttttttgatcaaaattacactacatcttttcaatacatttaaaagaaaataaataaatgaaataaaatacataaaaaggctaaacgtttattaaaattcagatgtcaaacctctaccatttttacctaaactaagaactttccaagcatatattctaattttttttttttatacaaagtttacattgtcttttacaattggataaccaggattaaaaataaaaagtacaactcgcctttagcccaagatgagactcaacatctaacattttcacatgaatatcattcaattacaattctgaattagtctctacaaagttcaaatacaactactaaaaatggtatagtatatacaggaagtgattagtctgttctagtaagtaataaaaaagaaatcagaaaatggttagagctaagaacttacacaatcagtagaaaggaataattacaagttgcgtgactgagttatgatgacaatgtatgcttgttcagtctcctctcagccgctatagcggctgccgtgaaggtggcaaatgcttaatatcagtcatctcatcttcattttccggtgctggaactgcggatggtgctgctgagaaaagggattcaatgcttttagagtcaaaaaggtctgatctggttcttgtcttcc

SEQ ID NO: 207654 - DNA, 1184 bp, Cannabis indica
acagacttgaagtccattggcataagatccttttcattaatgggaaatacaggacccccctggctttgcacttacgggccagtgaatcagatacaaatcaaggtactctagctgaagtttcctaataacaattatcaacaacaagaagaaaataaattaaaagaaacaacaataggtgatatatatatatatatattttttaaagtgaaaactgagttacccaagtgatgttttaagagaaggaagaacgagatgagggtggctatcagtaatccaaagcttggaagtgatgaagagttcatctcgagaagcaacaaggccaagttttagagcttctgctatggcttccccgagaccctgttctgatccatatgcagaggcggtgtcgaagtgtgtgtagccaagcttaatagcttccaagactgcatttttaaggagaattgggtctttgtcgtttgaagctgttccaagaccaagtacagggatggtcttgaggccggcggaagaacccagaagcagctttggaatagtggtcgatgccattattttttgctttctttacttttctgtgggttccctcaaatttctttagcttagccaattgagttggtttttataaagttctctctctctctttttctttttgttttttttttttttttaaaaaaaaaagattattattttttaagggaagttctcttacggtcttaccaagtcaaataaaaattgagaaatgctaaagttacctaaatattaagtcctatagtttaatataataacttttaacaagtatcgttagtaaataataaggcgacatatctaaaagtactagatactactagtactcaataagagcatctccaatagtagcattattaaaggatctaaaaatttatacatcatctaaaaatataatattttattttatctctcttctacattatttttagcactcttacttctaaaaacactctaattttagtattttttaaaaatactataattataatctcacacattattattaaatatatatacctaaccctttagactacaataactttttagttttaattttttaattaaaaaataatagaatagcattgatgctacaacatagcatccatgcaaatttctagaacaatattctcttctctccaatagtataacatttcaatattttg

SEQ ID NO: 207655 - DNA, 1718 bp, Cannabis indica
tctctctctctctctctgcttgtgcgacactagcgacggacggattatgaatactgtgctccgaccctcctctcgtccattttccccaaaacccacaacgtaccccaaaaacctcgaccctctacggacccaaacgcctcaacccccaaacgtcatcgatctcctgtaaatcaaaacatcgtcgaccccttgggaacccaaacaggtcgactcctggaaccgaaatgttgccgctcccgtgcaaacccgaacccgccgtgtctttgtcaaataaaagagaccaaagaattttttataatgggttatgggtttcatatttgggttatttgttctctgggtggtggtctcgttgcgatcaaaagagagacaatggagagaaggaaaaaagagacgtggtctcgtcgggattggggtctggccggggtggtgctgggttttgggttggtggttggtgggtggtgggtgtttttgggggtagttttctaggcaatgtgaagaagaagaaacataaagaaaaacaggaaaaaggaaataaagaaaaaaggataaggaaaaattatttttttttttttttgaaattttaattttaacaattttttaatttttaattattaaaattaggtggactaatgaaattttgccacgtgtacacttgtatacattgtggcagtccactttggcacttaacagatcaaaatggattgaaagactacagagcaaaatgattgtcgagtccagagagtttagctataattttttgagtaaggagttaaaccgtaacaaacataaaagtatgggtagtttgactgcaaattacccattactatatatacttacaaattttttttcaccgattttgtttgcactacaaaattttttacttttagttgcaataaaatttatgattaaaagtgaaaaagttgtgagtaattataaattatcattcttatgttgtgactaaaagatctgtgtctaaatatatttttagtacaatacttgttgtgactaaaattaatttagtgacaacttgcatctaaatactatattttagtcagaagtaattttttgttgtggctaaaaattcacatttaataacaaaaaaaattatattataactaaaaaattatcactaaaaatatatatttttaatattggtatatattttgtttataattgtaacttcttaatatatattttttttagtaagttagaaatcttaacttctgtaaaaaaatattaaaagttaaaaatatttttatggatctagatgtgtctaaaacttgaatataagggcaattttatttttttagtccaagaggttgcaattatttcaatatatataaatatgttttaaaaaatgatatggtgacattttttttatggggggcagttaaataggagagtgaccctatttaaatcactttatagcaagcacatagttttgctaataataaatatatttattgttgaaaaggaaaaggcaaacatcatatagccatatctttgttaggtaaacaaaaaatataaagaaaaataaaacgtgcaaattaaatattacattattcaatgtacctttattactataggcattaatcatcattaaaaaaaatagtaatctttactaataatattttagccacaatgttgtgattgatacatttagttacaaaccttttaattacaaagaatgctaattttataattagtcataattattt

SEQ ID NO: 207656 - DNA, 822 bp, Cannabis indica
ataataataataattaagttggatatgtccaattatatatatatactagctaataagctatctatctatctagttgcttaggtatttatatatctatatatatttatagagtattcatcatgttgaaaaaaatgccactttcattccatcaaaatattcaaattctaacggccaattaatcaagatgatatatattatatatatatacatgtatatataaatatcaatttgttctggtttattgaatatacatagtattagaagttttttcattattatatcttattattgtgttctatgttatatacaaatagatcttgggttaattgttaatttatctaacattgcaaattttgaataattttgtaattaccaaaaaaaaactaattaaatggtacggagagaattcaaaactgtagttatagtccgttatgattacaataactatttattataatatgcacaataaaaattatggctcttctcattattttgtggcttttaaataagatttatatctagagatcttagtaattagagtccgttatgattttttttggtttgagcattggaactttaatttgtaaaggtttttgatgcttgtgctgatgatcttcttatataaaattgtatttggattttattccattatcaatgaaaaaaagaaagagcaaaattcaaatacatatagtccaaattgtcatttactaaaataaaaaatttcatccataatttttataaaacacaacatttaaagtagtatttatatgtaatttttctaatataatgaataactattataattaaccacttgaggctagc

SEQ ID NO: 207657 - DNA, 884 bp, Cannabis indica
aataaaatacatatttatatatttttattaactatttaagagttatttaaatgcttctaccataagaaaattataagtaattaagtattacattttgtaaacattaaatattttactcccgcaaatatgtcaaatatgtaaatttaattgagaagttttttttaactatgaacttactttttttaaaaaaaaatatatatatatattttaattcccaactaaaatgtcaatactaaaaatttaattatacataagggattttcataaaaaaaaaaattaatacataagggagtgtaatttttcaatctcattcatcaataatcatggagggcatcacttttccaaactttaccatcaattgaaattgtaaacctacctaactctctctctctctctcgattaacgtctatccataatatccactcagtttcttctgtctatatatttataacggtccaaaaaatgtatttatagaaataaattgaataaaaaaagaacccactatattaaaaaaaaaattccttttctcattttggacctcttccttacctttctctctctctccaagattttctttgttctacagccaaaaaaaggagaccacttcagaatcagatcatcctattcctatttttacatcctatccgcttttgcttaaattatcctccaaatccggatttccttgatccttgtaaccccttccttttattcatccattcccatttcattttccgcctaaaattagacaatatcttaacactttctttaatcaaaaaccccatttcactaaccaatttctctttgtaattgcattgatctatttctgggttttgcctttctcttcattctttaacctgagttcttccttttcttttctttttttt

SEQ ID NO: 207658 - DNA, 1146 bp, Cannabis indica
cgtggccccgtggactaggagtgttcggagacactgataccagtaccaatctcttgtgttcagtttatttatttttttgcaaattattttatattctgcctgttctgttttgctgtagcagaattacttctgctgctgcaaacgattacagtttttatattttcttatatacaactgacatttgcaaaaacacggtttttcagaagcttaacgctctctctttcttgaggactgtatatccacattttcaacagaaactaccaagattcaacaactatagatacacactatttgagacctctctttctattatgcaatctcaatgtatatattacaagcttttcaccagagatacatacaaagggctatagtttggagttaggatcaagttgtaaatagcttgtttgattaataaaaacttatttcttgtttaaaaaatattatcaatcatacctatttaaggtgcttgtcaatattccaatgaaatcaaaaatctaaaagtaaagaaccttaaaattaattgaaacaacacccaatccaagtagcaatatcctttcaccatttcaggcctctctttcttccctcaataaatattacaaagaacatacaagggatttaaggttcatcaacatatttattttgtaattcatgcaagaattcaaaaaacaattcacactcatttcatttagatgaagagatagtgcagaagatagcaagtatcactataatattaataagtactctagtttcctgtctaatatagaattctctaatggcaatgcagtaatccatgtgaaagtaaaataagatgaaaagaatgaacaaaaactttcttgttatcgattagaaagagtgacgtctcgggaaatcggggcgttacagagtcactgagacttttatacaaaagctgataaagaccagcttagaccaaaagagaaaacagttacaaatattaaccgaaaagcaagacaggctgacagctaaactaagcaacacttaacagaagtagttgcataaccaccttaactaactcatcaaactaatggcccgtttggaatagctttctaaaaagttgaaagtgctttttgaaaaagttgttgcttaaaaagtgtttggtaaaataaaaaaaatagcttattttaaaat

SEQ ID NO: 207659 - DNA, 735 bp, Cannabis indica
tcacctaaggatcgagatgaacagcagtaattcatttttatatatagtaaattattgtttatttacacacattagcaatgtttgactaactctaatacattctccttacgttttgatctgcaaattatgagtataacaaacaacttttaagagaccgcaacgtcgaacgtaacatttgaaaaaatcccacaaaactaaatatcgaaaaatttgtgagtgcacacgtcgagaaatttgtaaatttttgaaacagatcaaaaattccaacactgaaaactggcacacattgaccaaaaaatctcaaatagaaattaaaggagagacagcagaagtttttaagtttggttcgtccttttaagctggcagtactttgagctcaaaaatagatgacaaacggctcttttatgactcacatatttggaccaacgatactttgaactcacaacggatcacaagcggctctaatatcatgttaatatttcggataagatgaatgaagttccatcaatgagaggaataactcattcatcttatatataataatttatttccacacattagcaacgtaactctaacacttacgttttataacaatttattaaaaaggataatcttattataatcagagtgtcatcgtgatgttaacatattaacatggcaaaaacaataacccctaactaaatcatattagaatgatgaatgagaataatactggtcttcatattgggtgttacc

SEQ ID NO: 207660 - DNA, 631 bp, Cannabis indica
ttaaatacttggtattcctatattcctatatgctctaagaggatttctagtgcaaattgtgaaaacctaatagaaaagatgattgctagaattagtgcatggagttctcggaatcttttctatgctgggggagcagtgttgattaattcgtttctactggcgatccaatgtcatattgggctcagataataattttttctaagaaaatcttaaaaacagtagaacaaatttacaaagatcatctttggagtggagtcgctgatttgaaaaaacctagtttaattgcttggaatgatgtttgtaaagagaagaaatatggtggtttaggcttataaaaacttggataagtggaatgtggcagcaattaatgagtgaaataggtgcatgcaatgtatttaaaagaggaggattagtgggcttataaagctagctccccatgatcctagctaatacttactggcccaaagttattcatttgaaataccaaatgactggctgtttttcaaaatgccagctagaatcattgagtaaatattctattaggtttgtggaattatgctctccaataatgaggaacaaaagtggtatgcttctaccatttggaagatgtatagcgttccaaaacataggt

SEQ ID NO: 207661 - DNA, 781 bp, Cannabis indica
tttaatcttttagctcataaggtagctaggctgggccttggattagataatgagttaatttggaatggttctctaccttccttttaggtgtgttgtaacacatgtttctttccaaaaaaaaaagaaaaaaacaataagtaggtgagaactttaattaaagctttgtaaataatttgatctgataattcaaaaaaaaaaaaaaaaaaaagttattcatgttttagctatgaatatacaagagcgtctttataaaagaaattgagatttgattacaaaacatccaccgacccaccaaaaccaaattttattcgcttccaacttctatacatgtgacatccacgatgcaaaaatttggagatcttataaaagttacactttaattaatttagttgttagtcacaaataaattataaaaattaatttgtattatatataaatatgttatattccatttaaaaagaagttgttgataattctaggcataattttaaggagaactagtcattcatcaaagtttggctacaagtacttcagtttaatcaattactttaattatgctaacatttcttagactttgactttattatattgtagtaactgtatttacctaattttacttgtatacaattctattgcgttttaatgacagagaaagagtttaggatgtaggcttataattaatacactactagaaaatttggctttctcttcagtaaatacgattgctttatcttcaactaggtaactaagttgcgcttttgtcttttgtaatttttttttt

SEQ ID NO: 207662 - DNA, 844 bp, Cannabis indica
gtatctttaggaaacaatctcatgttaggcaaacagagtgtactaaaggaaagtacctcaaaacttgtaccctttgtatacccttctttttctagattgtaacagcttacaacaccctgatcgaaaattctggttgaacgttactcgtctaaccaccaaatgtgatgtatcaaatgataatgctgccttcaagtttggaatgtttgaagatgcttatgttaaatgatgttgcctcctcaaggtttcttgagaagtacttgtattgtctttggtggggtttgagaaacttaaggtatgattcgcatctttaatttgagagctttgtgatatttggtatcttaaataacatgaagatggttgtccaatacaagatttattcattttttttttatataaagtgatatttttgaaaaaattaaataacttttctgtatatagaaaaatgacatttttttttttaaattaagctgctcaaaaggtaagccataggcgcctgtccagtcttggacataattgaccttaagcacatgcaggagggccatgatgcaaaaaagaaaacattaggggtaaaatagaatttttaaaataaaagggtaaaaataataaaaaaaaatatttaatagtaattattaaatgaagttatataaatccgatagttaattttattaatatgttctaactactaatgtaattagtaaattactatatggttctacttattttcattttaaaaataaaatatgaaatgtttgatattagtcactaacaataatattttgtttatcctttccacaacttctgaaatgaatttgcaaaaataacataataaaataatgcttccact

SEQ ID NO: 207663 - DNA, 530 bp, Cannabis indica
ttaaaaaaatatttgaaagtaattgatattacatgtttagagtcaatgatttagaatatgggtatgttttgtttaaaacaataacagagtttggattgttaaaattaaaaaaaaaattatagtttacaaacattgaatatttatacaattaaaaataaatattgtattcatcaaaagaacttattctataattaataactaataagttactaatttagtaaaaaaaaaatagtcttgtattactatttttttaaaaaagccttttgagtttatatttgtaaaatatggaaagagtaagtagattctttcgtaccatttatggttccaaattaaaattcaatttctattccatatttgggtgtgtgaaggcttttctatacctttattagatttaattttgctttttcttttcttttatactagttttgtcccatttctcaacaaaaattacttgagttagatcagcaaaatataaataaaaaatgagaaaaaaataacatcaaagactttttttatttatacttttataa

SEQ ID NO: 207664 - DNA, 671 bp, Cannabis indica
tattaaaataaaaatgcaatctttatatgtatatatgtttgtattcacatacactctaattactaatcaaactattcacccttgaattgaaaggaactgtaatgtaatctctataatcatttctttttttagctaattaaccttttttctacaaaagacctgtaatttaaagaatatataaccttgtaaagactcttaattagccttcttatttaatccaattttttaagattatatatgttttaattatttagaattatttataaatattttaaatagtttacagtgttaaaaattaagcttcaagagcacaatacctgcgtataataaaatatttttattttacattcggtattataaattatttcaaaaaatttaaaaatttataagtaaccataattaactataacacatacaattattaaaaaaaaacatactgaaaacttatcatgaatgtcgagataaaaggtctcctaaaatatcattttagatgtgttatagactttttctgtctatattatatatatactgtagctatcagtggttaaggtatacaaaaaccttatcctgtattatttcttgttgtgtatattcttaggatatatcattttcctttacctaatcctacatagtcatgcccccatgctaggacaaaaaaaataaaaaagtaa

SEQ ID NO: 207665 - DNA, 617 bp, Cannabis indica
tatatatatatatacatataatctgacatatataaatatagctaattctattattagctccaatatatgattcacatcaatatatgaatattgctaattaacctcagccaaccttaaatattttgtttaagtgtatcagaaagtatagtaactagtaagaaattaaatttataagaacaaattaatattaattataaaaagagaaaactaacattttttttatattataattagaaatgatacattatattcataatatatatttgataataattgacccacactcaaattacatattacgtatattttttacatacaatattcatacaaaccacctaaaaatactaattacaaatgactagtatttgatacactttgttatgtgtaaataaatattgttgtaatttaattaagactttattgatatatacttatttggaattgtttgatcaatttgatatgtgtagatataataatattcaaagtgttctggtaataatataatgttagcttttttttgcagcttaccattccctgagtcaagctgagatgcatgtgtgtgaagagtttaaattggctacgtttgattcagtacataaattagagagagagagaga

SEQ ID NO: 207666 - DNA, 872 bp, Cannabis indica
agtggttcaacgatagctagggtttggaaatagttgactaaacctttccatagttggaaaagtgaataggttgttctttttttttttattatttatcttttctcattattaattctacctttgtgtatcttttttcaactttttgcctttgtttaaatatgtaacaactatatatatatatataaacaacaaaatacctcaatttctaggtctcttgctttttgccattaatgaaagttgttcatcaaaatcatgtcatcatgtgtatatttatgatatatatatatatgtatatatgtatatgtactgtgttcaaaagatctctcaaagtatataaattatgtttaattataaacttatgatgttgacctcatttatgacatatttctaaacttgtacttcttacagctcaccctccttttttttattattattataatatataaatgtatatatatagaatatccactagaatttttataatgggaagttatacatgaggactcaaaattaaaatagagaaatattaaagaaatacttatttctttatattgatgtaaaaaaaaattttttgatctcatatatttatatttttattattttaattctgaattatatactatatttaattataccaataataatatatttctctacaataaataataatatattgtattttatacttttttgtaaaagtggaatcagaaaaaatatcaaataaataatctatacgtctgtcctttttttttaaaaaaaactcatacgtccaaattaaaaactaataataaaataattactaatataataataatatatgtatatttaccccgaaaatatataactgtttttctaaaaaaactatttaaaaa

SEQ ID NO: 207667 - DNA, 568 bp, Cannabis indica
tctttatttattttggtgggaataaaatgtgtacgtctctgatttaattataaaaaaaaaaaacaaataaataaattatgaattatttgctccgatataaaaaatttattgtctcttccaaaatatctttaccttatgctagtaatattccaatacataaattggctaaatcatactgagagtgcggaagcaggataaacaaaaaccatttactactaattaggtctttaacatctcaaagtagtaaacacaaaagtgtgtgcatccaaacaattgctcttaagactattgtgaactgtggctaaaatattagattaagaagttgttgggttgattgtgacaggaatgacatgagacactgttgagttactacaatcttcaccctcttcttctgctacttggttctgctttgtaccaacttccttggcctctttgtttttaccccacaaaagagtgtacataccaattatgaccaagatagatcccagcaaactggttaaattaccattgccaaaatgttagtaccagcaaaaaacttaaaaacaaaagaaatttgaaaaaaggtgtt

SEQ ID NO: 207668 - DNA, 594 bp, Cannabis indica
aaaaaacaatactaaacatttcttagcttctttcaatttttaaaatccaaaaccaaagaagtggatcaatgtggctcgtttatttacaaaatggactcctccaaattcatattcatgagtattttatacttatcataatgtgtgatgagtatattattgacattgtaatgtgtgatgagtacaatagtcagttattaaagacaggaaggagtatagcctccctcttgattttgaataaatatgagttaaatattttctgaataactgaggcactattagtgtttagtattatttttagtgtcataaaattattagtgtaattattagtgtaattatcgaattttattaaccttaaaaaataatttttataaaatattaataaccaatcatagattattgtaaaaagtgtgaaaaaaaataatactctcatgcacataattttgatcataaacataaaataactaatgactactcactaataatgttttttatttaataattagaaattgtattgtttcaaaattacaacgggttaaaattacgttattttgtggaatattattagcttgtattataagggaaatttacatggta

SEQ ID NO: 207669 - DNA, 691 bp, Cannabis indica
gatgtggtggcaggaaaatcaagaattttgagatccaagacagtcaaaactggcttgctcagggacaggttgaagaactcaaagcttcaggctcattctttacttggtctaacaaacatgaggagcggatcagaattcattcaaaaatggacagaattttggctaatgaaagttggattgattattttccaaacactgaagcaagttacagatggggagtgctttatgatcacaaatattgtctcattaaacactcaaagactagtaacaggggctctaaactattttgcttttgcaactattggatgttcaaggatggttacaaggaaaatgtgctaaccgcttggaggaagaagaatattactaatcttaaaagcttaaaccagcagctgtataggatcaatgttcttaaaaactgctatgtttccaaacaggaagatgtggctagcatttataaagatgctagagagttgtacagtaatgctcaagtgactctggccaataatcctcactgtagtgtagctgtaaagggggaaaaatcttcatacattgcttttcaggaggctcgaaaacaatatatcagctaccttcaccaaaattcaaaagtgtgctggctgaggtttggagatgaaaacactagttatttccactcaatcatgaaaaaaagaatagcagagaataggatttgttc

SEQ ID NO: 207670 - DNA, 956 bp, Cannabis indica
gaagagttattcatatcacattaccatatgattttatgttgtatagatctgtaattgtattttctattcatatttattattattattataattattattagtattagtatttattatcattattattactcaaatttcttaatgatcttgattgggtctgttaatggtggatctcagacttattttagatttggatttttgtgggtgtaaaaccaatagtgaaaatctacgcaaataatttccagttcacatcgatagaatatacgtcaattttgccaaccaacacaataaataatattttgatttgaagctaatgcataaaatattttttgttgtagtgccagcctaattatattaaaaaaaaataaaataataacaaaaattaagttgataatattattttgtactaatttaaaaaatactaaatctgaattattatttaacaaaatcaaaggccgaatcaatacaaaatattttctttttttttttttatttttatttatgaaaggagaagtatcttattaaatcaacaacaaaatttcatcaaattgtaccaatatagtcaaagcttaagacaagctcaagataacactaccaactattcacaacactaggtataatcttatctttaaaggatattttccttttatctaaacaaccaaatgggcttttattccttgtttaatcatatcattaacatactgaacagtgagcgaactaaattcaaaaacaaagatttctattaacccgaaaaaataaatcacaatccacactctccaattcacatacacaatgggccaagttgtaaatgccacccatccatgaaccttgcgcagcagcgaacagaggagcgaagaacaaaaaagtgatcatagctctcaataatgccattgcaacatctacgtttaggaattgagagcctactccacaccacatgagcacaatctacttctcac

SEQ ID NO: 207671 - DNA, 1273 bp, Cannabis indica
  modified_base (1206)..(1206): a, c, t, g, unknown or other
gacctaaatagtacttagctaaatatagttaatgtcagactgacaaaattatggtctgaggatattgggatgcctttttcttccaagatagtagcttcttccccgtgtcaagctgaggtttggcgatgttatgggttctgagaattgcagttgaaaagcaaatgcaacatatctccaaactctttaatgcaaaaatggtggtggaagctcttaactgtcgccgaagacctcctaattggggtattttcatttcattaagtgtttggactcaaacagcaaatttgctagcaaaaaaatgcgttaaagtctttacattttgatggatgtaatccaagagagggatccacttttgtgatccctaattttctcctctaatgagctgaagggttctttcaatttttttttttaaaatatgtcgattcttatttatatagttttcccatcaactaagtgggtaatacaactaataataacatcctcaaaaagactatcaaagtcatctctaaaacaaaatttgctaatgtatgtgccaacatatttccttcccgaaaaataaatggacaagaaccaacattgcataaagaaagatagtgttgaacatcacatcttcaatcaaactaccacccttccaataacattggaaaaatcattttccaaacacttaaatctaatattgcactggaaacacaacttcagattctccaaacaagcaaggatctcagttgcgtaaagagaaagacacctaggtacaaacttagcgaacacacgtaccactgtaccatcaacatctcgaactgttaaccattaggttagttatctagttaattataaattttggtaagtgttgatttgtgctttgtttgataaattttttatgagtttcctattataaattatttcttatattaattatgttttgagagatattttaccttgattcttttcatttcaacacctatttcaaatattgtgagatatcttaattatttgctcatttttttttttattattttcatgtcttctttaataaaaaaaatcaaaaaatttaaaaaggaaagtgtttttttttctttctatgaaggatggtttcttgtaaggttagttaacactttgagtttttagcccttgagataaacaaaagagagagtagtaaattttaatttttagtttgtatgttcaaactatagactcttttttcagggggtntttgagtttggtttatgtgttaaacttttgttagagttagctattgtattttgtgttaatggtggtg

SEQ ID NO: 207672 - DNA, 866 bp, Cannabis indica
tcaaattctcgcatcttcccataacataaagatcacacacacatactattattaccttccaccctcataaaatcaaagatagaagtgatcgtgctcatccattgcttcaccttcagcaagttaggaccaccctataaaattggaggattctgtttcctaaactgttcataaaatgactccaaatgattacccacattctacgacacaaccaaattataactcgttcttacttaatattactgtatctgttaacacacaacgtgaatcatgccaaataactatgaaaaattcgatattaacaacagctaacattacaaatgaggatctattttgatacatattaggaaaattattgagcttaactcaatctaacaaggaaagaaaatatcctcaatttaagtggatagtaaatgtcaccaaccaatatgaatctctattctctaatatatatggcgatgctattatattttctttcaaaaagtttaaattatttcaaaataaaatatttttttaaattcttcaaataaaataaaataaaataaaataaaataaaatcctaaatgcgtataatatggagaaaaaataaatataaagctgaatatataacctaatcgcccttaatctctgtctccggactccgacacagtgacagccgcatttctctctctctcgtcaaacacgtaagctcaaagcttcacccaactctacttatacattttttctctgtattaatatatatttttatacatataatctcttgagtttgtgagtatggatgttcttatgtgaatactcttgataatgtccatgtctgaatattatgtcatatgaagtagcgttagtgttggttggttggaatgtgtttc

SEQ ID NO: 207673 - DNA, 500 bp, Cannabis indica
tagttattattaactaaaatcaagtcatactactactcaagcatccataattatagtgccacatgtgattcattatagtttctatccacgtggcaccatgcacctagtaaaccttcaaccattcatttcttgacacgtggtaaagctttgtttacccaaccaagccattttattttatttattttgagtttgagaggaccaaccaagctattttaacgtgcttgcttgtgataaaactctcgacactacactctattttttcttttcctttttattgaaaggactacactctggttctttaagttttatatttatttactttttccaaaaaaaaaaaattcacatttatttgcactttaattgaataattagattaggagactagagagaggctatattgacattccaacaaaattaagttaatatggcctagttttttttttcttaagaaaactttattatataactttttgagggttcataaaaaatgatctcaacta

SEQ ID NO: 207674 - DNA, 979 bp, Cannabis indica
acataatttattaagataaatttattgttatagaagaattcaaaaattgtggacaagtatcaatttaattcttttaaactagtaacaaatgttaaaaaaaaaaacttgtaacaaaggttgttaattagtgtatgggcgataccatttgctgaacgaaaaatggctctgtaagaaccaccaccaacagcatgtaataacgaatagatatctaataatatcgactgaaaactaaaatttatgtgaatctaactaattgccaatcgctattaataatagagatactgaaactatattaacgcacaagagtcaggcctagacgaatgacaaacaacactgccacattaacagaaaaattacccaacagtcaagataacattcttaatgtacatgcatgggtagcaattaatgtacatttaaaattaacacccaaattattttgaatgtattaatattgatatttttggaataatattttttacattgcctacttgctgctagacagacaacaattagaattgtgattaatgtattaaaaactttgaaaaaaaaaaaaaatctttggtaaaaaaaaagagttatttttttgtaaagcaaaagaaacagttacttaaaatacaaacaatgagtgagttggtttggttttgaatttcaaaataacaactatactaaaccaaacaatctttgaactgaattatcaataattctttttgtggttctgcctttgtgtgtgagcttaattcccttccctaattgtaatttagatttgaaaattattttctttttcttcttaaatatatatataaaaaaaaaaaaacgagattcccatataaagaataacaaccagctcagctgtgtgggttgtgaaatacgtttttactattttgcccttttatttgtcaaaattacggtcagattcggaatcctcccctgattccggtcaacataataactgccctgcccattctctctctctctctct

SEQ ID NO: 207675 - DNA, 554 bp, Cannabis indica
caagagcaccaaacaaaagagcatcaagtaaaaacaaaccgagaaacaaacggccaaagccagcaaaagtctaaaccaaccccaacaggggcaacaacaggcaaagctaagaggacaagtaactaacaaacaaactagaactaaaggaacagtagaacgaactaaaacaaatgaacaaagaaagaacttaaacagccatctactcaacaattgagaagggaactgtcaaaattggacaggtcaatactcccaaactggtttgtatcgagtgcccatttggctacagagtgagccacaccattgatgcttctaggaatccaagaagcttcccatagaccaagccgattaacattgttatggaacctataatcaagtcctgcacattatgatgcagagtggtaggctagccctgcaactgcttgcaaagaaccgcttaactgcatccgccgagtcactcaggaaaataacattgcggatgccctgagtaagagcggcttcagcaccccacaccatagcagcccacttcacctggtagagattcagagtaagtaaac

SEQ ID NO: 207676 - DNA, 1488 bp, Cannabis indica
tatatatatatatagaacatgcttgccacaaactttagtgattattaattaaggtaattgagtgtgggacattcatgtattagctaaagatatacatgaatatacatatataattctaaggacaataaattcaattaatcctaaaaatatttttggttcatatataacgatatatatcagagaataacagtacttaactaattaattaataattatcctaaattaattacatatttgtaataacataactaattaaatttttaaataatgcattaataatggacaacatgtgattatatatcaagagaaattgaacacacacatatattatatatataattataatttccccatttctcctatgtatataaaaaatattaaggaaaaaaaagtgattggtttgagaagatccttttaacaagtgatgatataataattggtgtaatatctttttaattaataaagattagttgaacttgaacatcctaattaattaattagttgttaattattgtttgaattaagctttttaataactaattagtacttaaacataccagattgtctcctaataattctcttaattaattagtagccaggttgagatatatatgatcttataaatattcttttattaattaatttaaattattaattagtcattagtggccaacaagtacacttgtcagaggcttttcccaagaatgtcgtttaggcatgcgcaaaaccaaaatcttcctttcaatatttcataattaatatattaattaattaattttaactaaatcacttcactactgctattttattaatttcagaaatgtatatttccaatggtaactatatacatttgtctctatctgatgaatcttattagctagtctgaaattaattgtgtattctaaatttcagaggcagtattatgtaattaattaactaattaatgaaactgatcaaccaattaatttatatataagactctaattaatatgagtactttactaataataaaattattttatatatagcttaattttatatttttcacatgcaactataatatattgatcaccgtgtatttaattatagaaattttttgtacttaaaagagtcgtgattggatagattttttgttgttttgatatttatgagaattttttaatatttttttaacaatggtatatattatagttatttaagattattagtaaattttaaaaaattctaaataatttaccatgttaaaaatagacataaataattattacctcacgtgacacatgtaaaaaaaaataatcacacgtataataaaatatatataaattttatttttgtcattataaattacttaaaaaaaattaaaaatatacctaataatttagataattatacgtagttatatatataaaaaaattaaattaaaaaactataatatgtcgaaacagatatgtgatcttgaaacacagtgcaccataattatatatgtta

SEQ ID NO: 207677 - DNA, 608 bp, Cannabis indica
tagtgagtcttgttagatgtcggcatcaaccaaccaaccaaacgattaccaacgttttacgtctatacgctgccaaacccaagatgagtgcgttgctgctttcaaaacaaaaaaaaaacaaaaaacaaaaacaaaaacaaaatacattggtttgatgtttatttgtttaataaaataaattttaattaggatttttttctttttaattttgggatgtaattaatcatgaactcttaaaattgttgaatttaaagatttttatctaattttaataaaaaataattaatatagatgaaaattcaaaaaacataatttcacacgtgtcaaaattcaaaaggtataatttgttaaatattaaagtttggaagtatgatttagtacttacacaattattaaattagtttttaaagggatgccaaaatttaagagacaaaaattctaattagcctaaactaaaaagatttattcgaaaaaaaacaaaaaatagaagaagatgtctcctaaattatcatatttgcctctttatttaatttattattattattattagaaaaaaattcccaaacttataatcattgcaaatttctccattcaattacattattatt

SEQ ID NO: 207678 - DNA, 589 bp, Cannabis indica
atggtagattacttaccccactgagattaactctcaaatggatgcttaattcgatgaagagctcatacatctgacccagatcggcggcgttgccatgagagtagagaagagttgatgtggccatggggtgacgaatgtagatggcgactatctcagtgccacggcgagtgggcaatttgagaacctcaacgttttcacggtgaggataaggactcagaagcaagagaccagtacggtcatcggtgaccaacttgtaggaaggtgggtttggtggaaaaaaggcaaacttggccgccatggatgaagtcaccccacccatcactcccaactcttactcaactcctctcactcctctctctctctctgtaataaattcaattatactaaaccaattctgaagaaattaactactcggataatctgacatttcttatttttcaaaagattgcaacttttcctttcttttttatttttttcaaggaaaagaagaaagagaatctagagtttgttgctctggtaggtatattaagctatagcctacactatagctactttaagctgtgattgaacaaaagagagagagagagag

SEQ ID NO: 207679 - DNA, 1698 bp, Cannabis indica
ctaaatagaaactcaaacattgcaatccctaaccaaatcaataatacttcaccacgacacgatcacgaccatcaatcatcgattagttggttgttgagtttgatcatcatgaggtttttatagtacagggattggatctataagtaaagcagcaatgctttctttaaacacttttccaacatgtgtatattgatcatcaccatttttgtaaagaagatccaatacttttgtaacattaagaacacgaactaagatagggaaaggcataacagttggcctaatgaagtcttcattaatttctttccaataattgaccactcttttattcagttcttcaattgcctctttttctgataccccatattgcttcatgtaacattccactgtagatggtatgtgatttctctcttgctcaaactatacacaaatgcaacaaaaatatcatttcatgcttgttaaataaatatatatacatatgagttatatcattaatatatataaataataattactcgaactaaataaaatgtataatttatcttggatactttatctcttctcaacataataggccacagagatgtcatatagtgcacccctaagtatattgataccttcttttgtattttcgaatagttataattttttttgttattttttttttcattatttaaatttcaaaaaattataatatcactagttttacaaattaatttgtctatttatgacaaaaatgtaaaaattaaaattattaataaaattgttaaatccggccaaattaatcattgttcgtcactactttaaaaattaacacaacaattaatattttttttataagacaataaaataataattgcgacataacttaatgtagtaatcataaattataaaacgaaaaaaatcataaattaacttaaaaaaatgtataatttaattatttataaatattataaataccttgcgagaaccaatatcatccatgaacctagcaagtagagtggaagctgaaacaattttagggtctttggagagccaatttagagtttcatgtgttacaatatcatacattcctacataacttgtggcgattaacgttgtgtaagcacaagaaacataagaaactctcaaatgctcatcgaagcttggcaagtatccatcgttcaaccatcgagcttcttctaaataagctcgaatcaattttttcatctgtttttatttgattttgaataaaagaaaataaattgaatttaatattatattattattgatcagttgaaaaaatattcatatatgcattaattacaaattaaattctatatatgaagaatgtcacattaattaataattggctgaattaatatagagaattaattgacatatatatatacctcttcttttgcatattgatgtttgtataattcttcctttgtaaactctttttcaaattcttcataagaagtcaacattgctttataatatgtcttcaaatattctggctcaagtttatctataaaatctatgtcccacctgacaattgtactcttaaggtgtcagtatcataacatactgtattattataagtgcaattcatattatcacttataacatatatggtgcctagctaataatcaacaccatctaaatgcatcatattaccattgataacctagaaattttaaatatggggatgaatattaa

SEQ ID NO: 207680 - DNA, 611 bp, Cannabis indica
atatatatatatattcatttattctatttatatattaacaacatgggaaaaaaaattaacatgataattttgccatttatatattcattaaaagagttaccacacaactaaaaataaaaaatagaattatgcaaatatagcgtaaattgattgtacttagtcataattctataaatctatacttataataccctttaaaaaaaattaaattataatacaatataaatataatatgtatttatttgatccattaagagtaaatggagaaaaatataatgattttattagtgcatatataatttgtatattcacgaaaagagttactacaaataaaataaaaaactgaaagcactttcaaattctacataatttagaaatttttaataaaattagatggagaataaataagaggaataatgtgtgtaaatcaatattctatttgtcatcaagtggattcgggtcgggtctgaagaatggtcgcctgttcgccttgattgcatgcagagtcgatgatttttttgtcgtcacgtcacctctatgtcctctctctttcaaaataaatatcctatttgtcaacataaaatttgttattggcttggcatatacaatct

SEQ ID NO: 207681 - DNA, 885 bp, Cannabis indica
atctccacgcgcttaccccggagaagaagaatcaaggaggatggtgggtccctcaccgggctgtgttggaacacacgcacggttgctcgtgattggttggaagctaggaccgtgtgtgacacgtggaacgttttcttaggtggcgacggttccgaccattaatataacgccacgtttaacgttgaatgaggtagcaccgaacgagggctgtgattttagtacggcggcttaggcaaaatctttggggatttggatttgttaggatgagagaactagaagtgacacgtggcttgatttgattaggtgttttgagaatactagtgaggtgcatcacaacttatcaagtactgcaccacttgactgaaagttttacaggacttgttgagttggtgctgatcaaataaacacgtggttatgttttttattttttttaattcaaaagtgaaaaaaaaaattaaaaaataaaaagtttgttaaaaattaaaaaaaagaaaataactttccaaaaagaataagatgtactccaaataaatagcacttttttgttatttttttaatcaacactcttttatattctaaattaagtatatttgctcatccacctattatttatgtattaaaaatactaaatttagtatttttgctcatccacctattatttatgtttgaattttttaatttatttaaaaataatttttaaactatttatagtattataaattattttttctattaaattttatcacacctaataaataaaataataatatggttatttaatcagttattacgttagtattatgtcaacgtcacgtatgtaattaatttgaaaaaaaatatttaaaaatttttacgtaacttttttaattattaattaattttaag

SEQ ID NO: 207682 - DNA, 554 bp, Cannabis indica
aaaagatagtgtaatattattatttcattatagaagtaattctaccaaaatttatacacaataatttgaacacaatattcttaatatatttacacaaattatttagaggactcacaattataatttctatcaaacttatatatttaactctcaaagacatacttagaataaaaaaactcacattttgatttttcaattcttagggtcctcccacaattgaaggaatatttcatgttgatggtgatgactttagcagaagaaatgatcataatgtcataaagttagaccccttaatcttcgaaaaagtagccaaaactaagattactgaaactatcgggaaaatattctctaattcgagttcaattgcctaatggtcttcatgacatgacttttcccgactgagcttagacacttggaatgggcgtgaataccctttggtaatccttaggcgtcaaatttctacaccacacgaatcttgcctattttggtaatggcgaaaagacaacttaaggaactatggaaagaaaatcaagtaagtgaaataactataatgc

SEQ ID NO: 207683 - DNA, 1257 bp, Cannabis indica
ctctctctctctctctctctctctctctctctctctctctctctctctctcagatatttgtctccatttctactctaacttctctctctctactgtattgtgtatctctccttcttgtgtttttacttgttcccttacgaaatgagattagtagtccactttatataggccaagggatcatagttgctgtcatatttgacagttaagtttgttaaagactaactaactaaccgaatcttggttgggggtttaaggaataataccacagatctctctatatataagaattatattagaaaatattttgacaaaatttgtagtgaggagagtgtgggtataataaaatatacaaattattagaagcatatatatatcattaatcatttttaaaataaaaagttgttgtaaaagtatgacttaaatatatatatattttatatatagatgtaattttatttttaaatatatataattaaattattttttttatataaaatatgtacataattttatttttaaatatatataataatataataaaatttagaaagaatattctgttaagtcattgggatcagtgatagacccaggatttttactttgtaggggcttatttatcataaaaaaaatatttatagctacattataatcactcttactaaatttatctaattttatggaggctttctactattttggtttaaaattattaaattaaaaaatttacatttaattttttaacatgtatttttgttagtgggggctatagccccccacattaatgttaatgggtctgtccttgattggaatattctattaaagttaacgtagaaaactaaaaaaaaactccgttaaactaattctgttacgtacatagccacattgaatagatagatatatatagaatagatataaatgtaatagataaatatataaaatagctagatatagatgtgattatatatagatataatttttatttttaaatatatacaataatattgtacaatttataaagaatattctattaaataattgaaatattctgttaaagttaacgtaagaaaccaaaaagttaaaccaaaattttatatataggaatcttattataaattttttcgtacactcggagttgtgtgtgtaattttgttcctgttcaataaaacgttcttttcagatcaaatatatttatattttatatcatttttcatgtttgaaatgttgaaatttttctatattaattttgtttgttttttt

SEQ ID NO: 207684 - DNA, 694 bp, Cannabis indica
ctgtgcaatccgttgctaatcaaaggatttattagaaaacatggttaattaaattttttcataattaacatttaaactttaaataaataaactttacataatccgagttcccatctttaaaagttacaactatactacacaatttttacaaaagttttcatttagtaactaacaaaatacagcctgctatcttagagattaaacactccaaatctaactaccccaatatgtagaatctttattagctcaaactcactgttactcagctatagccttgaccatacctacacatgcaaataataacagtgagttgacaaacttagtaagaaaagcataatcataacataacgtaaaccaaattataacttggcgcccatacacccaattataaccatattgtacatcccacacgtattgaatctaaaacattcgtatgacaatactattcaccataatatcagcctatactcaatactctagtcatatcaatgtgatagcagcagtcaatacttagccaaacatgtatttatgtcagtattaaatgcaactatatgtacactaatactgcgagtactgatatgttatctacaagaattcataaacatgtacgctaaataggtaatcgtatgtgcaattgttgtactaatcttaccttaatttaaaattaaggcgtgtcgatcaacctgagtagaaa

SEQ ID NO: 207685 - DNA, 644 bp, Cannabis indica
agtgaagaggcgagcgtttgaaggaatctagctcgaaagcaagctcgggtttgaggtgaaggagttgtttagtgaaatggagatggtttagagcagctgatatgtgtagaggagattgagtggaattggtgagtaaaactctagtaagaatcaacctatctttctcgatcaagtgactcaaggtggctacatttccttcctttgcagcctctaaaaccattgacacttcaattattgtattattaccatcatcattatctctattcaactcctcgttgtaatgattgaactttactctcttttttctatatattaatattcatatagatgatatctattagtggagtaactgattatctatatataattatacttgtcttacttttctttgttatcttagaacagtaacatgcacgcttgaaaaaaacattactttatgtaaagcaagattattgtgtagaagatcattttgttgttttagatatgtacacatatatcacatatataatgtatatcaatataacttggaataatcaaatatcttatcttaatttattccttgcttgttgccttcaacatcactaattcctacttttaccaaaagcatatatatatatatatatatatatatatatatatctatc

SEQ ID NO: 207686 - DNA, 899 bp, Cannabis indica
aatttttataaactatatatatatattaaaaataatttcccaaaatattacggggggccatggccaccccataccataacatagttccaccactaggtgtgatgattcaaacttttacctataaaccattttatgcatatgaggggcaaatatatattgagtattgtcatttggtattttaaagtgcttaatattttaccgatgtggtgatgtagtgccctataattagttagtaggttcttatattatttattaaattaaaatatgtatgacttgatattaaaatacactaataatatatacttgataacttaaactccctagcatttctcacatatattactatacctaatgttatatattatttcttcaccaatgcatagaatagtatgtagaatttaatttaaatgcacgtggagaattctatataaaaatatctttaatggtaagaaattaagagatatttgcttaggtagatatataaagtagcaaaatattgatatgttatattattggagggaaaaaaatgttattctaggaatatgtgtgaatgttatacagttgatgctatcattatttttttaataaacaattaaaactaaaaattattgttgctaagaaattaaataataatatgtgaaattataattatagtatttttgaataatgatatactattagagtaattttataagtaagagtatcaaaaatatcgtaaaaataaaataaaataaaatattatattttagaataatataaaaaaatttaacattcttaaaagatattaccatcgaagatgctttaaataagctgttgcagaagttcgtgaaacgcctggtacaaaaaagaagatacaaaatatgtttggggaaagtagaattattaaagcctttgttagg

SEQ ID NO: 207687 - DNA, 1705 bp, Cannabis indica
caacatggatgagtttgctggttactctattaccatctccaagagaactcctctcaagcttgtcccagagaaacatctgatctagacttatttactaaataaattagtgtatgtttgttacttataaatgaaaaataaattgattgctatcatgtgtttttcagctttgtctttttgaagatgttgttagattagttaatcctgaaacaatctaatgtattgtatttaatgtggcattattctactaataaatatcagatgatttggtgtaagatagaactgattttagactattaaaagtgaattacatgaatgaatatgatgcaagggaaacttgctatttagaacgattgataaacatgaaaaccaagaaaccagaaaaactgtaaaagagtattgactgagaacaatttatatatatatatatatatatatgaacgggtttgatacgtcgtattgtattgtattgtgttggattgtattgtattgtatcagtattatttaatataatactatatttggtattggcttgattaataaattgtgtaaagttatagtatactttcaataaattcgactcgaacacttactataggtcgggtctgagttccaggtccaagtcccgagtccttggttgcatattcagatccaggtctgagtttcgggtgcggatcagagattgaggttgaccacatattctttataaatattataatacaaattgatacagaccatttgttatgtattaaattatacaacttatattgtattaaaaattttggtggtaataattgttgagtaaattccacttataaccagtcccttttacatacaaatatccacatcagcattttacaacagaaacaaaacaacttgactcaaccctaggtggcttcacctctacagtatcaagaaataggagttagttacaactgtcattgtaactaactcctagatctgtgataaactgactcattatatgtatataaacatcaaatcaaagcaaatacaaaagacagaacacagatcagagacaaagagaagaggagaatgtgtataccctagcctcgagctccaaaatccaagatccagagagaactcatccaaaattgagagtaaaactctcgcggtgaggattttgagagagaagaagtacatgcacaagaaaaacacaaagttagattcagaatataagagaaacaaagagagacagacttgtaaaatactgaaatcgagtcttacctgatcgaacttgtgacaggaagctccaaaatgttgtaactcaccattgttgatagtggatatcaagctagatctctgagatgagcttgacagagacgtagcctagttttgggtgaactctgaacaaatttctcggtgttttctcttccttactttgtttttcattttactaaatctaatatgtgtgtgtgtgggtgaggatcctagggtttctactgggatcgagcaagttcttcacaagggtttggtttttcctgttgagtgtgtgttgtgtttggggattagggcttcgagactcttcttgaggagtctttgagctgaggatcaatacgacacaaaactcggtgtcgtgagagatcaaatgctgccgttttagtctaagtttacttagactaaggaaaagtcaaaattgacctttgacaatgatattacttgtttttttggtgtaggtcaaagtggtaaa

SEQ ID NO: 207688 - DNA, 1214 bp, Cannabis indica
gtttgatcaatgactagttacacaactaccaaatacatctgaatatgggtacagctcaagttataggcataataaataatttttaaccacattataaatgcaaatggcatcaaattaatgtactaccacccctcaccatacttcaaagtagtgcttagacacttttaaagacatgtatcgtaattggttagcaatgctttataaaagttattacatttaattatatgagaccagatacttagtttggacacatagtgattttgacacataaaaaagtgaggaattacttagtgtcttttagcatttttctcctcaaaatagttattcaggtaattgcttgtttaatcttcatattaactttagtcaatttcaatgcacattaatgtctgaaaatatatattaaacatatataataaggctctttcaagaaaaaacatatataataagggaggatatggtcaaatgaacaatgatattttctgcattggttggtgacaatagctttagaggaagttgttgatggtggctaccccatttatactaaactattgtactagctgaattttttttttttttttgtttaaatgtactagctgaatttattcatctcttttttccttttaagattctcctcatgaggccaaattttctaaaaaataaaacaatgatatttatgctactgaataaattaacgaatattaattttatttatttattataggagaaatgaacatcaatttgggaatagaaaaatgtaataatgataatgaatgaatagtgataattagcaacagtgctatttcacaagagatatcaacctgaccaaaataaaaataaaaaatatatatcaatttgtaaatacagataaatcctacgggactcctgtagaagttttaaaaacgtttattccatgatctatctccttattttcatataataataacaaatatatttattaaaaaataaaaattcctaacatgatggtgactagtgaatatgtttatataaaattttattttttataatttgatcaattgactattgttagtttattttatttatatatttcaaaatatataataaattttttgatttttttgacagtagttgatttcgggttaatcaatttgttgatatcttgtttatttttattttatttttgtagtggggttgatatcatactgttttttcttgttattatttaactttttttt

SEQ ID NO: 207689 - DNA, 1169 bp, Cannabis indica
ttaaatgcatacataataatatgggctactcgacttataactaattaattttgaaatatatagaaccataattcaaaggattgggactcggacccggacctaaacccgaacttggacccagactctcgggacgtggaactagaactggaactggacccagacctagactcgggactagtgacttgcacccgaacccagacctaagctcgagattcgaactcgatctcgggactcggaacccagacccgaaccaagaccagatcgaccagaacccgaacccagactcaagacccaaactcgactcggacgtgggcttgggactcgggatctgggacccaagaacgggacctagactaagactctggacctcggacccagacccgaacccaatcttgggacctgagacttagacccagactcaaacccaagacccagattcagactcgagatccggaccgagaccctgacccagatccagacctagacccggactcagactcgagactcaacccatagtcagtgtttaggtcaagtttgttgaaaatatattataactttatacaatctattaatataagtcaataccaaacatgatattgtattaactaatactaatacaatacaatacaatacgacgtaccaaacgagcccttaattctattattactccaatataaatatagaattgcactctttgacaatataaaattatactagtagtctatttatataatcaatataagtagttcaccctccaattattagttcataattagagttgttcaaattacagtttttccttttaaatatctcttgaattccttatgtaccattaattcaatgtaaacaattaatctataattcaattataaatttggatccaactgttagcactctaagaattaacactataagggaagtaatattcaatcctctcggaaagcttagattctattattgtataacatgttcccagccacgcatgttattaagttcctaaaatagaaattttgaaaattatcttgtctaagaaatttaacgagtgaatcaaataactcaataaacacaaacacgagttcatgtatactaagaatttagactgatccaactaataatcatcgttgtgatatgaataaatcttctataataaacggcatgttgatgaaaga

SEQ ID NO: 207690 - DNA, 697 bp, Cannabis indica
ccatggcaactcaccaccatcgttacccagtaccaccatctgagagagtggaagcatcgaaatgacggcgtgcgatgcggcatcgctatcaacgggaggtcattattgatgggcttgcaattgcaaatgagttggcagccgagtttactgatcagaaacgcaagactggccctccattagggttaaagaacttcttgctacctcaatagtgttctccagtgtctcacctatacgtgtccgcttgccgatttctgcctccgcaaatagcattcttctctctgtaagtttttttgtttgggtgccctagctaggtttaattttaatttcttccattactgatgcttgaaatttgggtgccctgggttgagatggtatcgaatccaagctacaatccacaccatccgacgattcaaaaccctcgttgttctgaatccccaaaggcaaagaagaagaagaggctgtagagctcaattgattgggtttcttccatggtcgcggagtagtaaagcttgaagctttcaatggtttcttccgtgagagagagaattttttaattttggatcttagattgtatttagtgtttaggtttctttgattgtgtttgaattttaaaaaaaatgttgaggtggtagtggtgggcagttgtggttttgttaaggttgatgatggtgatgatagaaggaggaggaggaggagg

SEQ ID NO: 207691 - DNA, 511 bp, Cannabis indica
agaaagatactattacattgatatgtaacagcagtagaaccaacaagcacagtacagcatctgattttaccttcaacaagctgcccaaaattttcgaaagcatttcttaaactctcttctgtagtgcggaatgagagccctgcatgaagagattattagctgtagtcttttttttttagctttctctaacattactactacaatacagatcttcttagagatgcatattgtattctaggaaactagtaacaaattatagttagtttaatacaaatgcaaggaatgctctggcaaaccgttagcctgcatcaacataactacaaatataagaggaaagaagagtgaaatatagctaaaagttgtgttaggtgtgcaaccaaagtctcacattagctaaatatagggaagatcatgggtatataaggatggcaaatatgtttattgggatgctttttgggtagagtttaaaagcaaattcatgagggctaaggtccaaagtagacaatgtgaa

SEQ ID NO: 207692 - DNA, 1080 bp, Cannabis indica
caacttcttacctaccaaacctctttctaattctaaaattattattattattatctactacttttctcatacaaatgagattttgttttattttagatctctaatctccaattcagtatttgggcatatctcgtacttcactagtaatcattttaagagtgcattaattatttaagtaactttattttaattaaagtaaatttattaaagatatgataattttaatcctgttaagactgataataataataactcgaaagaaagtcttcctaagttatcgtttactattatatcatgggtggtggccttacaatttctacccaaattccctaaaggaacaattgactttaaagcttcattatttagtctctaaattgacacattcccaaagtcttggcctttgtttggtttctaatgactactaaggcacttgcattatttttgtggttcatagcaaatggagtcacaaaggtctttttaacaaattaatgctacatcatatatatttaaaaatcaccaatcaatttggtaaacttaattttatattataaacctatatacaattttatattctaattgaaatattggtgtatacaattgaaaatttctttggtgaattttcaataaatatatataaattggaattttttttaagtaaaatgtttttattttcgctacgttatacattataattatagggtattttgttcatttttgagaaattttaaataattttaaggtgtcaaaaatatgatttaaatagttcattattttgaaatttattttttatatggtaaattattaaaataacaaaataagttacatgatatttagtataaataaccaattaatctacacaagcacataataaaataattataatataatctttctataagagttaaaaatagaaaataatcatagattaaaaacaagtgatacccataatctgatctaagaagctaattagctaatagtacactaatttgagaaatttaaccattattgtatttgtagctttgaaaattatgtacaaaatccaaccaaatcttaaaatttccaagcaaaaaaaaaaaaaaa

SEQ ID NO: 207693 - DNA, 889 bp, Cannabis indica
ttttgttcaattttattaatgtggcaattgtcgatctatcaaatcgtgcccccaaattttaattttactatatcgtgcttctcgaattttaacatgtactaaattataatcccgtaaactttcatcaacatcagactttcgttagtaaaattgaataaaagacattaaatccaaaaatcttagttcagaaaaaaatttaaactgcctgaaaaagttcaaaaaacatgatttggtacatatcaaaatttgagagacaaaaaatcttaattagtcttaaatttaattgctttttatataactaaaatacattggccaattaataaaatttgtttactaagttttatccatacataatcttgatcaaaacactattttgataatgattttttatttttaatgatatttagacttccataaatatatatatatatttatatatttatatatatatatataatccaacaaaatagataaaaacacctaagatatatgcagcaatactatatatctaaactatacatttagttacatttagtctcataaattcaagttttggtagtaaaaccctttgaatttctacttttttttttgtttcattacacttccgttcaaaaatctcagttaagtaccacagtggactgcccacttacacacttgtgtacacatgataaatttttagtggtccacatttttatccaaaattcgcacatctgacgtggcacctactcatggcataatccagctgacccttaacatgacaaggaatattccagatagaagcatgcctgacaagtcctgtatggggctaatatccatgaactgtaaattaccttccaaaagaatctggtcgggctatcattatgccaatagagaaaagaagattgactcg

SEQ ID NO: 207694 - DNA, 939 bp, Cannabis indica
attttatttatgcccattaggttggcatgtaataattttggtgtgtttttgaaatcaatatatatacatatatgttcttatttagtaattactatcagtctatgaaggaattgtttaacaaaattggtgtgcacattttttctaaaattcaaatcatttataatgacaatcttgcaagattacataaagaaaattcaaagagatatctttcttttataaaaatatgatcaacaagataataggatattttcgctagatagtgaacaattttattgagagacccacctaacaaaaataataaaaatatttggcacttcacttaaaaatgttgagtttagctcaaaagtcaacttgtcttggagttgcaaagatatggttcaacttgtcagaatcaacttgtcttagagttgcaaaaatttagttcaactttcaagaattttgagacttgttatttgtcatatttatcaagaagcatactctctcatttattatatatcgttagaagatgaactacctcatttattatatatggttagcagttgaggttttcattttataaatatggagctcttaaaagaggatttgcatctcaatgaaaagcaatattttgggtacaactttgtacaatcggattcattgggaaatttgagagagaacatctgtatagccaaactttaggaaatactttgagaaacacttgagagatattattagtaagaattcagtatctatattatttagatttaataatataattaaattgccttccgtggagtaggcaaattgccaaactacgtaattctgtgtatctttatttaccgctttgatatatatttatcgttatcttttcctatttactgcttccgtgcacaacaaattaatcaaagccaaatatagcgatattatatatacgaggcatatcctatgctacaagaatcg

SEQ ID NO: 207695 - DNA, 873 bp, Cannabis indica
gtacgagtgacacgtgtccatcactctttgcacttggacggagagatattatgaacagacttcaagcaacagatctgccactactacaatttggccttttagtgacactatttactgaatcgcacaaaagtaggcgtcactatatagttaggagtaacttttagtgacatgcataattagactctaaacattaggtgttagtctcctgcaatgtgtgtcactgaaatataaagcgtcactaaagagtgaatataaattttttctgatttttaataatttaaaaaaatattgacctacagtgacgcgccaaacatgactgggtaaatatatcccctcatacttagtgcgtcactatatcataattctatttttttttaaaaaaaaatatatatctacaattaaaaaaaataataaaaaaaaaaaaaaaaaaccctatcacttttacaaaccctataaattaactaagtaaataataaaataataaaatacagccgatcattggcaatccgaatgattataaaatacagttttattctttattgtgtatacatttcaataataataataataataataataatagtaataataacaataataattatttctctcctttggttccttaaaactatgcaaccctaatttttcacattttctttaatcaataactcactctttctttcttgtcctctctaaaatgggctgacggcggaagcacctcccgaccccagcgaacgacttcccgacttgatggcagaagcacctcccagccccagcaaacgacttcctgaccagacagcggaagcactatgcgacgatttttgttttttggtcaattgtggatgttgcgatttttgggtcgcacggtgtctc

SEQ ID NO: 207696 - DNA, 618 bp, Cannabis indica
aatatttaaaaataaaatatacttctctagcataacttatactaaggatgtccaagtacttgcaacaagttttcatagaaactaacttgatcaacgggttgaacaatgataataaagatgagtgaggctagagttagattagaaatataaatcacaaaagccttgagagtatcaactttttcaatatatcattatggctctgaacatggttgatcaacaatgcttgtcatttaatttgtagtctctataatttcttattttgtgttataaataatgtatttcttcttacaacttaatttatggttgattaaagctgtagtatatacaattatattttttttaatttaattatgttggttttttgttttcaaatgagcattgaacatataataataataataataataataataataataataataaatattttatataagaattgtttagtgagatttttaaaaactaaatatttgagaactaaagaagttagaaaatacagaaataaatgagattgggatttttatatggtttagatattattaaatcttaatccatgagtaagtctattagcttcttaagggtgtatttgatatgtttataatatttttgcaggaa

SEQ ID NO: 207697 - DNA, 510 bp, Cannabis indica
tatgcttgatcttgtgataactatgttctgtgatttactctaataaaatatgaagtagttgatatacttgttgaatttacttctttaattatgtttgactttactcttatatattgttaatttaatccctagtattctaaagatttttaaaaatataatattttgagtgctaaacaatcttttaatagtgatatacttgttaaatttactttttcgattatggttatcaatattttttaaaggtattttcttaagttatatgggatctgatatttaattacactaatagtgatataatatcgaaaaggatactaagctctaataatacctttagcaattctctaaacaatctcctaataaaaaaaatttaaaactatattttgagtgctaaataatctcgtaataaagattttttatgaactaaccataaagagaattgttataacacactgccggtattgcctaatactatttaaaagtgatatcttacgattggttaatgatatttta

SEQ ID NO: 207698 - DNA, 1788 bp, Cannabis indica
gcttaaattctggaaggaactatattgatgaatgtgagttttacatataaaaataatacaagtaataaaataaagaaataggtgtgttgagtgcgagaaaaaaagagagcgcaagataaagagcattgtataattattaacaacttaattcatcccatctaaaaataattacattgtttctttggtggtgtgatcaattttcacacaatcttcaacattaaaaaaagtaaaagaaaaattgaaaagtttaaagcaactaaacaaaaattgtttttctcttgttgttttaaagctttttttgcattgtttttgcaacattttatgcaacttgaacataatgtataaaactaagatgtttttagggtgttagagtttgttatgaattgtttacactacactatttatttaacatgtgaaaatagtcttcaattttaaaacaaaactcatgtcgtatctcatttttaaagttatgaaaaaataaaataaattttggtacatagttacgggaaataggaagacaacaaatattatattgatttttattaaaatgggagttgttaggaaaagattgcatatattaagaaattttaggtatactaatgtaactaatacattttaatggtacaacaacacacatagaaccacgctatcaattaaaaaacacttacttaccaccatttaaaattgaaggtaaaagaagcttcatgttttacatgcagttgaaactaatatttaatagtttactccatttttttgaagttgtagtagagttgtgaagatattatttggttctcttattattgcttttattttatttttacatttgaatatcagttattacaattcaaaaattcattctaaaagcataaataacataattattataataaaaccaataatgaattttagaaatagaaaagacaatattaattgattttcaatttactaaaaatataaacaaattaaaaaaaaaataattggcggcaaaactctcttatattttatttttatacacttaacccttttatcttttttcttggtggcaaaacccccttaattttacttttctttacaaatttaaggcatcagttaaatattatcgttaaatatcaactggatgaccactgtgtgcacttgtatatacatgaaaatgaaagtaaaatttcgaagccaatacaataataatttagttggtatttaatggtaatatccagctaacatcgcaaatttgcaaaaaaaaagttaacataagaaagttttgcccccccacaaaaaaaaaaaaagaaagatagaagtgtaaaaatcaaaacacaaaaggatttcgccgcgaaaaatcctaaaaaaataatcataatgttcattattttatacaagattcataagttaatgtagttaactaaataaaagtttaaaacacataaaaaaaagtaaaatttctcttaaattttgctctttactacatacaaccaaagccaaacacaactatttagtcattaatccattgaaagtggcttcaaccatttcgaattttggagtatcatttagttcacttttaatatgttcaattttgcttcaactagggaggctatacgtgctccgcacgtggatagtaggatatagaacattcacgttataataattcaaagtgacaaaaaaattttatgttccagcatgactgtagttttcaaagttgtggcttatttacatacttgttccatctttagtagtgatgtaaccttgaaaagtatgcctatttacaagtgttccaaagttgtggcctacttcaat

SEQ ID NO: 207699 - DNA, 764 bp, Cannabis indica
agagattagctagatttaattagatgagtgaatgagagtgttgagttaggaagggttgactggggtaaacgtgggccaagacacttataaaaaaaaagggttacaacacgttctacgcggttttgtttaacatgtagtatgcagcaattcctcgtacacacgttaaaaacaaaattatataatgttgtttgataagataaacactgtgatccacgaacccaatatgatttattgttttgtcttttgaacgaccacactacatactttcttttttattattaatttttctttattaaattaaaatatgtcacattcaaatttttgagacgaatatatactcgacggcagaaaaacgtacgtatggtagtcacaacaaaacataccatgagaattagggttaatttactattgaaaagtaagataaaataatatcacaaaataacataaacaatttaatatctcattttcactttcacaagaacaataagttagttaccccaaaagtttttcaattatgtctcttgggactgtgttggacaatgtagtgtaaaatttttattttaggtttatattaacgtttgagttatttgcagcaaaacttctttaacactcaattcacttgtaaataaccatccaacctctaagtttagtgggaaaatcatccaaaatgttgttccgtttgtatttttaaggtgttgtctcctcatctccgttaactccttattttgcctacgtggcaacgacagatcactaaaaaattatcc

SEQ ID NO: 207700 - DNA, 2034 bp, Cannabis indica
tatggtggcatttagtggagagaaataaaaatatgaaaaaatcggaacaagaatggaattaaggtaccagttataaaaaatgtgaataaaaatattagataactttattctgattctcattcacatccctatttcgattttcattttaataatttaaagttatcactaatcagttataagataccaagtgttaaacatcactaatatcgtatagcaatgctatcatcatatatgtaattgtgtttattttagttggttattttcatagttgattagttggaggagataaaaatttattataaatattatacataaagagcattagagtttgtgttaaattttatcagcacaaagaccatttctacttgctcttcttattttgttttgcttttatacactttttttttaaaataaataagaaacttaataaaagcaaaacaaaaaagaagagcaagtatatgatttattttatgtacagagcaaacttattttgatcaatagtgatgactacaaataagatatgataatgatagcgactttgaatgtagtggcgattcggctttgaatgacaatatttttaaaatcatttgataaattttctatatatttatcaattaatttttgtagatctctattttatgtgaggattttctaactttctatttttttttttttttattttacttataacgtttgtaaaatatctttttgtttagctttcttttttagataagaaattgtatgataaatttttttaccatattaatttatttttttgtataaaaaatatgaaaatttttagtagaataattattcatactattaaaaatatcaactcaataaacaaaatataaccgcacgcgaagcgcggtttgttttctagtataaatatacaactctctatacacacaaatagtactatgtattctaatttaaatataatatataatatattatggattattagtaattgaatagttagtattatatattatctcaataaaaattcactcacactaaattatatcaacaacatataatatatatgatatatttagtttttaacatcacttatactcaaaaaaattagaggtacttaattatatcgataataatatatgataaaaaagataattaatgataatttagatcattatgattagtattttttaaaaaaatttttttactaaaaaataaaaataaaatttatcatgtccttatgaataatattttggcataatttataggtgcccatatcatttgcatatgtgtatacatgaattcaagacacttggcaaatggtaagtgattaattattgcctagttgtgtggaattggattgatttgccttcaaatgattatggtaatgatagaaggaacttagaactagaacaagttagcttgcactaataaatgataaatttcattctatgatgatatattatataataataaaaagaaaaagagcaattaataactccactttttgtgttctaattgatttcttttctgcttttaggagaaagatagtctaatgaatttggggtcaatttagtcttatatggaatggaccataagaacaaaacagccaatgttgaaggatttatatgtgacccaatgaaaaaaaaaagtatcaaaggagaggaaatttctcatctacttatttaatcaattaatccacgtttgctgcccaccaaatttgtttcctttttattatcatattaaatgatttttttattagattaattattttattgtctaaactacaataccatatcatatgaccttatattatatactttttttttgaacaaaattaccttatattatatacttaataataataataattgaaatttcttatttatttattttggacttgtcaaacaactcaatcaataaaaatgttacttttggtcggggttgagcttaggtaaattaggtccgcgcttagagcttatctgagttaaaaaataatatttttcctttaaagatatatagtttagatttctttttaaaaaaatattacatata

SEQ ID NO: 207701 - DNA, 511 bp, Cannabis indica
cgagtacaatgacttcttagcgacaatggagcaagcaagacagaggaacttggaactcagctcttctctctcaagtttttggggagagtttggggggtagaattaaaagtattgccaggcttccgaactctgaagtggatatactggtgtggaaaggagcttcagatggtttgtacactgtgaaaagagggtatgaggctacgactatgcatcgagccacaacggattcgaacctgtggaaaagtatatggaacaatggtatccaatttagactctcgttcatcatttggagagccatatcgggatgccttccaactcgaaatcgtttgggattcgtagccgagaagatgtgtcctctgtgtgacttggaaattgaaaccgctctacacatcttttgggagtgtcactgtgcgcgtgcactctggtttggcagccccttttcatgggttatggggagtgttccttgtagtgctaatactgtcaaagggaggattgagtggatgctctcaag

SEQ ID NO: 207702 - DNA, 831 bp, Cannabis indica
atatactattaaagtttatatttttacctattatcgaaatccgaccactaatactgaccaaaattcggccaccacacaccaccacaataacacaatcttaaaaatctagaaaaaccctaaaaaaattgacaaagtcaaaaataaagcaatgtaagttgctaaaattattagagattatatttataccttaatagacattgagattcaacgatttctctaccaaaatcggagctacaatcaccacaactaccacaatcaccacctttaagctcagtttaccctgaaaaacaaaacaaaagatgatcaaactctcagaatatagttttgggtatgaaaaatacaagatttttataaaatgggtgaaaacggataaaaaattgagaaaagggggatgggaggcggtggttgggctagggtttcgtgaaggggctgttggctattttatttggggagaagaagaagtgaggaagacaaatagctaaatagggttatataaaccctatggtgtcgtttattttgtaataactgacgccataggggacacgtgtcagccaatgcgtgcccctatagcgtcgattattacaaaataactgacgtcatatgtggtgtgattaaaaatttaataccctatggcatcagttatttcataataatcgatgctataaggtgtttttaataaaattttatttagccacagtctatagcggcggttgttttttactaaactaaaaaaaagcgcctctaattacttgttttgtagtagtgaaatacaaaataaaaagatcattttcatctataaaacgaaaattataattaaagcaattgaagtta

SEQ ID NO: 207703 - DNA, 947 bp, Cannabis indica
acacgaaaaaatatgaatttgggcacaacatgacacgatgctacaaattggcatgacacaacatgaacaatatgagcttgagaatgacatgacacgaaaaaaaaaatatgagcttaaacacaacacaacataacaagcccaaaatgcatgatacgtaaatacgaataatctattctgaaaatataacatgttaaaagccttatatttgataatagttctaataataatttgaacatttattaataaatattcaaattttaatagttataagaattttatgaaaaattgttgaaaaattatttaaaagtaattgaagctataaaaagatataattttagtaattatcttattaattgtaaaaataaaatgtagaaatagtagagaacgaatttgaccttatataagaaaatgagttggcctgagtaaagcatgacacaattctaagtacagcacgacacgacttatattattttatgctacggcacgacacaactcatattttcttatggcataacttgtattttttatgacacgacacgacacaactcgacctgacctatatttttttatggcatgacacgatatgaccttcatttttttatggcataatacgacatgacctacatttataacacgacacatatttacagcaccaattcaaacagtttagttgacacacatatataaaagaagcactggtgcaataaattatttaaattttattttttaaaaaatttacaaaatattttaaataactaaaatatatattatcaaataaaaatattaaaatcaaaattatttaaataataataaaaaaatgcagtggggtataaccaattttggggatgcaatataaaatctcgtgtaataattagtaatagggcattgctataagacaatgtctagcactaatgatattctataattgttatgttatttttagtatt

SEQ ID NO: 207704 - DNA, 828 bp, Cannabis indica
aatgcacaacaatcatcaacggagaaagatcataaactatcacaaaagtctgaaaatagaatggtgtgtaattagtgtgaatgtaagacgttcctcgaaataaaggtttcaacctttaacaagcaattcgttcaagacgacctaaaactacgaaaaacgaagtacccttcaaaggaaaaaaccccaataccaacttctagggctaaaaggcgaataacatcatatgcgatttctaagttaaatcaattgaataattgagagtgaagcctaagacatttcaaaataaaacgatccttttgacgaaactaaaaaaggtaagagacatgaagggagagagagagagagagagactcacaggtgggggacggcgagagaagaaagggtgaattgggtgagggagcttcggccgctgactgctgctttggaaaatagattataaggtttggtgcacttatttattttatatgtatatctaaagaaaatagattacatatttatattttccagcagtagcgagttttaggtgtactatttcgatggtactttatagtgtaatagaatttcgatatagtgtgttcgactgggctgttttatcttggagacgacgaggttgatagtctccttacaccaatttgggcagtgccacgaacgtcttaaagagagcgacctactcaacccagattctaattcggttacttcgttccttttattttctgcagcaactagtttctaataaagagtttgttcaccaccgctaatgttgatagtgatatatttgtcattttttttttggtaatttaaacaatgatatatttttagatagtcata

SEQ ID NO: 207705 - DNA, 1391 bp, Cannabis indica
tagattaaggtctttagggtaaaaacgcttgcgtaggccatgaatccctcggttggggcacacgttgggtgtgtgagtcccaacgccaaatggttgattgacgttttcgagctctctagaagtgccatgaggacccttaaaaagatgttctttcgatttttcaaaaattgggtagaacacttatattaattattataagttgaacaagatagagttttctattagtataattattattagtaaaaataaatttaattaaaattattttttttacattaatttgaaaattaaaaaatatatataatcaaatataaatttttaatagacataaatacaaagtaaaaaaattataatttgaagttagatttggagttttgttagttaaatccctaattaataatgttcaaaattaattataaatcacactaaatggagtgttaaaatgagagttgcaatgtttataccaaaaaagaccaaggctgtaaataaagagtggttcaatgagctataatgtaaaaagtatagaaaaatttgttgatgtatagattgttaaggcccgaattgggtgctaattagttgtaaatattgttttgagcaatataatgtcctgatttatcaaaaaaaaaaaaaattataaatacataaatatattaattatgatgtaatttttaagagttaatttgagtcattaaattaaataaaaactattttacccaattcctactgtaacaaataaaaacttgcgcttgtttttggcaacactacatcaaaaataaaaaaatgctcgatcatttctcaaggcactttaacatatagatgtaaaatatatttgctcttagaatataaaacattttgcaaaatttttgaggtcaaagttgtcacatcaacagaatacaaacacctccttttccgatttcaccattctctttgcatttgatgtttccaacgattctctccagctatgagtatttaaaacagaaaaacaaagatgaaagaaaatgagtaactaatatggaacaacatcaaaccgaattaaaacacaactctcaaggaaatataagattataaacaaaaacttggagtgcttttgaaattaaaaattcacccaaaatcacaaatactaaaacccaaagcttgggatacatttctaattaaatgcatcgtcaattactactgatgttttatgctatgtatatgttctggtatagttgaatggtatttagctataattatgttctggtatagttgtcgattggggattggggttgctagtgaaaatattacctaataatctagatagacatagcaaacttcgagtgagatcatagtaccatgttgtagttatctgctgctcaattaatttggttaccctttcccatgtacttgtatat

SEQ ID NO: 207706 - DNA, 587 bp, Cannabis indica
gaagttcctgtaaaaccaggtagaaatattgcgatgattgttgaggttgcagttagaaatcaaagacaaaaacttttgggttataatgcggcacaagagttaaataataagttaattgcaaatatgaaaaaagatactgaagaacacagaaagcagttaaaaaataacaaaaattaatttcacaataaaattttttgatgaagtttgtcattcttgcaatgaggattttattgagttataataactcatagagcggagttcgtccgttttaaattaaacaatttatttatttatatatagggggttaaataaatggcaaaacacatgaaaaccatggatggaaatacagccgctgctcacgtagcttatgcattttcagatgtggcaactatttatccaattactccatcatcaccaatgcctgaagcaattgatgtatgggcagcagatggacgtaagaacttattcggtgaaactgtacaagtaactgaattacaatcagaaggtggagcagctggttcagtacacgggcgtttagttgtcaggggcgtttggtcgatctacattctacagcatcacaacggttt

SEQ ID NO: 207707 - DNA, 686 bp, Cannabis indica
tttattttattaattgatatataatttcttctcttttttttcctcttgtctctagatcacatcaaaatttgtattttgatacagactgctacctgactgttcttatatatgtgtgtatatatcctgaatttaatttttacccagtcaacaaatttaacaaacttcgtttgtgctgctatttgttaatcgcaagcagtgacattttcttgattcgtattcatcaccatttcgattctgtgaggtcattaaacaattctttctcgtgtacccatatgtatataatatcattttttttatttgaagctcccatggcaattgtagatatatatatacataaattcactgtttcaaatatgtatacaagtgataaattataacgtttttattttcgctatatataatatacaaagtagctagaaaatattttaaacgaatatatatcatgcgttaatgtatatatacatggtacttaatatatgttgtaaataatgctagctacatactgctgataaataatttaataattaataaattgaattatttaacaaagtaagacacattcatttcaaaaacaaaaagacaaaaaagacacatttatataaatatttattgtatataattaatgacacttatttttataatactgatatgtgatatttctcattgctatcagccgacgttctaga

SEQ ID NO: 207708 - DNA, 725 bp, Cannabis indica
agatcagattcagtaacttagaacgaaacccactaaaagaacaaagtaaactacaataaacgccataatttcttttttcattgataataataataatagatagaaagagccactctcatttagataaaactacaagctaaaggagtgactttttttagtacacaaaaaacacttgttctttcagtcctctctaaatagagtaccaaaacaacaaaataaaatgaaaaatttcccagacaatacaaaaggacattactaaaaagttatatagtaaagggcattattggaaattctccaagtttcctaagggcatttagggcctccttccttagtcttccagttgttgtagcaagggcacacagctttattaccataataccccggtggcacacacaggcaggtcttacaacatttctggcagaagaacatgcacggcttgtggtactgagttcttccacacctcctcacgcattcagatgggcattctggtcatttcacacacaaaaatcttaattagtaaaaaagaaacccaaaatatggtcaaaggccatagaaggcatttttgagctcctcaataaactttgaccaaggtcaaacaccattcccgcgcgtggatcaaacgctcttctgattctctcttaaaacaagatcatgagaatatgtgttgttgaatataattttaaacaagattatactgagagaattaggataataatttaataata

SEQ ID NO: 207709 - DNA, 648 bp, Cannabis indica
gcggaggtttaactagaatcactcgctaaaatcagacacatagaaagtcacgccaataataataataatgaaatattaggaaatccactcaaattctggctggtccatgtaatcttttaaaaaatctacattacactataaataataggagtatctctaggaatacattaaattaccttatcactaaattagtatcaaaaaagtattttcactctaactacaacactaaaataaaagttaatatcatattaattatcacttttaaaaagtatattatttcaacgtgttaaatttttttgaatttttcaaaattttactaaatcgattaaataactataatatacataactataaaaaaataatctaaaaaagcttattagatactcaaacaaataagaatatatttgtatatcacttttaaaaaagtgcataataaactttctcaaaaataagcttttaattctgtaaatacaataatataaatattaattaaatatatataaaatactgtaactataatacatggtatatatgtcgtgcagtgtagaaaaaactttaaagtagtgccctaattagtctttccttatagtattaattacagcaataatgttgttttagtggtttcatttagttgctctaagttatcct

SEQ ID NO: 207710 - DNA, 506 bp, Cannabis indica
aacaccaaatttggtgtctctttagagatgctctaagcattacgttgaaatagtttttttattaattttatgtttgtaaaagaaaaaggtacgtaggattgcaatatatcagaacttgagtgaccccttaattatttcggaaaaatatataaataaaatttaaagagatcttaaaaaaagaataagtagagagtgatgagagatgactaagtttcacacgaggcattctctctctctttcctctttctcatattggcactttcctcaaggaaaggggaactaaactagatattggtttttgctataactatgttgtatacgaggccaacatttatgagtaggtagtctacagtactgacagtagaattttggtgatgcatacatatccagtgcttaaatacatgacaattaattaaggagatactatgagagtgacacacacggagtaaaaacgctaacgcccttgtcaactcttctctcctaattaataataaataatacatgca

SEQ ID NO: 207711 - DNA, 648 bp, Cannabis indica
tctctctctctctctcttatagattttgatgcttaaccattccttctaccattatggtaatttcctcaagtgggggagccttgtggagccttccggtggtagcaagtagcaactaaaaaagaagtggaagaaactcactacaatgcccaaaaattaaaaatacagaaaaaagggagaggaatagccataacaacaataactcatttacactctttttttttctttctctttttagttatatattgtttgttgcattttgttttcttaactcagtctgaaaagtgaggttttttctttactttcttagctctagtgttttggatctgattttctcttaaatgggtttgtgagttttgttctgtttttcttcttttcaaagctcaagtttcaatctttatctcatttatgaaaatgggcatttgtgtttttcaatgttgggatctgattttctctcaaatgggtttgtgagtttttttctgttcttctttttcaaagctcaagttttaatctttctctcatttatgaaaatgggcatttgagtttttcaatgttgggatctgggttctctacattattagctcatatcaaagttttgaaatttctgttcttaaagtaacaacctttataatccttcccctctctctctct

SEQ ID NO: 207712 - DNA, 1468 bp, Cannabis indica
aaaatttgtatatttgatttgaactcaactgatcaaatctaattatttttattgaatgtttaatttctcagttaattcaatctaattgaattgagtcaactgatttgaactaatcaagttgatgcattcgaatggatcgatactaactattaagtgcattaactaatttttttattaaattgaattgaatccatccaatcactagactaaatttcattaaatatatacatataaagataatttaaaatttaattatcatagtaataaaacacaaatttaacatacataataataattagttgatttagtcactctaattcttatgatgccataatgaaaatataacaacacaaatccaatccaagctaataatcataagttttaattaagataagttcaatacatgcaaatatcatataagttataaagtaaaattactcttaagtttaataaaatgatatgtgatattttaaatttaggattttttttatgtaatctagtatatattagcttagaataaaattaattaatatattttttaaaattaaataaataaatatataaaattaataaatatattttaagaatatataagtataattgaatgataattggatcggttcggttatttattggatcggatgtcccatctaataaccgatccgatctaattacatttttaaatttacatccaatccgatctaattataattagataatcaattctgatcgataataattaaatttaatgactttctgcacacctcaatttgaagggagattctctccctctccatctcttctccttcttattctttaatcaatatcttttatccatctttctctcctatctaccaaatattgtgtaaatatttttatgttgaatgtacgtaaactattaaatttactaagtttgtaaccctcaataacaaaaattatatgtattcgaaaattcaagttcataactctgagtagcaaaattattaccatttttttaatggaaagagacaaatttaatatgtcttacataaaccatatgtcttgtaaaagcaactttgtaaccatttgtaaatgaattttgaacttagttttcataaaggagtaaaggactttgaactatttagtcaaataataaaaataaatgtaacacatattccaagatttccatgggtggtgagaaataacaaagagaatattaacatatgtaaccattcttctcttccacttatcttaacaaagactaggctagagagagagagagagagagagcaaaaggagcaaagggaaatgcttactgccactcacaaccatgcaacaacaaccttaagattcactcctaaacatggttcttaaatttcaataatgggttatgtttttctttagcttttgttcactttttcttctagtaaactgaaaacccagaatgattatgttgtttcagaaactgggtcctttaagaacatgggtg

SEQ ID NO: 207713 - DNA, 791 bp, Cannabis indica
aaggcatgatttggtacatgtcaaagttttaagagacaaaattcataattaacttttatataaattgaaagagattttttttttctttgaacattgttaaaaagcatgtgcgatctctagcactctatttaatctaatgtaagagtattactattgggtacagggccggcccaagcattttgggggcctcgtgcaaaattttaaaattggaccttttttagaaaaaaaaaaaaaaaccgtgtacattaaaactacaattttattactagttttttttaagatttattcataaatttttaattataaattttttatttatgtgtatataatagaaaaaaaagaaaaaataagccttttacttaaaaaaaaaaaaataaataaaaataaaaaattgggaccttaaaagatggggccttgtgcaatggcccaagctgcccaatgtttggccggtccctgattgggtacttggagtgtatgtttagccttatctaaaggtcatacctttctattagttaataatgttttctaaaatttattatcttatatgttagttttatggtactaaatcatatacacagcagaagaattttgtaactgattattattgtactatatcgcggaagggtttcgtactgattattattatactatatcttaataaatttctagatgtgtgtacattaaatcaaaacataaaataataagtttaaaatttaccttttaaaaactatcacgtattcttgaaacttctcgtatgtaatgcaatttgattcaaactagtgcatgtgtat

SEQ ID NO: 207714 - DNA, 777 bp, Cannabis indica
caactcatatacaactttaagcaaagatgcatgtgttactaatactgtatatattttaaagggtgatatgacatgatttagttccattctgatcctatcaattcattagaataattctaattcctattcctttatatattattcctatatatctcattattatatttatactttcacttgagttaatttgtaaaaaaaaaatgtcaactggatagcagacatgcatggtttcttcaatgcaatttttggagatattaatggaattgactaaagaaagaaatccttttattataaagtaataatatattatttattaaaaagaaagttatattattaagaataaaaataatgtatatatatagttatatgtgttttaacacttgttaaagaatatatattcttacatcaatatatatatatatatatttatatatataaattaatgatttttttaatgataacacacatgtatgataagtactatttcaattatgaactatatatttgtaatgattaaaactaattaattaaagaatattcttacatcaatatctaaaaactagttattgagttttattatgataaagacacatgcatggtaactatttaaaaaatattaaaagaaaggtatgttatgtgtgttaaaaatactactaaaaatataacaacaactttctagtgaatatatatatattttttaattattattaaatgtaatttttaacctacaacaaaaagttaaattctcattaataaaatattatcttgatacaatac

SEQ ID NO: 207715 - DNA, 746 bp, Cannabis indica
acaaacttttctttatcagatgggagggctaatattggagctgtaatcaatcttgtttcaactattggaagcttgcttcacacttatctgtccacaaaaactactaattcttcttagtgagttcagttaagggtgtggagatcctaaaaaatccctcaacaaaccaacaataataaccagccaaacctaggaaacttcgaacttctgtaactgtctttggtcttggccaatccctgatggattcaatatttcccggatcaaccctaatcctatctttactgacaacgtgttagataaaagacacctgagataacaaaaagttacactttttgaagttagcatatagtttatattctcgtagtcgctgtaaaaccatctaaagatgttgctcatgttctgtttctaactgagagtacacaagaatgtcgtcgataaatacaataacatagatatcgaggaagtccttgaataccatattcatcagatccataaaagttgtcgaagcgttggttagtccaaaagacataaccaggaattcatagtgcccatacttagtgtagaaagaagtctttgcaatttcgtcctctcggattctcaactgatgatagcccgatcagagatcaatctttgagaagactgtctttccctgaagctgatcgaataactcatcgatcctaggtaacggatatttgttcttgacagtcagtttatttagttctcggtagtcaatacacatgtgtatggat

SEQ ID NO: 207716 - DNA, 1040 bp, Cannabis indica
agagtcatttgaaattgaaggtgcgaaacagaagctacatgaactttgtggcaagaagaagtggcctaaaccaactttcaagtaagaatttttttacttcattacgaaaagaaagatacatgaattgctaatttgttttagtttgctaaataggttgagccttagaacaacatcacagtaacacagccatatacaaaattagcaaaacaagttagctatgttttaacttcattattggctccgcattattgattttcaatttatattttgaacaaataggatttattctcccaagaactatgaccttgtatagttttgttctctgaatttatctttgttgcaaaaatttctttagaactgtaaaaattgttgcaaatatcctcttgaagttgtattatgattatttctttaaacaatttgttgatatagtattaacataacgttaatgtaacccaattcaagagtccagattaaacataattgcataaataacagtctaattatgaattatgagagtatgtatgtgcattcttagagctattgtttgtatgtttaatgttaataaattgaattttaagtagcttaaagttattaatcaagtatttgtacttgcaattatacttgcaacctatagtcacataaccaaattgttttaaaaaatgagcaaaatgtaactagtgggggatatttgcaacaatctggatacttcagctgaaattttcgcaatagagaaaaattcaggggcgaaattcttatttattcttttatttttaggctgaatggtgaatccaggactagctttaggcataagcggactaggccccgtgcttagaacctgtactatacgggggcccaaaataaaaaatgaaaggtctctttaagtttttatttaagttaaattaagtgtattgtaaacaacaaatatttgtaggttgattggttaaggtatatgacacattacaatacgcaatggtagcttatcaatagtgtagagtgtagcagagtttcccaattttgagatatactgatatccgtacggt

SEQ ID NO: 207717 - DNA, 805 bp, Cannabis indica
attttgacttctatatccttcattgattagctaataaaattatattgagatgagttttatttagaacataaaattctaacatatgaaattttggcaaatcttgtaaaaaaaaatactctatctttagagctaataatattcagtcatagactaagcttaatttacacgccaaccacataaaaattatcatttgtccatctttaatcttgttttcttcaacttaattttgtattgaatcagtattcaaaaaattcgataaacacaccccaattccaatcttccactcttcaatacaaatttttatttccactcttcaatacaaatttttacgatgattgaaagaggaaaaaaaaatctcacgaatatttatataaaaaataatacaaaaaaataattataaaaaatatgaatgaaatgatgatcataaaattaaattgtaaggaaaataatggatcactgtgcttggtgaaataaaataatgaaataagaagagaaaaattaccagtgaattggataggaaaaaaaaatatgattttgacaatttttttttggacataaagactaaaatcactttttgaatttacgatgttaacattcacaatcaatgactcttcgaacctagatagctcattatctaactaaaaagtatgacatgccaaaccataagttgagcgagctacatgcatgagacaaagttgtcatcgaaaatttagacaatacaactataacgacctcaaataatacaccaagggctcgattggaacgccgttttaggtcgtattgtattgtattatattgaattgga

SEQ ID NO: 207718 - DNA, 962 bp, Cannabis indica
tgaataatcagtgagtttcaacttttagctctaaaaaactcttttaacagaatatctttagtagctttcttatgaagctcttcctaaagaaactaaaagctaaagcagaagctcagtcaaacaagagtatatagtcatagtcgtagaatccgaagccggtgaactaaggcacggcggatactaatctataatgaagaagataatgatgggaaaggaataaacatggaatatatgccttcttcacttattttctgttcatgtttttacttagtcaattaagaaagaaagcatataaacaaagcttttaaaatgggtcctacattacataactagtgaagttagaaaagtgaaacataaacataaaacataaaaacactaatcattgtctttatatatgtgcatattccttcttgttcctatccaaaaccaacatcttcaaaatcaaaatgttccttttgaaaagaaaaaaatagagaatggagagaacaccatgtaataacacctagagacatacaactaagattattaacaatgaacattcatttaaaataatttaatatatcaatagaaaaaaaaaaaccaattcaatccaaataactcatccattcacctaagtgcacaaactcctaattgatgtgcttttatgaacaacatgaatcatgttagagaaatattaaaaggcgtcagtgattcctaacactttctaagatgttatatcgttattggtacaattaaatattgagtctcatataatttaatacagagtataattattagtcactagtagtgtctaacactttctagacgtgttatcttacaattggtcatcgatactttattacattaaattatatagaacatgatatttaattacactaatagcaatttgctattgacacataaaaagtgtgaggcaccagtatttttaatattctctttcatatataatttttatagaatat

SEQ ID NO: 207719 - DNA, 1109 bp, Cannabis indica
cttttagtgaccaaattaatctcaaacttggcacagccacactaacccctaacattataacacgtgttaaccaaaattattttaaatttaatagatttatatgctaattatctaatatttaatcaggaaaatccatggagtttaacgtacatacaccctgtcacaataaaatattcatatatttattggagtcatcatctaacgtttttttttttttaaaaaaaaaaaagaagaaagaacatggtgtttgagtttttattttatttttgtctgtttaagtttgattttaattgcaacagaagagaaatagtttaacgcatgtagtcaacaaaatataatttaaggagtgtctgtccattagagttacaacacctagtccccaaagctaatttttttttaaagaaatattaaaaggtattagtggtgtctagtactctcctatgtgtcaatatcgctatcagttcaattaagtattggatctcatatagtttaatataataacttttaaaaaatattattagtcaatcacaagataacatatttagagatactacacagtactactggtacttaataacaatactctttttttatcacctaattaattcttctccataatttgagtttatttctagataatttatagagagacatgggcgctaaaaagtattaatattttaagatatttgagtaaatgtcattttaaaccttgtgttttataaaaattaattattaaaatattttattaaatgacagttcaaattaagttttcattaaaatagtacaaaatagtaaggatgttcataaaacttaaatctgtactacctgcatcgcgaatacctttacaaaatagtactttgaacttaatttctgtcaaattaaaacttaataataatcttacctgaaactgttatgatcatacttaagaaaatgttaaaaagtgaggtcaaggtataattttgttgcattttcaaaaatataagattcactagataatttttgaaaaaacacaagtatctaaaatagtatttaccaactcatttttggcaactatctttagtaaaagagtcatttgctactactgttagttgtattctctctctctctct

SEQ ID NO: 207720 - DNA, 686 bp, Cannabis indica
taaaaatattaattattcaaaaattaaacttgatgttgtgatatatgattgtggtgaagtattctccaactaataacaaaagctttgcaactatttagctttattacattccaccaacataatactaataaatatcgctacttagatcacttataaactaataaccaaataacaaaatactagtgtcatataatttatgaaattaattttttagttgtttaaataattctgataaataatagtgtgacaaaattgatagttttatcaattgtaaaataccctctatatatatatatacatataggaagttacaaacttagagataatgatacaaaaaataagaagttgcaaaggcaatcatgatgatgagtgagatgcaatataaaattggaggcttcattgagtggaggttctaaacacaaatatgacacgtatgcccagagtaagctcctacagaattgatcgttattaaatttttaatttttctctaaattatcactcttaattatagtaaaataaagtactaatactatttaaatttatgcgtaattgagaggtattaaaatatagttgttgtcataaaagtttggctagattcagaagagaaacaaaagctaaaaatactagcagtcatacatcatggtaaaaatatcgcctacaataaatgttatattgcctaggggtac

SEQ ID NO: 207721 - DNA, 1385 bp, Cannabis indica
tgtttctacaagcttacagtttagttccaaggtcctggtgtgaatccaacctaagtgaacaaagggacttgccataatgttaattacttcatataattaatttttggaataattatctacgatcgctgctctgaagttcattttaattttcaaattttggtcttttgaggagcaggtttgttaaggccattttaatggtaaaactcatattttcaattccaacaacatcattaaaaattacactaaaaaatatatcttttattattatattattttattaatataataagaatattttaatataaatatttatcaaatctaataaattatattaataaatattaaaatatattatttaattattaaaagaaatatataccgtaaactacaatgcccaccattattagtgggacactgtagagctccatgaaaatatataagttggtttttgcagtgtgattggagcatttttgagggaaaaataacaccacatataggtttttgcagtctgatcgaagatggcctaaacaacccgaagtttggagtatttgcggcaaaaaatgtcatcgcaaatacctgaaattttcggcggatgaatagtgcacaacttttattttattctttgcagccacagtttcgccaaaaatagtgattattttattttataattttataataataattttttattattcaataaaataagaacttttattattaatttttcattttcaagaataatgtgagacatttgaggagagaaaatggttatctctagtgttagaatactatcgattagtgcacttattgatcttgaaatatcttaggtggcgattggatcataattaggtccgaaatatttcataatgagttaacaaaaacatttttttacaacatatgggtaatattaacggtatcaaatgagttaatattgcgatgttgatgtacgtaagggataaaactaatctcgatagtgtaaaaataattctaattataataattacaaaagagctaataaaatgatgtggcaagaacggtatgaaacacaccatttcatgaaaagagaacacatcagaaagcataggatctagagcaaagctgagggagttaaggaatagagcttgcggagtttgaagagcagaggtcgaggagaaagtgcacgcaaggatttgaagagaggaggtccacgtggaccaatccaaatgagataaaagaaaagattgagcggttattcccacctatataaatagaagaccccactattcaaaaaaaaaaaaaaaaaaaaagaataggactaaattttcatcataccagtattagtagtaaaacgtttctgaatacatcctacaaacttattttaaattagagcacgagagacttattag

SEQ ID NO: 207722 - DNA, 536 bp, Cannabis indica
taagttttggatgctcaacactcgtttgtgattgaaaatcaagtatgaagattcaatccaatttttttactatgattcattcattttcaaggaaaatattgggaataaaatttctaaatctttcttttagattttaaaatattttgaattgtccaattatgagcaatatcgagagagttatgaccaaaataccatcagtcatcgtagtagaattttaagataaaaaaatattgtacactgttggaattagcactgttgtgccccactacataggaaattaatgttttccaatggtagcaggtgccatgacattggtattgacgccacgttgtcgcctacacagtgaattgtgattttttttttagctttttaagagaatttttggaatttaaaaaaatagaacgagggcttcgttttttaaagagaaaattgcaaattcagaaagggagagaccttttagaactaaaaaaaaatatgaaaaaggagattggagatcaagctttagagcaatcgtgacaaccccaaatctagttctt

SEQ ID NO: 207723 - DNA, 555 bp, Cannabis indica
actaatcttaatagtaataacggaaaaaatcgttatgtattatctatcctaacacctgtgagcacgtgtgagcactctccacttatccaaggattcagtgggtggtagtgtttaactcaacttaagagacaaccaaagttatctcaagaccaactcacaagctttactcagcgcttagagagcgtaatcaggtctagtgagctagaaattgattaatttaaaagaagcattgataactctatggtatagagttacttttagtgcctataaagtgaaattatcatgaaagagtaatgaaagtgtgtttatttgattaactctaatcagtttttatcttcattttcaatttggtaagctagcttttaagtctagtaaatttttttttatgaataagaatatgtattggctcacaaacattgtgtttacaaactaatagcgcccaacaagggcctaaaataatcatctatacatgctaatctcaactcttgcttctactctatacatttacatcattcataaactaacaaactattgtctatctttctctgaaatttt

SEQ ID NO: 207724 - DNA, 557 bp, Cannabis indica
aaaaaaaattctatgtaatttcatgtgtggggatgcatattaaaattaatatattttaaataaatatataaaattaataaatatattttaaaaacatataaatataatgggatgactacaggatgataattggatcggatgttttatctaataatcgatctgatccaattagatttttaagatttacatcctacccaatccaattaaatttttggtacgcatggtacatctctgctactttatggtcacgtcactagtgtaaattttgggataacgtaatctttttattttaaaaatttattatttttatttaaaataaataaaatatttataatttaatgtaataattaaatttagtaataaaatattaaaaataatataaaaatattacatttattgtcatacaaaaatgttatattgtgatttagatttttataacttttgtttgtggcaaatttggattaatttttgacacactaaatccaaaccaaattaacattttgcaagataagttatgtttaagtttagtaatactttttatattagttttttttttt

SEQ ID NO: 207725 - DNA, 1856 bp, Cannabis indica
tttaaatcacaagtttccctctacatttcccctcctttatatgttgttcttctcttataaatacttgcatgttcataatcaatggttgttacccgatcaatttcttcttctccaattgtaacaaatcccccaaaaaaacttcaaaaaaacttacctcgatccttaatgggaaagagaaatttcaaggaacatcccctagccctacctcttcagttcctacgaaacaaaaattagttggtgaaacttcgaagaagaggatatccaaaggtcctcgtcccgttttaaaagatcatgactctaattttgagttggagcataaatttttacagtcgcccaaagttgataaggtaatttctagttgtttttgtattatttttggggttttgtttcaattcctttctcttaatgatatctttgtctgtggtttctgaattttctctatcatatgtctttttgttattttattttgtgtttggctgtttattcgtttgaatgtagtattcattgtttaatagttgtattggtgttttttattgttgttttgttttcttataagggaagggtaaatctccagttatgaatgttgaatctgatgatgtgtttgacgggatcactggaaaagagttgttgaggtgtgtgcttttttaatttttctattagtggctatttatgtttcatttgtttttcttttatttttgtgttattttagtttagttttagtatttttattctgtctttctaggtgagcttgcaagtacagtcgtttggaacactatcattccaaagtaataacctatgggtattattcagttgtaaaagatattaaaactattctcaccccaacccaactagaaatattctcgaaaactgtctttggtaattttctccgtatgcccgagtacagtctccacttccaactcattcattgttcgttgttaagggaggttcagcagccaaataagttggaattttagatttctgtgccaggcaaattgttgaggtgtagtgttgaggaatttttgttaattacgggtttaaattaccacattgactctgatattttctagtataagcaggatgaaaatatcattgttaaacattatttaaagggcaataaaaaatttaacaaagaaatatattcaacgctgcctttactgctgataattttaaggataatgatgaactagcagtcatatggattggggaaagagtgtttttaatatgactattgaatcattgaagggtaaaattgatgttggtattaggaaggtgaagcagaaggaacaagtatggtggtttttacaggttattaggtttttcattagtattgcaaatttggtttttcaagtgttatccctatgttgtggggaaagttatgatgtattcaaacattgacattccaaggcttcttatttgcctaaaatgccagagttgaaagtatcatagtgaaagatggattaacttgtttgttttattgttgttttatagttattgtttactttttttatttattttacattttcagttttttcagtttatgccctttgtttataactttttattttttattttattgcatttaaaactaaaaaatatttctccaacatcggtggcgagagtaagtttgaacttgcatgattatttcttgagtgacacaactctgtcctttattaaggttaaaggtaaaagcgatcgtgatcaagattctaagcatgtccccaagtcttccatggaagctgaattgtaagtttattttcaaaatttaatttgtttattgtcaatgctcgcatgttgctcctacacaaattgggacacattctgatgatgtgctctgcacttcaaaaaatgatgatgat

SEQ ID NO: 207726 - DNA, 1163 bp, Cannabis indica
agggggattagacaaggtgatccggtatctcccttactttttgtcctgggcatggagtacttatctagattgatgaagaaagttggggaaaaagagggcttccaattccatgatagatgttctgaattgaaactcaatcatcttgcttttgctgatgatttcctcttattctgtcatggagacttcatgagtattctttacatgttgcaggcactagaaaccttctcacttacatctggattgtttccaaatgccagcaaaactgccatatattgtagtaacatgcagcctggagaagtgaaccatattatgcagatttcaggattcataaggcaggagatgcctttaacctatctgggaattccaatctgtgggaagaagatctcagggaaagaatgtgaaatgctagctgagagaatgactgctagaattagaagctggagttccaggaatctctcctttgctgggagaattactttaattaactcagtactaatcgctatacaggcctattggagtcaaatgatgattcttccaaagaaagtcttgagatccattgaagccatctgtagggcttttctttggaaaggtcaagctatgttccaaggtgcagggtctatgttgcttggaatagcacttgtcaacccaaggcaacaggaggtctgggaataaagaatttagaattgaagtatggaacaaagctgcaatacgtaagtacatatgggctatctcaaataagcaagagagcttatggctaagatggattcatagtgtgtatattaagaatcaagattggtgggactactcttcttcaattcattctagctggtattttaagaagatggtagctctcaaagatccgatcagaattttgatggatcctgctatgtttcagaagcagaagtacaccatctcagcaggttataatttgttattgcccgcctcaactcgactgaactagtgcaaggaagtttggtcaagactaaagacccccaaacacaatattatagcttggttggccatgcttaataggctgaaaactcaggacagattggtgtggtttggtgttcaggtgaatggtgtttgctgcttgtgtgatatgtagatggaaacttgtcagcatttattttttgaatgcaaagttgctggccagtgtttgctgg

SEQ ID NO: 207727 - DNA, 1280 bp, Cannabis indica
tcccaattcatccaatgaataccagatttctgtttagaagaagctttccaccagaatttacacatcatttgttccgaatcctcacaaatgcctttaggaattaagaacacactcatagcatagttagggagagattgagcaacatatttgataaggacctctttccctgcacgagacagaaatttgctatcccaactctcaactctcttccgcattttatccttgagaaagcccaacacagcatttttattatgtttcataatattaggcagtcccaaataaaagccatcatcaccagcttcagacattcccattaaagaacaaatactcactcgaatgtcaggggaagtgtttttgctgaaaaagatggatgacttctgacgattcaccttttgcctcgatgctagttcaaatctctcaagaagagacatgatcctttctgcttcattcacaagggccctacaataaaggtagctgtcgtcggcaaaaaacatatgagtaacttgaggagcaccccgagccacttgacaacccttaatccaccctctactctcatagctccgaattagagatgaaagtccctcagcacaaataatgaatagatacggggataaaggatcaccttgtcggattccacgagatggtgatataggtcccaacgaatgacctcccgatgggatccagtaacggaccgagacaactaaggccataatcaattgtacccatctagtatgaaagcccaattttcaaaaaggagcgtctccaagaaaggccattcaacgcggtcatacgctttgctcatgtcgagctttaatgccatttgcccaacctttcctttacctttccttttgacgtataatgcattatttcaaaagtacaccaaaatattgtctgttattagtctaccagggacaaaagcactttgggtctcagagacaatgtcttccagaaataacttgagtctgttggccataactttcgaaatgatcttgtacacaacattacaaagagcaataggtcgaagatcgcccatattttatggatttttcttttttgggatgagcaccaggtttgtattgtttaagtcctcgggaatagtggccgaagcaaaaaaatcttgaacagtttaaccacatcagaacccaccactccccaacacttctgaaagaaacccggagtcataccatcagcataaccttgaaaaataacttttataaaatgtaaatagtataaccctgaaatgaatataacataatatcaaaatggaaacaacttttata

SEQ ID NO: 207728 - DNA, 1542 bp, Cannabis indica
cggatcacaggactactgactgtcacaatagtgagatcaacaagagcattgtattgttcaatataactctcatgggccatgaggagagcttaaacttctttaagagtcaagacatcacttcgagaggttatgctagagaaaacaaagtcatattcaagacctaagtcgtttaacaattgaagaattacatcttggtcacccgtcgtagaacctgcaatcacaattgaatcgaagagagaatggactttttccacatggtcagaaatggataaggcacccatacgaacatgggagctttgaccgttgagctgatagaaatatttgatcgcatttcttccattggagatacaaagtatttggatcatcattaatgagggtgcaaggaggtggcacaccagtataaagaatctcatcaagatcatggcctataactattgggaaaaactgagatttttaggctataaaattggtgtgatcctgcttaacagtgaggaatgcatagagcgaatgagcaaatgaattccacgcaactaaggtacccgactgattcaagagagggggagtaggcaatagttatggcaggtgaatgatcgattggagcagcagaggaagatgtgttgtcgtgggaagccatcagagacagaagtcaatagcaattgataccatgtaaaaacttcataaatggcaatagagactggtacaaaaagagaagacacaatatcagttagctttagaccttcttatttatattgaaaaatagagttgaataaaagttgttaagaaatagaaaaaatacacacgatagtaatgcacctaactactaactaccattaactaactgttacgaattttatgtttattacgcaagtgtacgcaatcaagtagtatctcacgcaagtgaggtcgaaccacagggaattggattaagtactactaaactatacttatgattctatttggtaaaataataagtttgcaatttgaaagtaaataactcagaaaattaaagagaaaataaacgaagattaatcaagatgagagattagggaggtgaatcctgttgataagctaccaatgttaatacctaattgctatccttatctcaatgtgaatgacagattataaattaacctaactcttttcagatcttttaggttctaaataatatgttctctaattaacttcttaattaaatcaacacaaaatcagcattaagcaataatctattagtcactgaggctatgtaaatactttcgttttacatcaaaacctagactatccaaattttagcattctcaattctcacttttcagatttcgaattgagatcattaaacatgtaaaaggtgatcaagcttgcacatggaattaaacacaaataaagatagtattcacacataagatgaaggaatggcaattatttattaactaggcataaacttaaacaacaatcatcatcctcccttattgggaaatttagttcataataactctaaaaacatccatgattaattcagaaataaaaacaaacataaagaagaat

SEQ ID NO: 207729 - DNA, 766 bp, Cannabis indica
catttaccatatttttatcataactgtaaagctcatgtagtattatttaaaatatctataaaacatttgtgatgctaaattatgaattttggtaggtgatatttgacatacaaaataaatgatgttggagataacgcaatttaaaatgaaaaatgtatataatagataaatttttttgaaaagaattacaaaagttcacacgatttttttatttatttttactctttaaaatttattatttacaaaaatacatttttagtaaaaataataaattattttttattgttttataatttatttataattgtattatagttgttattaggaagttgtaattgttttggttgttttatagttgatttatagttattttgattttgatttttcattattttttttagttatttattttttcacattttgctgaataaaatgtatttttgtaagtttaaaactttatatatgtatttttataaataaaaaatttaaacggtaaaattataaataaaacataaaaaaattattttctaaaaattcctaatttaaaattcaaattagatattttcaagcaacctttagatgataattttcacaacccgataactaataaaactattctttttgatttcggaagagactttagcacaacctgaacttgaacttagagaaacatcttaatttttaaatttgaagcacttgaaggcttttataaaagaatccaataatgtttcggttgttgaacaaaattattatatattgttattaa

SEQ ID NO: 207730 - DNA, 875 bp, Cannabis indica
gctacattaccaagaaaaacattacagttgtaggtgcagtaatgttttctaacatgaagcataaaccacagtagttgtcatgtttttattatggttaaaatggcaaacctattaccccctttagaaaaaaaataaaatgccaaagctattgaaagctaggaatatttctttttcggttgattggtcaatcaccatgttaaaacacaatgaattaacttgtcttttaaccttttcctaagtatatttataggggtcacctttaattaatcaattaagtaatccgaatcagcacttttttaaaagtgaaaagctgtcgttattcttcatgttactctttgcttgacctgtcccttttgtatagcaatgaaggttgatttattgaaagagaataatggtagctcccattgggattactcttgtaaaaacactaaagtaaaacataattttttgctttttttattttttaattttttattagtgcccccctcccctcaatccttttattattttttttttagttttaatttttaatttttaaatatgattttctctcatccattatttatatattctgtttgtgggcatttggaatggtacaatttgtgtgatccaacttagctccgaaaaagatcaagtcaataggttagaacttaagtgcctttaataatttagtttattgtctaaataaggagcacttgatagctcaaccttatgaaaaggtgcatcttttgtgaatgttgacactgcacatgatgccatttttatgcttcaattacaattatatgaataggctaattaagatttttgtccatcatcaaatcatgtcccttaattttaggtcgtaaaaatccacatggactattgagattattgga

SEQ ID NO: 207731 - DNA, 1211 bp, Cannabis indica
atatatatttatatttatatattcgaagataatgggaccataataagctgaataatcattcctccaaacatatggtatattacaaatctgaccactgctgctgctgttgagtctaaacattcagccctctttcttaaaagaaaatatcaaaaatatggtatattacaaaaaaatacaaattttacttgcaaaaatacggattttgtttacaaaaatatggattattagtttgtaacacattttacatatttgtgatttattacttttgggataaaatacaaattctttctcaaaaaatggtaattttttttccaattattagttgaggattctcttgggtctctaaatagaagaaatataagaaatgaataggatccatgtttccactgaggtaacatttgattggatgtaataaaatggaatggaataaaaaaaaaatattatttatttcattccttttattttgttgcattcataaattgtacttggaataagaacaatcaatggaagacaatcaatttaaaatataataaggaaattaaaatcattttattttgtttacataattaataaaaaaaaaaaattaagaatgctttaatttaattgaattgtcattattagatcatgtaattattttttatttttatatttttgaagggcatatttagtttattttatttttaattaataaaaatataattaatataaagtagttaaagaaatagaaatgtattctgtatgaaaagagaactgctaaaaagacatttttcttagtgtcatattgttattggtgtaattaagtatctgatcccacataacttaagaaaataggttttaaagaatattactaaccaatcgtgaggcgccacctatagaaggtgttgagcagtgagcaccaaatgctcaatagcaatgctcttatgaaaattggggaatcttttcttttattttttctttaatttgtgtgggtcctactagtagtttctctcattctaaaaatttagtaaacaaattaatggtaatcaacccaatataattgattctcattctcctttagtaaaacatgctattaaagtattggaatgttattctcatggaataatttttttttatattttggtggaatgacttctattttgaaattgatgaaatgaccattccaatgcaagatgagaatttacttttttttttttttattttttaaaaaaatt

SEQ ID NO: 207732 - DNA, 590 bp, Cannabis indica
cataaaaagtaacatttgagtcaaatatgcaaaatgctatattttatgtaaaatatagtacaacttgtagtaacaaattctcggcacaatatttagtgcattaattattggagagctaatttattgaaaagtgataaattatagcattataccactactttaccactaagcatttgcaatatagtactagtatttggcagtagttttaaaagttttattaggactaaaaaaaaaaaataaaataaaaataatgatgagaattaagagtgaataaaaatacttaattacattgtaaaatctgcttctgtttcgttgtatatatatatgagggttttagtgagaaaagtttgtttggaatgcatatggatgaagaaaggcagagtagttagaatacatgtgcatgtgattttaagtatgaatattgtactggtgtttagttagggctgggctgggccatcatgaacaccttacgacttacgtcacgccccaatcctcatctcagttttacatccatatagcctaagctccaggggaccactaataatacacatacttaatttagactactatatattattataattttaaat

SEQ ID NO: 207733 - DNA, 778 bp, Cannabis indica
gaagccgctcaaaagccgcagccaaagccgcagcaacagcaaaagccacagcagaagccgcagcagcagcagctagtgtcaaagaagagagttaagagtgatgacgataccgatgatgatgacgaggatgacgatttcattttaagtcccaagagaaggaaattctaaaagggaataaaaaaatcatcctttatatttaattgttgaagaaaccatattagagttgagtgtttttcattgtaaaccaacctaatagatgatttttttttttaaaaaaataatacatttattttagttgaaataactttgtgaagtaaaacaataagactggagtgaattaattaatcacaatttatttctcttacatcatatgatcttattgttattaataatctcttctgaatttcagtgaaaaagttttcttcctccaatatatgcacagatatatatatttatatgaatttaagaatgagatgagtcaatgggagtagctagtttttcagcaaatgagtagacaaataatagtacagtgcatgcatgtatatatatatatatatatatatgtacaacagtctgttcttgaccaatatatatagcaaatccatagacagttttttagaaaacaatgagcactgatctgaatcatgtcataaaataaattaataaataaaaactgggtattatttaatatatagagactatactattgggtattgtgtggtttcaataaaattcatatgttacatcacatctgttatatttatattaatacatcaat

SEQ ID NO: 207734 - DNA, 1243 bp, Cannabis indica
attaacgggatatcaaatctaatcgttaaatttaacagaatattcttttatatttttaagtatattctgttaaaccaagaaatgccgttagatagacacttttaatatataaagatatatatatataaattaggttttcaaatctcatatttaatatttttagttatttaggtagttttattagtcactgataccagaaaagttgccaaagtttgctgtcggtactaaaaaaattattagagtagctgtcggtgttggaaaagtcgttggagttgttgctgatgccaaaaaatttgtcaaaattggcattgtcgctggaaaaatcactaaaaaaaatcaccaagaaattagtttcttgaagaagaaaccggtttcttgacgaaaaaaccactttcttggtgatttttctagtgacaatgccaattttgacgactttgctgacacttgaagctactccggcgactttttcggcatcgacaccaaacttcaaaaaagttatcggaattggcatagtcgccagaaaaataacaaagaaactggtttcttcatcaagtttcttggtgatttttctagtgattttttcgacaccagcacctactctgcgacttttctggtaccgacatcaaactccagaaaatttgtcgaaattggcattgtcgccggaaaaactctggtagtttcttggtgattttttcagtgataataccaattctgatgattttttttcggcgccgacagtaattttggcgacttttttagtgccggagcaattccgacgctgacaacaaactccattgtctttttccataccggtgacaactccgataattactgtagttttatttgttttatttttttaaaaaaaatataaaaagaattttaatatttttttatggtaattcaatccaatactcgaattaaagataacggggttctacactatttagtattttgagtattccaccacctaatcatgtccgttggattcggttgtaaggtagataatcgaaggggcttcataaaagacaaggagcaattgttcaaaatttcaaaaacaaaaataaaaaaaacaaatcaataaatatctaataaaaaaatcaataaatatcaatttttttttcgacgtgaataaatatcaattttgtttcgtgggcaaggggaaagaagcacagaagcagatcacgtattctcacgcgagtatacgacgcgtggttaaaaacaaaaaaaattcatctgatgggca

SEQ ID NO: 207735 - DNA, 674 bp, Cannabis indica
aatatatatttacataaaaaataagtaattttagattttctcctgtcttgctttggtttgagtttctcggcttggagattttgaatgtcatagaccacggaggggtggtctgcctgggttgatggcagcgacacgaggctccatcagagctaggttgtgcgcgaaggatgcaatgaagaagaataataaagacatgttgagggaaaattggatcgggaatcaccattttgatgttcgagggagaaaacagaaaggattagtgttttcttttaattacgttgatattaaatatcttttagggatttttttaataatatacataatatcaacaatttatttacaaaaatgacattatacaaataattagtaaataataacgttccatgtcagcaagaataccatgtatatgtattcagttatatactattaataaaagcatgcacttgactcattgcacttaacattgatctttttttaaaaaaaaaaaaaacccaatatttatttctctctttttgttttaaaaaagaattttaattacactactaattattttgtctcaaaaaaatactattgcaatctatttttttaaatgatcattctaatatgtgagaaatatatattttttgtcaataaagaaaataaaacaaaagtatcattttagtttctttaatatt

SEQ ID NO: 207736 - DNA, 847 bp, Cannabis indica
agaaaataattagaagtaattaacaagttaaaatcataaacataaatatttatttataaatttaattaatttgtaatcaaattatgtttatagatacatcaaatgtttaactcttggttttaatatacagtagccttttacaaaaaaaaaaaaaaaatagcgaagtttaatgaaaaaattaataatttaaaaaagaatagaaagaaagatcctattgtgatggagcaaagtaagtaactgagaaactctctcccttaaatagatttttttgaaaaatcctatataggatttactaaactgtattacaaaataattatctaattatatcctattttaatgcatattgaatcggtaaggattttcgtagaaaaggaaaatataaataaattaaatctcaacgctccaacaaacttgtatatcactatacggtgacttccaccttttttgatctaaaagaacagaaaatatctttttatttaaccttttttatttatttatttgttactctaattaatatccaacaaaatacgtaattactcttctacaccaaattaaattacgaataaaatatataaatatccataaatcacatataataataataaattatcaaactttagcttagccaatatgacggttatctttttccataaaacgaaaagtgacatttggcttgccattttcccaaagatttattaaattttattaatagaagaaccaaagtcttaaaatgaaaagaaaaaaagaaccaatatctttcacttcttaaatcttgtggtccacttagaaatatatagaagttttttcattttttttaaacaagaaaatatacagaagttaaatacat

SEQ ID NO: 207737 - DNA, 760 bp, Cannabis indica
caagtatcattcttatatactataaggattgtgtctttaacttaataggtaagccaagtgacggtctcttaattagggagaaagagcaccaaattattatcattatcttctttctatatctaacttttatatttaattcaaaataatttttgtcttaaattgtaatttattttcattcccctcgacaaatgcataatatgaaactggattattatgggtttgtaatacggtattcataaaatttttaatccattcaatccgaataatttaatctaattcaatttgtaaaatgcagatacttgcacttatgcagattgaattgagttaagaaatctaaaatttacactttaaatcaaatgttgatttatatgtaaaaataacctttacaatctaatttgcacctatttatatatctaaaaataaatatataattaatattttgaagaaacaaaatagtaactaaaaaattatacatatatattttaaaatttaatatatgaagcaaagaaaattataatcttatataaattatattttctttcaacatacaacatacattttctcctgaatcttagaattttttttcttacttttattttggtggcttagaacaataataatttatattttaataaatattattaagtaactgatttaaaatattgtgggttatattgaatttgagctcttgtgtggttggattgaatccaaaatataaaaaaataattacatgagacatcaatttttgtaaaaaaaaaaa

SEQ ID NO: 207738 - DNA, 992 bp, Cannabis indica
tattttaattttattttcattatctttttaactcatatatatagttttgttttttttttctacaaattttcttataattgttttgtgataatatttaaaatataatttatttttatttgataggtatattttttaaaaatataaattaaaagaaaaaaaaacttagtataattaaaattataaatttatataaaataaaacttattaaaataaggtgtttaaaaaattttgaggagtaaataaaatttctacaaaaaaaaaaaaaaaaccctagaatctttatttttttaagaaaaaaaaagttctgaaataaggagcactagaaaaaaaattcatgttattattttcttattgaattatattattatttaattaaaagattatttgtattatattatcttattaattacattgtttataatgatatgaactatataacacaatagggtccttgcaaagtcttcgagctcttcctatataagaaaaaaatatgcaatggaaaacttctgaaaatgattgagttcagtattctatgtctaaaaaattctaccatgggaggctggctaacctgctaggaagtaatctgctggtagcctgttgtatttgtccaaataaacctttggacatggatattggagaggtttctctattcgagcatagggtgctaacattgcacaacaggaatctaagagtacctacattgcatcaaaccaataagaacttctcaaacaccaatgaacatagaaaaatcatattaataagaaacaattgcaatcacaaaccacttcaaatcatatattcaggtcatgactcaacaattttaagcctaacattcacatataaacttatatttttaccttttactcaataaataaattacaaattattaaaaaaattaataaaaaaaaacatttacgagcttcttgctggcatttttgataacaaaattaatgggaaagggacgagctcaggcgcggtcgcatggggacaga

SEQ ID NO: 207739 - DNA, 598 bp, Cannabis indica
atttataaaaaataaaaagctcaaactactatagttttttgtgacagataatttaaactttaaattcaatccttataattatcacaataattaaaatataacaattaaatatataaaaaaaaaaacattagtgctcggtttagacggattaaccctcatggaagcacttatttcagttgagccaaaaaccatgcactgcagctgcaacgattgcattcactacaaaagccaaatgacatgaacttgcgctattaattcaattttttcaactatcaaaactcaaagaccaaacttaaaaacccaaccaatgaaatatagaactcacaactctgtttgaaaaagagcagtcaaagaaaaaatagaaatgactctctttctcccaaccacaaacgggcaatcaagagagtttataggaatatgttcacctacctttcctttactctttataaataaatatattttgtacataaccacattatgcgcgacctaattggtaacccgagtggatcttgagaatttttaaatgtttggtaaagcctcaccctttaggtctctacttcacgatcttgttcttactaattgtttagttggaactcaa

SEQ ID NO: 207740 - DNA, 1093 bp, Cannabis indica
gggtttgggtcaagggtcgaggtcatggctggggtccgaggttcgagttcgagtatggtgtccagggcctagtctgggtctagagtccaggatggggtcggggctgaggtcaaggccgggtccgggatggggtcagggtcgaggctgaggtcgggtatggggccgaggttgaggccaggtctggggccgaggccgaggttcgaggtctagggtctagggtccagggtccgtggctggggtttgggtccaaggtccgagggcgaggtccggtgctaggtttaggatccgtgtttaggtttgggttcggggtctaggtctaggtcttgttcatatcgggatctcaaagtattgaagtgttttttttaaaaaaaattatttatagagaatattaaccaaacacgacttgtgttttgaaaacttcaaaaaaaaattgtgttctcatgtttgataggctaggtgcattttattaagtattttagaggtgtgttcaagttgattatattgattttgtgtagatttatgcttgttttctatttgtttcaggtttaaatggtaaaattaatatatgaattaaaaataagaagaaacatgttaaatgagatgaatatgatgcatttatcatagaatttgcagttctaagatataatagggtgaaaaattctaagttttggatgttcaatacgttccgtttgtgatcaaaaatcaagtctgaagcttcaagccaatttttaactatgatgcattcactttcaggaaaaatattatgaataaaagttttagatctctctttcaactttccaaaacaacttgaatcgttcaatttcaaaaaatactcaaaaagttatggctaaaatattattagtcattgtactacaaagctcggtgcccaaaaattatccacccgagccgtgccattgaaagcaccatgttgcaacctgctatacctaatttcaggcccaaaagggtttttcaaccctaatttcgaaaaaaagggagccttttaattgaaacttttgggagggacaaaaatagagagaggaagcgaacttcggaggttacaattattgatcttcaaagtagttttttttcttct

SEQ ID NO: 207741 - DNA, 1648 bp, Cannabis indica
ttttatatataatggtgtatagttatgtaagaaatctgtgaaatttcaaataattaaggtaccaaaaacaagcttttaacataacttgttttgtataaaacaagtttcaaaataacttaattcgtgttggtagaaattatttcaagaatttttgatcaattttaaataactatatcaaaaaatttgagaattcacttaaacatatatctttcaaatcaacttatgatcggttagaattctctctttaagaatataattttattgtgataatgtatttttggttctaatttagttaaatactttttttgtactctccattctagtaaatctaaaaagaattttttttttattattttttaaataaatcatgtaattttatcaatagcaatgagctaaaataatagcttataatttaactaggacatctcttttgttggagatacaattaggaatagaattagaaaaactagttaaatattcaaccgcctaattctcatattgtttgacaaaaaaattaaaaataaaatcagatttaaaaagaattgtaacatcacaaataaccttaaaaatacttatattcattttcatgtgtcgctcagaagatacaactgcagaaactattgcaacaggttcatttaacctcatagcttgatagcttgagcattcaattattttgtaagttatgtaactgcactactaacaactccttcaattttcagtcgtaaataacttgttattcccagccacaaataacgatttgatggtgagtcatcgaaaataaaaaaagaaccaataacaaaaaaaagaaataaaatcatgtcacacaaacaagactaaaacactcaaaatcatgtaacagagacaagactaattgtggtagcgaaaattaaatcgcaatagcaaaatacaatcccgatcaaactgcatctatgcctagggaaggccactgaacctggccgaagaaaaaagacaatcaacacggacttgagacttgagaattcctaaaaaggatcttttaattattaaaatagtgaaaaaatattccttaattataattttagtcaaatatgatttttttattaaaaaaaataatttaatataatttttttatgtaattttttttaacattgtaaattaattattttttttttaaatttacaagtggttttaaataattataacatacacgatcatcatgaaaattattctatatagcaaaatagataaaaatctacgaaaacaccctttttagaaaaatgtaatgtagacttatttaccagaattataagggactaaaattgtattattctatttttatattaggtgatgtttggttagaaggaataaaaatatggaaataagaatagaataaaatttaaaatacataaaaaaattgatagaaaaattattaaattttttctcatgttacattggaatagttttttttttttcattttaaaatggaataatcattccactaaaatagtaaaaagagcacatttcaatactttaaaatgcaacaacaaaaaaatagaattaaatttatttatttttcattctattttattaactctaactggacgccaccttaaattttgaagtggggaagccaagtgatgattttccttatttaattatttatttattt

SEQ ID NO: 207742 - DNA, 521 bp, Cannabis indica
gctctagccccgaacccaatctcggactctgaccatggctccggtctaggcctaaacccgacttaaataaaatcaaaaaattaaaaaaaaagttgtagaacacacttttagtttctgtttttaaaataaaaaaaaatagttgtaaaatatatttttattttttaaaagcacaaatataacttgtatttttataattaaaaaattaaaaaattaaaagtgttactaaatactaagtactatctctttgcggtgttgtggtgttagatatataatatctaatagtaaattaataatcctctaaaaaataataaatgttattaattatgtataaacaatatacaacttaatgattgttgcattactaaatatcaccacgttattttattttatggtatgttagtttggattgtacataaatttttataaattgtccaacttaaacaatacgtccaaaccaaatcgagataatttgacagaaaatacaaactgaaaaattaaacaaaaatataacccacccaatc

SEQ ID NO: 207743 - DNA, 885 bp, Cannabis indica
  modified_base (843)..(843): a, c, t, g, unknown or other
actctttgttttttcaactttttggaaaatatgctctgtgatacaatatatagtcatgtcacacaagtgttgaatttgaacaaaaattaactagtaattgagttgtgaaggggaaagtgttattacaaaaaaaaaaaaaaattaatttgtattggttttgatctgacatattagtgcgtcaattagctattgacgcttcatttctttgatagacaatcacgtcgtgtggaattaaaaaaaatgtaaatgactttagatgaagagtattgttattaagtattataacgtacgtctaataccgtcgtcaagtacccatttcttgatcctcttgaacccacagaaattcgtagattattattattattattattattattattattattattattagagctcatcaaataagttagattcatatatagtgtatataattattttaaaaaataatatattatacatagtctacataatttgtaactttccaagaatatatatcataataatataatgtattataatatacatttctatatattaactcacacgaaacactatttaaataagtatgtatatatttacaaatattatattgacttatttattgttattttctgcttggacgagtcacaaatcgacagacatcaatgcacaggtcaactagatggtttttctaatttttcaattctgcaatataagtgtgccctatataattaagaatgttatagtttgtattggtctaataattttttaatataacaaactatatttccattatattaagaagaagaaatttttgaaatgtacacacaattaatagagaagaattaataatttgtaatntagtatgtgctaatttttatttttttttttgtaaactcaatg

SEQ ID NO: 207744 - DNA, 701 bp, Cannabis indica
aaaatttgactagaaaattattttgagtgttaaaacaaataagtgtatctattttaaaagggtgcacggaagaattttccaaaattattaaaataaaacacccctttcagaaaaaggggagaaaaatgtatggggctccaacagccaccattaacaccatcttctccgtcgcttctccttccctgcaaccactacctccggcttcttccacatccaatctctgaccgccaccgctgcatccactaccagctccgcgaccacaactctgttcacctcctcccttgtcgaaccggtgtgtgctctgacttttaggtagatgagattagattagataatattgtttcaattttgcataacgtgaatttgggtgggactggtaacaagccttgtgttccgattatttgattatggtaaagatcaaaatggtgactactgacaactttgtgttcatatttatatgtttaaaaataaaagttaaatatttatttaagggattaaataaaacagttaaatagtattgcttatgcttgataatctattcaacaacacctaaagggccattatttcgttttcagcaaccgaaacgaattatgggaagcagatgaggttttggatttgtaatgattgatttgttttttctttgaatcgtagtgtgatgaatatgggactgatgattggtttgttcaactgttattagtttt

SEQ ID NO: 207745 - DNA, 1214 bp, Cannabis indica
ctaatttgactctctgttttgttaaatgacaaaatggaccctacattttacaaaatggtaaaaataggactctgaactcaatttttaacaattttatattttaatataaccaactttaaaacaatttctaacacgaattgatacagaaaatataaccagttttgtcataatatctctcgatcaattattaaattttatattgacaaagaatcagttcaagatcctatttgtataattttagaaaatacagggtctaattggtaacttttgcaaaatataagatccaaaataatatttaactaattgattatgagctctcacatcattattgttcacaaaataattcaaaaaccagcagtattaggaataataaaacactaaatcacatcttttgtaattaaaatgaaattgtaatcatcgcacataaatttctctttatttttttatttattgttgtgtgcctaaaaataaaattttttaaagtatatttttttaggtaagattttaatatttaattatactaataatagtaagttattttttaaaaaataaaaaaatatatatataatctattaatatatttaatttcttgaacatattaaagataaaaagtatagaagaaattacattttataccattttagattgaatgtaaaatatgcgttagacttaatagaaactgaaagtatattaggtaatccacttaaaaagtgagtatattttaataatattaaaatatttttaattaatagataaaaaatatttctcaaacttatccaaaaatataattataatgaatgattattgttttgaacgtaattttgacttatttgctaaaattaagggttattgtatatttgggcaacagggatatgatagttgctttaaatttgtagaaattagattattatcgttctttctttaaatgacgttatcatcccatatataagagatatgttcaacacaatattaatttgatggttacttttatgttataatatccaattatgcgcttatattattgaaaattttcaatagaagtagcagttggcatccttttgacctatcagccaagcccccaaactaaattatgaacatgtggaatggcatgggatgttatatttgtgatgaagataatgaatcacattctactataattaatgtactggactaatttttcacaaaaataagttttctttctcaaaaaaaaaaaa

SEQ ID NO: 207746 - DNA, 1179 bp, Cannabis indica
atttttatacacattgcattgatataactaaaatacgctaggatctaatgtgccaaatcagtttatattaacctaggacaaaagtaaaagaaagataacaactcaacattagaaaatatttaacattaagagaaaaagaaatactaaccaatttatttttataataatttaaattgtaccactgctataaattaaccatgaatttaaatcataaaaatataaactttattataaaatataacattattttaatatatgtaattctcaattgttataaaattgtcaataccattctactaacaccttattgttaattacaaaatattcttttataccatatatattgtttgattgaaaattaattaattatataaaatctaaatacgctccatccaagaatttataatatatttttaaagaataaagcatatagttatttcacatacctgattttcattccatagttccttaagttggctttcctgcattttaagataaacaagattttttggtataaaatttgaccctaaggattccaaagggtagtttggccattccaggtatctaagctcattgggaaaagtgtcatgaagaccatcagggaatgcaaattgtattcgagaaaattttgctgacagattaagtattcttaagcttgccatttttttgaagattgaagggtctgagattatgaccttatctcttacgtaataccaaccaacatgaaatattccttcaattttgggagtaacctaagaattgaaaatacaagaaattaaattacgttacataaatttttgtaaattactcaacttgaataacttacgtgctcaaaataaactgagataatctatcgaaaaatacgaattgaaaaatgtgacgaaaatataacccgcttaatctttatatagggtaggctaaaaataataccaacccgtccaatcaacccaaactagcccgaacatacggattaagagggattatatataaatatatgttttatatacatatttatagaaaatttctatggtgagacatttaaaaagaccccatttgttacaatgtaattttgttataggtttgttttatattgattttaatctatttgcgccattatttatggcttgggcgccttacaaggctttagcaccttttatatggttagcccctaatttttta

SEQ ID NO: 207747 - DNA, 856 bp, Cannabis indica
tatagattagcttattgtttgaacttcaaaatgtacaaaatcccgtgagtgaacatgaaaattattatcaatattatttatatcatgtaataattttataaaattattataacttctattcataagaaagaaaacaaataacctaaaattgtgtatttaattatttcatgtatatttagcaaagtattgttattaggtatcaattattctatatttattagatcaatatcataatatataataatatataataaaatatttattagtaattgtttacactttttcactattttctgcctaatgtgaaagcaagtttaaatttaatttaaacacaatatatatggagagaaaaattaattggcacattttttttttgtttttattacattatatatccaattatgttggtgtctaattactataattttcttattttgcagcctcataaatttcaataattttaaagaaaaaatattcctcttcactatagtcaagtgatgttaattaatttaaataataattttttttaatgagtatatatgttaattaattatgatgtatatgatgtaagtttacgtcagtctaattaatattaatatatattaatttacgtatacatagacatgtatattctctatcaattcacaaacggatccatgccgattaattaataattataattaaattaatcatgtcaaataattgcaaatgttctaccttttgcctttggcaagaaataaagttgattgatttaatataaaatagacagaaagagaaatattaaccaaaagaaatcaaattaaagaaaaagaaaagaatgaaataattaaactacatcatctttttttttgtttat

SEQ ID NO: 207748 - DNA, 724 bp, Cannabis indica
acgttggcagatgtaattttctcaatattaattatattaaaatattttaattaaacacaataaaatgtcttttctatcattcaaataatcaaattagaaaaatgacaactcatttcagttaagagaatgctgaaaactgaattgccaaatcatctttctttgctgcatagtcataaagtgtttaagagagctataaaatcataaatatcatttcaaaagactgaatgctgaagttgatgcttacactcgaaagaaagaagaaagaattaagaagcacaaagctcatagataaactaataggccataaaattcttgcataaccgtaagacactttaggtgagaccttctagtaaatttctcaaaaaaattccaaataatttatactagtatcaaaaacttaacttcaaatcgatttttgatatcgtaagctattcgaaattttaaaaagtatgaaattgtagctaactataatgaataccacaatcaaaatatttttgaaaatgttttcaagcacaacaattggttaagaagttctaacagattttagggtgttaatttattggacaaaggctgcctgcaaacgaaggcctaggtggtcagcgacagcgtccattgccggatctccatcccgtactctgctgtggtcttaaagccctgtactcctccaatccttaatcgtttcaagaagcacaaatgttggccatttcttacggagagctcttcc

SEQ ID NO: 207749 - DNA, 521 bp, Cannabis indica
ggatattattaacaagtcgtgtatactagaggaaacacaacttagtagtataaaaaattcagaggacaaaaagactaattattcatcccttatcaaattatagaatgtaagctcatataacacagatgtttaaaatttactaaatctcacttggaaattaatcaaaatccaatcaacatagtcttttgtccagagagcaactaaagaagaaaacattttgtttgttgtattaaagaagaggtagggaggtctttagaagtatcaaagagttattcatatattgaaagaggaaggcaaatgcagtgtcaatgtggtctacttgacttgaacttcatttatttgctgcttgcaaacccatcaacacctaacacttttacatacataatttatgatcttagttgaacatatcaaacaaaagcaaaaatctttaaaattaagaatttaactatgtatgagtcagttatattacacctttatgacatttatattacactagtaactattcaagccaaatgctactt

SEQ ID NO: 207750 - DNA, 1116 bp, Cannabis indica
gtagagataacaaattactaaggaaattatgtatatcgacatatatttcagcaccactcattttcctataatatcattaactatacacatatctacgtatttaaaatatccatgatagtaatcttatatctattttaatttcacagacaaatgcagatatacgaagttccatctgagattttgagtttacagaatttgaggatacttgaccttagcagaaattcccttcaatcaattccactggtaacacatttgccactaagaatcaaatacattgcacgtcatgtttattttgttgacatcaagtttggaatcatgtcactatgtgagacctgatattccaggttaattagtagctgtatcatttgtatttaatagaaactaaataacggaacagtttattgtcggtgaaactgtattgcagcgatactttcccggagatatataagtagggaaaatgaactgtaatgaaataggaaagaaagggatcacaattaatagtgtcttgtagctcattttttctatttatgttgttgggaattttcttgggaagtgaataaaatttatctgtataaacctttaaccttgacttaggtggttagaatagcaaagttccacaatctgaaatctgctgttaattgggcttattcggagttgatagatcttctctgtagaaagttttctaatctttgaaatgcatcaatgacagggattcaaaaatcttacttctcttgttgagcttgatctatctgacaataacatatcagcacttcccgcagagttggtaagtataagatgcctttcatggtttgtgtattggaagcatagtacagtaacttcaacaagtttgtaataatattgcttgcaattacgtgtcttgtatattgcgttgtgaagttattgcgtgcatcttgcacaatgctataagaaaaaaccaaatatttgctcttgatgcaaatcactataagaggcctatttaaatatacaatttcgcaaatgttacttacacgtgatgaagagcatttgcaagaaatatgaaattaacatttggtatcttgtttttcgtagttaatatgaaattttgtgaagttaattttatctaggtatgctttgtta

SEQ ID NO: 207751 - DNA, 603 bp, Cannabis indica
atatatatatagtttcttatcctatatatatatatatacacataaaatttccacttgcttttggaaatagaggtatatatatagatggacattgaagcactaagagagagatacaatggattggttcacattttcatatattgctactcttctcccctactttattatttgatgtgtatatatttcaaacaaaaaactaatacaatacgtctatatatacatacatacatacatatatatacgactgtcaaaaagagaataataaaaattcttatacctaactaatcttaataataataataaattaatgtatatatatgtgtgtgtgaggaggaggaggaagaacaagatatatatgtctatatatagatatatatatatatattatatctatatacgcatgccacacaaagaggtcaacaatagggtaataagaattccaaatcatatatatgtttgggtcaaagacgctttcacatatagaaggaaaaagtaacacatattacaaattaacttataaataatcaagttgattgggaaaaatttaatgaaagaccaaagtgttattggtttttatcttttttttattattattatttatta

SEQ ID NO: 207752 - DNA, 546 bp, Cannabis indica
aaatcaaaacctaatttactcaccttatcaatgttggttgaacctcttcaaaaaagtatccctctgccgcctatcaaccatcaccaaagcctccccctacaacccaaaacgtgagagatgaaaatgaacaaaaaaaaatgaacgaaagagaggggtcgacggtgagagggcttaccaccggtgagaaggcttggctgcgtcgacggcgacagagaagggtcgacggtggctgggcttcaaatgatagggtttttcggctgagaaatggggctgagaaatgaaatggctgagaaagaaatggttttttttaaaaaaaaaaataaatcaaagtggggccgacatgtgtgtgcccatttttgtgccatttgatccctgttggcacgccatgtcagggcatggggcccgacgttatcgtgcccaattgtgcaacaatgaatattcccgcccttcataacgggcatttttcaaaaccaaaggggcacgactttttcgtgtccattgggacacatgtcgtgcccacatgcctccaaaattaaaaaaaaaaaa

SEQ ID NO: 207753 - DNA, 1733 bp, Cannabis indica
attcccaaactacacagctcggtgagaccggtcttctattcttcttctgtatctctatctctaattccaacaatggcctatgattagctcggtgagaccagactattattattgcttctcctaacaaatcacataaaaccccaaacttgaatttcaaaaaataaaaaataaaaccaaaccgacaataccattacgtggcacctccacaacaagtcctaaacctttatatccaccaaagtgtgaaaacgtggctagaatgtctgttcaaacatatcaacatataatggattcgtcttattaacatcccaccaagccaagcttaataaataaaagaaaaagaagggtcaatgtcttctctgttttttttttgtcttaatttctttgtttctgttgagaatgctatttctatctaatcctaaaagttacaaaatgcaatttggaccatatcaaaatcctaaaagtcctcttgctacaccaacaccaatcttaagcctcaaaggccactccatttccttagtagccatatcatttgagatgtacttgtaaaccagaatgtacgctgatgtggctggcattggcattggcaatggcatgaagcagaagcctaggagtggaaacaagttgatgtgtctcaacctgcctacactctttaacttagacaccagggattgtttacaaggtttgttgtgtctcttcaccgcaagcaataagggatgatgatgatgattgaactctttccaaagctgattatattgtggttgctgaaattgttggtggctttgaggattccctggaaactcattccaccaactcactctggaatctgtcaatgatccatcagtttattatactcttcaaccttcaatttactattatgtataatattaacaatgttatgtagtactggttctgttgtttggtgcttcttcattttcatcttcaaattcaactttaactttagtttttcttcatctttctcctcctgaagctaaaccaaagcaagtagtagtaagacataaagaaagtaaaagtaacaaaggcagttagttgacaccacataaccaatcacaaacccctctttcaaatattccaacatcttcttcatctaaatataattgatcaactgatcacttgatcaaaaacaccaaaaggttttctgatttaaactaataagatgtcgtaattattatttttggttttggtaaagttagtcgataaacaaatgtgcctttgataacttcaaaaaggtttatttaattgatcaagttactaattaaatatttctaacgaatctttgggccaacctaccttgacttataacaagcatataagatttaattttccactctttacaaaaaaaaaaaaaaaaatcattttctaaataattacatgactaattcatcatatttatcttgtttgttttttcaattcatattataattttactatttaaacccaaaacaataatagattagttaatgtgcattttataaaatattttagaggcatattttaattgattatattcattttgtatagaattacgtttgttttctacttgtttcaggtttaaatggtgaaatataatataaattaaaattagaagaaacatgttaaatgagatgaatatgataaatttattatggaatttaaaattctaagatataatagtttgaaaaaattctaagttttggatgctcaatacactctgtttgtgattgaaaatcaagtct

SEQ ID NO: 207754 - DNA, 1059 bp, Cannabis indica
gtgaggacaaagcacactataaatacttatgttggtctatagagtcagtcgttagtccaagaagtagtctgagtgacgtacccatgtattagagccataagtccatggggaaggcataatggaggcttgaagtgtgaatgttacaaatggtatcagagtcttgactcagcagaaagtgtggttaacgaggatgtcagaccccgataagtggggtgattgtggccgttagtagtcctgtgatctgtaaggagaaatattaggtaaattgtgcaatctcacatcgcttggggaaggacaagtgtgatgattctgagactgtgtaggtataggaatacatagttaaggagagcttaaaataaatggattgaatggtacttcctatatgaacaaggtgcatcttgttttctgatagcccatcacgaaagaactccacaattaaactgcttgacctgggctaattttagaacgggtaacctcctaggaaattttttcatgaagtgtgcgagtgaggacaaagcacgctggaaacacttgtgttggtttctagaatcagtcagccagagtgacgtactcatgtataagagacatcatttcgtaggtataaggacctaatgaaagcttgagcgggagagttacgagcagcaacttaaagaaagagtgagtagcccaaaaaaaatataagagaaaataaaaaatgggatataatagtcaataaaattatcacaccattaaaatatttttactataatattaagataaaatattttttgaaaggtaagataaaataagaatgtgcacacgaaataaaaataggaatgtgacaattggttttttttttttttaacaaattacatttacatgtaatattttaatacatattttatatgctcatattattatatgtaaaatcctttttggcaagttagttgacaaaatattttttatttaatggtaagatatttttgcatttatgaccgattgtcttaccttgaatatttggatttagttgatcttttcttggttaggaaatatgcttttaatgctgaactttcctttgtt

SEQ ID NO: 207755 - DNA, 761 bp, Cannabis indica
ttctctcatcaatccatctcttctttttataaccacacttataatccccaattttcacctaatttcaaaaatccactattcatcaccttctacctcaagagtttacaatggcttcatcaatggaggtggagtgaaggagattctcatcaatgtaagtaatttttcatgattatttattaaatttttagataattttgaatttttgagaatcttgcaaggagtggtgtgtgtttttgtaattgtcttgaatattgttgtggatatattgtttgtgattgaaaaattgagtgattattgattgcgtgttcacccaagaaagagtaaaattaaggtgaagtgctggcgaaatttttctagagtgttaggtgaattgattgaaaatgggacctaagagatcaagagtgagtgagaaaggtgcctcatcatccaactcgtaaaggtcatcaaggcgatcaaatgtagatagggaaaggttcgtaagtgtcgaggcccaagaacactatctagaattgaagaatagggcattcatggatgataggggtattgatgttggtgacaccagagttccttgtcatccaatgtttgagcaaataagggaataggttgaaaaacgaggatgggtgcaatttgtgattgttgatgagagagtcaaccaaaccttaaccctagaattttttgctaactggcccgagtggaagaatgacatagtaaaggttaggggtgtcgacgttccgatcactactagagctatccatgccatc

SEQ ID NO: 207756 - DNA, 637 bp, Cannabis indica
tttaaattaatttttttatttaactcataaaattaataatataataacttcataacaaaatttattttaaattatactttttttattctttcattattctaaatttttttaaattttattacaagtttttattgttaataaaattttaccatcataatattacatctttaacatatccaaaaaaattacttaaatcaaatacaatctaaaaaaatatcaatacaactaaaataaaacaataataaaaacatacatttcacaaaaaaaaaaaaaaattgtacacaccttctctaagctattaaaatttcaactatccttttatcaaatctgaaaataacaagaataaaatattttcaattttagaaataaaataaaaatataaaatgaagaatacataacaaatatatatatacaaaaataaatttaaatatacattatttattatatgtatatatacataactaatatatatacattatatatataataggcttaataaatttgacttgatactgattctaaggcgacgatcaattgtcaaagagctttatggtggaataacttaaacaaaattttatgtgttttagctgtatgcgttcatgcatcgcatttacaataattttaaaataatatttat

SEQ ID NO: 207757 - DNA, 804 bp, Cannabis indica
cgcttccatagcggattaagccaacatacccaaaaaccttcttaaaggcataatgaaacgagtcgcctccatagtagactaagccgacataccaaaaaactttcttaaaggcataacgaaacaagtcgcctccatagcggattaagccgacataccaaaagaccttcttaaaggcataacgaaacgaagtcgcctccataacggattaagccaacataccaaaagaccttcttaaaggcataacgaaatgtgttgcctcgatagcagactaagccaacataacgaaagaccttctcaaaggcacaatgagccacctccatagcatattaaacatatcgaaagaccttattgaaagatgtaagaattactccagtgaaaggtcaaaataacatatcaagcccttattaaagacacatcagtcacatcgaaagtagattaaaacaaatatacaaactcttcatcaaaaatacgtaaagttgcatacataaaaaaaaaagtagtatcatagaatttgtagtagatagctaaaaatcctgcccatgagaaatagtacgccagtcaaactgaggtattacatatctcggatcattcaaagttgagataatacacatcttaatatggtccaactaaaatccaaagggtcaaacaagaagagaaaagttacaaaatctttaaatacatgtataagacaaaacaaactcttcgaaccaagaaaagtcattagactcaagtattatacgacctacattggttaagccctttgaatcagctcaggaaaggcataacaacatcctcatcacttga

SEQ ID NO: 207758 - DNA, 1079 bp, Cannabis indica
tgttaggatagaaaccacttaactgtttttctgttaaattctgttataaagtagttagtctgttatgatgtaatctcttgcttttgtactcttcttgggatataaataaaggctttactcagttagttcagtggttctttaacacctctgttctagcttgtgtatgattcagaaactctctgtttcatcttcttcctctttcttacataatatcagattgcctctgacttgcgtcaatggagtcctcctcgattgatcccaccaccaactcggcttctactacaccttctgcatctatcgctccctcgattcctgcttggaatcctttttcgcattctctttcatcttccctcacgatcaagttggatcgtctcaacttcttggcttggaaatcacaggtggtgcctactgtgattggccatgaactcgacgaaatattgttctctggagttccgcctccctccaatctggttaatggaaatcccaaccctctgtttgctcagtggagaaagaaagatcaattacttctctcttggcttcgctcatccatgtccgaaggtgtgcttgcgtctgttgcgaacttctcctcctcttacatggtgtggaaagccctggagcaacgctttaacagtcaatctcgtgccaggcttcttcaacttaagaaccaattttctacaattcgcaaaggtagtctctcgatttctgattatgctgacaaagttcagaatcttgcagattctttagctgttacaggctatacagtcaatgatcaagatattctcttgcaaatcttgaatggattaggaccggaatatgactctgtggtgtcgggcatcgcggctcgaagtgatcttctctctatcgaagaagttcatgctctcctactctctcatgaaagtagattggaaaatcacagtgctgtaaatgaactagcaatgaaaatgcaggccaatttgacgtatggtaatccaagatcaaatgtttatcgcccacctcaaggcaccagacccacggggcgtggatataccaaaccaggcacttaagctacacggccccaatgtcaagtgtgtcttcgcttt

SEQ ID NO: 207759 - DNA, 969 bp, Cannabis indica
gtttagcatctcaatcaaaataataataatagtagtggaaaaattaaattaagaataaggggacaaaatgtggccacaatcaaccattgaccatgtggggaatccttaattattttggccaattattagatcataaaaatagttgtaataataagaagacaaattgacttgattaaaaattcaagaagaaaatctaataatgctcacttgtattaaatatataaaaatatgtttatgtatatatattcatttgtgtattttgagttgacttattcctaacttattaataaggccatatatatttatagtttttataaattaaaaaccacttatatatataattaataattagctaaattataagatcatcaatcttttaaattatttatatgtgagttaattcataacatatgtttaagtaactaacttattaagcaagattattattagataaatactacaaatctggatctccataaatatgtgaagcaagatcgatcttaataaattaatgttggactaggtttgtgtcttgagcttttttaaacccccttaaaactttcaaattgttatattttttaatacttgtaactataatatttacaactaaaattcttaagaaactaagatctttatatttaattttcctagttaaaaaaatctcttatcgcctatgcactaacaaagtttgttatactaattcggtaagagttcgtgtttagacagatacttttgtcctaaattctaagtgctcctataacaattgatttaatttaatataatatcaccgtgttttccttaaaaaaaaatctcttaggagctttcaaatttaatgaggaaaaatagtagataagaaaaatcttttcatcacaattttttttaataacttcttttcactaatttgataagaatttatatttatatatatatatatatatatatataataaataagattatttctctctgt

SEQ ID NO: 207760 - DNA, 1007 bp, Cannabis indica
tagtcttaaattaattccatagactagaactatattgtaacaccatattgacagttcccaatcagtgaacacaatcttttaatatttattctaattaaaaactaactaattagtcaattaatcacaaataattaaaataaatatctacattaatcaataaattataaaccctattctatatcatagcatacacaataagtagtattaaaaaaaataagttttgctattttaacatcacctaattatttttcataattaatctatgcattaacacaataatttcataaaaaatacaaaaacgatcgaaaatccaatataataattttagaacagtttataaccaatataaaatcagataaaattaatttataatttctgggtattctagctattttctataattatttgtaggaataacttgataaattcatgaaaattaccgaaacaaactgaaactcaataaaatcagtcaataaccatttaaaatcaatactaaatcacataaaattaatttaaaatttgctgagaaacctagatattttttataattaatttgtgaaataaattaaataattcacaataattttaaataaatttaaaaaattatgaaacttcatcaagcaccttagaataaaataaggaatcgaaatctacaaaaatatgtgagaaaaacacctcagaacttcccataacacggtcgccagcgttcacgtcggtttcgtcgccgacaaagtgtaactttgtccctgattgctcttgacgcgtcttttcgaatgggaaaactttaccacagtgcttaggacctcaaaacgatcaagaactacccatgataacaaccccatagcatctgatcggagtcgccttctccaactccggtgtactgttgttaatgttgtaaaaaacgacaaatttcgtttaagacctttaaagctctgattcttcaagctgaatctgatcttggggtcccatatcataacacaacctcctttgatctctgaatattaaac

SEQ ID NO: 207761 - DNA, 2030 bp, Cannabis indica
ttatactttatgccgttaagaatatttaaaaaaaataaaacaatttttttttcaatataatttagtctacacgatagttatttagatttttgaaaaaaatatctttaaagtctacactatatatgattacgtacacataaatatatcaattctaagtcgtacataaatttatagatacgagaatagtgatatgacactttaaaattattctaaatatctttgtttttgttttaattttttatgatttataaatagttattgattaattatctatttttcttatttttttctaatatctttttcttttttttagaaaaaaaacatttttctatcttaattataaatatctataatagtatcataatacattagaatattttaatatattttaaataataataatataaatcatgtacactaagtatttaaaaaatacaaactttatttaaatataatttattgagttattatttttatatttatctatttatttatcaaaattgagtagttaactcattgattaattaaacatgttgataaaaatagtgataatcacagatcaaatacggtgataacatcgacttggaatgtagtgaaaaatacaagtaagatatgatgataacaatgattgtaaaatcatatgatgagttttttttttttttacagatttataatttttggtttgttttaaatttctattttatgtaatggttcttcaatctctaatattttattgctattacgtctgaagatattaaattttaaacatgagtaaaaaaaataataaaatatagttactcacactaataaagaaaattatataaaaaatatcaaattttgaaacttcatatatatggttttataacttaattatcactaaattaataaaatacaaccgctcgcgaagcgcggtatatttcctagtttttagaataaaaaacaattcattgtttctctctatttttctttaaatgaatgttgtcatattggaatttttttataagaaaaaaaataataataacatatacttgataactttttgcttgacataatatacacttcataattatttgctgctttgggttacttaattcctatatttattggtatttaagatatattatttattttttaaatttataaaccaatgaaaagtagctatatataaacggatgaattaacataaatttatcaaataaaagagtaatttgcggcataaatacttaagtttaacttatggtaggaaataaataattaagtttaatttttggcagtaataatacttattaaatattaagtaaattgtgacgttgcaaactttgattggtccaggtcattaaatttttattaaaaaaaaaaagaacaaattatggttgtgacaaagcaacaaagtgagtcacttattattataacttattattgagtacgtactatatatgataagctatatataggcaagctaacatacagtacgtagatatcatacatgattgtacatatatgactagtactcaaatatgaatacataatgtctattcatcaacagacattttgagcactccataagatgtttgtggatcatcattgaaaggacgttgattgtaacagtccaagttgtccccagtgcttactcctagaaaatggcagtacattttatagtagacaatcctatttctgaccctatcatcttcaccgtggccgcactccgaacctccgttgagtatgttagtgatcacaccataaccgggaaatcgattagcagcctcatcaatctctgttggtttccactcgcccacaattacgtcatggggggatggtttgttcaaatgtactgaagtagtcatccaaaaccatatagctgtctggaatgaaacaagtgcgtctgttgcaactagctctgggttgcctaataggtccaaattatcgagtgcgtaaccaacttgtccgtaattgtcgttgctgattttgtcgtcacaaaagtacgtagtacgtactaaaaagtattaataaaacatatataaagcacatag

SEQ ID NO: 207762 - DNA, 1376 bp, Cannabis indica
aactttattttttatttttattcctttaccaaataaataaaataaaataaaaaaaaaaaaaaaaaaaaaattcccatgcaaaatttactcatgtccaagtccaactagttgtgtgcaattttttttaattaaaaattgtacactttttaaagagattttgggtgagcacatatcatgtgatgaaaaatctttatttatttaatttaaatggaaaagttttctccatataatatctctataataattaaataaatatgatcctttggttttgaaccaatgaatttagttacgttttatttctacaatatttaataaccacagttcaatattcaaaggtgagcaaagaacccaattgtgcttttttaatcaactttacaaattattaaagtagccaatacacaacaactcaagtgtttttattttattaataatgataacaataaaggcattaaaaaaaacatatatatcatcatctaaaaataagatttaaaaatatatttaactaaaaaaaagggaaatatacaatgaaaaatagcacttgggttatataattttacctccaatatattatttttgttacagtaattgatggcgtaaatatttaaattttactctcagttgcaaataaatatttaagtttcatttttggcagtaatcatatttaagttaaatttatgaaacttctataagtacctgaccgttaagtatcaagtcaatgattatatgatagtctctgattaatcgaagtcataaaaattatttttaatttaaaaagttacatttaaataatactaataaaaaaaaacatatagatattgacttggcgcaggttacatccaaatgcctactaaagttctagaaatataacttttatattagcgttacaaattaaacttaattaattatttgtaaccaaaaattaaatttaagtatttacgatataaattatttttttataaaaagatttttgttttataaaaattaaatttaagtattgtttatttactattatttatatatactttttaattagtaattaaaaagccaaatatccaacatgtaatagatatcaattattcttcaaaaataattttggggtcaaactattttttttttttttgaataatgattaaatttcattaaactaaatcatccaaaactaaggatgcaaaaacaaaaggtaaggagtccttactaaaagtacggccagccttaaaaagagaagatcgcgccaaggcatgcgcaaccttattagcagatcatttagacaaaaattaaaaagaaaacaaacatacaaaatcagcaaccaaagtcatacaatcataaagaatatggccataaggagaaagccatatgtttgaactttttgcaaatca

SEQ ID NO: 207763 - DNA, 513 bp, Cannabis indica
taaaggttctactgtataacttttgtcatgttgactctatgtatattgtgaatcatatataacttttatttaattgaacaacaaacaatgtaacttttatttttcttctttaatgtttttgtgtggctggaagagtcttttatctttttccttgtaggtgaaaaaaaaacaatgtagctacaaaagattataagactgagatgcaaaatgatcctaaactaagtaagtaaatatccctttttataaatatttagcaaaatggcctgctatcacttaaaattttgacgatgaaattacaactataacctttgataattaaccctaactttctacattcttctcattttgtgtccaggtcatcttgcctccttatttgttggtggctgaatggctagtagataaagcaaacttcaatttatttttggtgaaacagataaggaaagaaaaaaagtggtatattcattttacgtgatacagtatataatgaaggaaagaaaaaataaaagtgcatta

SEQ ID NO: 207764 - DNA, 714 bp, Cannabis indica
agaagccatatggttgaaggggttggctaaggagtttggtctttatatagatggaatcacaatgtactgtgataaccaaagtgtcctacatcctatgaagaatcccatgttctatgaaaggtctaaacacatagacatcaagctacatttcataagggacatcatagctaagaaagaagtgtttgttaagaaggtgcacactcatgagaatcctactgacgtgttcaccaagagtgtcgccacagagaagttcaaacactgcctagagctactcaacatcactaattgactggtttaataatcaaggtggatttgtaatggtttgtgattgaaaaaccagctcgttagttagttatagtctcataggtatgctaacgagtgtgttagttatgctagttgtatagttagttagtttaattaatggttttcactctatgcactcggaccacttaaatataaatagactaaactagcttatcgactaatgctttgggttcattcttgtaattactgactctgaagacaggggagagaaggaaggtaacttgtgtttctgatcaagttaatcccatttagtgagattttgtgaggagttaaactctaacaatccacaagctctctctcggtcattcattgtataaattcaacaaccaataaagataagtttttctctcattttggtacattgaattctgtccagaattgttcttatag

SEQ ID NO: 207765 - DNA, 580 bp, Cannabis indica
aaggttgaatttttcaaattttcactatgttgatcgtgttggtttgggtgggggctaactgctactttggaatgattctttgtttattaaatttttgtcacctttagttggtcacattgtagttttggctgctgggaataggtttttaccgtaggttttactcgggcttctatgggcatcatgaccaatgccagagacaccactctcgaaaacttttaaaaaatttgaaggattcatgttgtggccgttggatgtgcattggagactttaacgagattttatctaatcaggagaagttgggtggtagagaaagaagttggatttctatggaaggatttcggaatgccatagatatttatggtttgatagacttttgtgatattaaaaataaatttatctagagtaagacataataaagatgcacttttgaagagattggactgcggtttgtgcaacgcatggtggcttcgttattttcctaatgttaaaatgccagttcttgattggtgtaattcttatcataaagctctgttggtggattgctggaattcaaaaatcgataataagtgtggtatgatta

SEQ ID NO: 207766 - DNA, 968 bp, Cannabis indica
ccttactaactgcaaccatggaactaactcaatcccgaccatttttgagcccaatcgatgcagatcctccatcgcctttagagaaaaaatcagacacatattcaataagagagagagagagagagagagagagagagagatcaccatataacatagatctatacacatatataaaaaagatgataaaagaaaaataaaattaagcacgaatagaaaatgaagatgaagaagaagcgatacctaaatattttcagggcacttcctgctccattgaagttgtcggccatcgaagacccacctattgcctttgttgatctcttcgtcgtagtcgaccgagaaagccttgaaaagtgtcgagagccaaagagacgaggatcgattggagacgacgattggttgccgagatccttgcactagagagacgaggcggagacgacaacaacgaggcggagagtggatgttgttcgccggaggatggctggtcaccagcagctacggaaaagaaaaaagagatcaatcgcccagcgcttcccgagggagaagaagaaacggcaatagcctaaaactttgttttagcaaactgatagggtttcgtgtaaacctttattcaccttttattttttatttttttaattattaattacattattattacagcttttaagaaaaaaaaatgcattaatattacaactgtatttttcttgttttttattttttaatttatgattatgatatagtgacgcgctaggtgtgtgggaaaatacttatccaatcgcacttagcgtgtcactatatgccagtgtttttaaataataaaaattataaaaatttttgaattttactctttagtaactctctatatttttagtgacgcgcattataggagattaacaccgaataattagagtctaattatgcatgtcagtaaaaattactcctaactcttagtgtcactaaaaggctaaatt

SEQ ID NO: 207767 - DNA, 1194 bp, Cannabis indica
atttctttaagtgttttataaccataacatatatagcacgggtacacaattggttggaagaaaagaaaaagatgaaagaaaacgttaaaagaaatttaaagaagaagaaaaccattggcttctaaaattgtttctctagcaaacgccacagacaagacaactagaatgtatatgcaatttcaggcactcctccccaaagaaaaaaaaaacaacaaaaattacttattcatttattattattatttatttattggattgaaaatgtaatttcattttagaaactatataaactttagttgaattgtaataaaaaaaaaaatcgacttggtcatcaatatcatcattattatcatcattttgtttgttgctaagtcaaattaattatattatgagttaggctactctcatcttttatcatcgttatatatttgttatatccatgcacgtttgtaattctttagggcctacacatattatatattatagatcaatttaatttactgtatatgaatttaagattttaatttactaatacaattaaggaaggagaatacaaatattcatcactatgaatggttacttatacttaaaattacatcctaacacaaaaaaaatcttatttttaatcacaacaaaacttgtgactaaaagtaaaaaaattgttaagtactaattataaattatcatttttatgttgtaactaaaaggtcgtagctaattaaaaatattagttataaaaattacgttgtgactaaatatatttttagtcataataattattgtggctaaaattaaattagtgaatttgtatttaaatactatgttttaatcacaaataatataattgtcactaaagttcacatttaatcataaaaaaattatgttgtgactaaaaagttatcactaaaggtaacaattttttgtaataatttcttgacatacaataagtacatttttacttatatacaagtaaatattcaatattaaaaaaaagtgcaagaaaatataattatataattttatgaatatttacaaataaatatatgatgtatacgcttaaaagaggttgattatttttaattaattaaaaaaaaatcaataactaaaaatataaatacaaaagtatttattcagaaattgatggacataaaacgtgactggaaataaaatagggaaatttacataatatactaa

SEQ ID NO: 207768 - DNA, 770 bp, Cannabis indica
gggtcccgcgtcaacggttccgggtccgggtccggaccgagtctgggtccgtgtctgagtccaggtcccaagggatccgagtcttaaattttttttaaaattaattgaaatcgggtctgatcaaatccgatccatccagaaaaaaaattaggcggggcgaagcggatctgatcaaagatccaataagtatccgaatgtttcagatcagaggtgatccatcgggtcggagctccaacccgctccaactaaatggatgtttttgacatgcctatctcaccctacgatgttgaactcgattgagaacccccattgtcgaacccaaacttgaaacccagtcatgtccctatcatcttctctcacggtctctctccaagttttagttttttttttaattttttttttttgcgatatttagcaatatatttgcaataataaacaaaatctgaggctaaggatgaaattaagtgataatttagcgatgcattctgatataaaactaaaaaatacaaagcacatcgcgaaatatcgctaatcatcgtaaaaacttaaatgtgatttagcgacatttagcgatatgcttagcgagattgcaatttagcgatatttagcgatttagtgatgtttaacaacatcgtgaaaactgaaaaaaaaaatgtaaaaaatgaacgatgggttgagaacttcggtgatgggtggaaatttggtagttttggggtggttgagctcagagctttgaggtagagacagggagacttagttagagtgagaga

SEQ ID NO: 207769 - DNA, 1242 bp, Cannabis indica
gtatattgtttttttcataacatatttgtagttagtttgttatagtagtataatgttataaactcccctattatattatgtagaaaataaatacgcccactcaacttaaatgctaagttcataactattagtaatattcagtttttcaaatttgattattattagagtgatgagttattttgctatggataattagttacaaacacatcaaataaaataataaaattatttcgatactgtaactagttaccaacttattactgaaaactataaaactaatttatagtagtaaaagtttgacacaaaatatatatcgataatagtaaatacgactacattaatgaaaaaaagaaaatcagtcgatagtagttactagttactaccacactattatatctataatcgtaactagttattgatgatggtaatctatcaaagtgttactattataattttggtttgacttttttctaaggtcttaataataaccaattaatactagtctattaaatccaaaaatacaatagaataaaagattaaaaaaatattataatgtttctctgtaattggttaccaattaccactatttataagtgtggtttaaaggtggtacaatatatctaaccactaactaatggtcattagtgatcaattaatttttaaattctcaacatcaactccactatatcaaatctaaaaataaaaaagattaaaatgttaacaatataagttcatgtacctaaagtaaaaatgattaaaacatagaataaatttactaatgtggtgataataggggtgtacgtaggtcggtctatattacattttattcaacctagtaacccgcccaatgaaattagtcggtttggtcgggttaacccgtccaaaccgaccactaatattttttttttattatttttacattcaattattatattttagttgtaataatgagacaaatatatatatagattgaattcaaagttcaaatcaactaccataaaaaataaaatatgtataataatcataaaaaaaatcaactaccataaaaaaatattaatttcaactttataaattttaaataatcatataatatgtataaaaaattatataaaaccctcctaatcaggttaatcgggttagttcgggttgattgggcggattgatattattttctaaccctcccaactataaagattggacatgttatatttttgtttgggtttttctagcttgtatttttcg

SEQ ID NO: 207770 - DNA, 711 bp, Cannabis indica
ctctctctctctctctccttgctaattttaccacatttgtggttgtaagaatttcccacacaattctatgacaaaggtagatctctgtagaaagactataaaaaaattaaagattgaagattgcactcttattcaagtgaaaaattcaagtttagttattggtgatgatactctgcgatagaaagaaaaattgttagatcttgaaacggaaggagacataatctgttgtaacattaatttacaagaaaaataaaatcgatcatgttaagcgtgttttcccaacaactggccctaaagccttgtttacatgtgtttgtttttcatgaattaatatctatgtttgagtattacatgtttttggatggactatgtttggtttggatgattataaaaagttataaatttttcaatatttcttgattttttgaaagattttatgtaaaaaaatgtttgcatgtttagtttttttttcacgtgtaaattgcttgtaaaagcattttgagttgagattgcatgaaaatatagtatgaaaaattgatttaaaactatatacatatgtatatacgtgtgtatacacatacatatacatatatacacacatgtgtgcatgcatgcatgcacaagtgtgcatgtgtgtggtatgtgatttgctttcccaccaagaaatcttaaaatttgggtagtttcctaaaaactaagtgcatgtttggc

SEQ ID NO: 207771 - DNA, 725 bp, Cannabis indica
agataaaagccaaataaataaaagcttcagttatcaatatatatcacaaagagtccttaaaaaattatgatatttagttaaaacctaaaaaaaaaagaaagaacttttaaataacataatatattaataattaattcaattcattttcttaatgaaaaatttaaataaaattataattaatttaattttaaattactttttaattaaatattaaacaaaaaagtactaaaatttaaaagaaaaaaaatcgataattatagaagtacattaaaatttataacaaatatttttataacatttaaatttatagattctatattatatagtaaaaaaaacaatatgacttttatagggtaaaaaaagaagagattgtttaaattgtaatgaatattaagttcatttatatttatgctaattttaaaatgggtccttgtataatagtgattaaaattaatcactatttttagtgatttgtttataacctttagatcttgatctaatggttaatattatgaataaaaacattaaatacaataaataatttatttttaaaaaaaatacaataaataggtaacttgttggtgatttgttgtatgaatagtaatttttattgaattatacatttgattatccatgaatgatttaaaaattaattattgaatattatagtgtattttttataacttttagaaaattgctatggagtttatttattgcaatccaca

SEQ ID NO: 207772 - DNA, 548 bp, Cannabis indica
agttataactaactactggtctagctaagttctagttgagtgaaccttctgtatatatagtccttagtcttcattcctgtaatctaatttcaactttctcaaattaatgaaatgtctttacttctttttcgtgatatggtatcagagcaggaaagttaggctttcctgtccgatctgttccagccatagtcgtgttcttcatctccgacgaagctgtgttttcctccgctgcaacttcttctccttctctcttgctcaaattcgatcgttcccctctcgattgatcttctgcaatgcctacagatgataatcgatcaactcaagaatctcagggagaaactacgattcgaaccaccattggagacactcagaatgcacctctgcaagttttagcttcaagaaatcctcttgaagatcctgcgaatccttattttcttcatcatggagacaacctagggcacactctcgtctctcagcccctcactggacaggacaaatatgtgtcctggagcagagctatgcttcttgcaatttcagtcaagaacaaa

SEQ ID NO: 207773 - DNA, 1281 bp, Cannabis indica
ttttaattgactctataaaaaaagctacttttagtcacaatatttttgttacaacataatttttttgtgactaaatgtgacttttagtcacaataaaaaattactttgtgacaaaatcataatatttagatacaagttgtcaccaatttagttttacttattgtgactaaaaatacatttagtcacaataaattgtgatttctgtaactaatgcatttacttatagaccttttagtcacaacataggaataatgatttataatagtcacaatattttcacttttagtcacaaattttattgtgactaaaagttgttagatttttatttgggcttacattaacttttattggttaattaaaatttgggttgattggatagttcgtgttagtccatattattgtttaaacttaaagatttaggggttttattccttgttaaattctctttgtattgataaaatacatgcttaaaattattgagtaaattaggagaattttatgattaaactgtattttaattatgaaatccaatttagaatttttcattatattgattattaactaaaattgattatgaatatcctattaacaatcattttacaatgtttttactcgtttaattttcgaattggacaacatcgaaattaccatagtcgaatttattttagttcatagttttcagattgagtttcattagatctaccaaatcccctgctcaacaggcatgttctgtaaaaatctaactgcatcttccaaatcccctggtcgagtcaacagattgataacacaaccatagtgttgaactttcagaacaatgttgtacttctcctgcatgagtttgaaacagaattttacctcagttcactacaaaaaactgttagttttagtgacaaccttttaatcacaacataaattttttgtgactaaaattgacttttagtcacaacaaaaaattacttgcgactaaaacatagtatttagttacaagttgacattaatttagttttagtcacaacaaatattgtgattaaaaatacatttagtcacaacaatttgtaatttttgtgactaatacttttagccacgtatattttagtcacaacacaataataataataatttataattagccacaactattttatctttactcacaaattttgttgagaaaaagtaaaattttttatagtggtttaatgggttgcattctaaagattctcacactcttttgtctgttttttctagagctttgtggtacttttaagggttatttgcggcaaa

SEQ ID NO: 207774 - DNA, 1244 bp, Cannabis indica
gtaaacgtacctccattactattgcgacatgcgaaatgaactactataaattgtgtgtgtctctaattttttacttaaactcattatttatctcgtcaatctagcgagttggtgttgaccacttttcagcgtcaacactaggtatcgtattattaaagggtatcttagtaaaagtatacccattttattaaaatagaggttattttattcaaaattattagaagtgagttagaatgcaaaatgcacttataaaaaagacccattctgccaattatttctaaaaacaataacactaatgttgattttcatataaaatagaaacatgccattttgttcaatcttttcccaaccaattcctctaggtgtctcggttttggctatggtgtctctcggtttagtgttagtacaaactattgctatgtacgtaaaagtagggttgagcataaaattcaaaaaaaactgtttaaactgttcaaaccgacctaccaaacatcactataaccgaaaccattcaaaccaaaaattaaaaaaaatcattaacgattaaaactacccttaaatggtcggttcttatttcagtaacaaaccgaccgaaaaaactaaaaccgactgaatttatataaaacataaataaatttatatatgtatactatttaacttaaagtttatgtatatatataaggtatcttataattatattaatattattaatattaataataaaaaaaataagtttacatatatatactctccaactgctctctctgtctctctcttgctcactggttttctctctttgtctctgtcaatttttcatttcaaaagccaaaatgtctcatctcatctcattccagtctcataaatcataataatagatcatattttcaaaaatcttaagcctccattctatgaataaatctcagagtgtctttttcaatatttatcatctttctctatcttttatattcatacaaaattttatattttctcatacattctctcaattttacaaatgttaaactattagagtataggaaatcggcaagaagaaaccagccaaaaaataaattccaactatcctttaaatttgataacactttacagagacaaaaaaaaaaaatacagtttcagcagtttgaactaatcaaactgcaatttacattgatcggttctaaggagttttttatattagtctgttagttttcagattacaccaatccaccaaaaataaaatctgaattttc

SEQ ID NO: 207775 - DNA, 845 bp, Cannabis indica
gcaattagtattttttagtgtttgattttaacactaaatttaggttttttccattagagatgcccttataatccccgcttcctttttcaaagtttgtcttttcatttttagatttttttattgttataatttttttaatggttactaataagtattttttacataatttcaattaaaaaatatagattacaatactaaaaaaaaaaaaaaaaagaagtaaaactttttcattatttcttttcatatattacataaaaattaattttttgttacctcatgattatcttgttagaagtttaagacaacatcaagttaaagtaattggacttttttttttttttgagtcggaaaagtaatttttttttcaccttttatatttcaattaatattgttatcacggtactaatctttaatcaattctaaactaattttctctttcttttagtaataaaaaaccatctagaaaagaaaaagagaagaataaagaaatagaaagtgcatgtattccaaatttagatatcaaacccttctacctagttccccaatacaacaaaaatatatatatttatatatatttgtagaatttcataatgtttattcctaccagagaagaaggaaaagtaaaagtgggtgaagcttcattgatggtatatcattactttactcatcaaatttgtaattttgggttatgatcaatttggatgaacataaattaatgaatagaaacataaataatagaaagaaaagaaagaaggaagaaagaagaaaagaatagagaaaagggtaatgatgagggaagagtagtgagagtggttatagaatataaagggaaggagtatggttag

SEQ ID NO: 207776 - DNA, 545 bp, Cannabis indica
accccaaataaaaatataatgaaatcaaatttaaaatgcattaaaaacttaataaaaaattattaattttttttctcatcatacattggaatgagctttttttttcaatctcaaaatagaatgtcattctactataataatggaaaagtcattttattagaatgtcattctaaattctaatactttaaaatgcaaataaatacagtaataaaataattttttttctattctattttattttattacctctaaccaaaaaccatttaaataaaataattcaatggattaataatgaaaaaattagcatattaccaaatcatgtgcctattgccacagctaattagttactattatatttggttaaaaaaaattatgattctcagtatacgtttggagttacaatactaaaaaatagatttaaaaacaacttgttttgtatttgtataaaataagtttcaaaactatttatttgtggagttttgacacatgtattaattacaatcccaaattttttatataactaagagtaggaatgtcagtcgggc

SEQ ID NO: 207777 - DNA, 1177 bp, Cannabis indica
tactgtatcttcctgcgaaggaaaaacagaagtaacactcagtactattgaaggtcatatcccaagcaagtacagttcaataacatctccctccctaaatttctgactgatatgcaatagaaaatgatataaaacataaaagaataatgatcaaataggtaaggaaaattgaaccatacagaagaaagcgatgtagaaaccagcagatcctgaaagaaaatcaacgagtggcatagtgtgctgccaatgctagattcaattaccttgacaagtgactgcaaaataaatgatgaaattagaatactgactaccagaattgcaataactactttctagatcattacatggaaatatgaagattcagcaagagagtagtatagtgagaagattcgacccaaagaaaaaaaggagcaaaagcaatcatttgtagacaaaagcagtgtgttccaaaagtaaaaattggctaagaaaaccacagttaagttagggatttcgtttttacgagtaaatctttgataagctaaggtccacaaaagtggaagagatgtttacaaaataaattaggatataaaagattatagcggcactctaagttgatagtttttccaaacaatagtattgttaaataagggcagagtcatgagaaagtagaattcttgatggtttgattatgttaaatacttaaataagtcatcaaggtcgaaacatagtcattcattacgcatctgaaaacaaaagataaaaaatgggaagaaaaaaaaaggtaatataacaatgaagatatgattaccacagatgtatatgtgcttattttatacagatatatatatatatatatattttactaaacaacctgaacttcgagtgcagcctcccggctcacagttaacatttgtacagtccctcgctctttcaaacagtcacggaacgatggtaattgaagtttcttccctccaagaaatctgcctcagagaggaaaactagtatcaggaatgaatacagcaacttcagcattactaggtagcaaaaatccaattgatactgcaacttcagattaccccagcagcacccatccaatggagaccgctttttcatatgctggcaattagtgactttacaatgaaatgaaacattttgaaccaagcacaaactaaaactggacttcattgattacggt

SEQ ID NO: 207778 - DNA, 719 bp, Cannabis indica
agagggggggaggggttagggtttttattttataggtttaagtgtaaaaaaaacagttatataattcaacggggtcaacaggaggatacggattagaccctgcaactcctacttaaagatgcatacctgcgatcaagagaagtaggagttgcaagtggggggggtttgtggttgagcagtggtgagcatgttgagtttcggtgggggcatgcgtctaaaaattgtagggaggagggggaggggtgaatcacaggggagaggtagtggtccggtttggtgagagggggtgctgagcagcgacgagcctattaggttttgctaagggtctgcatttggttttcacttgggagaggggggaggggttagggtttttattttataggtttaagtaaaaaaaaactgttatataattcaactaggtcaacaggagggtacgggttagacccggacttgaccatatgtaaaaatatcacccctacttgcccggtaacaatgaacgggtttagtcggacatgtccgatactgatgggtaagggtgagtagaatatatgcttaaccatgaaacctacattatctgcattgcaccgtacaatgtggtctggttaatttcattcgtggtgcgattatggttaaatttttcactatcatcacgatatgttgcggtgaagcaaaacaaatataaaaaactgtagtatccacgctgcatcatatacataata

SEQ ID NO: 207779 - DNA, 818 bp, Cannabis indica
ggttggccagcctcaagacaacacaagaccggctagccaggattggacctagcaagattctatgcaaagttttatgtgtagactgggagttggggtattcattgggccttaacagcccaataaagttgctgaaaaatatctatgtttaagggaaatttagtcttttatatttaagcaatataatatgtaaatttctacttattttattggtaaattaggatttatgctctcctatataaagagccttaacttaaccctagaaaacctaagttctaaatgctaagtctcattcaagccgtcaagctctaagttcgataatactctctccccaccattcacacgcccactatagcatctctcaatacttgagatttgacatatttaattcctaccttgtaaccttaagagatttgtatcagagcccagctatagtgatctaattagtattatctctcggaatcaataaaactaaaaggggagtaggtcattacccgctaactaagggggacgaatatcgataaaagtctttgtgttctttacttttatgttctaattgtgtaacacatggcagacatcagattcatacaaccacgctgttggttggccactttttgaggtcaacagtttggtactttcattaggagagagtcgatatcaaatctgatcaaatgccatggtcaacacgagaagaaccctgattgcaccatctgcatcttcagttcttccttaagacccacagactgtagatcctaatgtctatgttccagtcacaactcaaatttccatgaacactgcagatttatagggattgctcttat

SEQ ID NO: 207780 - DNA, 725 bp, Cannabis indica
ggatgtaatttattctctttaaaaaaagaatataaactaattagcaggctaaaattataatgtggtaatctgaaatttaaaaattattatatgttctaaagtgtttactttattttagtaatgtttaatcaattataatgtagtagacccttgaagcttgttctgttgtgggagatgagagattcagttgaattgcatctttgataagctcattattttaggaccaccactgtcttttcttaattttatatatttaataatataaattatataatgattgctgacgtatggctacctaacttaagaaaatctttatgaccttttctagaaaattaaataaataaaatttcatgatatatatgagtgtcatgtacaaatcatattgaattgaatattaattaaggatatatgtgaagaatccactaaaattccctaaaaacaattgcataatatctttagcaacattatttttttttttgctttaataaatgatttatagtgatatagattatttgcttacttagatcaagaaaagaaaaagagaaagtgtgtatataaaaatcttctaccaaaatatataaaaaagtcttccttgttataaatattaataattatgtagatgtctaaatcttttatttattataattaattgtaattaatatcctttttttttagtttccctttttcttagtttcttaatatttctactcttgtatttgtataaa

SEQ ID NO: 207781 - DNA, 1465 bp, Cannabis indica
attataaatgctatagctatagtctcttagttcacttttctatatttttttttaaaaaaaaaaactcccaacacaactaataatattaagacaatgaaatataaattactactttaacacaaatcatctaataataatattaagaattgtagtcagtattacataatagaaataataatattatataaaattaaatcaaataataaaaataaattaccataaaaggaaaattaccaattttaagatttacatattttcctttaaaaaaaaacaaattaaatttataactttctaattttatttattttgataatgttaataaatttatactaatatttattcatagtaaataatataataattaagttttaaaataaattatttttctttcaatatgaatggcttaagtatgaagaatatttttctttatatatgcttctatcaatctctataagtcttacgcatttttattttaacttttagtcgatccactatatagattttttcactccaatcctacatcaatatataacattatgaataacaatttaatcaaaatataaaaaaaaaaaaaaataaaaaaataaaatagagttaagtgtaataaaataaaagtaactttaaagtgagttttatcaatttaccatctaaaacacttggcctatatttcaatgtgagtgtgaaccttacatcaacatataaacacttatcttagtattccattaatcaatgataagtgttaattcttgagtactttcatgacaaaaaaaaattaaattagtgataatcaaggttaaaagaaagaaaattaaaaatgaaaaataagatattagtacaaagaaaagagaggtatgatgataataagaaatgaaaaagatctatttatatgaagcacctaaattataaaaaataaataagacctcatagcaaaggtcacacagttaaattagaagagaaagaaaaagtactatatagttagttaattaattattaaaaaatgaataaaacatagcaaaggtcacatatcaaattggaagagagaaaaaagtctatgtagttaataattaattattattttattaattattttttcaaagaaaagtaataaactaatttaattaaagaaatataaaaatgaaaaaaaaaataaaataatgttaaaatcattaaataatatattttttttttttgataaattactattaaattacaatgtacatagtacaataaaaacgttatcaaatagttattactataatcaacaaaaagtcacttataaattaattaaaaagttgttatgtaataaaaaataattaattagcataatatagaaagtttttttggctattacataatttttggttgttacataacaattaataacttgtgtgttttttttattggacagaatatgaaaaacctcaaaaaaattagaaaaatagaataaaaaagttatagaatgcca

SEQ ID NO: 207782 - DNA, 525 bp, Cannabis indica
tcaaaaattcttatgtggatcctccaccttttaagtattcaaaaacataaaattgtatccaaatcttaaaccaatcaaacttattttttttaggttctaatttaaataagtttacttacatagtatttaaattaataattactattaatcttttgttatattaacttgtttaattaatatgtatatctttctgttatatggcaaacagattgtatcaaaattccattgaaatgttgttagacatatgttgtgttacaatgtttttattacttttctagatgtatgtcttaatgtttcaatatttgttaccacagttttcctccgccataagtgaggctccctaataaagttgggagaaggtcagtgtatgatgtgtgacctgtctctttttaaaaatgtgctttttgcaggatgctggctcataagtttgtggagaaatcgacagaatcagcccacatgagaaaacaaaagtccaagtcatcatggtggtcatttggatggtattagctctctctctctctctct

SEQ ID NO: 207783 - DNA, 1329 bp, Cannabis indica
caggtatgaaaactactcctatgccgcacctattgggagatcgggagggctgggattatgctggggaaaggaagtaaaatgtgtgattgattactcctctaagtatgttatctctgctacaattgaattggaaccaaaaggccttaaatggaccctgttggggatctatggtccgcctcatagagaggacaaagaagcattttggattcaagttggtgatattgttaataattcatctagaccagtccttctcattggagatatgaatggaactctcacggattcggaatgcttccactacgctaagcaaggcaactcttccaaatattcctttgactttcgtcgaatggttcagcgggtgggacttatagacctaggatttcaaggcccctgcttcacttgggctaagggccgaaacaaccccatcaacggtggatctttgaagagagcaaggctagaccgggggctagttaactccgactggcgaattttattccctcacgcaattgtaaagcacctctcctccaatggatcagatcataggcctctcctactggacacttcggggggagctcgttgcaagaatcggacattcaaatacgaaaacatgtgggctagggatccaagatgtttttggattgttaaggatgcttgggcacaaaggttgcatcaccaccctatgatcgactgccatagaaaggccaagaagacgggtcagctgcttacacgttggaaccaaagtcagttcaggaatgtgaaaaaacaagtggaggaggccactaatcaattgcaggagactgaaactaatagacctgatgactacgtagccattcactcggctaaaggtgaactcgcagaggctcttctaagagaggaaatacattggaagcaaaaatcgagggttcaatggctacaggaaggggacaagtgcaccaagttcttcatggcttcaactacggtacgcagaagacggaattacattcaatgcatcaaaaaggcccctgacgagaactgggtagaggaccccgtagagatcactaattgttttattgctaagtttgaagagcttttttcaaagaacacacggtgtacaactgatgcactccgagatatcctgttaccaacgatagacattcatgaagccgagagcctccaatccattcccacacatgatgaaatcaccactgccctctttgagatggggaaggataaagctccgggaccggacggtctccccaccagcttctactcccatcactgggacacggtgcaaacggatctcctggccatggtaatgcacttctttaggacatgtgaactaccaaaggt

SEQ ID NO: 207784 - DNA, 1055 bp, Cannabis indica
atcattaggagtggtatttaagtatatgaatttattgtcaacactttccttgagatagaaaaggcaagagagagaaagagagacaactgtttaagtatatatatgtgtgtatgtatatataatttatgttaattcaatattatattaggttatgaatagcataatatcgtttgtcaacatttgaaaatttgaaaaaacattgatcctcatcaacatgcatgcatgcacatatattcctagttctttgcatgttaccatatcagagcacaattttataagtactttcattcaaatggtctcacataattatacttatatatatatatttaatgctgcagtacaagtactataaattagattattatacatgacttagtttaggagagagctttaatattaactatatattctattatagttagaatgtgcttttcctccttttatatatactacatatatatatatatgtgaagaatactaataaaaactttaatattagatgtgaatttgttgttcaaataaatatcgagtctcacacatattttaattttaattaattataaaagacttgatactaaatcacatgcaatgacgatattctaatgtgttagacatcttagggtacctcataattaaagatgatcaatatgccaaacaattatttctagttattcatctcacatcttcattctcatttatatataaatgaaaaattattgagtaatgatttttttaattacttttatatgtaattttaatattttgcagtacatattgtataatttaatttagaattacaagggttttttttttctctttgtagtgtagttacaactacaagataatttattaattttacaaattttaaatttaaaaaaaataaagaaacgaacaaacaaaagattaaatattctaaattattttataaattttaatttaaataatttactatatattgagattaggattcaaattatttgttttgatatttatatgtgtgcgtacggcttgaaatatattgtaatgctgaattttaaattattcaaaaaaaaaaa

SEQ ID NO: 207785 - DNA, 760 bp, Cannabis indica
ggctaaatgaaagagtcgagttcatgttattatcactgtatctcatttatatctcgtttactgtaatcattatatctcatttgtatctctccaactacaatcatcatatcatatttatagttcataatatacattaaattagcttatgtatgattttttgtggaggagacccacccatatatttacacattatatttacacatgtaattatttcttgtcaaaataaaataataataatcaaaagaaattaaattaagtgagggagaaaaagataatgaagtaagttacataaaccatgtaactcgactctttacatttagcaaataaattaaaaactaaaaaagttctttcatttaagtataattttaatttccaagaattcataattgatattgtaataatatccaaataccaattaaataaaaaaaaatagttttatataaacacaccaaaaggcttcgatatatatacatatacatagttttagttatttaattattttttcaaaatattataaaaaaaatgataaaaataaaagcatttttatagtagttaataagatatttaagggttaaaaaataataaatatataatatggcaataatttttacataaaaataattggttaagcattatttgtgttataataatttgtaatattattttagtgtaaaaatagaaagaatctatttatatatatctttatggatatgagattaaaacttttggaataaatattttgataattttttaaaaaaaa

SEQ ID NO: 207786 - DNA, 752 bp, Cannabis indica
aaccttctttgtcactattacctgttttgcatgatctaagtccccattctttctgtaacctcaagatggtatatgagcttctgaacttcaagtggtgagggtgtggggtgaggaaagtgaggtaatcattctatgattctttctcatgtgcatgttaataaatttgtatgccatgttactgattcatttccttttgtgaactgacttttcagcaaaccttcagagggctaaggggaagcccttcacccctacagttttggcactgtgaacaggatctcatcaaagctgctctgcttttcagggagccacagtgaaagaaacccaggacctgacaagccaacagaaaggtaagaatttttaccagccaggctcctggtctctcttcctgtggaatttgactgagctgatgctaaaaacccactatttgtctctctttttctctgcaaagttctgattaataggagaaaaaaatttgtgtgagtagtcttgggtatagcaatgctggtatattttatggtataaatattcatattgtttgattcctatcatacccaaaacagactatgttggttaatactgagtgtcaacttaattggattgaaggatgaaaagggttgttcctgggtgtatctgtgagggtattgccaaaagagattaacatttgagtcactgaattgggaaatgcagaaccactctcaatctggataggcacaatctaatcagttgccagtgcagctagaaaaaaagcaggc

SEQ ID NO: 207787 - DNA, 589 bp, Cannabis indica
tatcaataaattccaacaaaacctaaaaggtgaaaatgaggtttcccaagaaaaggatgacaataaggcgtggttagtctttaaatggtgactatatatgcttttgattttgaagcacaaaacaaaacaaaaagtgagagaatcttttggaaaattaaaagcaataaatacaaaaatggcatagaggaaaacattacctgactcgttagggggatcccaatggatttgtttgccgcagctgctccctacaacctctgaatataacctcacacattttcttctgacatacaaaatttaccaactctttggacccatatttaagctttttttgtcattattaatttattaatataatattggtttggtaagtgtcgctaggaattttcagactgaatcactatgtactagatattctattctcttgttaattgcaatgcaattaataatcttgattcatgagtcatgactaattgaattgaccatggcaacaaaatctttggaatcaataaatataaaatttattggattttatttttctacttcaaggattggttcacggattgaattctcttactcccttttgataatg

SEQ ID NO: 207788 - DNA, 565 bp, Cannabis indica
tacaataatattatattttatatgattttatgataataataatatgcatgtgagaaaataatatatcatataggatacaaatatatatatatatatattttatatatgatacttctttcaatgtacatattttactttttccaccatattctaacatatacatatattaagagcacttccaaaaaatagtttaaattttaaattgtcgagaaaaaattataatgtcaagcttctatcaaactttagctatttcatatgtttttttagcttaatggatactattcaactaaatgtaaatataattattcataaagttaaatatattttgttattatttttttttggtgtgatattatatattttatttttataaaagtgaataaaaatataaaaaatataaggataaatagcagcataagtacccaaaattttatgtttgtaagcggcataaactcaatgtttatttttagcggcataagtacccaatgattgtaattttctttcaattttgtcagtacagactctgttttgaatttattaaaagaacatttggaagtaactgata

SEQ ID NO: 207789 - DNA, 1755 bp, Cannabis indica
caaaaaaatcatatagaaacatctattgcaactagcgctgcaaaccattttagaaactcaaaccataaatttaaaagaaaaaaaaaataaaaaaaccgtatatagggtaattcctttaaatattaatattatttattttaaattaatttaaatatatataaatattaatatattatttgtaacataatttttttttatttctaatattaggagtatatttaattttaatattcttaaaatttatatttattttatttaaaaaaaaattatatttatttttctcaaatttttaaaattttaaatatttaaaaaaataaaaaaaaattaataagtagtttccttttaatttataaattttaaaatacacattacaaaaaaaattaaaaaatataattaaatatacctacaatgcaagtaataataactttatttaataataattacgtaaatcaatacaaaagagcatgttaataaaattttgaaataaatttatagtacacatttttaaaggattattttagtaaatttcttaggcacctaaattagctttgtaattttaatttttttttttttcatgaccttatatattttaggtaattaggatcataagaaactataggcctaatactaatatttttaagtaattcaagtttttagtaattagattagattgaattagttcagttcaattggattggttgttgcccacctctacaccatactgatatggtatccaataattagttaacaattttttaaatcatttattaaattaaaatttgtgagaactatattaaaatacatcaataacaataaaaaaacattaatatttttgttattaatatgttcatatctttattaaaattgattttaaattttaattcttttacattttgatatgctaatttaatcaaatgtattatctgtctttatttaaatataattgatctcaaaaaaaaaaagatgattgatacaaataaaatatattaaatagatatatattgtgcttaaaattacaagagaatgatccaattttatcttaaacatcttcctagtacaaaaataatgtactgttttcttctatacaaaattagttggtagaaaacgatgtagttttgatttatctttgttgccaataataataataataataataataataataataataataataataataatgtcattcatccattaaaatttcaagaactttagccacaattgaaacaagaattggttttgtattctactaaacaacaggtccaacattttgcctcaactcaaataataaactccaaaatgaatatacatacatagattaaatactttaaaacacaaaaaattaaaataatcaaataatatcaacaactatttttgacatttatttgtgcatttcattagatgtagcattgtttttcatctaaaaattacaaatgatatattttttccccttttcttttatcaatatcaatttgatccctatgaaagcaactaaggcattttgatgaatgaagtaaaatcataacccaagataacaaaactaaactaactgaatctgaatataatcataatagttgcacaccaggtataccagtccacaaaagaatccttcggggtcgatctagaaacctcgcttgccatgctggttcgtcgctttcatgagtaaaaccgctctttatatacaacttctttgccggttcattgtcaaccgctacatgcacgtacagatcagatatacctaagaatatcaca

SEQ ID NO: 207790 - DNA, 777 bp, Cannabis indica
ctgtttgcgtcacttccaaacaggtgcaaaatgttataactgacgcatatagtttgctccgtcattttataactgacacaaataatacactatttgtgtctatggcttatacgtcagttttagagacatgacacaaaatctttatgtcaattagtaactgacgaaaatacccatttttgtagtagtgcaaaaataaaaagtgggaaaaaagcttcttaccccatttttagattttgtacctctttgatatcatctaaatgtcatttagacaagggccctgtttggttgaacatttaaaaaaaattcgaaagcaaaaaaatgagttcaagattaaatttttattcgtcagccaaacatgccttaaatgacttatgtatatcaagagacttgtttggttgtttagttaaaaactgattttttcccttaaaagtgggataaaaatattgcaggagccaaatggatcttagttataccctttttttcctcattttttttgctaaaactaggataaagggtataactaagaccttttaagcctttttatcaatatatatttttcttctgttttttttcaagtgctattagtaatatataagaaatcgtttaggttttagggttatatattttctctcaaaccatctctctctcccgccaacatccctttctcttccatcttcgtgcagcagcccattcacactagtgatcaacccattttcgacaacgaacaatcaatggagtccagatctaaaatgctcatctctctctgtggtctctttt

SEQ ID NO: 207791 - DNA, 1457 bp, Cannabis indica
caaatagtactttttttgatcgaaaaatcaatctgatttatttcgtacctttcgctcaatgagaaaatgagtcagattctacaggatcaaacctatggcacttaaggaatgatggaaaagaagaaaatcaaaaaagaaataaaaaaagaatatgatgttgagaaaaaaagatataaagaagtaattacgaaaatgagtaatgattttgcctttgtttactgcctatctgagtaaaaatagctaacaatgttttatgggctttgtgcagaaaccaaaaaactggagacttgcatgccaaactacagttggtgaagccgactccataggactggtttgtgattttgcaataataccatcatacttgaatgtttgcgcaagaaacatatagaattttcaatcccaatcccataaacattaaataaaataattatgcctaaaaattatattgaaattaaaaaagagttttatatgtatcaaccaataaccatttcgatctgattataaataagtaataattttcttttgatgcaggtggttgtccaacaattgcctgagtggaaaattcacgaatggaattatgaaaaagtagaaccttcggagcttagttaattcagacatttttgtcactaataattgtaaattattgaaacaaaattatgtatattgagtgatattgttgacgcaggaaatattcgttacatataatataccaattattgagaaatcggcagctaaaaatactcatttttttattggtaaacattgttatatattgataattaattaaatataaccaatccacaaaaaccatcacagcaaagttaaaacaaatgtaaattacatatatttttttaaaaaaatatcaactaagtacaaagatgatatatgtagataatatttagaaaaacatgaacaataccataatttcaaaattaaaacggcatactaaacaagtaataacatgcaaataaaacatatttatgtatagaataatgagaaggagagaaaatgaactaaaccatacacacattaatcagcaccaataaatgtttgatgtcaacaccttataattataaatagttattgattttttataataatgataaaatttaaaatactagtaagacttaatatttaattatactaataacataataatgtgacatcttctaatatgtttagacactctaatagaatttttaataaagttttgtaaaaagttgtttattgttatttttttagcataacttgatagtgaaaattaacattttatggtttttatacaatttgtataaaatattattttttttctttccaaaaatgttattttacgaaaaattaaaaataaaataatatggaaaattgtgtaaagtaactggttacctacttaccagttaccacttcagttaagtggttatcctaaaccattttgtttatatattttttaatttttccca

SEQ ID NO: 207792 - DNA, 1165 bp, Cannabis indica
ggtttatcaggtggataatgacttgtcttaagggtactaactatcatttgttgctcaacgacacagaattcaaggtagcttcaaaggggaaaaaggccttcgtcaaggtgatctgatgtcccctcttctctttcttctaattatggactatcttacaaggttgttaagttattattctagtcaaaagggtttcagatttcatcatttatgtaagcaccttcgcttgactaatttgtgctttgcagatgacctggttatcttttgtaaaggtaatattaattcggtgaggtttactagtgaagctttcactaagtattgcaatgacacaggtctgtctgctaacacctcaaagtctcacatatacttttgaggggttagtgaagaggataaatctaaaattctagacttggttcaaattgaagagggaagcttccctcttaagtatttaggagtcaatcttagactaaccaaatggaaggctacaaattgtggagtcatattggataagctgaagaagaacctaaactgctgggcaagtaaaaatctttcttttacagggcgagctcagatgatacattcgatcttgcttgggataaggaattattggatgagtatcttcatacccccttccaagattacgacagcaatagacaagagttatcgggacttcttatggggagtttcagggaatagaagtaagcttcaccgagtttcttgggacaagatttgccttcctaaacacctcaaaggtgttgggtttcgggatggaaaaagtggaacatggctctctcggctaagtatctttgggctcttgctagcaaggcggattgtctttgggtcaaatggataaatttcgtttacttgaaggataatgacatatggaattgccagaagaaggttgatacaagttggtacttcaagaaaattttgaacataagggatatcattaatgttgtgattctcaatcaagctgtgaggggaaataaattcagtgcaaaaaagatgctataatctgcttgtggaggggattaaggctgattttgcaggggctatttgggacaaaacgttgttgtgcctaagcacaggttcattcattggcagatagctaaataccaatctgcttactcgggattacttacagtggtttatggctattccaagtcat

SEQ ID NO: 207793 - DNA, 1410 bp, Cannabis indica
aagccaatcctctggcagtggtcctatgccaatggtatggactctataccgctacccgcaccaaataaatgctcagcctctacttcttaattctaatcggttcttcttatttgtaattatttttgtcaacaatggtttttttttaatattgtttcacacatttgttgctcttccaacacgtcaatataataatggtatataaaatcatttactttaaatcagtattgggtaatgggtgtattcatactctataaatatgccaatggactaaatattaagtcagtaatgtaatgtttatgccaaatatattaaacttgataatgtgccttgggcactttgcaatcattttatatgctttatttttatcaaaataaaaaaaaattaaaaactcttaattaatttaattttataaaagttctacaaataaaattatttaatgaattttttatctaatataaaatagtaatttaaaaatattaacagctaattacatatattaatttgtcttacttatgtttaaaaataattatataactgtttttttaggataaaaataatgatataattaaaaataattttttttattttttatttttacacttcaaaatatctatagcaactaattaagtaacttaaatcgcaaccaaaatccgtatagcaatccacatagaaatgatcggagaaattaccggagcaaaccaaaccgtaaattaaaaaaaaataataataatatataaagtaattttctttaaaataacataataagaaaagtagaactaaaaaaaattagctaatcacaataattagaaataactgaagaaatttagctatgggaaaaacaacataataagaaaggaatatttcctttaaaaaatattgaaaaattatttaaaaaaaattaaaaagaaaggaaggaaataatccaatttgagagagagagagagataacttaaaaacaaaattgtaaaaagaaaaaaaatactagattattacgtatatatagaatttatataatataattataaaaagaaaaacaaagaaagtaaaaaaattagtaataaaatttaaagaaaagaaaaaaaataacataaatagaaaaaggacaaattttagtaacttgtaaaaatacatttttctattgaattaatatgtatagcgatatctctctttttacgtcttgggtttgagttttgagtggaccctggtctaccttagtccaggatcggtcccaaactttttatcataattgataatgggttaaaatttgtatgttaaatataataatgttatatgtatgaaccccttatttgaaaattgataatcgactaataaatgttaaattttagatattaaacttgtttgctttacgaacaaaaaaaaaaaaaaaaaaaaaacaaaaaaaaaaaaatt

SEQ ID NO: 207794 - DNA, 1091 bp, Cannabis indica
aattaaaaataatgaaactagaatgaattatcaataaaaaattctagttgagtcgcagacaatgtcgctttctttaagacgttttgcgatcgaactatatcggtctattacaccctaaagtttactctgagaaaaatcgtaaggaagacagaaaaaagtttttgatgttggaaagatgttttcttccattgttctaatacgacttatatagggaagttgatccaagaataaacggtaagaaaacagtaatattatcgtggaggaagagttggatcatgagcagtaaaaagcagatgattgactgatcgcgttttactacttctgataatattacaattaattaattaattaataaaaaataaatctttatttaattaaatacttataaaaaaaaaaattaatgacacctcaactgccaacccaactcggatggcgttgcgcgtgtggtggtccagtgtataagtcctcacccatgcaaaactaggtacaaacccaattctcaaacatgtattatttatacacttttaatgtagtgttcatatcccatatgagactccaatcattcacacattatgcttttcaacttttatataatttcacaaaaattccaacaatttttcttttttatatttgttgtgagtagaatattgttaatgaacgacaattttttttagtgtggacaaaaaattttcgacccctaaagtaagagcacatataacttctcaattcaaatggaaaaaatcaaaatcggaaggtattccaatgcatattattttctaataaaaatagaaacacgaaaaatcaaaaaattggtaattttatgaaattcttcattccaattattctaccttaaatgatttcccaattagggttgtgatgtaactcttgatcagaatcaggcccttcaaaattctcaagggccaacttaatttcacttttgtagtcagaaggtacaactacatcagccttcctattcactttcactttctctagaatcgtcttttttgtggttggatattggatctttctctgaaaaatgaaaaacagaagcaacaatattaaagtaattaagtgcagctcaaattacaatc

SEQ ID NO: 207795 - DNA, 1045 bp, Cannabis indica
ttaagtgtatcttaatcattattcataataaaaaaaaaataatgaaagaaaatttagaaattgaattggtacagtgaaaagttattaaatgtttgatgaaagtaaataaatgaataaaaatttagaacagaggctcaaccggcgagtggagttggaacttggaatttacacaagaaatggagtctcattacttaaatacaataataaattgggtgaggtagggtcttattcctttgaatttatcgtctcaattttcattattattattattttgattaattattaacatcaacaaaaaaaaacccacctgatcatattatacatgtacctattttctttcctttcattatatacaaaactctaatgacgtgttacacacgaacttctcaatacatcatttaaactaacatgcttaataagtaataaaaattaatggtaatatttctttatatttatttattatattattaaaattaagaaaagaagaatttaattaaatatgagagaaatggagaatttttactattaattttataaggaatgccattaaaagtaataagttttaattatttttattttattaaaaaatattaaatatataatgataattttatcctttaaaatatatcttacaaaataaataccatataatatagtttaacttaaaagggtaatttaatcaatttaagtattcggattacgtttcttaataaaataaacaagataaatcataactattctatttccaaaaagatttagtaaataacatattacaaatattgattctaattattttttatttattccgttatatttttttattaatttattttaattttaaatactgtatagtatacgtatcataagcattttaatgaaatattgtgaccattggtttaataaatggtaaatataagaagaagagaatagtagcagggagggacggtcaatactcaatattctcttagatcaactccagggataataatggtctatggaagaaaatttgtcctgaaagaacaattctttttttattattattatt

SEQ ID NO: 207796 - DNA, 943 bp, Cannabis indica
atatgggtttattcgggctttagggcatcgttaatatcttgataagatgtggatcgatcccccttttgggcaaatgactttctaaagatgttgccttttttatttttatcgtggctaatggttattaatccatacatatatatatatactaattattttgaaggtcaactaatttttataaagacacaattaatggaaagaaaatagactgttgtaactttgtgtagtgtgtatattggtatctattgaaaatgaccttggtcaatttgaagctatcttagatcgacacgttcttgttcttcttttttccattttgacttgaatttttaataaagttaatggatgcattttgagtccacaaaagataacctaatatatatatttatatatatatatatatatatatatataacctttgtagaaaaaatagcaccatctaaggttgtgatgaggtgatgatatagattgatcttctaatttttgtttttcgttgaccaaaactagttaaactaatatataatttttcttgataaaaatatttggacaaatggtagtgaaaagaagaagaagatgttaaaatgtggaaagatcttctttcactaattacggttgtttttaagaacacgtgtcgttagtttattattataagatccattgttgactttaaaataaactaagttttctgattttaatggtatggattttaatgtcatggccaccaaacaaacaccgacagtaataatttttatttaatttgtatgttttttgtttttttaaatatagtgatgtgaggaatttttttttacgtaattttattatatatataaataataaattatgaaaacaaattaatgagtgtcgaaacttgaaagttatgcaaggtttattggttttctaaaatttagtataacatgggaatccaggaccactaatgcataatatt

SEQ ID NO: 207797 - DNA, 562 bp, Cannabis indica
ttaatatatattttttatttatagtgtatagttatagaatatacatgcttttcacttgcaaatatatttggtcatttcgatgaaaagtagtaaagtttattttggtattttccggttagatttatagttttttgtcctcatatatgaaccctagctagctagtgggctacttaaattataaaaccacacaacacacactgcactctttctatatgtacaattaataataattctagggcatgtccccaacacattaccaaatgggtcttctttgttcctttgataacttatatatataaaaatggcctaattataatatatcgacacatatagtacgttgataataattaattaacgatatgtactaaacctttttcttttttgtggtctccattttcactcaacaaatcgatcgtgacgtgttgttaaaaataaaaacacaaattgtgacgtgatatgtatgtgtaggtttagacttttcagttcagatttttattgctttattaaaaaaatattagctgataaatagttatttttctttttaactcatacagttaatggg

SEQ ID NO: 207798 - DNA, 780 bp, Cannabis indica
gaatcaggaatagaaccaatgggtgatgcttggttacaaacttacaattttgaacttgttattttatgtttgctctagtttttgttgttgaaacggtttttttatccctaggcaatgagtttcgatgtattgggggtatctgtatttatagaagctttccgataggaatagttgacaatttaatccaatttttttcactattttcgtattcgtaatagtgcaaaaggaaagcacgattccatgttgttcaagaatagtggtattgagtttctcgaccctttgtcttaggattagtcagttctatttcttgatggggtacaaggaaagggatataactcagaggtagagtgtcaccatgatgtggtagaagtcatcggttcgagcttattaatagactagaaaagagaaggacaataattgaaagaaaagaaatctattatttattcatcaaagttttctcttccttgtcaattgcgacaatgattgttttttgccttggagatttgttgattcgaagccgggagggggatggactcatcttggtttggagagggagctcgacagcagcgaacacctcgttgttaactatgtcggttgttttgtcgatggtcagggtgagatcagagttcaatccctcaactgccattgcttttagctccaccaccacctacaggacctccgtcacctccatccccacgctcccttcctccttttccaccaccacctgcacaatctcctcctcctcttcgtctaagtcacagtcaaaattattattttttt

SEQ ID NO: 207799 - DNA, 1359 bp, Cannabis indica
aaatatgctgacgagtcctggagtcaatggcagtggtgccatcgcgcagcttgaccaaacaggacacgtaaattccaaagggcaccacttgtgacttctaatatgtccaatattcaatttagcctaataagttttttgcccttaaatattattacgtattaaattataattttgaattttgttagtattcaaaatgtactctaaataattaagattgttagatttaaaaatttttatttaattttattcaattttcactattacagtgaatgtttatgtactaaactatgtttctcagattttgatatctaccaaatcatatccgtcgaactttaatatgtactaaataatgccttttaactttcatctatgttagatttttttattaaaattagataaatatttttaaatttaacaatcttaatagttaagtgagtatttttaatgactttaaaaattcaaaacataatttagtatatattaaaatttaagaaataaaatttttaattaaccttaaatttaatatgaaatctcatttataatttatatcacgtgaattgctaaccaattatagatatactgatacaaaccatggtaccatataatgtagtaattaatgctccttgtaatattgtgcacgtgttccaggaccacaccaaagtaccgcagttgagtttgaagttgaacacgtgttcaactgtaccagaattaatttaattataatacgtaagagaagagattttttatttaattaaataactctgcattccattcgattaaaaataaaaataatttaataactgctatatgttcagttaattaaaattgtgatgtgactacgtacttacttatatgtagttccctattatttacgtaaattaaaaagagataagatattatataataagatcctgaatcctgatcaaactttagcttacaaccaaataagaatatatatatatatatccacagatattatagaattaatattgttttttggaagtatcatttgtaaatgccttttcttttttctgcaaatattaatgtacgtagttaattaaaatatgatgcctctcacttatattatatttcaaaaaaaaatcatttactccttaaaaaaattagttccagacctgaaccgtacgtacgtatatatacctacctacctacacatgcagtatctttatgagaatattttctatgtagggttccatccagggtgacaacaacaaacatagatacgaaagttgtaaactaaacaaacatatatgtatatttgggaactatagatgatcatgtttttcacctatatttatataaggctggtcgtaattacaatgatcatatactaagacaatt

SEQ ID NO: 207800 - DNA, 548 bp, Cannabis indica
actattattaatggtagacacacatatgatggatatgcatgtaatcaataattataattagtttaaaaatggatcagacccgtgaaacaagttataattaagctcactcttgtgatctatttagacagtagctagctagtagctattttcatttgtatatatagacgtagacagtgcaagtttttgtagagagtgtgatctcgctgatgaatatgaaaatatgatagtgatactgagatagtagtcacccagccaagaagtacacgtgtcatcacatcacatgcacatagtattaggactctagccaaagtttgagactagcaatacgtgatcagaaacgataggatatgcatacagtattatacgagtaatatatatattataatgttttgaatcttttgatataccagtccacatattactactgatcatatattattttatatggattgaaatcacacgtggtaatagagaggactcaggactggcgatgggattgacttatttgccattttaggagattatttatttgagagagagagagagag

SEQ ID NO: 207801 - DNA, 1082 bp, Cannabis indica
agagagagagagaaagtgataagggtatgtgtgtgtggtgaagtcgaggatgatatttttaagatgatgatgatgataatgtgtgtgaaaatgaaaatggcaatttgatattttaaaccatttatgtctatagtgtaacttgttagataaatacttgtaaataaatatttaagtttgtgtatttttggtggtaatatttataattgttaaaatatatatatataacaaagttattttaatggataatttttattgaagatattcttataaatttataatttttatagatacctgtagttattatttacgtttaacatgttgatttatttgatatttaaccgtttgatacttataaatattttaaaattataatttaagtatttatttgtaattaataatcaaacttaaatatttatttttaattaaaaattaaatttatgtatttataccataaattattgatgtacatattttgttttagtagattttattaatctaataataaatgtttaagcttgatgatgaagattaatatgaagatatttggacttgaaggctgcgttttctaactcaaaaatagtcgttacttactagtatttaatatttattaataaagtgttattgttagacaagtagtgttattattgtttgtttgtttgtttaaacagagtaagagagattttgtcgtatgtatattgattattatatttgattttgatcatcaattcaataatagaatagaagaatttaattcaatggtggatgatgatgatgaattaaaagtggggcccacaacaagtgagtattatttgaccgacaatgttcacatgatagaatagtactactatatatactactattcttctttctttggatacttttttttggttaatttaacaacaaacaaaaaagaaagaagaagaagaagaagaagagaatgagtgtgatcaagttttattaattacaccaactttcatggatttgtgtttgttttgtttgtaatgttgtaaaccaacaaaaaaataaaaaggaaaaacgacattattttaactaaaaggtcgaaaaaaaaaacgacatcattt

SEQ ID NO: 207802 - DNA, 884 bp, Cannabis indica
atctgatatgaacttagagagagaaagagagcggagaaacgaaaggagggtaaagcttcgtcgtcgtcttcgtgctcaatttcttctttcttcgctgcttctttacttttatatatccactagttgccttttatatatatctaaacatttttagtattcattgatagcgtcttcggtgccagtggccatatttgtaattattttgaacttcttgccccttttgttaagctgttttttctttacatccttttaaattgcactctgtcggtcaagaaaatgaaccttcacctcaaccacatgattgataatatatttgatatattttattatttgttctctaataggttacctaagcctatttgctcgttttcttgtcaagttgtgctcaatcttcacacattttacaatttataatgtaaaataattatataatatccacacaaaaaattagaaaaattattttatatattattttttaaaaaatttatagtttagatttctaaaatagttttttcggtaatttttacatgagttgctatactattttaggttctccgctcattagattctatgtagaattcagtataattttaagagaaattttaaagttatttaaaccccaaaatagtttttttttccttaaaacaaaatatacatcaaatgagatttaaaaaatagtaactaacaaatatatgaattaacacttatttatatattccttagcaaaaaaacacatatttatttatcttcttagttttactttttttttttattgaacatcttcttacttttacttattctaagaagaaataaaaggttgatattttttagtcactaaattaacacagcattaataatattggattttaaatattggtgcataa

SEQ ID NO: 207803 - DNA, 675 bp, Cannabis indica
aaagaagaaagagaaagagaaggaaggtctatggaaattgcttctttcttttcttcttcattctataaatgccagtaggtttataattttacacaattttttgtttctttgtacccaaccacaaaaacaagcaaattgatagtttacccaaaatttacaaatttctctatttgattatttttaaagctttatttcttttttgtagaattttattaatatttatttactcaacccaaatcttatgttctggaggaggcacctaaaaaaaagaataaaagaatttcttaaggagaggaagaagaatcccaacttcccaagtttgaggtcagcaatgaaaatgaatatatgcgtagggcccactgatagaaataatagtcttgagagaatttatgtggcaatagtttgaaatgacaagtggaatatttctcctgcatttggcctcgggtatcaaagaaagagactcttaattactactttctattatagttttttgagttagtcaatctctatattcgaaattacatgttaaaatatattttttaattttttaataatagtatttgttatagttacagtatcaatgctgtaagtttaaaaaattttcgaatagttactaatgtcgaaacaaaatttactaactatttcagtttacctatgcgtgttaaaaaaacgttt

SEQ ID NO: 207804 - DNA, 748 bp, Cannabis indica
tgtccaaatccagtaaccacattaagcactccatcagggacaccagcctatatataatttgatttagtcatggtcatatttaatttatatatagctaagattttttttgttaattatagatacataccagcttagcaagatgagcataatagagagctgagaggggagtttgctcggcgggtttgacgaccatggtgcagcctgcggctaaggcagggctgaccttagtgaaaaacaaggaagtgggaaaaattccaaggaatgatgtgtcccacaactccaataggttccatcaatgtgtaagcttgaagtggtcgtgacatttttaaaacctgtccatggattttatcggctgcgccagcatagtaccggagaagttctgcggccccaggtatgtctgtggacttgcccacactaagcaatttcccagcatcaaggctgtccaaaatggctagttcttctatgttttgctcaattaactctgccaacttcatcataatctttcctctctcctaatatatgtgcaggtatatcatcattatacaaatacagattaaaagagaaataataaattttttatttttatatatacagtagaacctctatttaagaatactcaagaataacctctaatttgttaaaaaaaaccaagtcccgatttgggccagttataaataagaataacctctaaattgtaattagttatacattttttaagtcccgtattaacaaagtatacctctatata

SEQ ID NO: 207805 - DNA, 705 bp, Cannabis indica
  modified_base (17)..(17): a, c, t, g, unknown or other
ttttttttttttttggngtggtatgtaataatatgtgtaatttttttactgtgtggttggtttgttaaaattaatagcttttaattatgttggtatatgtgccactttgttaagactgctcatggtattgaatttatggataaggttataaaaattgtatttgtgtgtatgtgcacttggctctttgagatgtgttgggtttttgagatcccatagattctttgttaggacgatgtgttgttttctcaagacgattatcgttgtgttgatcgttatcggccatttaatatgggtagattgtgtttaggagagatttttctgagttttttatcaccaatgctctcaatgaaagtaccaaactattaacgcagattttcattatctaaataaatagtcttttttgcaataaacatactacagaattaaatgataataaataacaccatatatttaacatagttttatagttaaaatctatatatttcacgagtccttattattagagatattttctaggattcagaatacaatgtcaatatttaaaataataagattttttctctcaattttatcgttatttttcccatgaattctgcccccatttatagaagtataggttggcagttattccttttgggattgattcatttacaactgttaatgaaacgtggacattctctacgttttatttattcacacatggga

SEQ ID NO: 207806 - DNA, 542 bp, Cannabis indica
tttaatctatggctgatttttttgaattaaatgacatattatatattatctacccaaagtgataagagtgcagtaagagttgactcactattccagatattagttatgaatcaatgcacaaaatttttaattggactcattatatggtgtcgtcgtttaggataccttaatttttcttttgaaaggttaggaagaccttatttaataaggacaattaatttcatcatatcattcattggttggtacgccaaattataattaaaaaaatcctttaatagtgtatcatgacttaattaagagcatcactattggacaccaatagtgtctaatacttttaagacatgtcgttttacgatttggctaataatactctctaaaactattatattaaactatatgagactcgatactaaattagactaataacaatattgatacgtaagaggatgcttggcaccactagtactttttagcatttctccttaattaatcatgttataatatactgaattagtagtaaagtcaactagtctataatctag

SEQ ID NO: 207807 - DNA, 772 bp, Cannabis indica
attactttactaacatgtgcattctaattaaactttgagatttacacagaatatgcgtgtttttgccctcttaaacatgatttgtttcgttggcttgttcatggcgtattcgcttgatgtttcattgttttaccttttgttaaaatttacaggtaatgcctcaaagtgctccttatggaagaagacctcttctaccattatgtaataagaagattagaatcattgtaggagagccaatcgaattcgaccttccgaaaatgaggcagatggctactacatctcaatctcatagtacttcattggggtggccaaccactcctgatggtttggatgaggcaacacaaacatgtctctattcaacaatctcagatcaaatccgaacagccatggaaagcttacgagctcttggtggtaatgatgaaagggtttaactctcgaaatcattttatggaattggaatgcatacaaaggaacagaagttcatcgaatgaatggtttcgggtgcatgatgatcatgcgatcgggatgagaacaacaaatttgttcctgtacagttcttggtaatttctattctaaaattgtgaatttgtaaagttgaacttgttgtatttgtataaactattcataaatggttcttatttttcctcttatttggttggttattcatgttatttacccataaataatagttgtcgttttcctcaatagtgttgcttttcattttcttctttattatcttgtttattttcttctttaatcaaaaaaaaaaaaa

SEQ ID NO: 207808 - DNA, 1798 bp, Cannabis indica
atataaactgtatatatgtgactgtaatggccaaattgttgggttctactattaccaggtataaaatataaaaatataaaatttcataattaacatgcatggcacacctaaaatacaataaaatctcaataattgagaaattatatcattaatgcacatataaatagaaatactaattaaatcactaataagttactaatttttatgtctaaatatgtggttattaaaaaattgaaatgattttttttagagtataaaaccccaacaaatgatcacttgggtagactcactaatggaatgtgataatggttgggaatttgaaagaggggttatactatagtgtggtatcttgatgtgttgcctacatatgtgacttgtcaaaaaattaccatcttacacgggggtatttttttatttttttaacagaacttattaatcgtgtagagagatggaaaattttcaatttattataactctatattacacttctgagtattttagtggatcccctgtttgtttcgtcattcagattagttttttagttcaacttattttcatgatcgtgtacattatagctatttaagatatattgtaaaattttcgaatcaacgtagtttacaatgtcaaaaataaaatttgaatattttttatacgtgtagctttttttttatatgtgtggtaagtaattgtttgaatcttatttttcaatactgtaaactattcaattttttttagaaaatgtatagttatatttaaatagcgcgcaattatgagaaacaatatgactaaaaaactatttcacgtgtcgaaacctaatttatcccttttacgaagtgtactatataattttttattagtatgtttgctcgaatttataacactaccaaaagatgctttcatatgatatgctaaaaatacccatacatctataaaaatgtgtctcgtatatacttattagttattattatattcagtcttttaattagttgatgatgttacatttcactcaaaagttcaaaggtagaaaaagtaattggtcgtgtgctagagctgccatcccaacgagtccgatggtacattaataaaatataagcaattctccccacctgatgccctaaatcctcaattttgaactaataaaatcttagttagaggggtgcactcaaataatgaaaggtgtctactatagaaatactctataatatatattggaggtttcacacttatctacacgacatatttatttatgtatatttaactggcaagtgaaatctgacccgatcgattgatcaaatatactactcgtatgtgttagctaagcttccaatatttctcaaggtacaagattaggatgatgacaatactcaaaatattatagtacattgctcgcaactaaaattaatgtacgttttttttttttttagcaaagcatacgttcgtatagggtttttattagtttggtccgtaagtttggacctaaattataatttatacatataaattagttagtagtcgtaaagataatacctaacatttgacttttgcttaagaatcccttaatttatgaagaagaacaaaatgattgagacgaattgatttgacactaaattccaagtacgtcattaagttaaagcctaagaaaaaggaatttaagacaagtactagtcaaaataaggaactctttctgttaaatatatgactcaaatagccattttttattatattttaaactatcatctgagtggatttggggtggggcaagtccaaatcagcttcacaatataatttatatttgaat

SEQ ID NO: 207809 - DNA, 578 bp, Cannabis indica
tatatatatatattaatttactaccagaggtgctatagctaataagctaaaataatacgaaaaaagtagctagggtttctatatttgtactgtaacgtggggtttaagggtggtataaacgacacaaaatttggggcttgattattagtaccagcagtagtagtttgacacagctaggaaagcaacctcttattgaactctatacatacatatttatatttatgtttatgtatgtatatctataaatttataatatagccaataataatgataataatttgtagtactactgctagagagacaaaaaagctttgtgaaccgcgtgacagtcttttttgccctttctatatatgatataaatatctaacacatttaacttagaaaattgcctctctaaacgtacaataaatgctaaatctatgcttaaattcacacacaaacacacaactatgtatatacatatatacatatatatatatatatatatactggtggattagctcacggcaaagtgcatatatatcacctccctttcagacttaactttcaacataattgcatacaaaccaaaaaaaaaa

SEQ ID NO: 207810 - DNA, 628 bp, Cannabis indica
gatctaagatcctggtaaattaagttccaacaccactgtatctcgatcatcatctaaggcagagtatagggccatggcaaatgcaacttgtgaactcacatggctgcactccatcatcaaaaacttcaacatacaaatacagttaccatcaatcctcttctatgacaattcaacagcaatccacattgtagaaaatcccatctaccatgaaagaactaaacacgtggaaatcgactgtcacattgtcagagaaaaggtcaccaatggcagcatcaaaatgaactatgtatcttcaaaaaccaaatcggttggttagttttttctcaattgtactggttcaagctctagctatataaggcatctttcctctcttgtaaaaatacagttttcatataataaaatattgctttctttgttctaataatttatgagatatttgattgattaaataaagtgttacaatgaagcatataatatttaagattaaaattgtgatcgagagtataatgtaataattattatgagtataatatataatgtgatcgagagttacataaatgtaatattcatattagtggtgacataagttgtggagttactcataatttgtaactttcacatgatcacc

SEQ ID NO: 207811 - DNA, 735 bp, Cannabis indica
agtttggaccatttggttgtaatattacatagtaggaatgccacaaaaaaaatgttacatagtaagaaaatacaagtaaatgtacatctgatattaatgatataattaataaaattgtataacttacagtacacgagattttaacatcatactgcttatttagattgtttactagcattgaggaaattttattaataatacatataatactaattttgtggttagtatgctattattctctgaattagataataatgtagactttgtattttgcaaataattttaatcaatattttagacttaattttaatcaaataattttttaatataacttaatattaaatttgacttacatagtaattcttgccaaattgagttctgagtattaatttattaaaaagtaatttggcatctttgagcttatggtattaatttgatataatttgcaaagtacgatgttgttgaggcgttgggtatctactctggggttctactagtttgttgtcttggctatcaaagggtgattttggagtctaattgtcttacggttattaatatcattcatcatagtaaggttgaccagtcttatttaggttgtattattagagctattcttgcttattgtaaatattttagtgatatttcttttatgtactgtcttaggattgctaatagtgtagctcacactttgacaaagttagctttgtctctaactgatcattatgtttggtggtt

SEQ ID NO: 207812 - DNA, 1142 bp, Cannabis indica
aaaaaaaaaaaaaaaaaggctagaaaggtatgtagcattaaataaataattatattttgtattttattggaggaacaagagagatcgagtaatgcgactactcgaccttgaatatggattgatttcctctttctactttttttggtaatgcctatggcttgtggggttggactttgtctccaataataatccctaactaggaagtggttaatatttgtactacttttctttcttataatatgacccttcaaacttacaaaaaatcattttgggaaattttaaaatattatttttatattttatttataatattacagtttaaaatttttatttataaaaatacgcttgtaaagtttaaaattataaaaataatttttttaagcaaataattaataagtaataaaaaatcaatcttacgacaattataaattaagatggtagttatttttctgctcaccgatcttgaacctaatcagagtggacatggttactatctgtataggtgcagatcgaataggataccatgttgagaattatggagttttatctttaaacaaattggtgataagtggagtagctcatgttcttatatatgtctcaatactctactatttatttcatgtgaaataatgtccacaatataaaataatcgaaaataattaaaaaaaaataaactcataaaaattataatacaactataaaatacctaaaaagacggtttattatttttattggaaatgtatttatttgtaaataaataaattaaaacgtaaaaataaaaatcgtgttaatgtatttttgtaattttttttaaaattttaacctatattttgtaaacttttcatattaatctccacttttatttttcattattcttatggtacatatgtatatggaggttttttctttttatttttttggataatccgtctttgacttccccaagaaacctgtttcatttacatacgaaattttgccttgcctatgtttcttgtgttgagattataaaagatagaaaagtatattattatttggtatatttatttgtatggttaaaaacaacaacaataataattaattaataaaccgacaattatatatcttgaaggaataatggatttttgtggtaagcatgatccatg

SEQ ID NO: 207813 - DNA, 933 bp, Cannabis indica
tgatactttaatatttatggaattatttctctcgtacttttacatgtgtcaaatcatgctccatgaactttcatccatgttagactttccttactaaaattagacaaaagtccttaaaatcaacaatcttaatagtttaggaaaaatttctaacgaccagaaaaatttaagagcatgatttagtgcatgtgaaaattcgagagacaaaaatcttaattagtctattttaatataggtaaatagtggcataactatttaaagttttgggtttataaacggcataaaccaaactatctaatgatttttttagtgacataagtatccaatgtttataaaactgtaatttttctccaattttatcaatagagactctattattgtcttaaacaaggtacatataagattcagaatcaagattatttagtttggacagaaatatatagtatcagttactttcaaatctttttttaataaatttaaaacgaaaatgaagaaattacaattttacaaattggatattgatgccattaaaaaaattatttggatacttatgttgttatttaccattttaatatttatatatactatgagagtttatagctgttttgacatttatgagagttttttttttagtgtaattcgttttaaaaaaaaaatatatttatagtattaaaaatacaattaactatttgtgacgattgtaaaaaaaaaagaatcttaattatacttgaaaactatcaattatgtaaactattctaaaaaaaataaaatttataagtactaataaataagtattactatcacgaaaaagaagtaaagacatttcattaatttagaaagttgaaattagattacaagaatgaagactaaggattatatatacagaaggttcactcaattagaacttaggtagaccagtagttagttataact

SEQ ID NO: 207814 - DNA, 1782 bp, Cannabis indica
gtcttagctcaaggctggcctgtggccaacactcaaaagttaccacatgttgtatgtgatgatgttctaatatggaagggttcgccgaaagaaagtttagtactaaagcaacgagctagggccctttccaggactcgcatgaatggggattctaatttgtggaaacaaatctggaatgctcttgtgcttgagagatagtgtttgttttcgtggaaaatagttttgattttgaaatgtttcccaatgggtgaaaaacttgtggtgttctttaggatcaatttcttgtgttgcttttgcaatgaggagattgatttcattgtcaaatcttttttgggaatgtgctatatacctaaaaatacataaatacttcaacacaaaattttttggatttttactcttcaaaatttttttatttagaaaaatacctattcagtaaaaaaataataaactgtttttttttttgtaatatagttcatttataattgtattatagttgtcatgacattatttttttatagttgttttacaatttatttatagttgatttatagaaagagaaaagattgagaggtagagagagaaaggtatagagaaaagaaagagattaggtttggattttgtacgtatgaagaatcttctgtagatgaaaaagattcttggagtgtgggagttgaaacactttaagagaactcattagagaatcgatcttgactgtattgtacatgttcttgctcaatcaataaagagaatttggtggtgtttcagaactgaaatagagccataaatcacatcgatttatcggacttgaaccagtatatatctatgtgttgattttattatttcttgctttgttttcacttcaggtttttacactctgttcatccatgttcttctctgattattgtacctgattggtaaatcttgtcattgctaattgtttgattgtttaaagtctagttgatttgattttgcacttttagttgtaatttctacaatcatatattatttatcgagtagaatcaacaaaaataggctaactaagccattgtaataaagtaggacaaaacccctaacaatatcttcaactaaatagctcataaggtgccaattgtgaagcaccaaaacaatatgaagaatactaaatttttatcgcgaatgaacatgtgacaggtcacacctaacaatgataaagagacaaagatcttccaataaaaatttaaaaaagacaccctaattattcaaactagaataaaagagaataacaaactacactatgccaagaacaaatctattaaaagattgattcataaagaaagaggttaataccaatgcatggtcccccaaataaattactgagcatagaaaccttacactgaataaaaactattactcccattagaccaatgggatagtgacaaaccaccattattagcaatataaaacaataaaataaacacctacaacaaataaaaataggaaaatagaaaagcaaaagaagatcaaagaaaaaaccaaataccccacaaagagatttaaaccacaacaaccatcaagaccacagactcaagggaaataccacgacgcactagaaatccaccaaaaacagagtcgatgaaggtcaaagctcccaaccaatatccgcatcgtgaggactgaggaaaccaatgaccagacaaaactgacgacaaccagcctagttctgcactgtgaggaccaacaaaagtgacaaccaaacaacggaggacaagcccctatcgattgatctcattatcctagtacaaa

SEQ ID NO: 207815 - DNA, 559 bp, Cannabis indica
tcatttctaaaatattttagtttcgtggagatattattaatttcttttattactcttgtgtgttcttgctcctaattaatattggtgaattcatctaccaatttttgtatgaatattaattatttaataaaacatgaatgcattccttgatgtcttttattttttatacaatatatttcacatgatatatataactataaacttgcaattgatatatataaatttattatggtgttgtcatcatacatattgattatttctttaatttggaaaatcatttagtagcaaaaaataaaagtcactggttttctgatatttgacttctctctttcttcatttcgtggaataataagtaactaaattttgttttctgatatatacaaatatatttaaatatatatatgttaggtggatgttcaaatgataacaaattgtaaagatagagtccagtactatcaatagaaagaaatcttgacagttataagttttcattttctatgcatgacaagtaattattttactaaataattcattaatgattaattttatctgattattt

SEQ ID NO: 207816 - DNA, 756 bp, Cannabis indica
gtggatatttggttagatactttgatttgatcatttttaacaatggtaattaattgaataagattaagattattgtataatttttttttcatcaacaaaattattatacaaaatgttagattgattgatttattgtggtggccaaaggtaggttgcttcaatttatagtgtaatagagaaaattaacagtgatatgtaccagaaaactgcagacacatattttgtcaatatttatatgttatatattatgtttgtaggtcccaatcccattcaccacgtgtgatacccatacccagccctctctacaccaatatatattactaaattgtatataatttatgcaattttattatgcatatggtgatcataattaattttatataacctacattaaaataatacataatatttacttaaagatgcctcatcatgtttgtcaaattcatgcaatttattttatggaattactgtacatacaaacgttttttattttacataaaaagaggtgtaaaaaatggaatcccattaatttattatactatgcctttttgtgattgtcaatcattttaagaggttgtatgatatgttgtaatattttattctttcacattttcatattttgttaaaaataatggatgtgcaaacattatttgcctactatgagctgttatgagatcattctagaatttccacaattcttggaatttttttattttagccaatcaggttgcaagtgttagagcatctccaaagaga

SEQ ID NO: 207817 - DNA, 896 bp, Cannabis indica
tatatatatatatatatatatagactctacggttactttagaaaaaaataaactaatgcacacatatctttcataaacaactatatattatttgtctcttagtcttcttctttctcttttttttttttttctcttatgttcttatttttttttcaaaccatgataggttgataagttagagtttttggatttaacatactagatagtagttttaagattttaagttgatagtattttttagtttttaagttgatatgttgataagttagaatttttatcaatctttccactaaagatctatctaatattgatagatttaatcataattaatgtctccagattaatgctataaatgaaagatggattcactaattttgtgttggcatataatttagatgagcttaattgaattttagttttataatatgtttttgttatctatactactacatctataaatggatcatttatcttttatttttttttgttcatcaaccattaattgaataactcaattattcatcgcgttaagaaagtatgatgttgtaatgaatctacaaagtcttttaggaaattgctctaacgtatttttcacaagaaaagtatacatttagatgtaatatgatgaaacattgaagcttaaactagcgttttatagttattttagaattttagttattatttttaagtaattacaaatatataaattaatcgatcaatatttttttaattttaaatttacttattatatatttttaattttcaatattattagtttttaatctttttccgtacatttaagttttattattaaaagaaattgatatctattttgtctgatttatgatttggtgatgtatttttttttttttttttattttttttttttgtttttt

SEQ ID NO: 207818 - DNA, 1096 bp, Cannabis indica
catgtattttagtttaatatttagactcaaatttatccaatttttcatttaatatcgaaaaaaattcattcccataatctagaatgttattttattaaaagaaaaatagaacataagtaataagaattaactctattataaaggtataatatattaaaatttgagagaggaaacaaattataaatatagcattgttattgactacatgtggtattcagtattttctagaaatcacattttacgagtagttgatgatattttataaaaatcaccctatacctaattgtaccaacactgatacatgatgaaaatactagacacaataatatctttttaacatttctcttaaaaatatatatggacaacaaacctaagatcaataatatgctaaaattgtggctgaagttaagaatttttaattaaaatacatatttattttttaatattaattgtatttatttttagagcattgctattagtcattagtagtgtcgggcacaaatgtatcaccttatgattggctagcgatactgcctaaaagttattatattaaattatgtgggatccgatactgatgagtgtacatttgtacactcattcttagtcaattattagatggattagtatttatttttctatagatcagatgtgttttctctaagtgtataggtttgtgctgaaaagaaattttgtgatgaactgagatctttgagtacatttttgacaatgatttcattattttctcgaagagcttatgaaacccaaaatgatagagctcgttctcagctttccaaacatgttaaatcatcacatttggagtcgggacacaaaagttatacatgatttactgagcaaggtcgaatcagaaaaatttggtgctctgcgctatagcacagatacttagttggatcaataacaatattaacacataagaagatactaagcactactgatgcatgccctttaataattctcttacttttaatattcagaatttattttgataaaagaaaaagtttactcaataaatatagtattcaaaagtatcaaatactattaaattaaaaacaaagtataatatattttacacttacaa

SEQ ID NO: 207819 - DNA, 676 bp, Cannabis indica
cctctgttagactctcagcatcactaagaacacctttagcccagtcatttgatatattctaagtacaacatataacaaagaaaataagtttaggctataacaatttactttaacatacagagatgtctaatatggaattctcttttaatcttatatataacttgcattatatacctgtagctttcccatggtagaagaaacattaacaattcgcggtgaatcagataactggagaaggggaataagctcttcagcagtttttttagcaccataatagtttatttgcatgcattctttggctgactcataagtttgagtagttttcttaatatcaccttcttttggggtctgcattaaaagaaatacgcaagtatatattttatgatctaaaatatattttataataattacaaaataatactaaaagcctttataatattataatatgattataactcttcaaaacatattattaaccaaaacaacaatagataaataaagatagtgtgtagttcatcaaaaggatcataacaaacagtaaatcacctatttaaaaaattcaatatcttaccttagcatttaaagaagctacaattgcatgcatgtcttcttctgttccaccaacaccagcattgttcacctgcatagctcttaacatttcatcatttgttgtatt

SEQ ID NO: 207820 - DNA, 766 bp, Cannabis indica
ttgaccaccaaatccttacagaaattataaccctaaaaaacacactctactctcgtcatccaaaccccaattcattcattcatcatctaaatcgatcaacaacaccaacacccagtaacttttgtcgcccttatttccagaaaattattcaattctgactcagatcaacaaggtcaccaaatgttctatctcataacctaaaatcagaaggaaaaacaaaacaaaaccaaaccctcaatttcaaattctcaaagaacaattttttccttaatcaattttattaaaaagaaaaaggaaaaaaattcatcaaaaaaaactaaaattttactgaattagcattcttttgtcgggaaaaaatcattagtttatggattaaatgataattgattcataaaattcctaatttgaagttcaaacagaataaaacaataatatgattcttacctcgtagaaagagctgattagcaaatgttgaaatagaaaaacttgccaaaatatcctcgatttaatcgcattccaagctcgtggatcataaaaacgtaaagccctaaatttattggcaactgaagaaattatattccttactctttgtttgacctgagaactgagaaaagggaaaaaggagcgaggaaaaactattcgggataaaagacgacgactgctaaaatgcgccggtctgaaataatgggctaagcccaaattaataattaggcccataattcagaaaagctacattatactctttttttttaaaaaaaataaaaaa

SEQ ID NO: 207821 - DNA, 587 bp, Cannabis indica
tgattagtgaagttgagaatggaaattccatggttattgtcaagagatattccattttttatcagaaaaattatcaaaaaaaataatagtgaccaaaataacagttacttaagtaatttagttattcataaggggaaaaggcaacacatcaatttaagtgggatgttgtttccaacaacactaataagaattagaattgcaaatgaatctgacaaccaatctcgcaacaataatcataatcggaaccaaagagtgctggcaagctagaatgggagactgtagtgaaagatgaaatcagttctcaggaaaaacaaagcatggatcttagtaagaaaatctattaaaaagaaggtagcaggttgtaaatagatccaaaaattcaaagaaggcataaaaggttttacttaaaggaagatagtaaattacactgcaatattctctcctatggtaaaccacacctcaagtcaaactctaatagcactaaaaactatggaagagctggacctaaaccaattgaatgttaaaacaatctttttatatggccatttaagaggagctcatatggccttggcttccatatgaccctc

SEQ ID NO: 207822 - DNA, 847 bp, Cannabis indica
gtcgtgcccaatgagttttatttaaaaaaataaaaattttgtaatttaagattaatttatatttatatttaaaatatatatcaaaaactaataaaaattaatttataaaaatattttctactatatgaattagaaatcctaactacaataaaagcattcaaataactaaatacaacaatcaaaataaatgttcaaataaaaaatacttatagtgtcacattcatacaacaattaaaataattgttcaaataaacaatacttatattattacgaataacaatactataatcttaattatgtggactcctcctcctcatcatatttgtagatagtaagggtgttgcgagacttttggcatttgcaggttgtgttgtatgtgtggcatctggtgcatgcatctaagacgctggtggcatttgttgcattgatggcatcgaaggcatctgctgcttatatatgcggtgtctgctgcatagaagacatcatcacaacgatttttcgttatccaacttttatcaatcgccatctaagaaaaattttaaataaataagattactaaatttgtttagctcatattcattttaattttaaaaaacttaagctcacttattatgaggaattatcttttattattataaattcattatttacatacgtaattattttaattattaagcttattcattatttttaattattatgaattatttttttcactttaaaattattttttttttaattattattatttcaaaatttatagtaattttaaatttgattaattatatatcatatatttttccattttaaataaattataatgactattatgataattatttaatta

SEQ ID NO: 207823 - DNA, 1043 bp, Cannabis indica
attattagtttgaaaaactgacctcattaaaatttgttgagtgaattcccatcttagaattatatttgaccattaataatggttagtttgcgcttattaatttattatttttaaattaataccatacatataattataatttcaaaaattgttttatgataattaattgtacattctaaattatttgcttacgatttatctattaaaataattttattttcaagaaattaattgaaaaaattaaagaaaattaagaaaaaagtcttccaaaagaaaaaaaaaaagactttaaaattttagacagtaagatataatacattatagttcataaaaaaaaaaaactttagtttgtcatctaaattattttttcaattcttcacattcaaaattatttatatatatataaattcataaattgtatacaatatatataattaagtgataaggaataacctttattatactagaatggtcatttttgtgtgcatatgcgaaatcggcatactctccagaacaatcgaaagggacagttccgttctacaacctcttctatcttctctttaagctttccgtattcctcctgcacaagaaatcaactaatttaactaactgtcgtttaatcatttcaataacaataaaacgacagaaaaatgtaggtaccttcatatttttccattcccgttgaaactgggcgaagttataattacccttaacaccacgatgttgagcagttggcaaaacggcgtcgtcattagagaaatatctaaaaggtgcccggacttgaataccgtattttttacagaaaggaatccagatgcgggcgtactggaaagcgtggatgagagagtagaggatgataggggagcaaccatcatctgacacgtagcaagccagcttgtgaggtggatactccaccgccatgagtgacagcacagtgtttattgtcattatgggtggttccaaacccacgtccgccgtcgtcacgaacatatccaccgctggtacctcatctctcttcaccctggtagttttatgtatatata

SEQ ID NO: 207824 - DNA, 694 bp, Cannabis indica
aacaatgatgttgttttaatttttttttcttttcattttttcttttttttctatgaaaaaatatataaaaataataatttttcaaaaaaaaagagaaagaaagaaaagtcagtccaactctaactcggtcaaaatccacctagacttggttcaacccaaacttggcccacctgcacagaaactcgaaaacccaatcacataaacaagtgggttattaattctatgcacccgaactcaaaaatttaaaatttggtaaaactcactcgatgtgcactcctagttatgctcaagtttatatttttttgtgtgtggtcatgctcgtactgatttcgtgtcgtgccaaaaaaattcgaatttatatttaaaatactagtgttgagtggggaccacctactttttataatacccccgaattattatgtaaaagtttaactaaattatttttaatatttttatttattaagatgatactaaaatgataaatagtgatataagtatttaaagttttgagttagtatcctaaatttaataaaactataattttcgttaatattaacgaatttattaagataaaatttgaaagtaattgttagtgtcaaaatttgtaactaaataattaaataaagcccaaataaaatttagaaaaccttaactctatcttcttcacctcccacatttcttctacacagagcaa

SEQ ID NO: 207825 - DNA, 534 bp, Cannabis indica
gttttgattttcactctttaattggctctacctttgatcttctacaaacagtaaaaataatataagtattagttaaaatcgacaccaaaaagtacaatttgtaataatttttagtataaaaaaatctgtaaaattgtaaaaatatatataaaaaacgatattttagatatataaaaaatgacatttttaaatggaaatttcattccattaaaacttacatttgtataagaacaactttcaaaagaaaaaactgatcaatgatagatatggatatatagataaataattgcatgtgttcaacagcttgaaatatgaaatcatcgtcttttttttttttactctcttacaatatataaacaattaaaacgtaaaaaaccaaaacattgaatttataatcaatcttttggttttttgcattaagtgacattcactatatatagcctcccttaattaatcatatgatagtatatatatacagtcgactgtacaattatagggcatgcacagtcttgcccaattgttatatccttccat

SEQ ID NO: 207826 - DNA, 502 bp, Cannabis indica
tctacaacaacggaacaaatgcctttaccaagatcaagaattcgcaattttgctttctcaatgaagtctgccacggtgatcggttgtgatgataagaaaagattagggttagggttagggtttagatgttgttgttgttgttcgagaccgaatagtaaccctagaaggcttatattgttttcaatctttccttgtttggattcaatgttccaacgcttcacatacaatgcaataagttctttgcctttgaattttcttgaggagaatatgtcaaattcttcttccatttcatgtaacaacgatttgatgctcttttccattttctttttttctttttcctttttgatttcattttccttctcgtccatttccatcaatatttcatcattattagtttccttctcgtcaagctccattgattcaaacttggtgtttatttgtgttatctcttcgtgtctggccatcatgaacaagaacctagctattcttgtttcttggatga

SEQ ID NO: 207827 - DNA, 902 bp, Cannabis indica
acgtgcattgcacataacatcaatctagtaaacttatataaataatttgatacaaggatttagaggtgttgtttcattaaaatagaaagaaagagcaagtataccaaaaagaatagagcggagctcaagagagtccaaaaaaaaaaagcttagaagatggagagaatgagtgaaacacacgaagagataaggagataatgtcatgtgaaccaaatagaagagggactgaagagtgagtcgcatcgattcccgtctataaataaaaggcctcaacatacaaatgggaggtaaattcatgatcacactaaccctgtcgaaaactctatcaaattgcttctccgagagaaaacatctcgcaattctgagtgccaattgaggagagaataaccaccaatttaagaggaatagagcaatgaagtagagataatttttaataaggataatctagtgtaaataatctgagtccaattacaacaaatagcatcaacaattacattcaaataatttaaattgatttgttttttttctttttttgagagagtaaattgatttgttttatatagcaatatgtatggtaattataactattattattattattattattattattattattattattattattatattggtaaatggatcagttgtattgcactaaaaaaggattacaattaaaatataagacccctatctacaattaaaaatgactaattatctattaaaaaaccgactaattacaactcaaaaatttctaaaatcaatatttatcatttacaccaatccctttcaacctttatattaaattctattattaacatcaaatatctataactatataaaaatgagaatgtaggtttggacttcctacattaaattataaaatatccttattgttt

SEQ ID NO: 207828 - DNA, 938 bp, Cannabis indica
tgatcatcagcagctctcaagtgaagagtggacagaatcgcatgacgaaccccatcatccctgttggagctgaaaaatatagaagacttactcaaattaaccttttaacctgaatccttttcaaacttattaagcaactccagaacacgttgcgcctcctccctgatagcagtatagtataggaagttatcatcagcaaacagcatatgagtgacaaaaggagccttacgagccactcgacacccatgaatccatttcttctcttcgtaaagacaaattagagccaagaaaccttccgcacagatcataaagagatatggcgaaattggatccccctggcggatccctctagaaggaataataggcccaagaacatctcctccatgaataatgttataagaaatagtccacagacattccattatcatcattacccagtcaatagagaaactcgttcgaagcagaatcgattgtaagaaagaccactccatcctatcataccacttgctcatatccaatttgagagccatgcatccattttatccttgttgtttacgtcttaatttatgaagaatttcaaaagaaacaagtacattgttagtgataagctgtctcggaataaacgcactttgaaactcagaaattaccttggacaataaacctttaacattactacaaaatgggggttcagtgacccactttgagagactctaaagaattttagtgagacttcattgcgcgtcactaatgtggctatcaggaaatgtaattttcagtgacacttagtacaggtcactaaaacattttagactctccctcgccccgcgttaccgtagacttttaaaagctcactttgtcatactttaaagacaatagcacactcaaagagcgtcactatatctatactttttctctttttattaattttcctgataaca

SEQ ID NO: 207829 - DNA, 1442 bp, Cannabis indica
aggtagtttattgataagagcaaaaacaaatacaaaattcctagttatgtgagaaacttggtaaactccccgagtaataatttactctaaatacttcacacaaaattcacactctcacaagactaactctcactatttatagtatggactaacaaataattaactaggcaaccaaattagaagacacaaacttagaaacattgagcacaaccaatagcatattgtcggcctgtagcagtattgctttgttcccaaaattaaataacttgacaggaagtcgagtcaggcaaggaacggaagaaaagggccttctcaagaagaaaaatccaattcaggtcatcaaggatattttttgaaggagtaatcaaagctgtgagacccaaatagagagataattttagagcttcaataatttgcttttgggaaaattttgaggcaacaaaagggaggaaaagggcctttgttttgaacgtagatgatgaacacgacttagaggaagaagcagaaagcaaaatgcagataataatctactccagaaaaaggaaatcttttaccacaagcttctctgaagaactttcgaacctcacgggggtgaaacaatgaatatattggaagaggatgaagatcctaaagagggagagattgctgattttagctcggaaagcaatttatcagaagaggaagatgataactttgttgaagaagatacttgagatggaggagattttggatcatattaaaaatctgtgtagatgaggattcatcgctgaaacaaattgaaccattgagtaaggccactagagtctccagtaatgaagaggtggttgagattgtgcccctgactaaggctgaatcgaatctgtggagacgctagtagaaatgggtatggaattatgcttgaatgaagaggaagatactcaagaaaaaagcaaaagttgaaggtggtcgaaggaataacagagaacttaaaaatttgactttcaacattaattatgatagcagaaagacaaaagagggatgtagtataataccccaatgaagatccttacttggaatataagaggcagcgggaataaaagaaaagaagagccataaaagcgacgatttgcaaggcgaatccggatatggttattttacaagaagtgaagaaggaggtgactgataggaacttcatttgaagcatttggagatctcgttttaaaggatggatattgatcccttccatggggagattagggggtacgctactcatctgggatactagaagtatcattgtgttagactccttggtaggtgactttttttatctcagtcttggttcaagaggaagggatcaacgcttgggtggttttcagggctctacgacccgtattcatacaaattatgatcagacttctgggaggaattggctggtttgagtataatatgtggagattcatggt

SEQ ID NO: 207830 - DNA, 650 bp, Cannabis indica
aaattcatccgaagccctactccatgattgttatagatttctctgtaatcgtcatcaccgtcatcatcatcaccaacaacactagtaataacaactgccataagagaaaccagcacaagaatggtatgaatattattccttctcatcttcatcgaattaattaattattagtagttcttttgttggttttgaattttgatgatgaaatgaaagctagcatgggatggctttatatatatagagtgaaatggggaatgagtttccttatttattcaaatatattggataattttttatttaaataataaatatgcaatgtttacgtatggaaggaagccagccattgtttcctaatgcagcaacttaattagattatgatcatcaatattcaatgtctcctctccttattatatgattatatatgcatgtatgtatattatataactataatgtgaattcatattgaaggaactttttatcaatgtacatatatataatatttaaagtcaatgtgctttttaaatgacttcagcaaattaatgatcaatatataaatagtaatatttatacataaaaatgtatttgagattaacttttgaacattgtttttataggttacgcttttataattagttaacaatattttttaa

SEQ ID NO: 207831 - DNA, 573 bp, Cannabis indica
tattattattattattttattgtttatttatttttttgaatttgaatttgaataagtagtttacttagttttgaaatcatataattgcgactaaagttttgaagaaaagataacagatgaaaaccgaaataatgatttcaatgatttggggtagcaataaggaattaaaatatacaattaaatatttcatgcatgcatgtggttataattagttaagtcaataaatcttgctaaaaaaagtttatatattgagagagagactttctttaagttaaagtatagaagagctaatgattagagctatcttagtggagtcatcatgatctctcatcaaaagtcctcctagccctaacaataaaataataaaagatttatttcttatcgaatataaacagaaatataatcatgaactgcatgtgactatattttgtaatgtaaaaatctaatgagttttcagtttagatcccaataagagagtttttttttggtatattttgaccaacacatgcaaagtcaacaaatccccacatcccacaacaaataattatttagaaattagaataagacaaaagt

SEQ ID NO: 207832 - DNA, 679 bp, Cannabis indica
aaaacataatattgttgtgaggatgttgcactgtgttcccccaccacctggttcctctctggctattaataatattttagtacatgcgtgtatcatatatctcttatatattaacatttcaaaatgagcaattatgatactgaaatcatatgatcacagtttaataaatccaatggccaatacagccagatcatgagacaagagaggtgaattatatgcatgtatatacaaacattatatgtatattgacatgatgcagtaggcagtagcagactccataattaaacaaatatttgtgtgttcgttttctttccatctttctttccttctgattaattggcacattattttatattcgggaacataatttttttttaaagagagtttgatctggcaattggagtggaataatagaaaagaccatatatttttcttttagattagaataataattagaccataaaggtagtccgatgaattaaaaattaaactaattttttgcttaattaattgaatcatataaaacttggtatattttcattgtatttaatagaatgagacaacaagatcacataatagactttcaaattaattttgttaggaaaccatcattacaatacagtaccagtctgtacatattatcctactccactagcattataatagtagtatttattaa

SEQ ID NO: 207833 - DNA, 1079 bp, Cannabis indica
taggataattaattacttaaaaagatcttaatgttacttggaagaaaatacaatacttaaataaattaatatttaagtgtttctcattatcaaataattttccaagcttaatcttacgatacccaagaaaataagcattaattgttgaaataaatcacaaaatttatgccacaatactaaaattatcaaccaaatatgaataaaattcatgtaattagtattgtacatactaaaaaataatatagaattaaaaaaaaaacatgaaaatggtggaaaaatggcccgaaaacacccctgcacgcgcccccatgcacccattttcttcctctcttttttattacaggtccatacgacatgtcgtttgatgaaatgacatgtcgtttgaataaaacgacgagcgcaaggggatggcaaacgaccgtcattcgcgaggcacccgaggacaagaaacgacttgtcgttcacgaaggggctgaatccgaggacaccaaacgatgtgtcgtacgcgggaggacttcgaggtcactgaacgacgtgttgtttgcgaggctgggaccgagcacacacactaaacgacctatcatttttggaggctaaattcatgagctaaacgacatgtcatttttcccgacagaggcaaaaatgacacgttgttttctctgaccctgtcgcccaaaaatcgtgcctacgggttcaaaatttgaatcatcgcgacccggtttttgacccggccatatgtcccacattccgccaccaaattcgacgtcctttaacgcgttttgtcccatttttcaatacccatttactcaacaaacacagaataatacatccaaaaatgatgaatccaaaatgggtttctccattgttaaagctcatatatatctcaatagaaaatgtaaaagattatttccaagacatatatgaacacaattagaaggataatactcatattcacacaatcttaaacacattaatctaaaaaatcaccgcaaattttagatttgagaaacggggtttgtgaaaaaatttgagtcctaaaatcaataactttggccctgataccaattgttgaaaaacga

SEQ ID NO: 207834 - DNA, 619 bp, Cannabis indica
aaatatattgcattggaaattatatattttctattaggttgtgattttaactaagactctcagcttatgctattgtaaaattatgtaatcaattggttttgtacttgtttatgactctgtaggtatgtaggggtgaaaattggtcagttatggtcggtttttataatcgaccggtcagttatggtttttattttacgaaaatagtaaccaactgtttagaaattataaccgtataaaaccgatagtacggtttttggcaattttcagtagtttttcaattgggcaattttagacagttttttggcagttttttcgtttaaccattttttattttaaaaaccaaaactgaccaccatgtcaaaaaaattgtaaccaaaattgactgccaaattcggtgatgatgtggaaccgaaaattcaattacggtttggtcaatttgatggttgatttcaatttttcagtttttatgaacacccatatacgtatgtatggcttctggcctattcttctttggatcaagttataggctattgtcttagactagcctcacttcaagtctattcttctaagtgatttgtttttgttttggaaaaaaattaattcatagaagtataattgt

SEQ ID NO: 207835 - DNA, 660 bp, Cannabis indica
gttgcttcggaatgatgattgggaggcattactaaaaatgaaattttcttgattatttttaaacagttggttaatgtattggcgtcgatctttgaaactgtggcatattcgatcattgcaaaatgggtaaaataggtgacatgcaaaacaatcagccaagaaattttccgatggttttaaaccatcagctatagtggaaactattgctgacagttttataccgtcggaaacaccaaaagaaaaaaaatgcaataatacaaatccaatgtgtaaatcactaaccaacacaaatccacaaccctgaaaacccacccttgcgagcctccaccgctacccatccactcctaaatcacctactgccgataataatcactaaccgctagcaaaaccacaacctcgaacccacctacggtcgaaccacccgcaaacccacctcatctgtaaaagaaaaattgaaatatgaatttcattacgaagaaagagccaaataaagaaaataagatgaaaagcgaggtggtcacgatggggattcaaggcaaacaggtaggtggacgccgccggcggtgggtgggtttatgtcgactgacgcattagtggtggcggggagggagtttgagggacttgggggaggtattcatgatggtgaaggagtggtttggg

SEQ ID NO: 207836 - DNA, 617 bp, Cannabis indica
ataaactagcaatgaggttgacttgtctatatgacctaaaagttttctaccaatattgttcttgagctaccacatgatcacaaatccactatgaaattaattatttcatatgttattacaacaatataacataaacttcactaattaagttttagtcttcttttttttttgtttgaaggaacatcactaattaagttgaaacttcaattcttatctaaaaatgctaaccctaggccggcccttgaaatttgtgggctttaggacaaaaaattattaatgggttctcatgaaaaaaataatatatgatatttttgaaaaatagtgaaaattatttatattttttaaaaagaaaaaataattttaaggttggactaggtgggtctagcccaccttaacccaagttcggctcttagcctctctctcaattttttggaagtctttcatttttattatttatagataggtagccttcatataaattacataatctttttcaagttttattttatgatggtgttcattgtagtaataacaaatcctctgcaaattttagagaaattccaaatagtttacactcctcaaattagagttcaaaatagtcattttcaaaaaaaaaa

SEQ ID NO: 207837 - DNA, 1042 bp, Cannabis indica
tttctattttaaaatggaataatatcattcgaccaaattgatagaatgaccattcggatactttaatatgtaaccaacaaataaatgaaatgaaaattgttttctttccttttcattacctccaacgagttagactttttgacacgacataaaattggcacgagagtccgaaaggcacgagcacaggcttggacacgacaggacacaaagctacaaattggcacgacataacacgaaaaatatgatacgacacgagaagcacaaaaggcacaacacgtaagtatgaatagattagtctaaaaaaacatgacacgcgacaaacacgaaaaacacgacacgacatattaaaaaatcttataatttattattaataataataataataattaaaattatcaattataaataagttaacataataataaaatttaaatataatattgaatattataattatataattaacgctattaaaatatgaaaaataaaattatatattaattcatttatagggtgtaatatataaatctaaatatatattatatataagtaaatatcaaattctaataatactaatagtattttttatataattatctataaaatattattaaaatgttatataagtataactaaaattataaaataaacatatatattttagtaattgtaagaaaatatgaaaaagtaaaatatgaatttaagctcggatatgaaaacagattgacttatttaaaaaatacaggtcagcacgaatctgagcatggtacgaaaatactgggcttgcaggctgtgtcgggcctacgtactctttaaaaatattgacacgacacaacatgacttgtattttttgtgacacgacacgacaaaactcattttttaaaaaaatacggataaatataatacgggccaacacaacatgcacaaacttatacaaaaacttccgattaaacgccgatgttttttgactgaattcagtcggaagaagataatttttgtttatcgggccacgtgttggtaaagtgataaaaatgctctaaat

SEQ ID NO: 207838 - DNA, 1246 bp, Cannabis indica
ttttagactctaactccaatctggatcttgagacccggacccaaacccgaatctcgacccaaaccctagctctggacccagaccccgtcacagacatggacctggactcgaacctaaacctagccccgacctcgggcccaaaccctggacccagacttggaactccggtcctggatcttgactcggactcggacccgacttaaataaaataaacaaattaaaataaaatttatataaaacaaatatttttcgtttattttaaaattaaaaaacaaaagtagttacagaacacattttagtttttcaaaaataaatttttaaaaacaaaaattttaatttcatgtttgtgattaaaaaaatttaaaaataaaagtgttgccatacatgctctacataatttaataatttaaaaaaaaaaacaatttaaaataactgacccaattcgcactattgcaagttagatttaattggatttcaactctcgtgtggatttgattcgatccaaaaaaatatataaaatcaagagttcttgcacttagtgcgaatcatatacactataaataaaataatacaaattagattggatgaaacatctcttatgagtgtaacaaaataatttaaaaatgcttgataaaagaaaattattttatattttataatgtaatacattaatgcaatggttattaatcgggtaatattatatattttacatttatataaaaattaagtgatcaaattatattatttgtgtcttcaaaattgaccataggtacagtctagttgactcgtgtcgacctaattataatccaccctacttgcgttagagcaaacaaattattaatcaagtttgagatattttcattatgatcattattatagctgggatgaatatgttaaaagacatattgatcatgtagcattgactggtttggtctctcacagcttgttgctttcaaattccaattaataatatccacttaaagctttcgtcattccacctcttctcatcaagtaaaaataaaggccaacttggccttttctttatctttcatttcctcaacaaaaataaaggccaatttaacgtattttggtttgtaagttaattagaaattaattatggtctaacaatcttggcctttgggaggtatagaaagatagaatatatgttaattactatacaaaaaagccaatagtactaaatactaactaaagagagggaccactctcattttaattaataaggaga

SEQ ID NO: 207839 - DNA, 1136 bp, Cannabis indica
catgtctttcaaacttttgaaaaggaacacaagatatgattttgtagagcagttacctgatgttctttctctattttgtgcctatatttgtaaaacatgcacctcgagttttgtgatcatgtgatgatttctgttcagtatatacattaagtgcatattcatattcatttaattttaaatgtgttaaaacttaaaagaatacatagaaaaagatgtcaaaatcaaaacatatataaacaaataaaatcctctatgcttatataccttactaacatttttttttaaagaagagtaatggctatttttcacgaacagaattcattgcaaatttgcaccaacatggtaaaaaatttaaaatgaaatggcatccaactaaatacaattttatttaagcaaatagcataacgattaacgagctaaattacgtgcaactttattagcttctatctattgtgagacatctttgctctaggaataaataaaaaataagaaatttcaaatcataaaagctattaatatttgatgctatgttgttaataggttggggaaaccggagaaaatttgtttctatagattggacagtactgcctaacttgtttaaaggattgctttattggcttggtttgaatttttatttttatttttcgaaaattcaaaactgacctaaattaattaactgcttaaaccaaatcaatttatttgggaactaattaatttaatttaaacttatcgtttgtattacttaattattcttatttattttaaataatttttttcttacttttcaaagtttagaagacatgaaaaacaatgataaaaaatattttaaaaataatattaaattaatatcatatgtctaaatttattcttaaatataaataattcaaaaaaaaatattaagtatatatataaataaaatttgacggtttgatttaatttaaattgttgacgagaattttaaaaccgtgaccattaaaaaattttaaaccgtatgaattaatcaaaccattgatactaaattctttcaaataatttgtctccaatcgattgagacatgtaggaatggtatgaataaccttaattttcataaaatgtaggtactaaatgtaatatgtgtcattttcgacaaatacata

SEQ ID NO: 207840 - DNA, 519 bp, Cannabis indica
atattattggtacgaatggcatgaatgttactatgatagagcttaataaatgttaacatgtaattaagaaaaataaaaatttattaggaggtttacattgccattgtaaatatttgtgtgtatatagaatttgaaatcctagaaccgatcgaaatcttatggaatcaaaaatagagatttatttgaagttttctcagaataaaaaagtaaagttaaccaaaatggtttgctaattaagcttattcatgttattgttgtttatagtgtttgaatttgtgaaataaatttcaccacttttagacacaaaatttgacaaatcctttttctcctatcaaactacccaactttttaatttttatttatttccaattttttctcttaaaaatgtttcttcattgagcattgatcttttcattttcagtattcacaattctatttacgatctaaattccaaatataaatgcaaccaaccgaccatattagcggaatttgggacatatatatatatcaaggggtcaa

SEQ ID NO: 207841 - DNA, 878 bp, Cannabis indica
ccaaatattaagaactaactaaaaataaaaaaaataaaaaaaaacgtcaaataaataaacaaaaatttgtctaatttactaatcaaaaaaattataaaaaataagaatgaaaaatagacaagttttaataaattttagaaaattaaaccaaaaaatattgaaaacctatcaaaaaatgtcaaataaacaagaaaatcgtataactatagtgaaacgattgtattaaaattcccgaaaccttgtgacattacaattacctgaaaacatcgaaaaaaacatcaaaaattaaacgaatgagtagaataatgcagaaaaccatatctaaaatatatagtagagttagtgcaaaaggcagacatgatgaatttgaaacctagtcccactccaatggtgtcgtgtagacctctgccaattgcagatggataagtgttgaacactccaaccaactataggagcataagtggagccttgcaatatttgagccacactagacttgatatttcctttgttgtaaacaagctaagccagtttctcaaagctccaactatagttcattgaatgccaccaaaagaatccctaggtacctaaaaaaggaactatgtaccatgacatacacatttcactttgtgattacttcaatttgactaggtttttttatgccgatttgacttgttgtccaagtgatagaaaatccattgcagggtattgtgttttcatgggagaatctcttatttcctagtcatccaaaaagcaatcagttcaggcccgctctagtacataatcagagtatagagctcttgcacaaattgctttagaattgtcttggttgcaaggattgtttaaagaaatgtagttgaatctgcctacagttcctgtta

SEQ ID NO: 207842 - DNA, 791 bp, Cannabis indica
aaaacattataaaagttgaaatataacatcacatgctaaaaaaccttaataaagaatcttgagaatgtttaatatacaaaatataaataacaaaaatttaaaaaacagatattaaaaccatagtataaatgccaaataatataagaaggaaaattcaaagtaatcaataaaataaattattaattctaaaattcttacatttatactcaaaaatttaaaggtaaataatcatcatagtcataaaactaattaatagatttagtacaccaaaataaatttaaagacgagaaaaactttctataataatttacaatactcttaaaaaattaattattaaataatgaatactagaattaaaataaatcaaattgattattgaaaaaagctaaacacaatctgctgacaaacagaagagaattaagtctttaaggatagaaaaataaaataaaataattattaaataaattaaagaaaaagaaataaatttatatagttttttgaaaacattaaattcataaagatatagaattaaatagaaaaaatctactgtgtaaatagttaagtctcaagaaaaataaaatttacttacctaaacgatcaattacaatattgaaaattaaaattaagacctaagacacctcgaatcagaaaaatgaaaaaacaaccaaaattaaatttcagacatatcattaaaccgacagaacataataacggacaaatcaaaattaatataaaactgccattaatgaaaaaacatgtaattaatatatataattattgaccataaaaat

SEQ ID NO: 207843 - DNA, 1007 bp, Cannabis indica
tatgtatgagttcaaaaaaagaaatattacatatcagaaataccacaataacaacagcaacaatacgtatattatatgtatgagttcaaaacaagaaattgcaaagtatgatagtagtggcagagaaggcatagatgatgcaagttgttatgacgagagtggtgactgaggcgaagaaagccgtgacagcaaacaagagtcctagatgttctaacatacgagctattatgggaaacttggaggcaatgcatttgcttatcaacactaaagcaaatgagagtaagatggtcattgaaattaaatcatttatattgtacttaaatttgagttaatttgggaccagagacttgctatctgtagtactaagctatgtagtcaaacgcaacgacacaacttcagaatctcacacaatgaacaaaaaagaatccataaaaagcaaatattcatctctaaaatcaaaataattaacaactcaaactggaaaaatggaaagtgagataagaggagattgaacctctagtttctgtcctgaagcgcgagtgagtccgagttctggatcgaaagggaaagcgattctcctaatttgaaaaaaaaaatagaacacaatcaatcaataatctctctgtagaactaaactaaactcttacaacaaaccagagatagaaagaggaatgaagaagaagaaaaaccttgatttttgtagggcctgagaaacaaaagagaaaatcgacttgtgtacaaaacatagggtttttgaaagagagagataagggttcgggttagagagatctaacaggagctgagaagaaaaaaagcttcaacttggactctcatgggctccgacttgaggaatcgtcgcgcagagtatcgacgagagctgagaagaaaggagctgccgtggatcacatcacagggaaactttcaaccttggggattcagtttcagccacgagagagagagagagagagagagagagagagagagagatgagtatttcaagcactcgt

SEQ ID NO: 207844 - DNA, 1458 bp, Cannabis indica
atgatatcatggataatcatggtgagaacaaaaattaatagtgtggttgcaaaatttcaaatcagtgggtgaaaacacaacaggttaaggctcaaaagggtaactagggatacacattatggtaggcttgaaaggctcaaactatccaacaaatgcctaagtcatattccaattgaacactatcaaggatttcgcctcaaaagaataaacatgcaagttctaagctatcctgtcaatcttaccacaaaccatagtaaaacagttataacaattttcacaacttgagtatttgcagaaaaacacaggtttctaagcatccaaactaatccaaagagttaacaaaatcaagcacacagttattttacagtttcagatcacatcacactaatcagcagtatacaactatcatcaagcttattgccattccttaactaaaacaaaaaaactaaaacagaaaattaaaatgcagaaattaaagtgcagaatttaaaagtgcagaaatttttaatttttttttttacttttctttaagtgggttttggactctggcttttgttgtttttgggttacttttttttaatttattcttatatgcgtaggtgtgatggatatctagaaagaagagttcactcaattagatcgtgcattgattatcattaaggttaataggactgagttgcatcgtgagttgtaatttataagacaatcaatgtttcaaccctggtctgaatgagaagaggaacaatgacaaagagaggtgtttcttttgacatattcagaaagcatgttatgcattgaagaacgttaatgttgaagtggcaaaacctgtagatgagcttgatattgaaaggtgtatatttgatgttagtaatctgcgatttagttttgatttgaatacatctgttaagttttgcaatattcttgtgtcttgagtatggaaatcctgccgcaagtttgttgaatgcagagatagaatgtggtgttggtgttggtactcttagtaattattctaacacaaatatggatggtaaaatcaatgtggatggtatttcagttaagaagttaaagtgtgagtattttaacccaaagaatgtatttggggttaacaatgaaggtgttgaagatgatcgtctagttgagttttgtaatgattagtttacaagtgataatttcgagtcaaaaacattttagtccaatcagaatgcagatcgtgtaaattttctaatgtatcctgataagtgttttattgatttaacgaaatctgagaacccactggagaatgataatgttgttcctaattctttgttcgtgtcttagggcgattgtgatgtgaatagtaatttaattggagtgggaagtttttgttgagaataagtggtttaccatagttgtggtgaatgtagcattttaatgatccaaaaatgttgatgagaaatgttggtgttggtgaaagggctt

SEQ ID NO: 207845 - DNA, 648 bp, Cannabis indica
aattatataattattatattttaagaacaattttcaataatttatatattttaggggataagataagttcaaagaacaaaaaatattaattattattttttttactattttaagtatttggtatatttaatttatttttttcttaaatttttgaaaaaataaaaggattagatttttagaatttgaagaaagacatgcatctcccttcttctaaacaataaatgcttctgtgcagtgcagtgagtgcagtcgtcccagtccaagttcagattctttagtacaacacgggtaatgacaacatttcaacatttctgcattgtgcttcccgctattgcatacagctgtcccacaatttttaatatatacttttctgataagtatatatatagtatactgattgtatgatgtattttttttaattcactacattacattacatgctatatgattatagtggcaaaaaaaaaaaaaaaatgttaatgatttccaattacaattttcaactcaaacacagtgtattatatggatatgaactcttttcaggataatgggaagaaacaacaacaacaccatttttggttaccatcactattacttgcgacacaaataaatgcacatataaatatggatatgattttgtcttgttat

SEQ ID NO: 207846 - DNA, 1331 bp, Cannabis indica
atgaggttgtggtggtggctgtggttcgaagttttgatcatgatcagtagtagtagaagtgatgaaatttgtagttgatatgtcatcattactggccgtttgatccgaattgttattattattagtgatcatctttctcatcatcctcatctttgaagacatccacttaaccgaattgatattattctcatcatggctgttgtgatatttcatatcgtaattcatatgatgatgatgatgatcttcagtagtagtggtagtagtagtagcaatgcttaatttcaaatcatgattattattatcaaataataattcatgattttcttcagctcttggatgatgatggtcacgtgatgatgatccaacgtgatcagcctgtaaaaagatcatatatgattaataaatattattaattaaatccgatttcatgcatataagtaaagttgatatagatatatatataccggttggagttgaaattgttttgtctccctggtatagagaaaattcccttgatcttgagctggattattcatcatgaaaggatgaggacatgatgatgagagagataaggatgaagaagtttgatcttctttaaggtcaacaaaataaggtgataaattattattaatattgctattatggtaagaagaaggaagatccattagggcaaaattcaaagagctataactatagagtagggatcaaaaaaaaaattataaaaaatggaattggaagaacatatatgtaatttgtagtagtaactttccaacaaatattaggtggaatcaaactatagctagaaatttgagatggaaaaataatatggtcatgagagagagagagagatgatgatgatggcaaaagggcctaagcagtgtagtggtaaaactcttttaaaggatcgagatcagagggccagagagagagagaaagaggcgtgtgtaagggattcacgtgagttcatatatgagatgagagaagccaatgaacaaaataacaaagaaagagttttttaaaaaaagacaaaagaaaaagagataaaccaaagagatgtgtggaaagctagtaagagagaccccattgcacaaaaaccctatctgtaatgtaacactattataatttcaaatactcgatcgatccccacacatatagtataatattataagaagccctagttagcttagccgcaatatatatatatctctataatactttacttgcattatcatcacaatataaccaaacgcgcggcgcctagcttccatcctggccacacaaaattaagctaacggatatacatatatatatatatatattcctacacaaac

SEQ ID NO: 207847 - DNA, 689 bp, Cannabis indica
ctcactctttctcaatctcttcgctccttatctctcgatctatttcggtggatggccagatctcatcatcgaaaaaaatcatacacatttataatgggtaggtgatgtccaaaggatttctaaagcatttaaattagtgtgtaatttatttttgatagatctctgtggttattatttgcattgatattgttttgttggttttttttttttattgaaatggtgagatttgattttcttgccaaacttggtttttaacaaattatcgatgcttttttgattatatatcgatattttctcgataattaaggtaagaaggtaagggatgacaatttttaataatttttgtatatcgataatatcttgatccaggacaaaatatagtaaaattaatcacacaaggtagattcatcgataaaccatcgatattctattgataaaccatcgataatcaattaaaataactaagtaaaaaataatgtcagcttggcctcgatatcaataaagcatcgatatactatcgataatatcgatggtttatcgatggcaagctgatatattttttgctttgattattttaattattcgatagtatatcgatggtttgtcgatgattctgcccgtgtgattaattttattatattttgtccttgcatcgaaatagtatcgatataccatcaaaaagtgtacag

SEQ ID NO: 207848 - DNA, 889 bp, Cannabis indica
tagggagagaagatagcaagctttaatattttttgcgaacctattcagaagtaaatgatgagtgtcattcttacaaacataatccactaaatatttacaatcagaaagaacaagatctgagaaaatattgtgtctttgacaccaagataaagtaaaatatagcccatgcgcctccattaacaggggcggttgagtcccattccacggtgacgcaacagtcaaaacccgatccccattgctattgtagagagcaaagcccagtcctgttttgtttgctgtcacattctgggcagcatccactgtgagtttcaaatggtagcttgaaagagtatcattattcaccagttcagccctcgaagaagctttgaaggagtgttgctatgtattgttcttttggtattgcgccaaaaaatctgctgtagtgtggagcagaagagctggtgccacaacccgcctgtggtgaaggaattcgttcctgcagtgccaaatcttctagagcaaatagaggaaaaattggaactcatttgccttgagctcagtgctcgccaagtgtaggatatccctgcaagttagtgtgatatattttgaaataaattaaaaaagacttgttaacttccataccttctggatagttccacacctgaagagagcatgctctaaggattcagtttgatttgagcatcgacagcaggtagatgtggtgattggttttccttttttgcagatttagactagtgggtaaaatgtcataataagctcgccaaatgaagtgtttggttttgaaggaatcggttgtgtccataaggttttccaccaggtttgattgtcggtggtgttggagggtgaggggtcatgtttataatttagattatgtgctagatgatagccg

SEQ ID NO: 207849 - DNA, 536 bp, Cannabis indica
cacggctttatcactcaaggcttctattgatcaattcttttccaaacatgggttaagcatatctagattatgagggcagggttatgatggagcaagcaatatgcaatgtgagtttaatggtcttaaaacacttatattaaaggaaaatccatgtgctttctatgttcattgttttactcatcaactttaacttgctcttgtagttgtagcaaagaaacacattcaagtaggatcatttttcagtgtagttgctcgtgtagtttaatatggttggagcttcacctaaacggtgttaaatccttcattataataaagatgctatgattcttgaagctttgaaaaatagtgagatcttaagtggacgaggcttgaactaacaaagtactttaaaacgttctagtgacacatattggggatcacactatggtactttgctaagtttgatatctatgttttcttctgttattgatgtttttgaaattattatagttgatggaacatgttgtaagagcttattgaatgagtaccaagatgag

SEQ ID NO: 207850 - DNA, 938 bp, Cannabis indica
gcaaacccattgctgtcatctctggtgtgaaaaacagagttgttgttgtgtcccctccttgtgatggaagtatcctcgattggtaccagttggtctatagttggctagattggcttcaccatttgagatatctaattctttgacagatttctcaattcttgattcttgagccattagtaaagcttcaagctccgtgacagtgaatttgtctttgtgaatggagtaggaggtgtagaagacatcatattcaggtcctaggccattaaaaatggcctcaatatgatcagcaacagaaaatttatgacctatagctgataacagatcaactatggatttaattttaagcaagtaatcactaatcgacagattgttctttttagtgttacgaagttgggttttgaattgacttatcttggaggatgtctgagcagtgaagaattcttggagagctgcccatgcatcggctgaggtttcacatccgatcatcctggtgttcatctgatcattcatggaggaaagcatccaggagagaagaagttgatcttgagcttcccagtcaagatattcatcagacacgttttcggaggtgcgatctgcttcagaggcgtatttttgaggagcagaattttgaacaaagaaatgttgaagacgatggccttttacagctgtgaagatttgatgtttccatgacaggaaattgttttcatcaagtttggacgacaaggaatgcttgaacgctacaggttctttcaacgaggttaggctagcagagcttcttgagttgccagccatggggaagaagaaaagaattgacgaagaacagagatgaggaagacgataccctctggatcaaagaactagctctgataccatgttaagattcaagagacaatgaaaagaatgaaatctctgttattgaattgaattgagtaatgtac

SEQ ID NO: 207851 - DNA, 542 bp, Cannabis indica
ttgtcagttatatgaaaaagacagtcgacagagcaacacagctttaagctttcttgtaaaccaaacaagagaacctaatccaccacactttcggtttctgctatccatcatatagatgttgccaaaactcatcccattaattaacctattttctcacatgttatgcttatgtatgtatatatttataatatgtatatattccaccaaattaaaataaaggtactcaaaaaaaaaaaaactaagaaaaaacgacaaagtgctaatgattataacacttttatgtgaactaaataataataaaatgtcacacgttaaataacaatgaactatactttactataacagagagaagtgtagtgtatacagttagaagaatcaatctcaatcaattaattactatgattgatcatgatccttaacatcatcaataagatatttttgagtacagagacagaatgaacaattaattaataatgtgtaaaaatgaagtcatgagtaattgatattacttcactttttttttttttttagtttgggtacgg

SEQ ID NO: 207852 - DNA, 866 bp, Cannabis indica
tatatatatatatttaacatatacacatacatttcatacaactcatatagataaatacaagtaaggtacctgcatggtggagcattggcagcactgtacggcgatgaagaagatggttgttgacatctccgcccctgtatttctctccctttcgctgaggatttcagagtagggattttgatttacttctttttggcgccaaggtttttgttcaaatataatttttgaaatttgggctttggatatttgggcccttgggcttagatgagttgagaattttgttgcaaacctacaaaaatattagaattttggttaacttttacaaaagtactgtcacaccaaaatcttttcatgtttttataaaacaaaagtagaacacacaattgaactaaaaataacagtgaaacatttaaaaaataatagtaaaaatttaacatagtacacaatataaaacttacacaatatttttgataaaaatacagtatttttaaaaaaatttcactccacaatataaaagtaaaaaaattgaaaaattcaaataatcaaattttattggaataatttcataaaaatacaaaaataataaaaaaattaacaaaaatacagtaacgaaaaatcaacaacaaattaaccgtacaaaccgtattttctgtaaataaaattaaaaaaatacctaaaaatatttcaaattctataaaattatatttttataattttttttattatttttatatatttgtgaaataatcccataaataaacgctcctaaaaattaattacaaaaaccctaacaaaaaccaaaaatacctataatacctcttctttcactctcaactcagcttagagagactgagttagttagagag

SEQ ID NO: 207853 - DNA, 912 bp, Cannabis indica
aatgaaataagaaacatatttaacatataaaaatttagggaaatttaccctgggtatcctttcgtgttttcaatattcaaatagttttaatcttaatttttctatataacagtgtataacgtagttattttaaatttctaaagactatttagattttagactgtaatctatattgtaaatatttagccaaaaagttgacttgatgacatggacaatgtttttgacacgtgacacgaaggaaacaatcttagggtcccacatccaaagataaagcaatgttacatgcacactagggacacctaggtaagcaccaagatccagcaaagtcgtttctaagtgctatccttcaacaaatagatcataatgacgaaaaaacgatgaaccatgaagctaaatatgtcacttggaaatcccggagcttagcctgggcccagttaagtattgggcacccaggttgatagcctgtgcgctggcttgcattggttttggttcataacaacttctcatgtgcaatatgcttagctattgcactaaaatacatgagagacatgcctcgaccaagtttcatacattggagacaagtttgaaagaaactacacctaaagacaacatgtgcacattgggcgcacaagttgacatctagtcgacctgagcggcgcaacaacgagtttaggtttttaggagcttctttggaccccgattcctcaaatccaacaaggaacaacgccaagacatgagttttcatcaatgacatcccaaaggatcccatctcaaactatgggagcccatgttggcattaggggtgttcgcgatgcgggtggtgcaattttggactattttttcaaactaacccgcacatgcggttttttatatttcccgaaccgcacctgcacccgcaccgcgaaactataa

SEQ ID NO: 207854 - DNA, 1096 bp, Cannabis indica
tatatatatatatatatggctaccttggttttttcaaattcaaacgtacgaccatcgaattttccgatgattgaccaggtgttcgacctggacgaggttctgactttagccgatcaagattcaattcgaccttctggggatgatcacaaccatcaaatcacagaagtggtgagagataattcggtagtactgggatcacaagccaaaatatacacaagcctaacagatcttcaaaaggggtcgtctggaaccttaaccgcgccaaacgtagaatattcttgcatggtctgtatggaaagcttccactactctggcggacgcaccggcctacgaatcccctgtggacacgtgtaccacgcagattgcatcgccgcttggatatccgtatgtgattcctgccctctctgccgctgccgcatctccacagccgaacaattttctggtgccttgcccaaacaaacgtaactgaaacgaaacatatatatatatatatttatatataacaaattacatgatcatagtaagtttttgaagttagagtagtattatatatatgatagcctagaatttaaaaaaaaattacatataactagataatgatagctcgattgatcgatgcattattattatattattattatcgatgcattatatttatttgtatctaatttacaataataatgttattacttcatcttaagtttcaatctaatttacaataataattttgttacctgatctcatcaagtttcagtttctgtttttgtttaagctacaatttttatatacttattttatatatttttattattttaaaagataattagttattgtataatataatacaatttaattaataaaattttaagataaatattaactaagatttaaaaatatatataaaataataactaattagtaatttaatggtttcttttagaaatagttaaaaaaaaataacatctaacgttgaatagaacaatatatttcttttaaacttaagtagaagaggaaaaaagaagaaagagagaaagaataagtaaagaggaaaaaatgacaaaagaaaggactgcgtataccataccaaatattcaaa

SEQ ID NO: 207855 - DNA, 989 bp, Cannabis indica
tttatttatatgtatttttttatttattcagtgacataattttaaatgtaatattttgatgcatctattacaaacaaagtaataatattgaaattagacacataatttttttatttttaagatatatagaaaaatgaggattttgtgacaaatattaaaaactcgagaactaaaaaggtaattgcatgtgtttttctaataaaataaataaaaaataacacttatgaatttagttaattgggcttgtaactgatgatgtagttttcacattttattttgtagtatcagtggaatgttatgttcctaaagatgaatttggccagacaactaatttattttgtgggactatttctaaaacatataatggaaattgaatgaaaagaattgtaaaaataaaatgaacattatataaaatgccacttaatttattttgcgtgttcctttatataaatatatagatttagattattttttttagtattttacacacttttcttaatgctaagattttgacaaaacgataaatgaaaaattataactatttaagcatgattaaattgaatactaaaaatattttattcaaccaccacacatgaaagttaaaaaaactaatttttttttccaaataaaagtaaagattaatgaactttatttaacacttaaaatggttcctaaataatgtgagtaaaaatagaatgaaattatataaaatgccacttaacttattttgtgtttttctttatataaatatataaataataaaaatattttattcaaccaccatatgtgaagattaaaaaaattaattttattacaaataaaagtgaaagattaatgagctttatttatattatatagtataacacttgaaatagttcttaaataatgtcggactattttaaaatatatacgtttttgcacaaaatgaaaaagtacttacaaaaaagtaaaaaatagaaatgaaaaaattatataaaatagccatctaa

SEQ ID NO: 207856 - DNA, 946 bp, Cannabis indica
tcgttttagttttgaggatgtttcaattgatttgctattttatttggtagctgaagtaattagttaataaagccaatttcttatttaaagaaaaaacactacataaattctactaagggcttcctgttcaaaaaaaaaaaaaaatccactaagggccaagtgccaaagaatgtttccgttttgcaacttggcacacttgtttattttcttaaacaaagaaaagatatttgacattttataggagagagtagcgtagtagtgtaatatagtaagaattgacccataatcaataatttagcttttttttaaaaaaaaattacatatgcctttattgaattatatttgtatctgtattttaattattattatttattttgaatttcgtattttaattaatacatgctttataaattggctccaaaaaagaaagttaaatattggcacaaactgaggggttgggtttattttatttatttatttatttatttattttcaattatgataaagatgtgtgcgtgagtttaagctatagacttttgaagttttgaggtacaagaagacacaagggataaactttcattctttctgaaaataatatgatttgataggtttccactttatattttattattattattagtattagttagtatcattatgatttgaagaaatgccctaccttgcttatacaatacaattattttatcctttaatttctccattttttttttggtatggaaatttttctaccaatttgaattagaatggacaaataattgctccttccaaatcgaagaatttatttctttcttcaaataataataataattattattataattcaaagaaagaaagggattcttaaatggttaattagtaaatcccatatttactattgaccggaaatagaatgagttagtaacaattcattttttttttctttagt

SEQ ID NO: 207857 - DNA, 1555 bp, Cannabis indica
ttcagccgattttaaccaaacacctggactattataaatcagaccatagagcaataacagttgaagttgttcctttggcacaccaacaacctgaagttaagaggctctcacggttcagatttgaaaaattatggctgtccgattctgcagcaaccgatatcatccatcagacttggaaaaaaagtttgcaaggtactgcaattgacaatttctgcactaatatagaggcttgttccagttctttacaacaatggcatcaccataaatatagcaatttcaagaagaaaatcacagctgctcataaagaggtagaacttcttaataaccaacaagtccgaactgatgtttcaatgtgcaatctaaaaaaaatggaggatactctagatgaattgctctcccaagaagaggtttattggcaggaaagatcaagaattgattggttacaatgtggagatgagaatacaaaatgttttcatgcttatgcgtcttcacgaaagaccaacaacacaatcaaatcgttgcataatgaggatggtgttgttgtcacttcaaagcacgggatgactgatgttatttgcaatttttttggggacttattctttgcttcgggtacacacacagaagctttgcagcaggttttacatgcaattcccactactgttactgctgaaatgaacgactcgctgttacgtcctttttcagacaaagaagtacttgatgctcttcactcaatgagtcctgacaaaagccctggcagtgatggtatgtctgccatgttttatcaacattgttgggatcatgtaggcaccgatgtcacagatgtagtccttggagttttgaatgagggtcatgatatgagcagaataaataactcaatcataactctcatcccaaagatcaaaaaaccgaaagccatgggggattatagacctattagtctatgtaatgtgatttacaagttgatttccaaagtgatagtgctacggtttaaagatgttctacctttcgtgatatctgagaatcagagtgctttcctcccaaaccgtctgatcactgacaacattcttgttgcttttgaattggttcatcacctcaaacacaagactcaaggcaataagggtttttcggcgctcaagctggatatgagcaaggcttttgatagagttgaatgggattatttgtctgcggtaatggaaaaaatgggttttgctcatcaatggatctctctcattatgcggtttttattgtccaatagtttctcctttcagctaaatggagaaattgtgggcaatgtctggccaacaagaggacttcgtcaaggtgatcctttgtcgccttaccttttttaatttgttcagaaggtctctcacggctgctacaccatgaagagcatatgggaaatttgttgggattaaagctcacaaggcaagctccgtcggtatctcacttgttatttgctaatgatagtctccttttctgccatgcaaatcagagtctgctttagccataaaaaagattttggagatctaccgtcaagcttcaggacaattcctta

SEQ ID NO: 207858 - DNA, 1493 bp, Cannabis indica
attattattattatgaaacttaaaagattcatatatacctgattacattatattttcagttaatttagtcaattttcttattatacataaagctgtttttatgtatgatggtatatattattagtgaaggactaatttatctaaacatacgttcatttggtatgaagtattacaccatattatactactgaattgtatttatatataataactattgatatttataagcatattaaatgttaatatataatatataatagtttagtgtaaattaaaatataatattatatttaataaaaaaataaattacaacattatcacttaagtttaattctcggttataaataaatacttaagttttatttttggcagcgataattaacttatatatctggaattcagtaggtacctaaaagttaaatgtcaatttattatctttctgataggtatatttaaattatcttttttaaaaaaataaaaactcatgacctagaccaatcagagattgccaagggacaatttacttaacacttagaaatgagatagttatagagttccaaaattataaattaagtattaaaaattaaacttagatatttatttgtaattggaagttaaattttagatatttatgctacaaattattctaaataaaaatataacatataactcaatttaatataatacaatataatctcatacaccgtaccgagcctgaaatatgttaaactagaaaacaattcgcgcttcgcgtgaagttatattttgtttaatgatatatattaaatttcatattgtaatattttaataatatgactaactaatttaatatttttttaattcagaaatgtaaaaaaaaatatcgtcatacaacttcttatttaataaataaagaaaataaagatatatcttcaaacattatagtgaaaaaaaatttaaagaatctataaaaaaaaaatgaccatgacaaatgttcatggtcattttaaattactctctttccacttcaaatcaggctaaacttaaacttaattaaaaattacaaatgaaagtatagtgatactcctccctccaacataatttgaattaaaaattattataaaataggacaattttcatttctatacaagtaaatgtataatattacaaaaaaaaaagtgcaaaaaaatataattacataattctatataatttttggaatatttacaaataaacatatatatttacaattttaatttgttgattactttcaattgatttcttaaaaaaatacataaagttaaatatgtaaatataaaagttaatattcatattttgatatattattaaaataatatgtttgctaaaatttaatatgaaattaaaaaaaaaaaaaaaagaatatacaaacacatttccaaattttgtttatattttataaacaatgtatatacatatactaaatatttaattagtattattaatatttataataatttttttgatttaagcgt

SEQ ID NO: 207859 - DNA, 660 bp, Cannabis indica
atttaatttttttatttttttaacaatggtaaattatgcttttaatttgaaagaattttgaaataaatttaaaaaaattatattaggtgtactaatataaatgtgtcacgtgtataaaagtgtacacataagcaatctatgtacgcatttaactggaataaatgaatgacaccttaaatttattaccgatttcgtagtttggagagttttaccatcaaaatttgagttcagagggttgagtacaaataagataatacttgagagagtttagccgctaataactcaacattctaacaatgaaagtttggtgagttttgtcataaaaaaaatagatttatggaattaatcgtcacaaaccctataatttatgtaattttgctacaaatatcttaataaaaaaaaatacttttttataataaaaaatgacactgaaatttcaataatactcatttatccaataataaataaataacacgcgttcatatttttccttttttcttttcttttataagggatttatctattttctttttcttttctttttttacaagatttatctcttttcagtttttttttttaatgttttatgtataagaaaagagaaacaagaagtggagcctctaattccattgacgagtcataaaataagggaaacttaca

SEQ ID NO: 207860 - DNA, 620 bp, Cannabis indica
aatgctagttcttataggatgagatcaaagaactgattcgacaaggacattttgattagtacaagaaaatggagaagccaatcctcgagtggatagggtagacaatacaaatgatgtgaatggttctagagcctcttgcaacatcttgaccatcataggcagagcacacgtcggtggagattctaagaaagcacaagaacattatgcaaaagaagcctaggagaaaccgttaacaaatgtaaacaatttaagtgaaagactagcaaagctttttaagaaagagtgtgatgatatcactttcatggagagtgacgcaagatggggacatcatcctcatacggacgatttagtggtagtcgccaatataggaggtgacaacatccattgtgtactcgttgataattgtagctcaattaacctcttaaatttataagccttcaagaaaatcgggttacatgagaaaaatttgaagcctgtgacttagagtatctacggatttagcggagatacaatcaaactaaaggaatgatcaaactaccgataactttggggacgacacctgttactacaaatagtgatcgatcaatatctgcaaataatgcagtgataggtcgccccat

SEQ ID NO: 207861 - DNA, 586 bp, Cannabis indica
aaggattattagccaagccttttgctgatttatcgctcgggcagcttattgtcccaaataaggtctttgtcgatgttagaatggatcaaaatggtgaaagttaatttcaattaatattttatcatctataagtatctatctatctatttatatataaatgtatttatataatgttattttgatgtgtgtagattgagaaagtggtctaaaatatttgataggacatcttatggagtcagaattcatgacacacatagttttaaggcacacgatcccacatgtttatttatattttaaaactgaaattgtttcaagtgaaatcttatttcagtgataaatatttacttttctagacatactaacacttattttgttgtaatcaatctaattgaaataattctatgcaatgcatgaatcttaattttaattatagagagaacagcaccacaaaatcgatatttagaataaaacccaaaattaaaggcacagaaaagaaaaactagtaatcatgtgaagcagtctgctatatcatcatacttgccagaactgactctaccaataagaagtgttgagaatcatggggttc

SEQ ID NO: 207862 - DNA, 720 bp, Cannabis indica
tctctctctatgcatgttccaactaacttgttttttagaatttcgcaactgatgcaaatttccttcggtaacacagttggcagctgtggcagcattgtgtgttcagtatgaagccgagttccggccaaatatgagcattgttgtgaaggcacttcaaccgctcctgaagccaccggccccagctccagatgcttcataaacagagcaggtcaggtatcccagttctatcagcagtcacaacattgttaattattcagaaatgcggggttcgtttgcctgggaggatagcaagacggaagtttctatatatatatatatatatatttgtttattttttatgagattggatgtgtagggttggattggccaatttcatttccttgccaaaatttatctgttgattactgagccagagtgtaaaagactgctagaagagtcacaaactgactgggattgggttggggtgggtggagatttctttctttcttttgcttaaatcttttttctttcttttttccggtatttatatttataatttatgtgctacaaaatgtgtttggtattctgttcctcatcactattgcttctttcactgttgattattacacttgtacaaggcaacctaattgtcgtctacattgatgatatccacttcatgtaaagtttgatgtcttgttcatccagctcgcaatctttctttttagtttttctctgggcaat

SEQ ID NO: 207863 - DNA, 599 bp, Cannabis indica
agagagagagagtctagatttaagcatattgcaacatttattactcataattttagatatatatatacacacgcattcatacatgtacataaagcagaagcaggacaaagtacaaacataagctcgaaccaataatcacaatttgatgtagtattttcattgcaatactcttataagcaatagttaacttattacctcgcctctttccctcccatcagtgccctccaaatccatggctatcgtgcaaggctcgattccaacacagtgcgctatccaaatgcccttcgttgtttgactcctgcagcagtatggaaattggtagtccaacaatgcattgagaaaaatacaagtataaccgcatacaagaaaattaaaaaagctaaaagtcatgaaaaaactaaccttcccctgtaagcatccatctctctgaagtttgtgtggaaaagatgattcaataaggtactcttccctgcacccagaatatgtaacccaacaagattaaaagaagaaaagaaacaaaatgcaacatcattcaagtgcagcaattcccttcccatgtcaaataataagcaaccaaattctatatatttataaatata

SEQ ID NO: 207864 - DNA, 813 bp, Cannabis indica
gtttttcctaatacatcagaggagatgcagtagctttttacagaaattttgaaaaatgactgaaactattaaaaaatatttaggtctgcccataataggtgggaggaacgaatgtatgcttttcataccaataaagaataaaatatgcacaaaattacatgtttatcaagtaaaaattttctggcaaagggtaaggaagctttagtaaaagttgttatcctagaaatgtcaaattaccaaatgtcatgttttattattccaaaggaaattggtgaagagtttattggtggggatcaatccataacaaacaaagaattttattgaagaacttggcataagatgggtcaacctcatagtaatgggagtttaggttttagacgatttagaatcccgctaatagtggcttaagtaatgaaagcaagatattttagataagagatcatacccatcatcaacttggcaagaaatcttatggggaagagatttattgtcgaaagggtagtttggaaatgctagaaatacaaggacgtttagagacccttagttgctaagaccaccttcctttctcccaaacttgcatcctacgtatgatgtggcaagagtgtcggatcttattggcccatatgggatatggaattctacagtaatgtttactgagattttttgaaaactaaatatttaagagcttaagaaataataaataacaacaataaagaagataaagatttttacgtagttcaggcgttaatgaaccttagtccacgagtcagtctattagcctcaaacgacatatttgatgtttttacagtgttt

SEQ ID NO: 207865 - DNA, 708 bp, Cannabis indica
ttaaaatcacactaaccaaaggtttgaagaaataatttaataataataatgaaagaaaatggcataacttaatagataaatatgcacttatcaaacatggacttgtttttgctaatgatcggtgtattactccaattttatagaatgtccttaaaggaagggaccttatcaaacttagacttgagcaacacatcctcctccttaggtgagtcagccttgtctatattatatataatctattctgaattatgcgaccaattgtaatatttacaaaaaaaaaaagttaccaattgtaatatttcaaaaacaaaaaagtaatgcattgacgatattttggctccacagtgtaaattcttatttttgctggtttgaaggatcattacctaactaataacaatgatatttttttgctttgttttaactagaaaaaaactaaaaatatagaggttttacataattggtcttatataaaagcctataaaacaaaaacaaatagaagccttcaaacgatatatgatatatgtaatctatatgaagagtagcatatctagggagaccaatttagcttcatattatatgtcagaatttacatagattggagagtaaaaaatgttaaaaaataaaaatctctcacacatattcattaaggacaacaaatcattttgataatgttttggttcaatagtgaactcatctcatggaaggtca

SEQ ID NO: 207866 - DNA, 873 bp, Cannabis indica
ttcccctatcatttttgcgtgcatcagagattgaggtgtgcgaattcaaccgaatcaagagaaccaaaataggcacgcaaacccctctttgctcaaatgcaaggccgcgaactagaaagcgaaatctcaaaccgatggctaagacctaaaattgacagcttagtcgtgcattcccttaccactcattccctctctttcttccttgcccgtaaatcgttttgccgactttttacaaaaaaaataaaaagaaagaaagaaaggatctgagtaatttactacatttttggcaatatctgctagtaaaaaaattgatagtactcgatgggtactcgatattagtatgttttagaagttagggatgactatttgataatgtttgataagtgtttgaagtgctcgatggttatgttaagttttgttaaaacattctttgaacacaattgtactttatgctggtactcaatagttcatgttctaaaagttagtgatgaatattttattgtgctcaaagtgctcgatcagtgctcgatatgtattattgaaaatacatccctaacctctagaaatgctgatactgtgttccctttgagcatacattaatttttatgagcagaatgcaataaatggaggaaaatccagtaaaacccatatccattgttttttttttatgtagaaattcaacaaaacagttttacgagtgagaaagaaagagagggaatgagctgttaaagggtttgcgaatagtcgatggtcttcgccgatggtttgggttttagttttgggttctaacttccttaaatttttttgggttcgtgatcttaggcggagatgggtatcaaatcggtttcgggcttccagtcaggtcagatttgc

SEQ ID NO: 207867 - DNA, 906 bp, Cannabis indica
tcctaatttgtacaatgaagctaatattaattttttaatactttgtgtaattgaaataattaagtattaaatttctttcaaaagaatgaaaaaaaaactaactttgtttataatttatacacaaatgggaactttaattttagataattttagtcacaaatcataatatcaatcgaaacaactatatatatgccttttatctcaaaaaaaaaaaaacctatatatatgccttgatagaatttttttttttcttagaaaattatgtcactatagtgatttattgagctgaaatatcaatgtaaccaacatcgtcatgataaatcttcattcctcatgtttataaatataattaaagagcataatgtgagaaagacatagtggggtttgctttgttttgaaaccacagatgtgttggttcaaaattattgaaagatattggaataaaggcacaaaatgcaagagagaagacatttaaaatggagcacaaaattgagcccaaaaaaaagtggtccccaattagccagagaagattgattcattatttcatagaaatgaaccacagaatttaatttctacattatagagaatggatgcccacggatttaaatgcaaagatatagctgacccttttttccaaattctgacacaagttgtttggggtgcctaattggctaatctaattaaatttaaagaggggaccactaaaccatgaaaagctttttttttttttttttgagcaatccgtgaaagcttattacttctccatttctcttcttattattaacgaatagtgttgccgtcgactttctatcacaaattttaggcttgaagacacacgtcgaaatatttttccaatttttttttacggcagtgttcattatgcatacaacatcagctctgtaattt

SEQ ID NO: 207868 - DNA, 774 bp, Cannabis indica
gctaaaaccaagcaaaacccagaacacaagaagaataaaaatgaaaacaaaattaaagaaactcaagcaaataattataaaactaaccacctatgaaggtagaacttatacaatgaggtgggtttgtggcagaacccatgaacatggtactggtcgcccaatagttaactgtgagcgaccgcatgctaaaaattcagcttttgggattccactgggttcttcaactgaacccaaaaagagaaaaatagtgagacgaggtttaacaaagaagaaaactgcttaatctcagaattgagaggagcaatggaaatctcagaggcattgaaaatggcagtagtattacgaccaatgacaacagaaagactaattatatgaacaaaaaaaaaaaagaaagacttaaatatgtaacatttactttagtagttttatatgattgaaatgaaacaaacgagaggcctcaaattgttcgagtctgaataatatgtcgttggtgttttggaaaatataagtagtgacaggtttgatgtcgtttatcctattcttatatgttggggtaagcaaagtttgatgtcgttgtactacattttatctataattgaaaattatgaaggcaataatatcttaaataaatagtccaaattatatatataaagtgattaatctatttacatatatatcatcaagatttcatcccctttggtcaagcatgctccttaactctttctttccatttgcatagtttcactatttaccttaataatatacctcatatca

SEQ ID NO: 207869 - DNA, 729 bp, Cannabis indica
tccaatctgcgtacaaacagacctttaagaaaacttctataggaatagcttttagaaattatacagttacttaaaatttactagtaaaatactatactcgtagaatttagttgtcacaaagtgagttttagacatttatatatagtgtttaggatgatcataatgaagatttacacacacaacacatcatgactatttccaccacacacctatttgtagacatataaataggtgaaataagagttatgaacgatgagaaaaaagttgggattaaacccaattaaagccataacattttgaacattttactctaacaaattctttaggcgacttcaacatactacaaaatagagttttgtaactcctttcgactcctcgtgtaacactttctaacaactataagatcataattttgaatcccataattaatttaggtaacaattcttttattacacttaatttgtgattaacaaaagagttacaaatgaataattactttgtaactcatttttatgttacaaatgtatataagttaaaataaactatagaatatataatttatttattaaatactctaatatatattattcagatgataatatacatgtgacacattttaatcgatttattatattataaaatgatataacatatatcttaagaaaatctaataataagtttcttactctaattgtttttaaatatattggtaatctcatcaacttatag

SEQ ID NO: 207870 - DNA, 995 bp, Cannabis indica
gttttatagaacatgtttttgaaaaaaaatttcacttttctacttttaaaaacagaaaactgattaaaaaagtgttaccaaacgccacctatatgtttacgtttaatgaattttttttttacatttttacagttttctgtataaataacatgaaaacaacaaaaaaattacataaaagtaacatgaaaataacatctaaataacatcaaaacaacaacaaaaaaacatacatataacaaaaaatcaacaacaaattaatatgaatacaacataaaaagaccgtattttctgtaaataaaatcaaaatattcgtaaaaatatttaaaattccgtgaaaccgtatttttataattttttcttttgttatttttgtgtatttgtaaaattatccctaattaaaaacagtgtaattttcacatcagataagacattatggtcactttataatagaaaccaaaataaaaaaaatcatttactatttaagtaactaactccattttatagaaagaatatgaggagacaccacaagtgattcatatatagttgtcaaattggtaaccattaacaaactggtcgttagattcaaaacaccatatagtattattaagaactatattttaacatatatagtaagtaacaagatgtagttaaaagcttgttgacttggtttgtgctgtggtttataaatttatttgttggtgcagattctacaactaagaaggatgttaaagcagtgataaattggtaaaagagaacgtagcaatgaggtggtgcatcatcatcatgatcaagctcatagtcataattagacaataattaatgtgaatgagcttggtttgtgcatagcactactaccttaaaaatagtcttcttttactgataattaagttggatagttcgtggtacaataccaaataatgtgtatttatatgaatactgtgaaactcttatatccaccataaagtttgattatcatatctctgctttaacattta

SEQ ID NO: 207871 - DNA, 519 bp, Cannabis indica
acttgtttgtttttatttttttttttttttttttttttttttgcatggtattaccaataacctaaagcgatctatgagtttcttcatagtctttcttaataaaatcaaaaaccatctgggttgagtatttcttctttctaaactataactaatactcattttcaaccatagaactaagttcttttcagatagacaatctaggagtagctaagactaaactcacaaaccaaatttccctattataaaagtcagaattcgcgacggtcccaaaaacaatattttttggggatcatcgctaacaatattaagtgactgttttaaactcttaggaaaaatccttttaaaaaaaaattgttaggaaaaattaggtattctcgacaatttagaacactcatgagggcaatcgacagttttatagatttatcacgactttttaatagatataatcgactattaataaaaccaaaccctagggtctttgactttctcatccagtctccttgctctctctctctctct

SEQ ID NO: 207872 - DNA, 647 bp, Cannabis indica
atcattgcaaaccatagtttaagatagagatttatttgttatccttccagttttggacatgaatttttgcttaagttttcagactgttgagttcttctgtactacttttagagtgatatttgaaaatattttcaagcttttatgttgaacgaaggctcatagtagatacaaattttgatcatattgcaatttcacgataattgttgtttctctatctatgatgattgaaattgtggatggatgcctttgtgattatcttactttctcttttttatagaagaatttgatttgattgctgctaagaattttatggttaggtttctcaattattttttctgatatatcctactaaaatattgcttataaggtttagtcatttctttggttcaagtttgtgtatcttgatggtgctcatgttctccaagttctgtaatatcttgtcagatgaacacttttggcattgtagggattgagagagaaggcagagagagataggagggtagggagctgatgggaggttcgcttgagccattagtgtttgggctgtcgtctcatcgaggctttgggatttgggctctcggtctagggttgtcagttggggttgtcggtctaggatcatcggtgggggttgggtggtggtgataatg

SEQ ID NO: 207873 - DNA, 803 bp, Cannabis indica
tttttttttttttatgaaagaaacctttatttaaaacaaaaccaacttacaccacaacgttcaaacacccaagaacaaggataatctcctcagcagacagagattgacaaatcccaagggacgcaatccacttttgccaattcatgagccgggagattaaagtttctaagcacccaagttacattaaccccagaaccacaacacaatagaaaaaacagcttagaaaagagaggcataagtctccatgatgggcagctgcggtcctctaaggccttcaccagaatttggcaatcagtgtagaatcgcacttcattccaccctgaggattgacagaattccacagccgagatgaggccataggcttcagcttccaaaggagaattaacctggaacttataggtagcaacacccaatatctgatccttcgagtccaacaccaagaaagcagtgtaggccacggagccacggacattagcatcagagaaaactctcacagaggcattacgaggcacaatcgaattaggggtagatccaacgacaacagggggcagtttggatcgagcaactctccactcttgcacatcagataaggttttacacaggatgacctcaggagaaaccacagttccttcatgaaagcaggagttacgggcattccacaaggtattgcaaagactaaccgccacttggatgaacaactccctatccaaaggtattacctaacctggagatctagttaacagccatgaaaccaactctcttgaatttcctatatttaggcaatcacttctaattccccattg

SEQ ID NO: 207874 - DNA, 805 bp, Cannabis indica
tcttggtcaagagttggaaccacaaagtctgagcccaggtcgaggaactgatcaactgcttgctgcaagccctgttcaaatttgcttccacgactcaggtactcttcaatgggtgtggaattggacatcaaagggattcttattaaagagagttctagccgaaacacgaaggttttccttatggccaaatttgggaggaacaacaaaattatcacacctcacgaggcatcgtccacatttattataggtgtggtcgagagtaccacagaagtaacaaaatttttacaatccctcgtacttgaaggcaatccatttaggtttagcaatcttacgaaagcgaatgttcataccacgcctaaggggttttgtgacatccagaaagacgtgaattcggaggtagtgaccaaagctttccaacagggacagaggataggtttttatgaggtctcctaactcattagccataaattgagcaagttgaggtgatttttggctaaagggagtgttgtgggcttggatccaaaatgaaacaaaacgaaaatggtcaagcaagagagtgtcaagaccctcagggttggcaaagatcataaggcatttgtcgaaatgccatgattagtcttcaaggacacgtcgacggtcaccttcacattgaaaggtagctaagaacacgtcagagtgtagtctgatatcttaacaggaaaaacggagggtcccgaataaatgaagttaattttaaagtgttgacactatattaaaagttttcctaaaagaaacaaaaaagtgataaaaaaaataaacaagaaag

SEQ ID NO: 207875 - DNA, 645 bp, Cannabis indica
tatgtaattatttcattttttttagaatggatagtatttaggactatttataattttttaaaaaatcttaaacaatttacaatatcaaatagaagattcaaatatttttattacacggctaattattttatcttatagaaaatagtaaacaattgtacaaaacttattgtcaaatactactaatacatgcatgatgtatatgcatttattgattataaacataaatgcaacttttttgtgttcaactaacatatacaaaagtagaattgtactacccatactaataataatactactaatccatgcatgtgattattgattataaagagagaaagagaatccaaggtgatttttctattgcatctcttgtcacttaccactaatactttatttttatttttttgaatggccacctgagattactaatgccagttgcccatacaactttgtcaattcaatatgttttttttttgaacactcaatttaatatgttagggcatttagtttctgagacccgcattatcaaataaaaacttaaattatttcatttttaaatatacaaaatatttttggaaagtttatagtagtattttagtaaacttgaatctagtttagtattcataagaatttttagtctatattttt

SEQ ID NO: 207876 - DNA, 837 bp, Cannabis indica
agacattaaatataaatattattagtagaggttcaaaatgtaaaatacaaatactagagtataaaaataattttattaagattagaacccatgacctcctttatatgcatgaaatggctttaccattataccaaagtaatatatattgtaactaactaaaatacatatatattttttcccaattttttttttagggggcgactgtggactgtcttacctcgcctttatgtgggtctgcccctagtgataaacctatcattaataacatcaagatatgtttctagtagaaatcggtcaagataggtttttagtagaaatcgttattaaaaatatctcaattaatttaaaaaaaaatctcaattacattatttttttaattaattaatatttataaatttattaaaaaattaaaaaaattaatagaattaaagaggaaataaataaatgtattttgagtgattttagagcgtcatgtcaccacctcatattttttctttatatatatagtgattattaattaattcatataatttatgagtgaagttatcgacagttttttttcttcttctaaagaaggaacattcacttaaaagtttaaatagataaacgctactataaaaagacagttcgcaagtggctaggttgcgtcaaatcacagatgtaatggacaattagagaagtgatgtgaactcgcttgagctggatttgtttttattttcttgtttttgattttattttagtaatatttatattttgctcttttttttttcattttcagtagtgcttttagattttttttttttttttttacttttacattagttattgtattgttta

SEQ ID NO: 207877 - DNA, 1255 bp, Cannabis indica
ttcattttatagaaaaatttaatttatcgaaaataaaacacaaataaatcctaaaaagtaattaaatgggtgttttagcgccataacttaaaaaaaataatttttaatttttaaaaactaaacagttatttttttaaactacaaataaaagtgtttagatattattttgatgaaataattttttaaaactaaattttacaaactgtaattttgaaaacaacagaaagttattttaaaaataaaactactatttaaactaaaaatatcatgaactatatactttgagaatacattcagtgtatgaggatatttttaaattatacattcgtaataattgacttattatagttaattatttaagtcgattatttattatgtcaaagatcaattatattttataaaacttaaaaaattaaaatcaatattttgacaattagttaaaatataaatgttttacaggctcgaagcatttttttttttttatttccttacatctagattcccactatttattgtcgttagcatgctcaagattttatgaccaaaatatcaattttaatttccaaatttcaataacaaacaaaatttgatatttgaagataaacatacgagaattcgattgttactataatattcgtataaacataacatgccaaagttttttttttttttttgtacatttgtttaacaaaacataccaaaagtgttacctctcattaggcatacacatcatttacttttactttttcttgtcttctatttttagatttttttggtaatacttttattttttaattttaaaaataaaaaataaaaatatattttataattttagttttatttatattttttattttattaaagtcgggtttgtggtccgagttcgagattgagaccggactctaagttggtgttgaagtctaaaatattgattaagaaaaaaaactgttaaaatttaattttcaattaaaaattaaaaagcgaaaattatataacatgattttagaaaatattttactttttaatttaaaaacaaaaaactaattaaaaaaaaattactaaataaacttttatttattttttgtttgaaaaaatacatatttatttatttattttggtaacgtataatatttatttatttgtaaatcaaaagaagcttctataaaactaagataccagccacttagtattggttcatcagtaaaaaaaaaaaaaaaacaaaaaaaaaaaaaataaaaaaaactaaactctaaac

SEQ ID NO: 207878 - DNA, 713 bp, Cannabis indica
aacaatgaagttaaatgttataatataagttttgttatgtaattgttagtgttaaacattactgctgctgcctctaaaatacaaagcttttattttggaatagataatttttgtgataagtttattttggaacagatctttttagaatggctaggaaattgagtttttaacttttgtgatagatttatttttggacaaatcctcttggaatatgtatactttatgttggcagtagaagatctaaacttgtcaaaataaccattttcatttcaaaatatcaagtattacatgcaaaattaataggaacacttgttcaagatcctattaaataacaaagttaaagtaggatcttaaaccaaaataatacaaaagaaataacaacgcaaatgacaatatttctacaaaaggcatttttactatttttatggcagctcgaacactgaggaactcgaatacttggactgttatcatgtaggctctcactttcaggtagctttttaagttaaggttgctcatttatttctctcacttacgacctaaaaattattgatatttcttgttccaaccgacgaatcttcttcaacaggctaggaatcacaacagtggcacgatcacacataggaggatcgatccattcccaaaactcacacccaccacgacgctgccaatcaagaaaaattggcatagtgcagcgaagaaaaacctaaaaaaaa

SEQ ID NO: 207879 - DNA, 999 bp, Cannabis indica
  modified_base (862)..(862): a, c, t, g, unknown or other
agttgatgattttgtaaatccgtgtgtgttgtgtcggtccaacccaaattatattgtgctttttaaaatatggattgcacatctcataaaaaaatagatcgtgtcgtactaatattttaaagggtacgtctggcacggcccgtaaacctgatgttttcgtgcggtactcgaaatctttatttgtgctaggccatttttcttaaatgggccagaccattttcatatttagcctcaaatttatgctttacttctcacaattataatgagtcaattgtttatttaaaactttaattatatttatctatataatttttttaacaatattttactaaaattattaaaatttaaatatttacttataaatacttaaatttttatctcatactttataaataaatatattagtgtttctttatatttactaataattttagttatagaattataatatttaatattatatttaaattttataatttttttaattaatttataattaacaagtacatatctatttattatgagtattattaaattaattatagtatttttttaatgtgtcgtgctgtgcttttttggattatctcgtgtagtgtcttttgagctagtctattcgtacttacgtatcgtgtcgtgttgtgtttaagaacaatattttttgtgttgtgtcatgacaatgtgtaacatcgtatcgtgtcgtacccaagttcatattattttgtgcatgtttgtgctcgtcctactagcgttcgtgtcagtttcgtatagtgtcaaagaatcccaacccatatttacagcactaaatcaaattattagaaacgaataatttgtaatatgcttggtgttttgcatttcaaaaagngagttttatttacaccttaaaaaatgtacaaaaaaaacttatactaataatttttatttattttttaattattgatgtctcttttttcccctttattattctttagaaaatatatactataaaatacattttaaata

SEQ ID NO: 207880 - DNA, 1315 bp, Cannabis indica
agaagatgaagagagaaagagaaagtgaatgagaatttctgagttgtttattccaatggggtgaacccctatttatacaaatacaagagttagatattaagaaactaagaaaaagggaaactaagaaaaagaggaatattgattacaattaatggtaataaataaaagatttggacatccacataattattaatatttataatactacgtcttatataatatggctaattaattaattcatgatgaataaatgtctcatgtatctctatatgagaattttttttctcatttgaatgttttctacaagtttattattcgttaattttcatggttttttttatacatgttgcttttgtaaattacaatattatttgcacattttactgtttaattaattattatgatgagctacatacactaataatatgttacctgcttgctagtttttttttaaaaaaaaaatagaagactgttattgaattgagaatcatatttttataattcaactataaaatgcacataaactaaataaaataatagaatgaatttccaaagataaatgagaaaagctcgtactcaatttgaagcttatacataatgtatataaagatattgtacttaattatatagagatatatgttcagctcagtcgatcatggaataaaaatacaatgaattcattaaacgctatgaaaaataataaaggtaaactgcattaataaataaaatagaatatgtaattaaaaaaaaaaaaactaatgggagaatattaaaaaaaaaggtatttaattaggattaattcaaaaatagttttgataaggtccagagagaatataaaatataagaaaattaattagactgcatgggatgaataatgaaaaatatttatacgtatatattaggatttaaatataatataaatatggtttttaataaagatatatgctaaaatttaatataattcgtgataatatttgtcatttcattggttttaaatatgtcaataaaaatataataataaattctttgtatacaattaaaaaattagatcgatcgccatatataattggaactctatatgcgtaaaagtcatgtaaataaatattatatactaatttttaaattatcttccaatatatatatatatatatatatatattaatttttgggtacctttgttttttgttttttttttctttttctattaaacaggatataggccgaaattgtttgttgtagagtttattaaatttgtataacaagttttaagttttagtattaaaaaaatagtttatatttttggttggtgtcgtcc

SEQ ID NO: 207881 - DNA, 714 bp, Cannabis indica
aaaattatttatatttattatatgatgaaaatattaaaaaataaaaaattatacataaattatatttttaatggttttatgatgcttgttctagtttattatttgacaattgttgttttaattattttaaatttttaattacatttaagagtattttgatagagtattgaacgtaatagacatttaaattttacttatttttgtattattatttttttttttgttggagttaatattaaaaattagttatgtattccaatccaacctacaacaaattgttttctttcccaaaaactcaaagactgtttcatgaaattaaaacctgaaatgttaacggagatggagacatgatggagtaaccaccacttcggtgacttgatgaaaacaattgtgggcatagcaggaacaagaatcatgtcattattacggtgtcgttttaactgcaaaatagttcaaactgctgacaccatccatcatcgattgattggattcaaacattttccttttccgagggagatagataaaacatcctgacacgtaagacttacaggtggcagtatagtcctagtcagcactgagctcctcaccttctatctttatattcccacgcttctgctgcttatgtctcccctaacttagaaactgtaacccaaaacaacacgaaaccactgatcgccccattcctctctctctctctctctctctctctcttct

SEQ ID NO: 207882 - DNA, 600 bp, Cannabis indica
tttttttatcttggagaaatttataaaaatgtgacagatgtcccatgaacttagtcattgtcatttttatccaatttttttttcctttatcttttgtgagttttcaccttaaattatgtttgttaatgactaatgagtaatggattttagttagttttggtgtcttacaatacatagctaatagaaaaataatttaggactttgagcactcatatgatattattacattagctaaatttaattaaaaattattttagaagtaaaaagaaatgaaaaaaatttatcttaaaagattaaaaaattaaaattttattttcttattaaaattctcattttctctttttcttttcttatatttcttttctttgacttaacactattacaaaaagatccatttgcgtccatataacctatgtatattttacaaaacacaaaaaaagtgaatatttacaccaattattaaccggtagttctaattgtttgaacctattctcaaccgacacaaacatgcatataattaatttttatacatctttctatcgtttatcactaacacataaaaaaataggtctaaattacacgagcccaaatcttcaccac

SEQ ID NO: 207883 - DNA, 783 bp, Cannabis indica
acgtttttttttaagtggtactaaatagtatcttaggtttaatttttatgaaataaaacataatataataatttaactgatattatgaccaggctaatttattattatttttttgtactaaaatttagtatcagattagttatataaaagaaaattgataaaaaattaagctccaagatattattttgtaccaatttttaaaatataatacatgatttattatttaacaaaaagtaaaaaatccaattaattattttacaaaacacaatgtcaaaatgatcaatatttggtggaagcaatattagctaaagctagctattcacggtcggaacatgtaccaaaagaaaagcataatttaaaagtttgatcataaatattttaattgaaaccatatcatatatagcaagatgatgaggtggtgtggctgaaaagtctatgaaaaaaaagaagaagatcaaactgattaaattgccaaaatttaaattatctttcatattaaaatatgaaaggtaaaatatataacaataaacaaattaaacggacaaaaatggaaaaatgatgcaggttggaagagctagtatagatacttagtgttcgtgtaagttttaccaacaaatcatgatctttcatttccaagttggcataaacaaaagggattaactaattgaaggtgaaaaaagataatactactataaaattggactttaaagatggtttttaaagtttttcagtgtcaattttggcaaaattcgttactatacactattctaaacgatgttataa

SEQ ID NO: 207884 - DNA, 972 bp, Cannabis indica
aaataagtacccaacaacagtacctgatgccaatgaaccggcgaagcggggttgggcggagaacccaaattgagcagcagaagatcgataatttagggcttttgtgagaatttgagaaagcaacaatatctcaggcgaaggacccaactggtacaccggaagaaaattaatttagggttttttgatggaatttggggaataaacttaaattttgccggaagaaccaactggagtgagggaatatagagaatttaggatttttgaatgaatttgagaacgaaaccatagcttcttcgccggagaaggcaccgtacatggattttttttttttttggtgaatttgagaacaaaaatggataattatgttttaagtttcagacaaaaaactgtaacttgattaatatgaaattattttgtccagaaaaatatataaaattaaaattttatgacgcttttgcccttgtattttcataacgtggcaattatagcattaatgcatgtggttatctatctcattagttgagtcacatgatgatgacttgctttgacaattatattaatttagaataatttctgacataattaatatttaaatttatctaaatttaatttttaagtgttaataaattattatgtggtaatttttgattagtctaaatcatgaaatttttattttattttttaaaaaattgtttagacataccaataaaaaaataatacctaaataataatttaatatttaacggtcaaatacttacaaagttttagaaatatattttatttattattaagtgttaaaaattaaactttagataattattcacaaataaaaattaaacttaagtatttatactacaaattattcttaagtattaaccatttataatgtatatgaatttttagtacatttatagtgtaaatgattgacaaacttatacatttaagtgtcatgatgtagatctaaaataaaat

SEQ ID NO: 207885 - DNA, 781 bp, Cannabis indica
ctactatcatgacatagttacctcttacgcgttaaagcgccaagagaggcatcctttacatcaaaagcggcaaaacgctttgaaaggagaggttgcaaattgtaaataacaattttattagagaagattttatcccacatggatatcaaaccctgttctcgttcctaaaccaaacggaatgtggagaacctacatagacttctctgacctgaataaagcatgtctgacagatttctttctgttactaaggattgatcagttggttgatgcgattgtagggcacgagctgataacctttatggatgcatattctagacacaactagataaaaatgcatatcccaaatcaagaatgtacacgcttcattacacttatacagtactatattttttcaacagattaataactactacattctatgcttttgttgtagctgttactacaaattttattaaatgttgattaggttgagtaaaatgaaacatgtcaatatattagcagtctaactcatttttatttttaaataattgttaaatggtcttaaattaaataacaaaaggtcttgaaatatagaaaaaaacaatagaaatatgttattatttatttattagaattaaataattattattttttttcaattttgaaattatttaataattatttttattgaaagtgtacaattaatcaattgacatatgttagtttagtcaaatttaataagatttattgaaattgatattaaaagttgcaagaaaaacataaaaataatatttaatttatt

SEQ ID NO: 207886 - DNA, 505 bp, Cannabis indica
agagataatgggtggagtttgtccggttaggtctacaattatatatgaggtttggcttgtgcttttcccctttggaaattaggatcacgttcatctcattaactttaattaataaaacacacacaaacacacacttgaagcatcgtgccaattgcctgtaccataagttaagagaaacaaatcataagtagtaactgaattctcctcaacctccaataaaaaaagaccatgtacaacaatatgaacaaaattgagttttcagcctacaaaaaacatgttgctcatttgagagtattaagtgatataccaactgggtttggaacatgtttagtttctctattaccatagatagaactcacaacctaatattatgaggttgactcattgactgtcacactcacttaaacttgatcactcaacaaaggcacttaaaagtgattaaataaatgggtttaaatttatactcagaagaagtaatatggcatcatcaagtcttggataaaaa

SEQ ID NO: 207887 - DNA, 1527 bp, Cannabis indica
gcttatatacaattatgacccaaagtctaaggtgggtggggtgccaaacaagtcctaatgtttgggctttttttttatttatgatatttagagaaattataatttgaagttttgaatttataattgatataaatataatattttttaaacgatacaagtaattaatatttttaaagattgtaatttgtgttcaattttgtttgtcacaaaattttatagtgtacttaaaaacatgacacatgtaagacttatatctttacatttattgagttttggacggagcatagtatcagttaattctaaaattttttttttaataaaattctaaatagagtctatacttgaatgaaaattacaatttttattaacgttgggtacttatgctttttaaaaaaatcattaggtttatgatggttacaaaattaaaattttaggtatttatgctgtaattatcacttttatttatagtatttagagaaattaaaaactttttttatataacggtatataatgtagtaaagagtattattgtcaactttccatttacaaccttttaatcaatcttcatgtctgaaaatacatgccggaatatttttttttaatgacggtattcgttatccttacaatatcatccctgtaaatttttgaaaattttaaatagtttaacttttcacaaatatttatatatattttttcaaatgagttaatttatcattttcttatttataaataatgagtagggattaattttaattttttttttaaggttaagtctcttaaagttaacttattatgtaagttgaagagctacatcataactctttaccacaatacttaaactcacattaataaaactattttatttttgtttctaaataaattatcatactagttaattaacactatgctaattattattaaaacaataagtcaatgtccactataatagttgagtttgcaaacctaatccttccttaggtactaaattattaatggtcaaaaggtttttgggggtgggctaatcttcttcatagccatcttcaacttctctagggtcattttctatcaaattgagaatttcttccaaatatttattaattcaaaatattgtgacccacaatcattttcccaaaattccactcaattaaaataaccttgtttttcccttaaataaataaaaattaaatccaaaaacaaccaacaaattacaaaatattaaaaaaagtatattgggtgcttatatagtggattctaaaaataagtgtactcatattttttttttttttgtattttttattatatgaataattttatcctttaattttgttatatgatgatgcatattatatttatttaagataatttttaattttaagaaatataaaataatttataatataaaaataaggtttaaataatttattttacacacataaaatatagagaagcatgcatgtgtaatagactatttaatactattttagaccatgtgctgtacaaaaattatttattggactttttgtttta

SEQ ID NO: 207888 - DNA, 892 bp, Cannabis indica
actccccttcctaccaaacatagtgttagttggcttctacttagggtgacaaaacaggttcggacacgatacatgaacatgaatacgacacaaattttatgggttaggtaaaaaaaaattagatgcgggttgaaaacggatcgacacgacttgacacgaaataaaaacagatcaaacacaacacgatccgcttaatacgaatttgacacgttcgacacgattttttaaataaaataaatattattaataataatatagttatgtaaaaagtatatacttagtgatctaaagttaaaaaaaaatttaatttaatttttttaaaatttaaattaaattttttaactaaattttgatatttattatatatctaaatatatttaagttttctaggtgaatttaaatttattatttttctctataatattagctttaataatagaaaaatacgtcaaagtgggtcaacacgaagacaacacaattttttatgggtcgaattaagattgagaaaataaagactagtcaaaaaacaggtcgacacctgacacaaaatataaaaacaaatcacataaaatatgacatgaacagaatacgacaaaatgacatcaccccttctactttgcactggcatggcatggcatggcatggcatgcattgaagtcaaatcatttgcagttaattatctacctaataacaattatctacctaactaaactgctcacaaattcagttaatttactcggactaacagtctcgcggcttttcgtcaatttagctttaatgactttacttccttttattgaaaaactaaagaaaaatggttagaagttacataataccattcgaataagaagatgcacattaattccatctaattacattgcattatcctttt

SEQ ID NO: 207889 - DNA, 734 bp, Cannabis indica
ttgagagggatgagccacttgccaagacttaggatgggggcaaagagggaaattcccaaggcaggtctttctaggccacccactgtcaacaaggaggaatatgatgccctaaagcgaagggtggaagaacaggaagcacgaaacgaatggcaacaacaaatgatgcaggctcagaatcaaatcatgatagcgtattttagcaacaaatgtgcatttggccaacatcgttccaggattaaacatgccttcgatgcctctgattccaccattttggtttcctagtgctgggtctacttcacaaactgcccctcccgatgatgacgatgacgacgacaatgtcgtggacttgtagttttattttttagtttgcattgtaaataatattaatttttataaactaattgtacttttatttagttttagacaatgtatacagttttataattataatataaattttatatttataatatatttcagtgtatatttatttattattattttaaaaaattagattttattttcaattatattttaattttattataaatacagttttttttttttaaaaaaataaaaatattttgccgacgaactacatctcctcggcaataataaaattattttttattgatgaagttttgccggcgaaatattgcatcgacaaaacttttgtgagttaaaaaaaataaggcgtaaattggcgcaaaagttttgccagcgtaatactttac

SEQ ID NO: 207890 - DNA, 1073 bp, Cannabis indica
agcggcgggacccgccgctaataagtggacgggaaaattcccgcctattcagttcaaacatttttaaataccaattagtggcagagcattagcggtggaccccgccgctaataagtctatagatacccgacctcaccgacttattttccctacttttactctcagctcttcaaccctctctctcaacccttctctccaccaccaccaccacctagtaacaccaccaccaccacaatatgtcactactacaaaaaatatggcccatgtttttggttttttcactgaatcgtctttttgattaaataaaaattcagaatcgaagatattttaggcgaagattataatcagagatgtaagggacctatatatatcttcgattaaataaaaaaaatatggaattcaatattaaattgcattaaataatagtatgacaaatttatatgatgttagacatcactaacatttcacataacttttagatacattacatattattgttaaaaaaacctgagagaaaaactacaaaataaacacataactaaaataattaataaacacatatataagacaatcatacaaaatacataataattacgactacagtttgaatgacagaccagaatcatttaatttttctataattatatttttttacacgctctaccatagatggagtaagatgattaatccaatcaccaacttgaccttttctaaagaaaattttattatgaatgtttggccttacttcaccatacttattcacatccaaattcttcaatttactcaaactacacatctccaatatttgctcaacaactccatcattatcttcctcttgggagaaaggcattcctacgaactttgctatctttttaagttgaccaacactgtcttttttaggtcttcgtatttcaaaaacaacacattctcaggcctcgctaaacttgctttccagtaccctaaaacatgctcccaataacggccaaacggtaatgtcccccttaccaaaacactgtccaccaaaatattcaaatagtccactcgcgcgagagacgctctggatgaccgtttgc

SEQ ID NO: 207891 - DNA, 947 bp, Cannabis indica
tgtatagtgaacagtgaaaatcgaagattatttccatatcgtacgtcaaagaaagggatgtccttaaaagagacttatcgaaaaaagaaaaaaaaatagaatggagaagaacaaaagacagaagagagacatttatagtctcttaactcttaaataaagatttaaaagttctccaccgactatatttattttctttttccaattaactgctctataattaataaattttgttgcctagcacatccaaaaatataccctacccaaaaacttgtactaaatatatttttagtgaaagaaaaaacaattctacattaatttttgttttttttttttttctaatggttatatttatttgtatgaggactcttacttgtattaatggtactctaattttctctcaattttaatcaaacatttcatcaactatcaaccaaaaagggaattagcaaaagacaaatgaggaagatcttttgtgcaaaattatgaagttaccaaatttaatttttgtatttacgtaagtaacatttttttttgtgtttcatttgatttttgaatagcctaatgcaatatcattttctagaaaagaaaagggataattacataaatacactttttttttgtaaaaaaaatatattttaagtttaaattttgtttatatattttttatgatttttcatagaacaacacaaaaacaacaagaaaattaaaatgaaaataacaccaaaacaacaataaaaaataacacacagataataaaaaattaaacaacaaattaacagttaaacataaaaagaccgtatttttataaataaaataaaaaatacttaaaatatttaaaattccgtaaaactattttataattttttgttatttttgtatttgtgaaataattcccaaagacaaacatattaacatagtatacataaatttacaaccctaataaaaat

SEQ ID NO: 207892 - DNA, 1431 bp, Cannabis indica
ttttgtcaaaataaaacttaataataatttgatgttatgacaaaactgattatatttttgtatctgttcgtgttaaaatttcttaaagttggttatatttaaaaataaaattgttgaaaattgacctcagagtcctatttttaccattttagaaaatatatggtctattttgtgaattaacaaaacaatagaatctaaaatagtatttactcttaaattaaaataattttcaaaaaaatattaattgaaattacacaattaataaataaaaaatttatttaaaaaaattaataaatattaacattttaaaattattatttttaataaataatttataaaccatttattttttatttttatttaaaaaaaaaaaagctcttctccaattattagcattaactttaaataaatggaaaccattacaaaatgaaaataattatttttcgtgtcatctttgttactaccaactttattttaattttttttctataaataattaattttttttgtataataacaaatttattagtaattaaatttataagaaaatattttaaatttctactcaaaatttaacaacataacaactctatattaacatacccaatattttaaacctatatcatgacattccacaaaagaattaacataagccattaaaaaatacagattatcaaataactaataaatatatttttagtgattttattaacacaactatataacatacattttctaattccaatttaacagaaaatatacttttcacaaatataaattgtaaatcaccttctccaatttgcaaaccaaaataaaaataatgtggcaaaaattattgaacctcctttcacaatctgaaaaatatattaaaaaaaaaaacaaaaaaaaaaacaaaccaataaaaaattcaattataataaaaaataaagattcttaaaaaagtatgtatacagacaaaaattatttacaaacaataatttgtacaataaaaataaaatatttatatatcaaaaattaaacatacatgtattgcacttaacatcactttattgaacctaattaaaaaaataattatacataacatcaacctagtatctattctatataaagtgtgcctatataacagaattcttggttttatgaaaaatttatgggtgactttttatttatattaaaaataaaatggtttattaataaaaataaatggtttatgagaaattcatggtcactttttatttatatataataaaataaatctcattaaatccaaaaaatacgattagggtttttgttatttaattaaaattccattcaatataaaatcatttttaacaataatatgtgaattaatgtacacacaccatcccgagctacacctagccccaaaccatcgatccttcagacgcaaagatcgtaatcgcaccatcaaca

SEQ ID NO: 207893 - DNA, 666 bp, Cannabis indica
ccaaacatgacttagtggataatagatatgagagacgcatagaaattttatatgaataggacaccttatggtacagtattaggtgtttattgaatcacatccaataaatcttgatcaatccaattcaattcaattatttattaaatgttggattttgtcaaccaatccaatcaatttgaatgagtcaactaatccaattaaagcattggattgaataatgttccaaccttagatgcattaactaattttaataagactaaattagatctatccaattttttttagccatcatttaggcttaattttattatataaatataacaattcaaaatttaattgtcatagtaataagacatatatataaaattaaaaaatatattttagaagcatataaatatataaaattaataaatatttatatgtttttaaaatatatttataaatgctataaatatgtgatttgtgaaattttatatttagttttatgtaatctcatgggtgcataatacaattaattaatatttttaaaataaaataaataaactaattttaagacatttaaatataattaaatgacaacttgatgataattggaattattttattggatcaaatatctcattcaataaccgatatctaattggatatttaaaatttacatccaat

SEQ ID NO: 207894 - DNA, 525 bp, Cannabis indica
gtgcttgactttgtaatatatatctttttgacattacaaagcaagaaaataaggttttaattaattagatgatgatatataaatgctttattattattatattattacatatactttaattaatggtagaaattaatggagtgaaataaaattggtccatcaaattaatttttattatataatatataatgaaacttaaagaatatgtttttgtttttcctgtattttagggatttcatcataagtatacatatgtatttcattaaattttgtgttcagacattataaaatttaacttctattcaagtgctctttaatgctcattttgttagatatttcagctctcaactactaataaattcttatgtactaacccataaaaatttgattttttttctttctttctaaacaaatcaaaatttgatattaaatattgggcaaaatgatcattaatatttcatcagtcaaattcaagagggtggttcaaatggtaatatatatatgcgatatttgcgaagaaatttt

SEQ ID NO: 207895 - DNA, 635 bp, Cannabis indica
attttattttattattagttatttggttatgacatgctctttcatatgcactttcgtggaagtagtactgaagtttcttaattagtacaacgtggcagtctaggtggaggtgatgaggtcattgtaatgacgatagggctttatatggaattttttttggaatattatgatgagtaatttgcatactaaagtttaacttgtagttgcacttaaatacttaaaaggattgctttcgtaatatttatagttataattctgaaatttttgtaagtacttaatcgttaagcggtaggtatgtattcacatgtcactatctgattggcgcactacttcattttattttatttttatttaaaaattaaataaaaaatcatttgaaagctactaaaaattaaaaaaaaattattgaaattcataatttaaaataatttcataataattaaaaaattaacaaaattgaaagttaaaaaattatttcaaaatatcacacatgtactctatgtcttcaactcatccgacatcattaattggccattgttggcgattcgactcgttcataatcgacaaacgagaccccaccactgagatcacgagtatccaagaagcacaaagctagttctccctcgagttatcgc

SEQ ID NO: 207896 - DNA, 757 bp, Cannabis indica
cgttaccaaaatagataacaagtcagttagaacagcttctaaactgaaagtgtaatcagaataaaatatagaggctttagcaaagttatgagccaccatattagctgatcgtctaacaaaataaatatcaacattgtttaaatccttaagcatatccttacaaacattcaccacttgaccaaacatggatcgcatatcaattgtgcttcgtaaggcttgaactaccgggagacaatccgtttcaagaaccacatgtgtccattgtcgcaccttgatccaacttaaagcctctcgaatccccatgacttcagctgtagcaggaggaacttggccatgaaacaacttagtgcaaccttcaactaacataccccgagaatcacgagccactaaaccaatcccaaattgtcaggtttcattgaacaaagtcgcgttaacatttaccttaacactatctacgtgttgaggcacccaatacacagctgcatcctctggtaaaaaaaccagaaaatgtaatctcaatgattgatttttgtgcatttttccattggttaaggaagctctttgctaacgaaactacgctatccaccccaactcttttatcttgccaaaccttgtcatttctcgcgttccaaattgaccaacacaaagccaccagcagctgaaatttaccaatgcaccaagacaaaaaaaggttgcttcctactgcatatcagtccatatcccaacccgatcccaacaagccttagcagtaggacag

SEQ ID NO: 207897 - DNA, 773 bp, Cannabis indica
aataaaaatggaaagtagaataagacaaaatagatgagtacttatgtcattgttatattatatggtcttatctctaccacgtgattctctagaatatacttcaactaataatatattatcctaattttacaaaaaaaaaaaagtaggccaaaaatatttaaatgaaatctaactaattaatgaaaattttaatatttttattaaaaatataaaaataataattttagtatgtaaaatataaaaaaaaaataataaacgaataaagatgtatcatttaatgttatatttaaatataatcataaaacaatatcgaaatgatataaatataatgaaatatatataaattaaaaaattaatatgtttatgatgattaacaattaaaattgtatcaatttttggtacattattaaattattttttaaaattataatttaactttaaatcactttatattttaatctaggctaattagtaattttttcgcttgaactttgacatgtatcaaatcgtgccctttgaacttttttggttgttaaaaatttcctccgaactattgagattgttaaatttaaggacttctgtctaatttcattcaatttttactgttttcagttgattgtttatatactaaaccatgctccacagactttgatatctaccaaatcatatccctaaaactttgatatgcactaaatatgtccctaaactttattcatgttagaatttttttactaaatttagacaaaaagtccttaaatctaacaatctcataa

SEQ ID NO: 207898 - DNA, 618 bp, Cannabis indica
attattattattataattattattattatttccctactttataatataaaaaaaaaaaattacacatttcattattgtcctttttcataattcatattgattaataattattattattttgccaatatggtttaagttgtttggtacaaacactaaagcaaataaagttgttgagtcattttacttgtataaataatgacattaagtctaaataaaatatggcttggcaaaaaaaaactaaatttttttatatactatactcaattatccatttctaaaaattgacagacatatgtttgaaaatgggaatatttattatatctttactaggaagaccaaaactagattcaagaatctatgaaaattgaggaaacaattgtaatgtaatttagcttggatcacctacaaacatgttcatggtaattgaatagtctcttgtcaactcatttactcatgtttttattttctttaggaaccaaaattcgggaaaacgacatgtgtaatatattttattaaaattatttattcatttaatttactaattgtataaaatattaataataagtaatagtaatcacatggaaattctaaagtaaccgcaccaatttcattaacttc

SEQ ID NO: 207899 - DNA, 654 bp, Cannabis indica
actttgttaactgggggaaagagggtagggaacaagggatattacattgagccaaccatattcactgatgttaatgaggacatgcttattttcaaggatgaaatatttgggcctgttatggcactcatgaagtttaagtaagtcaataattaacttaaataagctttattaatattgctatttgtttaggctaaataccattttgaacttagtgttttacaaaagttacacaataaattctcttctttattaaacgacaaaatagatcatatattttctaaaattgtaaacataagcccttgagctcaatttcaagaattttattttttaatataactaactttaaaataatttctaatacgaataaatacagaaaatgtaaccagtgttatcataatatctctagaagagattattattaagttttattttaaccaaaaatcaatttgagatcttatttgtacaattttgaaaaatacagagtccatatatattattatttaataaaatagagagtctaattggtaacttttgtaaaatacacaatccaaaatggtatttacccttttaacttatttattaatattgtctaattgagagaattaatttcttgtgaattgttaggacaatagaagagggaatagctaaagccaa

SEQ ID NO: 207900 - DNA, 575 bp, Cannabis indica
aattccatttgaaattaaaaatacaaaataaaaagttcgaaaaattgatctcgagttctaatgtcagcttgagttctaaaaaattcagttccattttaatatatttaatggcttaagcatgaaagttaaaaaatatatatattttttatttattagctttaatttatatatgtatatattaagaaaaaaatgaaaaatgaaaaataagcaagccgtttagcataaaaaggaaagagttcttaataactcaaactaaaagtctaataagctaacaattaatgaagtgtgtactaagaaaaatgatagattttcaaattaaatacacatttgacaaatcatactcattcataactataggctaaaaatctccccgcaaaaatttggcaataacaaactcattatttaaaacaaataaatagaactaatcatacaatcaacataagaagtagaaaatcaaaaaatatagaactaataacaattttgagaatctcctgaatttgacacccaagaagagagaccatgacaacctcactcgcttaagctatttgataaaacaccaacaactaggggcagac

SEQ ID NO: 207901 - DNA, 725 bp, Cannabis indica
caccctataagggtaatgttattaatattttacagacttaaaaacgaaaaaacctcaataacaaacattaagaaaaaacaatactaatcaagttattttagacttaaaaagaaaaattatcatctaaacattttgatattttatgaatataatagatttccaaatatactttcacatattggaataaaaaaatactacaagaattaagaattttagtggaaaaaaaaaaacaaaaaggaatttaattgttatgtatgtagaactcaacaatttgattgtcactttctttttttaataacagttagtttgttatttcaagtattgaattaccaaacaaagtggaactcatggatatatgcgctaaaaatcctaataacaataagagaaaattgcaaccaaagtaccaaactttcactttaatagcaggtaaataccaaaattttgataacaaagaatacaataatgactcatatcataactcaggctcctctagctttcaaaaatccctgtatgttactattcaataaaattataacacacaacaaaattgatcagttgtactatctgctagtttcatgttttgttttgtctacataatatattatattagcacagctccttcattttctagggacaaaattgttgaaccttcaaagttagtaacagcaaaattacaagagaaggcaatcaaagagttctctcatatccatttctttgatctgaag

SEQ ID NO: 207902 - DNA, 556 bp, Cannabis indica
atatatatatattaatgaataagggtatgaatatttatggtatttatagcaaaaggtggagatctagcattaaatagcacacaaatccatcaaaaaagaaaaagaaaaatgttaaagggcaccgatgcctagcagcctcctatgtgtcagtatcgctattggtcctactaagtatcaggtccaacatagtttaatataatagattttagggtgtatcgttagctaatcgcaacgtcacatgtctaaaaaatgttaagcaccactggtacataatagcaatgctaaatctttttttacaaatttgactcatttaataatcttctttcttcattgtgtttttttttttttatatatttgtatatatataattgcttttgtttttttctttctaatttgtttttgtgtatataatgtatgtctgggttttttttgtcttttcagtgtttagacacactcacctctctcatggctaaaattcagaagatttgaaactaattacattttcaatatttttggtttaattttctatttcttaattattattttctagcttata

SEQ ID NO: 207903 - DNA, 1185 bp, Cannabis indica
ctagttctttttttttttggtataaataaaatgttgttttttattctgtacatgagattaattagggtcacaaacgaattttcggatgtaaattgttattatttttgtctattatatataggaacccaccacatataatcattctttaaaagaaattttgataaaggttatgaagagtggaagcttaccttggatattacataaaagaaaaaaggttataagcaaaagaatgagtaaagtctaagattctcttaattattaactttaatattattaagagcaactttggtatataattatttctcacttttaaagttaaccgtgcatatgttatacttttaatttcaattttccactgatgcatcagtgattattttaaagtaattctttgtaaaagcatataaaaaaatttaacaaaattaattaaatcccctgaaagaaattttacacaatcaaatttactattggaaaataacttaatgactgtacataacataaatcaaactagacccaaaagaataaaaacacaaaatcatcattaaataacaattaagcataaaatgatgagatatatacaaggtgttaactgaatcaaatgattcatatttttttcttttatattcattatatataaacgtacgattatatgtgctacacaaatcaattgtataatatttatcaactaatttaaagacaaaatcaatgtgattatattcgtatgatctaataaatttaaatagaaatagaaaaaaaaaaaaaaagtggggggatattggctttttttgttgttgctctttttggacatttattaagaggaaaagtttaaattgacaattgggacaatgaattattgaatgttagagagtgaaagaaccccacacatagagagataagtggtgtactattttttatattgtgattttcttattgcctctttctcaccactgaaacagcctggaaagtagactaaaagttctcttctttcatggaataaaaatctggtttcagttttaatttacatggaaatttcaaaaaaaatatataaatatattagggataatacattttgagtcaaaactataggaccattctctcttcaatagtttgatttgatcaattattccattcctttctttctctctctttttttttttttaatttatatgtataactagcgttgtaatc

SEQ ID NO: 207904 - DNA, 1214 bp, Cannabis indica
ctctagctaagccatccacaaattggatttgattacggttaatataaagaaacttacaactactgaacttactactataatctaaaatttccaaagactagtgaagaagtttccaatcctttaggcattgattccttgccaaagcttggactgcgatttgacagtccgaaactaccataatctcttttccttcttcctgtagagcccactccaatgccatagaaatcgcactgatctctgcctcaagagcagaactagtcttcaagaatttagtctttgaagcccaaacccctgttcttctatttatcccaactgcagctaatcctgcctcacctttgaaccaagatgcatctgtgatcattatccattctgttgcctggtagcttgtgtccatcctctgtactcctcggtccaacttgtaacaatctatctctgcattttcttctctagtgaatcttgagtagtcttcaaaagccttcgacactctcattaataactcttctatattcactctcgtcccttgtcgattgtattgattcctgctcatctaaatttgatcaatgacacaacctaaataagtcaagatctcctttttatcgatctctgccgcatccacttcctgaaccaagttctggattaaacaaagcatgttttcccaaggaatctgctctattctcaaaggaaacctgcttaaaaaccaaagagatcttgccaggctgcaatctctgaaaatatggatgcaattttccaagtgttggctgcagaaggaacactccttatccactagaaaaggcagtctttccttaaccggaattgcattattcaggactctccaaagtaaaattgaaattcttggatgtaaccccgaattccaaagccacttccaaaccaactgattgtctctaaatctgaaattctgatcaactatgtaggaacttttgactgagaaatttccatcttgttttcctttccaaataaccatatccatgttaggatgggggagcctaggaatctcaagaaccttatctcccacttcctttccaaaaaattgtaacaccacttcctcattccaagcattccctatagatagatctgctactgtcctagccgtaaatcctcttgttcttagtctattcattaactccttaaagtccttgaatccaaccaaggtatccaaggttgattccaatatcaatcttcttcccatctgccgg

SEQ ID NO: 207905 - DNA, 1213 bp, Cannabis indica
gtctattttatagagataatggatactccaaaatcagagctacaaaagatttgaacacaaagagaactcattagttaattttcttacataaattcattataaatgaccgaaattctatttgaatagatatagaaaaggtgtagacgaaatgtctagtcagtattgtaaatctaaactccttcaaagtcaaattcatctcgcaaatactccttgaccgctaataagtcaattagccgtatatttcaattcaaacaagatcataataaataaataaataaaggaataaaatacatttatttaaatttatttcaattttaaaatatcacatatatataatatactatttatgttgataaatattgactaaataaaataatttattatttccttataaaactaaactcaacatatatttcaatttttaaacaaaaaatttagtcaataaatcaaacaaaattagtcaataattataaaacttttctaataaattagccaaaaaaaaaaacttaataatcaccccctcatgaaaacttgttaggaaaaacacttgtctattttttttgacataacaggcaatgtcagtgataggcaaaactcaacacacttttatcaattttttaaccgacagcaaacaacattaatgttagtgatagaaatgaagttcataataactccccttgaaaaaatgcaccaataattaaaatattaaaccaaagctattgataatgtcaaacaaagtttaacaagaaataccaaacaactcctcttgaaaaatatgatccaaagtcgtaacaattatgtttatcaagtagacaaagaagactaaacaaaattgacggaaacaaatacatacaaaatagaaagaaaaattaaggtgaaattgggttttcaagagatgaaagaagtaacatcttgcttctagtttaggtgctatttgtataaataaatgtgttgatataattattcgtaaattgatcaaagaagaccataaatgaagcaattcaaataaatacttagataaactagtttaatgatttaatagtaaaaaaatgacgcaaatatttattgtggttaattccctttggcgataatagactagtctgcttgtgtttattattgctttcaatatctcaacaacaatgccaaaattatgttcccaaagctctctcctcttaagtaattacaattaagcatggtactctctctctctctc

SEQ ID NO: 207906 - DNA, 592 bp, Cannabis indica
tttttttttaaattttgaaatggaatttgaaattttgagttttagaattgtttttagctattgcgttatattagtgtgtcctttgaatgagatatcgtccgattgagcaaaactgtcttttattttaatttaaagttaaaaatgttgttttatttttgaatatatacataataatattataaatttaataaaaaatattttgttaaatagcatatttcgataaaatataaatttttttaattttttttttatatagtggcattttatataaaataattatattaatctcatgaattttatattgcatcatgatatatcatatctaatagaaacattactaacatcaataaacaaataacactcaaaaaaaaaaaaatacaataaacaaatatatttttaaaaagttaaaattttacttttctacttggggtaacgactaacaagagccttaactaagaaaagaaaagaaagtaatattaccataatgccataagcaagaccttgaattccaacactggcgaatggaggcgaccagcaagctctaatgcacccaaatggccagtaacatgagcgtgacaaagctgagcatgta

SEQ ID NO: 207907 - DNA, 617 bp, Cannabis indica
gaccataaatggccatggtgtttgcatattcttgagcttgtttagggtagcctggggtatttttgagaatctcttacatttatcacatctcttaacataatttatcaagtcttcaattattattggccaaaaatacccttgctcaaaattttctttaagaagttttaccctccagtgtagttgccacaaaaacccttatgtagctcaaccatgagtaacttgctttcttcatgcgtgagacacctcagaagaggcattgagtagcttcttctgtacatcactccatccatgatgataaaacagactacttgtctcataacttcctctcctcattcctggctgctggaagaataccttgctctaggtattgggctattggagtcatccatgatgaactattgtttatcaagagaatacgcccctggtctacctatgttgggttgagcaagatattcaacaggaattatgcttagagctttggggtctgttgtactagttaatttttctagggaatccacgttggagtcttgctcatgtggtacttgttgaatagagtagtgttttagttgggctaagagatccttagttttgttcaagtaagctatcattttaagccc

SEQ ID NO: 207908 - DNA, 888 bp, Cannabis indica
cagtgcattctagctaaatgaactcaatttcaaagaggaaaaaaaaagtttaaactaaagagcttcttcaaagcaccaggtctttccacttcaaacatccaaactactttagtaagtaatggcaagtaagttttgagacaaactaaccaatcgcagattccttgtcatcgtttcttgttagctcgtctgcttcttcaatagtctctaccgtgacaggaggccctccaaagctcatatgattatactgcaataatgatgccttgtcgaactcataacccggttctgaaaacacacatacactacttcaaaaaacagcataaaacttaaacaaaaaaccaaatgtgcatatctcaatgttataacattcttcttatctcgacaaacaccaacaaaacttcattttgaaagactaatcatcaaaagaatgctcattctataaaaggccatgtcttgataatgttaagatagttccaacttaatatctattggcagtgataatgcaatattctaatatatactaatcttaaatcaaatctctaacaactcaaaattaattgccaataattagagaatatattcttgtgaaatactaagatgcatatgtgctcagcaccactacaaagtgtcatatcgtataataacaaattattagtttaactgaataactaagtaaatctaataagcagcgataatacaaattccagttcaccgactaattctaattgttttatttccaaagcaaagatatccacattacagttccatctattcagatattctcgtgtaattcaatattgggtcctatctgttctaattattattcaacaatgattatagtaaaccgctaactcaacacactcctacttttacttacaagcaaagtaagaa

SEQ ID NO: 207909 - DNA, 935 bp, Cannabis indica
tacatttttatacatatttcttaatggcccaaatatccaaatcagaaaaggagaggcaaatctctattaacatagaaaagaatcattggcaaacaccccatcttaaacccaagagagctctattattacaaaatcaaccatattagtatttctaaattgtgacataaaactttctatcaattttgtaattaaatatatagaaaatgaacatgtttttttttgttaaaagaaaatcaacaatttgcttattaaaattataatttttcaattgtataaaagttaaaattaatcaccaaaatcagcatttagcctaagttgatcaatttggttactaagtgtagttcttaaaattagtaaaaacacttagcaaactaatactctaactataaaaactcaaataaatccaaaatagtcaagacaaaaaaataagaatataaaaaagaattttataaaaagaagggataatattattttgtaccctatcttttacaaaaataattgattggacactctgttttggtaaataacaaaatagaccatatattttttaaaattgtataaataataacctgaactcaatttttattttaatataactatcttgaagataattcatacatgaacaaatataaaaaatgtaatcaattttatcatagttatttatattaagttatttcatggtactatttaatactattttaaaaaatacatagttcaatttgctatttaacaaaacaaatgttccaaaataatatttaccctacaaaaattccaaatatatttttttctttctaaaattgaatataagccgttggaagaacttctcaaaaagtgttaattttctactttcccaaaatcacaaacggaaacgaaatgggccttagaaaagaggcccaagcccatacaaaataatattttaattaaaagaaaaaaaa

SEQ ID NO: 207910 - DNA, 726 bp, Cannabis indica
tctgttttctctgctttcaaactccatcaaatccaaaaaatgctcaaattaaagaaaacatacagaagaaaagagacgataatggctgtaaatttgtaaaaaattcaagtaaccttgaaagcatggaactgttccgaacgtttctcttttcgctgcgtaaccgtattgagatcggctaatgttatccgacgtcttttgaaaacgaatcctcccaatcccaccaaacaaacggctaaactctgtgtttgaattttttccaaactttgaatcgaaatccgatggattcggctctgatgtatcaccggagactggagtaagcgatcgacgatgatcggagtcagattttccggcgagaagtcttctttgggcagagagacccaaccattaaacaccatttgtgtaatgtggaaatcgataaagtacgatgtattttggttctaatacacaaaaaaaaaaaaatacatatttgataatgtattcttttattatttaaataataataatacggtaaataaagtttaataaaaatcaataaatgataataattagtgtcattataataaatacaaaaatattatttattgtgagctaaatttgacattatatcttgtgtcaaatttagcagtatttttttagaacaaatataatttgttttaagtataatgaatatatttttttttagccactatattagagatgctctagaagaattgttaaagctttggc

SEQ ID NO: 207911 - DNA, 669 bp, Cannabis indica
ctagctttaaatctttcaacactaccttcagcattcaattttatcttataaatccatcttgagccaataacacgctgatctgcaggcaaagaaacaacaatccttgtgtggtttttctcaagtgcatcaatttcaatatccatggcattgtcccatttaggaatgtcatgagcttgactgaaaaactcaggttcaaagtgacttgaaatggccaagaaaactgctcgaaaagctggtgacaatctgctgtaattaataacttgagacaaaggataaggagttatcaaagaaccatgagaagacaaagcagtagggttaattaccaaataacaatgtaagcattcaaatatgagggcttgttgatgtgtctacctgatttacattgagtagggaaaggcatatgtataggatcaagggtagacacaggtagagattcattagaagaaacaagttgttcattatgtaatggctgagcatcagtatgattatgaatatttgagaaaaaaattctcatatgcagcaggtactcctcctgtcttaacaaaaaaaaaaatctgctaataaaaataaacatctattgaaatgaaattattgtttgtgtttagatcaaggagcttgtatgccttcataccagtgaggtatctaaggaaaatacaaggtgccataaac

SEQ ID NO: 207912 - DNA, 1040 bp, Cannabis indica
aagcagtagaaatctgaataataattttgggtaatcagggaaatgaatgggtctttttttagaaagtagaaatgagtagtttgtaacaggttttgtggatgaccaaacatattttaccagtaaggatgggcggtaaaggaagagaaggaaggaacaacaacaacaacaacaacaacgttaagggagcgaaaacaacgctctttgaagttaaacagctgcaaactgaacagagttgtctgtcttgtttttctttttcagctgaaaatagtctattttaaccacttttttaataagtaactaaataaaaatcttttatattgcaggcatacactaattttatagttaggaagagttttattaactctcccctaaaaaagtgatctaaaacgactaaatttaaactctataaaccaaagcttataaaagtgtaacttttacttttagagaaaataaaaaatttcgaggcaaaggagacgttgattctattacgtgatatatcgctctcatttacagaagtaggaataaaactctaatagcattaaaaaaaagtaaatccatatataaaaaaaaattataattttgagttgcttctttggttgttatatgaatttttgttaaaaatactaaataataataagtttgaagtgtaaaaataataaaaaaaaaatcttaaaaaatagaaaaaaaatgttagctcaaatcagtttttttttttttaatatttttacaaaaattcacatagaaacctacacagcaatcatagaataacttaaagtgcaatcgaaattcatataacaactcacatagaatttatcgaaataaccaaaactgtaaattaaaaaaataatttataaagtaattctccaatataaatatttaatttttttaaactataatggttaattttctaatcgattatgcaaaattataattttcttaaatgccctattcaaataatattcaatatagtatttaggaagaatgtatcttgtggcagtggccatacgttttcttttttgctgaatgccagggcccagtgg

SEQ ID NO: 207913 - DNA, 636 bp, Cannabis indica
gaaagccggagtaataacaacttataacactaagcaaacatgctttgcaaattactaataccatatatatattagtgactgacttaagatttttgattatttaattgctataaaatattcataattattacctaaaattatataattattttgtaggagttttttattattttatcgtataattatttaattaaatgaaagatatttaatttttttttctactattcacatatataactaatccattaaatgcgtgagaatgaaatattatttagaggtggccatactgaaatgataaagtggtttgagtttgaatggctccctcatttatacaagagtcatatataatataaatccaatgagatgtcaggacaggacccatatatttaattatttttttccctaacatcaaaggccatatatcaactcaaatcatacttataaaataaaaaattaaaatccaattattacattttttttttcgataaatggtgaacaggatagcatttttgtttgtatgtatttatatagagagagagagatgaacttgtggaaaaagtgtgccttttacggtaagagtattttgttaggtattaatgatattatggaatttatttatttatatgatattatata

SEQ ID NO: 207914 - DNA, 1503 bp, Cannabis indica
gattactttattcttttacgaatgtatgggatttttttttgtttgagtaaatattattttagattttatattgggtaaaagttattaattgattattcagtcttgttaaatgataaaatgaattttgtaatttttaaaatggtataaatagaactttaaattgattttttgtcaaaataaaacttaataataatccaatttagagatgttatgataaaaattgttacattttctgtatttattcgtgttagaaattgtatttaagttgattatattaaaaaaaaaaactattgtcaaaaattgaactcaaagttctatttttatcattttaaaaagtagtgtctattttatcattaagaaaataaataatctaatcgataactttggcaaaatatatggtccaaaataatatttattttttttaaaatacaaatacaaaattatgagttctttgatcttgtatatctcgtgtgtttttaataatatttgaaatatgttgaaaattattaatcaacaccaagacacaactccaaatctactaaatgaaacaatggtgacaaaacacaacaactaaacaaataatcaaacacaataagaacacataaacatgaacataaataaaaagaagaagaaaaataccaagtttaattccagtttcgatcttagagatcaaatcgattcctagtcatactccaactgaaagtcattatcatgataccaatatgaatgtgttgaacttgtacaatcaccaatggcagagatcaagagctttgtattctttcttgaagaacagtcataattttttttcccaaaaatcccgagtatacccttaagttcttagcctcaaaaaacttgattctgtctctttctaagtttacaatacaagctacaactagaaaaaataggataggaactatttataaactatcgctcgaacaaaattataaactgtcataatagaaacttagtgaactaattaaaccagttccaactaacttaacaacggttagtcaaattagttattcttttagagaattaacttcttcaaaatatatatttatttatcttatatttcaaatatatatttagtatcttaaaattaaattttatcaattatttgaattctaaatatttaagatttttatcattttaacctcaataatttttataaatataattgtgttagcctctaaataaaacctcataaagcaaataaatggtaaataaggatatattgtgatgatatttaaaaatatatatattttaagaacatgttcacaaaagatttgatcaataaggataatgtaatatttaatttatgaaaatagtaataaaaaatgtaattttagaaattagaattgagaatgaaaaaataaagttatatgtagaaatcaaaagaacaaaaataattaattaatattaatatatatgtatatgtaatatataatttgattgtattatgaggaccatgtatgtcattatcaattatcatgaaataataga

SEQ ID NO: 207915 - DNA, 1040 bp, Cannabis indica
gttaaaattatacaagatagtactaaaatcgagatttgtacattatttttgaaaaattctttttgagatagtttatatatgagtatttagacatgtgcaatctttcaaaacaataattttctcaatgatatgaaattttggcgaatttcacctattatgccctaaaaaattgaaaataagcaagttgcataccaaaattttgttcaaatcatatttcaatcaaaacaaacctataggcatactaaatactcatttggacatgttcaaacatataaaaacatatattagccaaacatgcaaaaatttacatattcactagttcaaaggcatgtccaaagttcactataaattagcatactgacttataatctgtatttttcagcatgtatagttcgaaaatgtcaaaactcaactaataaaaacttttatgcatagaaatagtatcttccgtgccaaataagcatgtatgcataagagaataaacaagaaagattaaaagcaagtcaattagcaaaaatactttatattccactttctttccatccatgcatattagtctcatcaaaataagtagaataaataagaatgatattatcagtactcaaatttattcatttgggttgtgtacaagaattgacacattctttttctatgctttttgagacttgttagttaatgtaggaacttgacattcttctttaagcattaacacttaagagccaattttaattcttctttattgatactacaaaataaacttagatctttcgttttggtacctacataactttgggtcctttgatgttagtctttaaagcctttggtacccaaatagccttaccaaaataggcattcttttcacttggaaataggatttagtgtgaccatgtgattacaataagtgcaagttaaatccaagttactaattaaatattttaacaaagaaatttttgtttcacacttgtattgtatcttatacctatttttgaaaaagcacattaagcatcatttcaaaaatctctttcccttttgtaaaattg

SEQ ID NO: 207916 - DNA, 849 bp, Cannabis indica
acctgaataggcatactcagtcatccaatttactgaacacagtactctgtcaagtctctcccgaatgagacctcctctaaatcttttattttgccaagtgtatttgttcccaatgaatcggaggtcgatgcaacccgtgttatcttggaaattcttcaaccaccttgtatcagctattttgactttatttcctccaaccttctcttcttgattaccaatgacatttaaatcaccaattaggacccaagggacttgacactgattgacttccaattccaagctcctccagaaaacttccttcacttgtgtataggggggtaccatagacagcataaaacttccaattaagctgagtttgataatcccacaccgatgcaacaaaaaaaccatcctcaacataattcattgtaagattgacattgcgattccacaaaaaacaagaacctccttttaggccttttgcaccaaaacaaacagcccctgtaaagcccaaaattcgagccaaaacatccattttttctttcttaacttttgtttccatcagaaaaatacaatccggattgtattttttaacccaaacctttaaggcttggggtgtcgggtctcttgcgagtccccgaaaaattccacgaaaggcacttcatggggctgttgggggcttgataagggccgcctcctcgcccgagaaaaatttttgagagctttccacatgaacctcaacaaggtccagagaagcaatgagatttctgttactttcctctgtagaagttgtcgctttgtcttgagtttgtcttgccttaactggtgtcaatcgtgatcgagatccttttcgtcttcttttatcattct

SEQ ID NO: 207917 - DNA, 783 bp, Cannabis indica
acatgcttctattttctcacttcctgtagaaaaaaattgtcagtacggtcaccagactagggcggctgtaattgtattcgagtagtgttcctttctcaaggaacatatttgaaaactcattggttgtgcccttttacgagaaccaaattgggcatgtagcaagtttcaagcagttcctccttcttgggtcgaagacatgctggaatccaaactatggcctcacttccaagactaaaggtgagaactaaattggtaatacaatagactttaagtgttcctcgaaggagggttgaagacgtatcaaaatgccaactaacatttttgaccgggagtttggccatttttacaaaaaaaatttaaagtaatgaatcaattataaaagtagttaggatatgagataagagcaattagtagggcactcatatgtttttgaggatagtaaagtatacccccaagtgatctaagaagtttggacgtctccgaatttgtgatcacttatttaaaacatagcttatgcaaaacacaaattcgtgaattcttgtgcaaatttcttcttttttaattttattatacccacaagtttacattgatacaaaaatttacaaaaatgccacgtataactgtagaggaacatcagaaccagatacccctagcatatttgtaataacgacataaatggtctgcattcaagaaccttggaatttttgatccatccattctcttaaagtaaaatgttccatctcctactttgtgttgcaccttgtagggtcctttccagttagg

SEQ ID NO: 207918 - DNA, 843 bp, Cannabis indica
attaagccttatggttctttcctgtgtgcccaaccaagaaggaaaagctatcagataggttctcaatggctccgtgatggtagtctgaaggatgatgtttttttctgatgcgacgatgatgcaacagcctcaatcgtccagcaaggcaattatgtctaatgcaggaaatctgggggataatcagtgtgtgattcgatatgggagtaatgttgttactaatcctatttatccggatatggctacgggtcaacataatattaataagggtgtgaacgttgtagctgataaagagctgatggtggcagtgattggggaagaaaatcaatttcatcttaattttattgattctaaaaggagacgtacttaagaggaggctagtaataggcttctagtgtcaaaggaagaaggtagtgggcctgttagcactcataaaatattgccacctaggcaagatgttttgatgtcagatgataacagtaccattgctgggcctttgggtcgaaaaaacgaagtagtagtgggctctgggttccaggcccaccaagcattatgagtattctgagctggaattgtcatgggcttgggaacctctggacggtccaattcctaaaagaccttgtgtgtcaaaaggagcccaattatattttcctttgtgcgacattaagtttaaaggaaactattgaaagagtttgtgtgttactttggtttgaaggtgtgtttacagtggatgctaggggtcatagtggtggtgtgagtcttctttggagaaaccaaaatgaggtggaagtgttgggatattctttctgccatattgatgtaagaattactaatgaagacaagggg

SEQ ID NO: 207919 - DNA, 859 bp, Cannabis indica
tatgtttcttggtggaaatctgactaattggagctcgagaatgcaagaagtcagttaccaattgtgttatttctgtaacttcacttggtcaagctgtgtgtgtaaaagagtctcaaacctctcttaatatgcttactggtcattcttgtaatgttatcaagaccaagaaaagtttgctttgtcattagatcactcaggagtgatctaataaccatttactatgcattagacatagttattaagagtgaatattcgtcgggttatagtttttaaacttcccaatggtaatatcagcctgcaaatatctaactataacccgcctaataattttgacggtttgatcatatttacctgcccacaccaatcttcaatttttttttattattattgttagtttttagttttcaaacaattagatataaaagaatacaagaatgatatgtttcaaatagaagaaaatattaatatagtctaaattctaaaatttaactttaatatccaaatacaattaaaacgaacaatgataatgtttaaattattctcaggttgcgtttttttgttgacttgggttgggtttgactgtttgtaaaatttgttctacaacactaatagttattctacgagtcttttttcttaaggaagaaatattgtatgcatgaattcttttaaatatagaatacagttcgtcattctttctccatcaattagtgtttagagtctcacaacttgagattctaaaagtctacagtgacacgctttgagagagtctgaaaggtttaagtaacgaagagtcactatatttttcaggacacccacattagtgacgtggagtgaagtgtcactaaagcattttggagtc

SEQ ID NO: 207920 - DNA, 809 bp, Cannabis indica
gttgatgcaatatatttttatcatttttgttaatttagagctaaatttagtttaatactctaaaataggaatatggaaaattatctatataaatggaagatatttcaatggataaatcaaatatgtaaccattattttatcttatttgatcaatattgaaccgttgcgattaattagttcttaactaagaataattaataaattacatgtgatactaaggtgattttattttatttattaatacactttgtttctttatatagaaacaaactatatatgattaattataattgattcaattctaaaaatatatgtatatttttttataaatagcaagttataaaaaatgtagttttaatgtacctattgagtagacactatataatataataaattcccaataaattttatggaaattttacctaatatttggattaaaaaaagtaataaaatcctgaccaaaaaaataaaataaaatgaataaagaaaaagtgaattaaataatttaatcttaaatttgaacattaagtttcacacaagcaattttttttaataaagggaatttaagaaatatgataataagatattttaataaatgtgggattcttatatatctatcttttgttttgaattattttaaaattttatattgcaattaaaattatatttttcaatatttccatacatttaaattttatttttttctacaggaaaattctgaatgatcgctcaaactatggctctatttccttgcatagaatgtgatgtggctacttatatgaattgccatctcatatgaatttgttttc

SEQ ID NO: 207921 - DNA, 955 bp, Cannabis indica
aaggatcttctttcccattgtactttttctaaattggcatcttaaactttattggtaagggcaacacgttaatgcgcagagaaaggcaatcctcaagccctgtcaagttcgaggttagagaaatcttttagttggaaaggccttgtataagggtcttgagttgatcaagctatgcttgcattgtaggatcaactcttgtcgtcatttgtccaataagctcttctcttgggttaacaggaagttagccacacggattggcgagaattggcctattctgcgctcttgaaggatctttttggggcgagatgtatccatcccagttaattcttcttcggtttatgttatcctaaagatcttctccaacctgggggcccattctattaaataaaaaatccatgggccttgggttagactgcatttgagcattccaaggaggaacaccattattgcacccgttattattctgacttctccggttagtgcaaacatcaatatggtggctactggcgccatcctcattgaggttagggtaggattctctactacgagacctacttcgactctgcctgtgtgggacatcatcccttcttttcatctttaggtaggtcttggaactgaccagtcctaccatatacccttttaggcaagatttactcatcatttagttggatgggaggtgactttatttgggaaatagtggggcccactgggcatgaggtttgcccatgatccctagggtgttgagttttcccccgacacataaggagacttcccctcggaagggatcccttatgagaggcagttctttaatggaggatccaatcctttcatttatttgtctaatcaattcattacctccctattacggcaattcaactccactggtgccctgtaggattttggcttgtcgattcatccattcctagaattcccatctctactgggcgaaagcatc

SEQ ID NO: 207922 - DNA, 710 bp, Cannabis indica
caatgctccagactcatatgcagcaacagcaacagaacctattgcaaccaactcaattgcaatcatctcagccagctgctgtgcaaacatcagcttccatgcaacctcccatgatgcaatcatctctgccaagtcttcagcagaatcagtcctctattcaacaaccatcaaaacccatgctccagcaacatccacatctgttcttagatcacagccacaaactcaacaatcttctgttgctcatcaacaacaaacacaaatgtcacagcagcagcttatgaatcaacagccaaattctacaaatatacaacaaagccacttaattggacagcagaacaatgctggggatttacagcagcaacagagacttcttagccagcagaataatctcccaaacctgcaacaacaacaacaacaacaacaacaattaatggcttccagcaaaataacatatcaaatttgcatcagcaacagttagtctcccaaagtaatgggttacagcagcaactgcatggaactcagaccagtaactctaactcaagcatgcagactaatcaacactccgtacacatgttacaacaacaatccaaagctccaatgcagcaacaatcgcagccgagtggatctaatttcgctaccaactcaggcacacaatcacaaccacacagcaatgtgtcacaatcagtcacagccgcagatgcagcaacagt

SEQ ID NO: 207923 - DNA, 555 bp, Cannabis indica
tttagaatataatataataatatactttaaatggcttcttgtctgtttattttttattttttaatataaatcaaagaaaatatttcattattttaatgtatcgtaaaggtatacatattcttaataccactccattcatagtagttggttccatgaaaattgcaccaagaacatgtcatgatgcaaagaaaagtaagtttaggtatcatttgactaatctatttatatgtatattaatattagattgatattacgtgtgtaatatatgtataattaattttttaattaattttaattaagtaatgttcagtgcaatacatctatgtttaatttttttaattagataatatattttatttttttaatttttaaaaacaattgagattttaatttttgagaatttcttttagctattatgactacattagtgtgttttttaaatgtgattacatatatatggtattttatatttacaataaaagaataaatttttttattgatctctatttataaggattatatattaaaaaaaattttgacaaaatttgagtttga

SEQ ID NO: 207924 - DNA, 855 bp, Cannabis indica
gtattttgttattgagaaataaatatacacttaattatgagaaatgtaacacacatgaaaatatatcatatcgctattaatacacttaagtatcaaattacatataatttaataaaataatttttatgaaatatcgttaatcaattgtaagacgctacctctaagaactactggtaccttatagcaattaaaggtgttcatccgattcaatttgtaactgaaagtaaattcaatcggcaataattgccaattttatattttggattcaatccaatcataatagtgtggattgaattgaaacttttttaatatttattaaaatataaattattttcacataaccaataacaaaataaaataatattgagaattatggaattccatttcaaaattaattggtaatgagtagaataactcatattcttttataaagcttaaagttgtatgtaaaaataataatttattttggattatattttccttatatagttatatacatttgatatattaaattttaaaatatatattatatgtaacgtattactttttaaaattattattattttcctttaaaatatgaattacatatatatagatgtgaatttgattaagtgagttacttttacatctaaatcaatatttgatttgcataaagtacgaattttaaatttctcaatctaatctattctactgtacaagtgcggatatctccactttacgaatttgatcgaattaaattgcctattttataaacacacctaattaaattaacaatgctccttaattatatatacaaaatattattattattattattattattattatttattattattattattattattatta

SEQ ID NO: 207925 - DNA, 1060 bp, Cannabis indica
actttttagtttttattatatataacataaatgatttaaatatataataatataaaattatatacttaattgttagttttaaagtcatatatattgtgttgtactttggtggaatgtgatatttttaatttatctttcttaatttttattgattttgactttgaaaactaaaaaaaaaaaaaaaagtttggtcggtttgggcaggttaacccgacaaaactgcccaaaccgtcgatcagtttacagttttttttaaaaaaattgggcgggttgcacttaaattttagcgacccgaactttaaattagattagaaaatatatatgacaaaccgaccgatatacaaccctaatatatatatatatatatatattttgttagagtctcacattgtttataaactatgtgagtattatgcttattaactacaagtaaacacaacatacacactatatttcatcaaaaaaaaatactacaagtaaaatatttcttcattcacaccgatttgtccaaaaattaatattgtttctctttatagggacaattaaatagcttacccaattaattttatatattatataaaaatatataggatacatctatagtaaagacatcagttatgtctctacggtagagacaatttactattggttgattgacgatcaagtggtgaagtagctataggaatatggttatgagtgtggacttcattacataggattgtttttttggctcggctgaaaaaagtgtaatcaatgtattggaagtctaaaaattctgaaatagtgttcaaggaaaaaaaaaaaaaaactctgaaaagtaaaaatattggtatttaaattaagctctatgacaagtaaaatctactcgacctcccattttggaaaagggaaacaaggatggacgcatcttccaactagctatggcatctattttaattcgaatgcatatatttctaagatatttaatattatatacaccttgtcttcattcatatatagctctacattaatgtgtattagtttgagagtgttatgtgattttggttcaactatcttttat

SEQ ID NO: 207926 - DNA, 1020 bp, Cannabis indica
gtaatactggacctaaaatattgaatgagtctctaatccgatctaaaaatatatactaagtctaaaatattggataaactcgaattagaccaatagatatacattaaatacatcaaatagaaccaatccaatgtttaatagatgttgtattgatagggtgactgaaattaataggatcggattgaatgataatttaacattcagtatataattaaattgaatcttaataagcataaaaaaaatattgaacgtagttgcagccctaaaataacgaaatagccccacttgtttgttaagttgcaatttgcatggttttaccccaaactttaattaatctattattttcattatagtttgatgataaagaattaattatataatataatttaaatagcacaatggctgaatattaattaatatatatcattgcttatcaggtgtacttcccatggttttttcttacagatgctagctatattcaaagttcaggcattttaaataggtttttttagtatacactataaaaaatttatttttactcgtaataaaatttgaaattaaaagtgaactaacactacaaaaaatcttatttttagtcacaataaagtgaaaaaaaattgtgactaattataaattattattcttatattgtgactaaaaagtctgtggctaaaggtattagtcacaaaaaattaccataaatttgttttgattaaatgtatttttagtcacaatacttgttgtgactaaaactaaattagtgacaaattgtaactaaatactatgttttatatagttacaagcaaaattttgttgtgactaaaagtcacatttagtcacaaaaaaattatatgtgactaaaaaattgtcactaaaaataacactagttttttgtagtgtaattaattataaattatcatttctatattgtgactaaaatgttcgtagttaaatgtattagtcataaaaattataatttgttgtgacgaaatatgttttaatcataatatttgttgtaat

SEQ ID NO: 207927 - DNA, 934 bp, Cannabis indica
gtttcatgacttaaaataaatcactaaatttttccaagcaatcatataaatagtttacacaactgtaaggataaaaaatcattcttttcaagtgataggttcgatcactgattttatcttaaatttcatatggaccttcccattttggtcctaagacccccacttctggctcctgagaggctggaaatagctttcttaagaccaaatcaccaatttcaaatctctaactcttgactttagagttgaagtttttggcaatcttgccttggtacatttggagtttgacttgtaacttctgtcaaagttcttcaatcagatttggggattcttgaagtaaagaatgattttgagtggggtcataagtttctcttctatgagaagggtacaattttttttactgggattattatattgcatctattggtcgtacggagtgtgacctgtttaggtccttttagttattctgtatgcccaaagaaatcttggatgttcttcctaccaatgagtcgtgcaaacctaaagcttctttctcaaggttgttttcaagatcttactgacaacctccagttgtctatttttctgaggtctgtccatagttgaaaagcttctgatgattccatgcttgacacaaaattggtgaatcgatcactgttgaattgctttccattatcagacaatattttttgtggaagtttgtgtcgacacacgatgttttttaatacaaagtccaaagccttcttggaagttactacggtcatggtttcaatttccacccgtttaggtaaatagtcaacatccaaaacaacaaatttgactcctcgttttgttgtttgatgtgatcccacaaaatctattccctaaatagcaaagggccaaagactattcataagggttatctctttttgtggagatcttgggaccttggaataacact

SEQ ID NO: 207928 - DNA, 809 bp, Cannabis indica
aattaacagagatagaaaaagagtcacttagcgagagagacgaagagagcagtattggagttggagaatatatatatgtatacctaaactatttttatacgtaaattatttttttttatttattaatattaatataataataatataacttatatatatacataaacttaacttaaatagtatacatatataaatttatttatatttttttataaattcagtcagtttcggtttttccggtcggtttgctaccgaaataaaaaccgatcatttaaaggcggttttaaccgttaacggttttttcggttttcggtttaaacagtttcggttttaacggtgtttggtaggtcggtttgaacggtttgaacggttttttggattttttgctcagccctaagtagaacagttatatctaagataattactgcctattcttctaatgtgggacttgagttgataccccaacactaccgtaggtttttcaacctttggaaacaaccttcgaagccacacaaactttgataatctttattcaatccctataaaaccaatacaaagtttgtccaaaaactttacaatcaaaagacagttcttagagctcaaaaacactcagacatctcataatatctctatattttctaataatgggattacattagttaagacaagccttatataggttttggtacaaacactaatcaaccaacttaattgtcttcttatttgagtgttgctctagctactaataaacgtaccaagtaagttgatcacaacaccacattattaaaactatattattattattatta

SEQ ID NO: 207929 - DNA, 1960 bp, Cannabis indica
attctctgagcgtggctctgttgactaatactatgtaagtttttaaattatgtactatttatttttggtttgtttttccaaaattgtgttctgcagtaacactattacattctgctacagactgatacaatagtatttttactaaaatttagtataattattggcatttgtaaaaacacgatttttcaagatggaacaacctcagccaaactctattctactatctcattccacatcctaacaagaagaaatcttgttatttcatctgggtttcgtggggcttcagctaatgaattgaactgaccaaatctagcaagaagttaaagatgactaaacataataaataaaaacacatttttataagtcgttacgtgttaatgatatattttctccattaaagtggacagttataactaacaatatcagaacctaatagagaattagtggttcacatatatactatatatatatttagtcaactcgtgtcatttgttaggaaaagaaggtaggaattacgagtatcattcaatctatgaacctaaaaaaagaaggaagatatataaagtaaattataattaatatttataatttacaccccgaaaagcaaaccaggctaaaagcatgatcatgcaataatttcatctatggtatattctgccatgttttaattgaaaaaacgagaatgatagcaatattttaaattaagattgtggtcctaataaagtataaatcatgttattaattattgattattttttcatttatttcttgatgaactagacccttcagctaacattgttatttctctaataatttacacatgtccttttaatttagataaactcaaacgtgaatgaaagtgaataattaattgatgaatcatcattttaaataaatactaatatgtttcactgtctgaaatggccgttgaaaacaaattaattgaccaagagaaaactcattataacaatgaatctctttcattgactggtatcacacatagtagggtcactagagttgacaaaatttggttcatatccctaccctaatattttgatacgtatatataaatatagatttatataatgcatggtatatatatatatggttggattcaaatactaccaaatagctagttagtgcaggtataaccaatcgaataagagagaatgtcaaatacattggccccatcatgtgacccgcacgtgtacatcatttaaggcaggggaagacccacatataaaaaaaaatcggaaaaaaaatatatatatatgcaatttaattaattataatatctatttgtcataaaaggtgatatttataagtataatattaattttggtgtatggttaaactacttatcatataggttagaagacaaggttctaatctcgttaaatgctattttttttattatttatttgccctccctcaacttaaaaaaaaaaaatacgcctccccttactttgaattctaggtccgctgctgattttggggaaggtttttctattggtacgtgtaagggtacatacatatatggtatcccgcacgtgccaccaacagacagcactaaataatttttatcataccccaccggccattgattaaagtataggacatgtaacatgagaaaagaaaaaagatgctctaatatgcaactatatacataatagaaatgggcaaaaaataaaacccattgcccattaccagacaatccatgttggtcccccatttccttatattcttaccactaaatatatatacagccaagaatttgcaatacaatcccattagagaattttatcaaaaatctctaataaaatcacaactatacttagctagttttaaaaaactttaatataaaatatatatttatatatattcttcatctgtatatatctgatgttggtataagcctatctatatcaatttatatatttttatatatatatatacatgc

SEQ ID NO: 207930 - DNA, 464 bp, Cannabis indica
gaaaacaatttaagaaaaaaaaagttggttaaattagtgactaacttcaggagatagtctattgatttgatataccaggttatttaaactatttaaagcaacctagtttattcatttcactaaatgcaatatacataaaatatataaaacaatcctaaataatcatgttctaaaataagatgcataattatcaaaatagcaaattgtgtgagattttatatatgacatacaaaatgcttgtactaatcaactattagtaagcaagtatttaacaacaagaaataaataaaatatgaaccgagtaaatattgagtatttctaaaattacaatctttgaaattaaaaaaataaactacactcgggcaactctcctcttcaagaactcgtcgtgttctctctcttgactctctcttattgttcatccatgcaactttaggaatttcccaacatactccatttaccac

SEQ ID NO: 207931 - DNA, 633 bp, Cannabis indica
ttatcgttgaaaaaaaaaaaaaaataaaaagaaacatatattatcttataatataaatggatttattatttttctaaaaattaatctatatatgaattatttttttaaaaaaatattagagttaaaaaaatatatgtttttagtgcgccttctaaaaaatatacaaaaacaaatatatcaaattatttattattagtaatattgaattttataaattattttaattttattatgtctactacactcatgaatcatagtatttcatattaatactaattaaaaaaggtgaaaatagttcacctaataaattggtatatttggttaaaacaataaataaatctcttagttttcctattaatattaatagaataaaaaaatatcgttaaattaaaaattattattagataattaattttatataattaagtgtgtttttataatatttattaaaataatataattgaggtgtaataaatattttcataataataatatgttgtttttcaatttattttttgctaaaaaaattcgttttgcacatcaaaatatctaatttgtataaatacgaagaagtgaagtgtaccctacacattaactacatcaactctaggtatgtggctgaaattgagaaat

SEQ ID NO: 207932 - DNA, 1202 bp, Cannabis indica
aaaaggcctagccagaactaatggactagagcatttaataatggaaactgaaaacatagtaggattccaagccattacaatgcacccaccattgtgccaagcattatttgttgggtttagtgccctaactaaaatcatatttcaatgtaatcttgaatgtgttttccaatcaactctagtgtctgtttgacgatccttcttcaccactagaattggctcgtcaaggagaacaatctatactaagtcatttcgcccaacttgatactttttctggtgatgtttttgtagctccgcccttttccgacaaatttttggtgatgatgtatgatttactcgtcgaggtgatcgttttgatatatatactactcctatttttggtgacgttttcggtacagcgatttctaccgccatcgaataccacacttaatattagtcgtattatatgtctttggactcagttttgaatgtagaatgtagtgatgataattttttatttgatggtatatataaacgtgatatctaaaattagattaaacaattggagctcgggacttgagaatttaggatcgtcctttttggaaaaaatttaatcactggggagaggtaaggacttaatcaacgtgattattggacttgattttatatgtgttgaataacattagacattctaatttttataatttataaagtatttgaaaaattaaaaacttaatctgcacattttttgggactattctggggtactaagtgtcaaatatatttttgtataaatatttttgcaggttatgatttttgggtttattcaaaatacagccgttatgctgccggatttttcaaaataaaagggaatatgttcttatgttattcttattttacctaatttttgttgtattgatgagagccatgttaattatgatttttgcatatgtttcacgacctagtctctgtgtcatcatatgtagatcaggtgtggattcacacgtaggtgaaagacatagatgtacaagatgtgaattgaatctgagcctcggtattatggtggttatcaagtgcgactaccggatgtcgttttctataattgatattgagagccagggctctagtggatagtgtgatatgcatttgaagcttgactttgtgattatttgtgatctctgtattttgcatttacattttgacaatgatatgttttatttttaaaa

SEQ ID NO: 207933 - DNA, 843 bp, Cannabis indica
aaaaactatctacctctgattgtagtacatgtattcgcagaacctactttactaccggttgaatattttgatattcaaactcaactaacatgcatattatgtcacacattcgaccacagtacaatatatcacagaacctactttactatagatgaatatttaagatattcaaactctactaagcattaataattattaattaataataacaaaagttagtgaatgtataaacctgtagctaactacaaaaatcgatcaactccaaattatttgataccttaataatcaggtagctcacaacctacgatataataaaatacaacaaaattaaaatttaattatttaactacttacttactagttatatgattttttttttgggaagaacaataagttcattactacgcacgagaaaaagggagtcacagggggaacttcctccccttaaaacgttcttgctacaagattgttcaacctaatatctttagccaggctatccgctacaacattagaaaaatgataaattaaaacaattaactgaatcaagtactacataagaaacactaaagcatctacaatccaagggacaatgattcctacgcagagcatgaatcgtcaccaagagaattagacaaaacaccaataaccttttgatcttcctccaatgcccaaaacagagccatgtgaattgcttgaagttcagcttccaatgttgaagtggtattcgaaagttgaattctataaaaccaagaaccagaactcttattgaaccttactgcagccaaacctactacactatttccccacgatgcatcagtgcaataaatcacctccaaatcagga

SEQ ID NO: 207934 - DNA, 519 bp, Cannabis indica
ctcctaattttatcgcaatggtagtcttttgattgttaagtgccaacttaaaaatatgtgatgacacattattgtatcacgtattataaataattattatttatttttattaatttaaaatatacaaatttgatgaaaagaaagactaaattaatttttctttattcgaacaaataaaacatggttgtaatatataaacacttaaatcaaaaacaaccaaaagagtatattgcaacaaaattgtaaaataaagtacttttgttgttattttttttattagaattatatgtgtaacaattacaaatgttaagaggattttttttttttttttatagatatctctataaaaatgtaataaacaaatcatttatctagttattaataaagaccctattatgagggtaaaacttggttgttgctaatataaaccttgttaatcacactcacatgaggaatgtgagatacccacacaaatctatctttttttttacacttcaaatgaggttttttttttttttt

SEQ ID NO: 207935 - DNA, 777 bp, Cannabis indica
cttttttattttggttcttaatctccattccaactgtgagtttggtgttgttttcaaccataaggggtcacaagttgaacattaatgccaatttcaaccataaaagtgatgaaagtcagaaaaattatcataaagagttgaactttttgcttatataacctgcattggcaataaaaatcaaaactttacagctcaaaatttggttctacaaataaagtctgttttcttttgctactttcttcagtcctttttacaacaattgacatttatataacttaaaaatcataactttacagagcaagttttagtttgtaaaatcaaaactgtaaattcacaacagatgatttttgagttattctatttctaaagacctccattgtgaaaacatctgtacttaactactacaatatctatagagagagagagagacttatgtaatgatatcatcacccttttgtctcatcctttatatatcaatatctccatttcagataaagttaaaatcaactatcaactgcatatcataaatatcattattttattagaaaagagaaggatagcttaagaagcaacaaataatacatatgaaaaaaatccaaatctgggaaaactaaaccagataaatacaccaaaacagctaagcttttactaagttcaatgttggagattttcattcaaagtacaaaaaaaaaatgctaaaaatgtaaccttcataagtaaagtacattagttcttaatctttactttgtttcaatttcaaacatctcatgatttgat

SEQ ID NO: 207936 - DNA, 1147 bp, Cannabis indica
tcctgaccaatcggacccggggctgggacccaacctgtagtaggtgtcttgaaattggaatggtatcaagacccaaacttggaaccatttccagaccaggacccaaacccagagtcggacctgagacccaaaattagaaaaagaacaggaatcatgacccgagaataggaattcgaacggacccaaaactggatctagacgcggaaccgatcacgaatacggacttagaccgagatcgatacccagacccagaccaaaacaaggacttagacttgcgccaggacctgcgacctagaatctgaaaaccatgacccatgaccggggagctggaccagaacccagactagtactagaaattggacccagacctagaccaagaccaaaacccatacacggactgaaacccagactcagacccaaatttagacacagacccaaacacgtaccaaaactcgaactcgaacccagaccgagaacaggactgggaccaagacccaaattaggactgagacctgaacctggactgggacaagactttgattgggactgggactgggaccaggagctgcgacccgatagtcgtacctaggacttgagagcagaactgtgacctagaccaaaacacggccaagaaccaagacaaggactagtatcgaacacgaaccgagacttgcactcaaattgggaccctaacccagaccggcacctaggaccctgaccttaattagagacccaaacccatgactcagggccgaagacccaaacctagacccaaagatggacatgagactcaaactaggacccaagacattaggtagaactggattaggatctggatttggactcaggacccagaacccaagacccgaggcttggacttgacccatagtcagtgtcaaaatctaggaattggacctggacccggacccagatccagacgagaactcgaacccataccagaactcgaactagactcaacatgtggttggtgtttggatttgggacccagactcggacctaaacccgaagacagacctagaccaagaacaggactctgacccagacccacacctgaaccataaatcgtaccatgtgactcgaaatttgaaccagacccaggacccagactcaacatgtggttggtgtt

SEQ ID NO: 207937 - DNA, 806 bp, Cannabis indica
agttgtgtgggggtagctagcttaatagatctccaactaacttaatggaatattcatatgttcattaccttaaaaactcattaatggtatgcagtatatgagtttgtatgtttgtgtatgtaaattagtcatatatataatttatttaattattattatttttttttttttgacaatgaacaattattattattatcttatatacccttatttcaactaactgaaataattgtcaaggagccgcccagttctaatttattatataattatttataggtgcatgtatatataggggtcaacctttaattcattaggaaattaattaatttatacggccaatatttatatatatatatatatattttgcaaatatataagttgtgtgtgaaaaagatggactaacaaatttaatgactcagaataattcttacaacagtgtatactataatagttagtcgttagcatttctatatacatacacagttgtttctgttagaaaataatacaataattaattaatctatatttttctaaaattttaaacggcttaatctgaaattacatagatgaacataattaattaatttcctttgttacttattaaaaaaattaaatgacgcacagtgacagtgccatgttttagtttttacccaataatctaatagaacaaccactacatatatttattgtataattttctaacagaaacaactgtgtatatatatagaatttttttaaaatagaaaaactaattttgttcctataatataggaatacttttctgaccgtagatgcagagtatttct

SEQ ID NO: 207938 - DNA, 616 bp, Cannabis indica
tattattattattattattaccccattcaaagctgcaattgaatacagtatacccaaatggtcgaacccttgttcgaaatttgaactcatagctgaaatatggtctcaaatattgcttaccaagatcatcatccattgatttacagtgaactatcatgtatttgctttctgtaatcatattagtgattcgaacacgagttgttcttcctccaatatctattgcctccaataataataataattgagatacaactaataataatatcaccaacctcattgttattattattttgtttaattctaataatttgtatcaattgttattctctcacaatatatatattatttggttttatggttttgttatttttgttacttttgttattacagagtttatcgcatgatctcttatttcttagaattgattacgttttctgaaaatttgaccaattctgttttatattattgatatgatgagtcatgaactaatatatatatatatatggtcaattcaacatataaataagttgttactaataacaaaactgcaccaaactataatgattttgaccaatatcgagtactttcataataatatttttaaataattttattt

SEQ ID NO: 207939 - DNA, 838 bp, Cannabis indica
aatatggaaacttcaataaaatatcataaataaactttcataagatgtttaaagaacaatgatcattgaaaaattcgtcggagttggcaccagcgttagaaaagttgtcggagttggaatcggcgtaaaaaaagtcaccggagttggtacaatcacaaaaaaagttactcaaaaatttgctaaaagtagaatcatcaccgaaaaaaatcaccgaaaagtagttggagttctcatcatgaccgaagttagacgccggattcatcactagagttgagcgttgaaatctgacacacagaaactaatttcatttatctactaattaaaattgtaacataaggaaactagttaataaagcaaaaactaatttcttgaaataaccaaatgaaaaaactgaagcttaaaaatataataaaagactagttataaaaattagttacttaaaatatctagttatgaaaataaaaaaaaaataagatatacaacaaaataatttttaataaatctatataaaattaaatcatagaaattggcttcatcaaacaactaattaaaaattaaacacaaaggaataagtttcgaacctaaaaataaaatgatacaaagaaactaaaataaaaaatatacaatgacttcataaaatagagcaaccccattacaaaatctctaaaacttgtaaaataaatttcgaacatgtgaaccccgtgaaaccaatttcgactctataaaaaatcatagcaaaactaaaatgataaacaatgacgataactgaaatcgattttatcagtcaaccaaatggaaaaaacaggcacacacacaaattactaaaaaaaattcacaa

SEQ ID NO: 207940 - DNA, 737 bp, Cannabis indica
atgtgctgccatggttacagtctagagaatttagagtgatggagtagaattgttagtacttgtatttaaaacttatttgatacaaaaatattatcattggagagataaggaatcatcttcttatgcaacagaagatgatgatgatagaggatcatataggactactattgcatccaaaggtgctaatctctagtattgaagatccacccaactacctaaaatatagcttcttctcaattttgtgcttataatgtgctcttaagtagtaactatataagttctttggttctctttccaagtggcttatttttctgcatagtattgcggattacatcctgttcttgaaaaagctatcgaggcttataccttggtgaggtgtaagacacttaaaaaatacctgaggtttagttgaggctcactcacattgcttttaatgtatttagtctttctgagtgagttttttcttttatttggccttttgtttttttatatgtttttaacacatttttggcttttaaacttggtttatataacacaaattaacccaaactccaaataaaaacgacatcttttccctgcccctgttctcagcctcagcccgagcctctcatatgtgttactctacagttcttatgttgtccagcctccatttttagcaaatctcagtagtgatgataatgaggacttcttagtcttttaaaatgtttagactttaagctctattaatcaggattttt

SEQ ID NO: 207941 - DNA, 825 bp, Cannabis indica
tgatgcactattggcagagtgctctcaaatagcatttgagaaggttgtttggtgttcactttcagttccaaacatcgcttcattttgtggcaggttattcatactaatcttcttactcgtaataatctcagcgagaagcaaatctttgtagattctgctatgtgtcctgtttgtgagattgacatagaagatcatgcacatttgttcttttcatgtcctcactcatggtaagtaatgtgtaaaattggggaatgactaagtagtcatctttggccaagtatatttgatgaactgattctcagtgagttaataccaagaggccaaaaaggcttatgacagaagtgtactatgcaaacaggtacaaaatatggcaatatgaatgaataggaatttgtgtatttttgaacgaaagtgtcttgttccacagtgtatagatgaaattttgaatgaacgtattaaggcgagattgaactttgttaatgagagaaactttctcatctcgatagatatgtgattaagtttgtaaaggatttataagtacggggtagtttaatgtttcaaactacccctacttaaattttgactcatttaaacttgtcttttcatcgagatttaaatgagccaaaatgtagagatagtcagttgtttcataaattcagtattctctggtttgttatcgaagtgtattatactgatcagtcattttgggcattgtaactaattgttctatagtgaactccttaagagaagacatgaaagtataataaaagagtaattttgatactatttcaaaagaattattataccctatttgatatccaaatc

SEQ ID NO: 207942 - DNA, 962 bp, Cannabis indica
tttaactaataatctcacttattaaaagatcgattttccctttagcttaattcttaagtaactaaaggcttatgagtaaaatggtcataacccaattatccctcacaacttcaagatcccaactaatcaaaaaccttctgtgatgcatttagaatatcaaagcgtattattgtgatattattggccaatttgttaaatttccactgttgtggaataaaataatatgaaaatatcacatttgatatattatatattacatatttatcgcatctaaaatttaataaaatttctgtaattcaaaaattatataataaatactttttttctgaaagacacaaatacttatttttaatgatagaatttattttataataatgcacatattctcaaaattactaattaattattaataatctcattttcatgtctaatcatgttgatagttattaagtagtatttgattttcttctcttgtattaacacaggtaaccctaaatttttttactactggatatctacgatttgacttctttcgcttaaatgccggagaatattattgtacttgtgaatgttaacgtttcaatgtatatattatagaaggtgaaattcaaaaagttgataaataattgagaggtagaccaagtcaccatatatttgtttggttgcgttactatttcctgaaacataagacatgagctggatcaagctagctaggtgagatgaaatgccagctggacagatcaaagataggcttactttggtccttgcagtcaaaagccccccaaccaacaaccttgaaaaagcagtcctaggccactactaccatatctaaatgttattatatatagttgagattgaggataaaaggtgggtggagtggaagcttgctagcaaggtggcacattcgtcaccgtacgtacggtttgcgcgttgcaatgcaccgaccctagcaactacatact

SEQ ID NO: 207943 - DNA, 699 bp, Cannabis indica
tttacaacaaaaacaaaatactcgaaactaaatagagaaaaactaaaagacattaatggtacttaacaccctcaaatatgtcatatcactattaattcaattaaagatcacttctcatataatttaacatagaaaaatactaagatgtaccttaacacctttcaatgtaaaattactaaatatcatgtctcataaacttgaacgtaataatttttgtggagcattgttaaccagtcgaagcgccacttctaacaccaccagcatctaacaacaatatttattttttataaaatatcactaactaatcacaaaaaatatttaccaaataaaagcattgctatgaatgaagcaacataaatgcctaacatcacaataaaatatagctgtataattggcattaatttttttataatatttattaaaataaaataaataaaattaaacattaaatcacaccaataataatattacacgtaatcatttcttgccaaataacgctcggctaaatatcctaattatttgtttttcgatatacaaatgttaatattaatacatcttctatttttgagaatttgccttaagaaaaagtgagggaaaataaatcacagatgggaaagaggttttagctattgtcttttcttttctaggttttacccatttcccaattttcctaaatttttcatttttgccattttcaaa

SEQ ID NO: 207944 - DNA, 459 bp, Cannabis indica
aaaaaaataaaaaaaactttgtacaaaaaaggcagtatactgctgtataaaaatcaaaaaatatacatagtgaaaaagaaaaaaaataccacttgatagtatatatgtaataaattggaaaaagttagtgtatgatgtaaatttccctattaaattgttgtgtatgctatagtacatggcatatatgctatatactatacacacaacatactttttagatatatatttaattaatatttatatatatttatattattaattgtatttataaaattatgatggacctctttaaaagtgatgcattaatgtactcctacctgttgtggcatctaaaagattttttttagtttatgtttttcatagtagtgtacattatagcaaaattttgaaaaatttaaataaatttaatacgccaaaaataaagtttaaactatttattgcacgcgtaactcttttatt

SEQ ID NO: 207945 - DNA, 1361 bp, Cannabis indica
tctcgattaagggcaaaacgacgccggatttgacagctttgtgggcaaagtgagccttgttgatggtgtaggaaccgataacgtgggctgcgtagtagggaatatagatgttctgaccggtgagtaaccatttgttgtcgttgagagctctttggatgagttttgccatgcattcgaaaattccgagggaaggaaattcagggtcgtttggttggttcatggctatgttccatagagtggtcaaagcgaggacgtgttgttgttgttgttgttggtcgtttcttagaggcatttgtttgaagcactggacgagtttaactcggcggagggaccgatttgactcgttcatggcgcagaagaaacatgaagagtcgctgcagccttggcccttggccttgccctcctgcctttggtagtcggccataatcaataatgctttgcctctgttttgtcgttttgtggtcttgagaaattaacaagagaaggtgctttcttatttcttttggtttgaaagggttcaactggttatcctatatattagctacaaatagatactggacaaaagtcaataattatagtggagagactcgagggacagagaaatatatagaatgaaaaatttagataccatgtttaccatattgggtaaatcaacattacacacccaaaattcatttaatttaaagatcattctaatagtttatactaccaaaaataagagtattgttattaggtaatccgtacctttaaacatttctctacaaataattacttattgcttactaggtgtgtataaaaaatatttaaattatatttttaatattataactataaaaatacttctaatgaaaatacaaataagtaattaaaagttaagctataaatttttagatttttgacacatggattgatttcaagatcagcaataatgtaattatttagaaccttttgtttagaaaaaaataattatttagaacctctcagacaaaagtttgaaaaattatgaataatttatagtattaaaaatacaaaatatatttttttaatagaaaataaacatattgttcttaagctgttttataaagggtgtgtgtcttggaggtcttgggttcgagtcccatataaaacatgactgtaatatataaacgcttaaaataaaaaaaaaaaataagttagttttataaataatttttttttgacacttttcagtacagaaattcgtcaaaaaaatataaagtttttttaaatgactacaagttaaattataattttttcatgtacctaaacagaagactctactagtggggcaatggcacgtccctaccaacgtcctatatatatatatatatttattaaagtat

SEQ ID NO: 207946 - DNA, 502 bp, Cannabis indica
agtgtttttgatctgttgattatggcgtccagtagcaatatcaagggattttgggaggaactatgtgctaatatagaaatagaagggagatgatgttatttctacgtttgactttgaggatgttgatgcacacgttgctgatatttgcttgtgtattgttgggtgattctttactgccaaggctatcaattttgatgtaatgtgacatatgatgctatgtatatggccaccagacagaggtatgtatgtaaagcatttggaaccaaataagttcttattccatttttaatgaacttgatctggagcgtgttatagaaggaagtccgtggacttttaatcgtattcagttcatctttgcacgactaaagcaaggggatgatccactattggttactatcaacactctgggcatctgggttcaagtagatggccttcaatatggattcaaatctgaacaggttattcagggggttggtaactacattggtacgtttgtcgagtc

SEQ ID NO: 207947 - DNA, 517 bp, Cannabis indica
ttaatcctcgagctctacccctattgtcaaaagcccttagccatgcccgctaataagaaacttttacctcaattgcacgttctttatatcattcaacagattggaaaagtttcttacaagcttcagctacccaatcatgccactattcaccctgttccatgtgtcccaacatagtcgagccattggtgatagcaattcttcaccaacacctccaccatagctcacatcagacttggagcttcaagttcttcttgaagcaatcttatagtagcggcaaaaagccttggattcgtctattagtgaagtccttatcaaatggaagtggctgcccaagtatgaggctacttgggaagacttcaccatcaagtagtacctgtaattccttcctactttccacattgaggacaaagtgatgttttttggggtggggtattgataagcctaaaacttatcaagtgtattacaatgaaatactttcttttacgtgcataggtgctgagattgtagtcttaggtgg

SEQ ID NO: 207948 - DNA, 714 bp, Cannabis indica
atttttgcagtttttggaataatttatatatgttagtagtatttttatgtagttattaagatgaatttattattttgggtaacatttcttatttattattatttattattttttgttattagattattttagttatatgttattagagtaataaagttattgagttattggaatgaaaattttcaatttttagagataagttttttttttttttttatttattatatataattgtacctttcaacctcttgaaaaataggtttttagggatttttattagttgcttaattttttgttttgttattttatgtagtttggaacttttttttttttcaattggaacaattagatgaagttgaacaagcattgactgttaacttaagagtaaaaaatgaagaattttagtattttaaacatattatctgacaatataagtaacgctggatagattttcccttcaaaatttgatatactgattgattttgaccctttagcaattgtgtctgcttttgttagatgatgtaaaagtatgttattcaaattttcaagagtgtccctatttcatgtacatcggacggccaatattgctcgacatgaattaattgtgcatactctttgaatggataaacaacttgtttaactagataattttctattactttattttttttagaatgattgtccattatgacattatttaatggaataattaca

SEQ ID NO: 207949 - DNA, 1333 bp, Cannabis indica
ttgtcattctagggtttaatttgtattatatgttatcttgtgttatataatataacattatattgaattttattgttttattctattaaaattatttattacaacactatatttagtattgatttgtattaataatttatgtaagaccataaaatcaacctcaattcgatcctatttgggttcggggtccaaagccaggtcaaggtccgaggttcaagtccaaagcaaggtctgaatttcgaagtttagggttggggttcgggctggagtttaggccgggttcggggctagggttggatctggtgtcagggctagggtcgggtgctgtgtcggggctaggtcctggctgaggtttaggtccaggtcggtgttgggtctgggtccatggtgaatttgagtctcgggttccagactggggctgcggtccccaaccccaaaccatttgtaaatattatagtataaactaatacgaatcattttttttatatattacaattcacatttcattaaaatttatggttgtaataattaggagaattacctcatataccattttttaaatatttttttatttacggtttcggttgttctggtggtttctatgaattgttgtgtgaatttcggttacaatttaggttgctctgttagttgttatatgagtttctatatgaatttttataaaaatgcaaaacaaaagaaaaattatttagaagtgtaaaaataaaaaaaaaaaataataataaaaaaccctttaataattacaatacattattttatccaaacatagtgttacttgttatttaatatgatataatatttatacggcctactaaatgagtccctaatggaataattttttcacaattttgatcgaatgactatttcattaaaaaaaaaaaaaacgactacttcaatacaaaatacaaaaaataaaataaaatatttaataatttttttaaggtaatcactacagcattcttcatcttgtttactcacttgaaagagagttttcttttatggaaagagtgaaaacgagtttgctggagttttctgtagaagtggtgaagaagaaatggagggaaaaaaatcatatatttacaacaaaaacggtaattgtgtatttaaattcataagaccatataaattaataaaaaaaaataagttttaaaatgtataaatcaaaaaaaaaacttaatgcatttaaaattttattttattttatttatatttttattcttattcttatttttttttttatttccttctaactaaacgctactaactaaacgactacctaaacgttctataattagttatgtgagaattttaacaa

SEQ ID NO: 207950 - DNA, 513 bp, Cannabis indica
ttatggtgctaaatattcttcttaatgatccaattaaatatcgaatcttatataactttagttaataaattttaaaaaatatcaataatcactcgtaaggtatcacctaaaagtgacgctaaacatcactgtacccagttgcaatattattaagtaatattgttatgttagttaattaatgatggagtggaatgattatagatagtaatggaagtcaaaaaggaagaaacaaaaaacaaataccactttaaattgtgttttagttttttgggagagtctatatattaatttatatgtaaaaatatataagataatataataatgttataagttggtggcattcgtatggaatgcacactccctcccattttctatattatctaaatatcccactctttccattcagtagtgcttttcctcttcaccatccatttcttcaacctaaacttttttatatcttcttaattattatatattttaacatttaaacaaatatatattgatttatatttt

SEQ ID NO: 207951 - DNA, 1268 bp, Cannabis indica
tttaaaattaattgctcacttggattaagcacataaaggtcgttactctgttttgcagaacaaatagtcgtaccattcttagaaataataatcccattatgaataaaactaatgttaaataattgtccatgcaaaagagataaagaataatattctggtacattcgaataaaataaatattgttcaataacaaaaagttatcattaaatttcagacagactttggaaacacctttggcagacacttgtgctctattcctaacctgcatggccacctctccattagtcagttttcttgacgaatcaagtatctgcatagaagaacaaatatgattagtggctcccgaatcaacaatccataaaaagttatcatcttccactaagttagcttcaagaaaaataaatcaaatttacctttcttaagctcggagagatacttgttatagtttctcttctagtgtctcattatgccacaatggaagcacttgaatttcaccttcttgtccttggacttaaggctggctttgttattcttgactttaggtgccttcctgcctttcagtttgggctagccactgctgctgtccttactgttccattttcttttcttatctaaagaagaaggagaactggattttgcttcaacaatgtttgatttaccttccttggacttatccttgttaatattctcaaacacggttaactcattcaacaattgagtaatgttgaactctagcttgttcaacaattgagtaactgtaactaactaatgacagctaacactttcacaactactaactaacaatatttaacactctccctcaagatggagaggtaatgctcattaatcccatcttgtctttcaagttgttaaattggttaggaaagtgagccttagtgaagacatcagctagttgctcatttgatgaaacatgactggtttttataataccttgctaaactttttctcgaactagatgacaatctattttgatatgtttagttctttcgtgaaaaatagggtttgctgatatatgttgagcagctttgttatcacagtgaagtaatgcagggccattgtgttcattcttcaactctttaaggacaaataaaagccatacaagctcacatgttgtgttggccatggccctatattcagcttctgcagatgatctagaaatggtttgttgtttcttgcttttccaagtatatcaacaagtctctaagaaatataaaaaaaccagtagtagaccttcgggtatttggtac

SEQ ID NO: 207952 - DNA, 1358 bp, Cannabis indica
gttaatatttattattgaagtaaaaaagaatactacaaaaaaaaatatcataccataacatcttttatatattatcttccttatttttttttattattattttatcataaagtaagaaaattaatttatgtaatatatgttaaataataatataattttattttaataatttttagagatacttactattagattatttttaaacaaaatgcatcaaaaatgatatgaaaaagagataaaataaaataatatatttttaaataatgtgcaagtttttgacactcttaaaaaatactgtatttggaaatgctctaacatactataatttcaaaagcctataatatgagatgcatcgtgtcaccccataaatttatggattatattgtgtcgtgttaattatttaaaaagtaaatttggcacggcctttatcgaatcggcctatttttcataaatagatcaatccatttttttatacaaactttaatttatgctccacttttctactatttttctttacaattaatatattaatcactaaattatatatgttttctataatttcaattgttttaatataaatttttaacaatactttacacataattatataaaaattaactagaatttaaatatttattaataaatacatgtgttattaatattgtaataatttttaatgtatcgagtttttaatttagtatatttatatgtttacgtattgtgtattcagacttgtcgtattgtgttacccttaaacttatttttttgtatcatgtcgtgtccaaacttatataattttatattaaataataatgctcgtactcagcagttacccaataaaaaagaaaaaattaccccatattttattttacttccaaaaaaaaatataaaaataaatgcacaccactggtccattaattatatgaaacaagtcctttttgatggaatatatctgttttattcaagaaaaaaaaaaaaaaaaaaaaaaaaaaaaaagtgtctgtgtataagaaagggtgtgatttataaaatatgtatatattgctataaaatttatcgttcaggtggctcagaataatcatagagattaattttaattatttaaaacctatgaaaatgagtcatgttttttattttaaacaatttgcaattatcatttccctgccactacaagtaatctttggataaggacgtgtttggcgacatattaattgaaaatattgacaccaatcactcttggcttaattaaaggaacaaaatggtggaacgtttggtccattgatttgacataataatgaataaataaaataagaaaagtccccaatcacttcagttagataagagagacattttgtccc

SEQ ID NO: 207953 - DNA, 1075 bp, Cannabis indica
gaagcggaacaactaaaaattaacagtggaacaacacggaggaaaactgaacatatattaaagcatagaatactgaagaaaataacttacagacaaatttattattttttattactataaaaatacagcaatacaataatatttagaaaaatgtaataaagaaatgaaagaaacaacaattaataacattaaaatagtaacaggaaagggtaatttagagaaagagggtgaacttgaaagtaccgtggagatggagccaacactttgaaaccaaagaaactgaagaacatgaacttagttcgagtttctgaaagatttctacaaaaagctcatcatagagcaaactctccatctctcccactcacacacaaccacactctagtctttcccaaattttcttcttcttccaacttcaattacacacaaaggagagggttagctattatttggttaatgttgtagacatggaaaaaaaaaataaataggatgatgaacaaggaagatagagctcaaaaacaataaaaaataaaataaagagtgggcttaattatttgcttaagactaatatatatatatatggaacacttcttaatgggtattacccatgaatagttactaaacaaatttaactataaatattaattttcaaaatatcaaaccatcgaattttgatctaacgaatagtgaaatcacaaatttgattttctatgcttaatttaactacttatttaaaaaaaatatctatttttacactataccaaaaatattttataaacacataaataatatatagaaatggggttcacataggttgcacaaatttcacaaaaatgaaaaactaaaaatattttaagtaaaaagatatcacaaaaatgacagcaattaatcaattcaaatttatatatatataaatatatacatatatatatttaagaataattagcattttcgcccctgaattttcggccctacttagattttccccctaaaatatacgacttgttaaaaatttcccctaaaactataacagttacataattatacctcttctgtaaggttctgtttcttttaccca

SEQ ID NO: 207954 - DNA, 615 bp, Cannabis indica
aataataaggtatatatataattattcttcaattctaaatgggatgctaatggaaattattagatctttgatatccacttgtaaaagaaaattattcatttcttgtattaaaaaaaaatgtaatatttatatattatgtgtactttgttcttgatactgttttttagtaattctaagtttacacctcatgataaattaatcagtgtataaatatacagtatattatttttcaacttggttctttatttttatctttgatattttagttaaaatgaattataaaattcaaatataaatctaaaatggaattataaaattttctgccgctgtactcgacaaagattccattcgtgcacgtggtaataattaatgaacaccatagataataaattaggaacagtataagttccatgtgcttatatataaaaaaaaatgtacaatattattcatgatgatcataagacgaataaaatagaaaaaaaagctagcttaaaggctcaaagggccaacttataattgttatatatattcaccttcatggtatcttatcaatatcacttatatattcacattaattagagatgtacattttatatcatcttgttcagactgtat

SEQ ID NO: 207955 - DNA, 777 bp, Cannabis indica
ggaaagacgttaactctaacattaatattaacctacgtactcgtctctctcttattctcatatggtgcgtttctcttttttttatattctcatatctattctttgttttctctcttattcttatatgtttcttttatttgtgtgttctctctcattcatatgtaatgttatttcacaatttaataaattaattttatttatcatatcatatatataaatataatatatgtttaagttatattgtaattcaaatcatataagttgaatattctaatatattatatcgatcacacaacttaaattaattattatatcctaaagataaatatctatacatactttcattcatttacttgtgtagtttatgagttcatgttattagaattcaattcataataggtcacaatttgaattcgaatttaattcattaaatttttaattctttgcaagattattctttttagaaaagaatctcagaaaataccaccaaatagccaatagctcaaaggggtcaagagctagggaaattcattaattcaaaacatcaaccaaaataaggtctttaatacaacttgagtactaaccagaccaccaaattatgcttgttgtaacaaaaagagcaagcttaggaagagaatcaacaacattgacatataccagatcattatgcattctcaatttaaagaggttttcaccttatatatcatttttttaatcacacatagtatatatattcatcattgatgtacgcgtagttcatgttatcatcaactcact

SEQ ID NO: 207956 - DNA, 1026 bp, Cannabis indica
tattgtgcttacgaacattcacaattaatacaattatcacatcgaaataaacaatggcgatcatacattcatcatcatattcatccaaaatttaatcatttatgatctatgccttattttgaacctcaaccataaaaatatcataataaagatttattagttcaactgaaactattgcaatgcacaaaataaatacactagtcttctgaactcatcattatagaacaaacataagaacttcacttcgaataccaagggaagttcctaagcgaattcgtcctatcaagaagttgttagtagttagttagttggtcttagctgtcaaattagttagaattggttatggttgttatgactgtaacagttctgttattgcagctatataaagattgtttcccttgtattttcataactgttgtattcattttcaatctcagcaataaaggatttcttcctttcttcttcttcttctctattttctctgtttactggtttataccagataatatggtatcagagcttgtcttcgagtgagctctcttcttcgtgtttttcttcttcgttttgcttacgcttctgttctgtgttcatggctaggggaggaggaatgcgaactcaaagtaatcgtgatcctaaggtataattcgaatggttcaaatcgattctctagttcttggtgagaattcgagatcgacgaatttcaatgatctgtctaatccgtattttctttctaatggagacaatccaggagctgtattagtgcctaaaattctcacaggaagcgagaattatataacctggaagagatttatgcttatagcacttgttgctcgaaaacaaagtgaaaatttgttaatggcaagcttccacaaaccagaaagaaagatcgtgaggattatgacagctggtgcagatgcaacagcacagtgatttcatggattctttcatgccattttcagggggagattgtggatggtataatgtatcatgataatgctgctgagatttgggatgaattgcatgaaa

SEQ ID NO: 207957 - DNA, 1633 bp, Cannabis indica
taaaagatattactagtgcctaacactcttctcaatatgtaacactcgcgtcaatatcatataaaattaagtatcaaattctatataattttaaaaaaaatatcgctatccaataataatattccttaaataactattctcccatgtaaatacacacaagtgaatcctttataattttccaaaattatttgttggtaatcccattttcccactcagctcttactcggattttgcttacctattctaattctatcctttcctccatacacgcgctcttactttattactttactttactccacgttttaataacacaaaatcttgactccaaaaaaaaaaacaacaaaatctgaacccaacaatacgattaggccacgtgtcgatctcacccaatgacgtctacactctaccgcactgaaacaaacccgttcacgaaacgtaaaatggactactcaccgacgaaacgaaactgcgccacacgactcactgctaagatggtgtgactgactgttaggcctcttaatctctctggcttaaccaatcagtcacctacacgtgtacgtatctatttcacagctggaatcaccttctcaaaattctcttttcgcggaatatacgtttttaattttccttttttattttattttttttatttgatggaacgtacgaagcattattaaataaaaactaattagaatttttctctaagataattttttttcttaaattttggcatataataaattatactttttaaattattttatccattaatttttttatttgaaattattgaattgttggatttaagaatttttatctaatttataatttattaattcggtgattatttatttattaaatttgtatatctaccaaattatatcagaactttgatatgtaccaaataaaactctcttaacttttatctatgttacattttttttactaaaattacataaaaatctttaaatccaataatcttaataattgaaaaattttaaaccacttaaaaatttaatgacataatttaatacatgtgaaagttcggaacaaaatttttaattaatcttaaattaaaatcaaataaataaataaataaaaatgaaaaatggaaaattcaaggtctttaaatggcgaaggagaaagaaagcgggaatgtgtgccatttattcattgcttttggatttttgagctaagaacacaacagaaaatagggttgagctggctgaagctccattcaatccagatctacttcttcagttttggtttcaggtaaaacaatcactaatgtccttagctttttacatttgttgattctgattttgtaatttggtgcatttttaatgaattggatctggttacatatggaaaagatctgtatatttgtataatgattttgattttgtgatatttggaatggatttgagcagagaaaagagagaatgagtcctccgattgaaacacctcacaaaccagctgtttcgtctcataatggacatccacctttgaatgagaggattctttcatctatgagtggaggtccattgctgctcatccatggcatgatcttgagattggtatggtttttgttcttctgtgatttttttacccaatatcaatattcatattc

SEQ ID NO: 207958 - DNA, 1043 bp, Cannabis indica
atagaatctgccttgaattgtattcggtctttgaaaaagtaaaatttttggacccttattataaatatatatttttaaaatgattgtttattcatttggcccttggattgggtggccctaagcaccgccttaacctagggccgagcctagctcaatatcattatcttaataagtgaatgagtagtctatacacttatatggtatttaagttccagaaatcctaaatagcatcaatagggcatagcaccaccgaagtgttatgttattatcagtgtataatatcgaattttatatattttaatttaataattattatgaactatcgttaaccagtaatgtctaataacaatattcattaagactcaatattttacactaataatactatgacacctcattaagttcccgtacattattaatatatagagaaatattaaaagtaaccagtggtgtttaataccaccacgagatgtcatattgttatgggtacacttaagtattagattctacatattttaatttaataaatatataaaatatcaattatataagctagccattcattcacaaaggcgacaactcgtagtggtgctgaatacaactggtatctaataataataatgttcttattattgtgggactctctaacgtccttagcactacattatttttttattttttttcttaaaatatatttgtataataattaaataaaactattgaatattattgtagggatgcgatgcttcacttctacttgatggtaagcaaagtgagaagaatgctggaccaaatctaagcgtaagaggttatgatcttattgacactattaagaaaagtttggagagtaagtgtcgccaagttgtgtcttgtgctgatattatcgccattgctacccgagacgctgtcagcttagccagtgtacgtaattaaattattacttaattattccaagatattacgaataattaaaaaaatagaattactatatatcgaaaataccaaaaagtacaatcaccattataataatatcatatatatat

SEQ ID NO: 207959 - DNA, 1025 bp, Cannabis indica
ttcttgatttcattgtctgttcgaccaggaaaatgggctgctattttagaccacctaaataataacaccaaaattaatacatataaatataaattttagtaacactattatataaatatatatatatatatattgttacctgttaccaagacgtgaatgtagttgaatgatttgattttcttccaattctgtaaagcctcctctcttaagatcaggtctaagataattaatccatcttaatctacaactcttcccacatcttaacaaacctataacataacacaaaatttaatataaatttataaaaagagaaaattttaatataagatgtatgtatatatatacctgcaagcttaggtaccattctccaacaatgaataccattattgagaataaagttcatgagtttgtgatcttcttcaattgtccatggacctctttttaggccaattttgtcacaacaaggttgtcttcccatattttcttcttttttcaaacaaagcccaaaatatgagaagaaagttttatcatatcaattttgattgttaataaaattaagttaagaaaagaaaaaggggtgcttattaagctctccttatagtccaagcaaaagattctcacagctaatttcagacattaaaataatgcaatatgttgttttgaaggggagattaatgattgattgagtaaaacctattttttttttttaatttttttaattattattttcagtttgttgatttcattatataaatatttggtaccacacccatataatatattaattagtgtaatggaaaaagtcatatatttatttaaaaatttacgaagggaaaataataataataataagtactagaaagaaagaaatagaaaccaaagtactacgtgagtggtatatacgttgactaaacttacttagttgttttttttatagtataaaaataattttgcagtcctctgtaatattctaattggtcatcattaaaatgttaaggcaagactaataaattaagaaaataatg

SEQ ID NO: 207960 - DNA, 757 bp, Cannabis indica
ggaacattaaagagctaacctatctgaacaaattatgtaggcttatcactctggtcgtggggctacccccaacaggggtctttttgagttggttggagagacttcccatccgccaactggccacatgggaataagtacttaaggggaaacccttaacgcatggaatggtactaccacacatgttaatcgtgcaagtactaagtaagtaacaagtgctgagactccacggagggaagaaaactttgagcaagagcccaaacagactcaaactcgagtgccccaaccaatgggccctctacctaatgtggaacgaccataaactaccaagaaaaccaatagaaatcctccaccaggctctccatatcgctctaatgacactaggcctcgagaccctacaaagggaaaggaaactgccactcacgttgaagtagagaattaacgactctacttcaaaactagaggttatgagatccaacaagtgaagactaacaagccacttcatacttagaagtatttccaagatgagaggggtaaattgtgtttttactgtgatcgtggccccaatgaccaacaatatgagtacttcccttagatagatggggaggagttgaacatgagcaactagttaaattctctctatacttgtgatccacctaaagactacttcgagggaagaagtcactacaatgctgtggatgacaactcccatagtgcatcatcccaagacaaccaagatttcattttgaagacatcgtag

SEQ ID NO: 207961 - DNA, 1120 bp, Cannabis indica
tcctatacctggtctagtttactatggggtagggatcttttaaagcaaggtttggtgtggaagcttggtaatggatgctctgtaagaacttttgaggacccttggattcctgacatgaaatccccttgtcttcggagcaatgatctgcctcctgttgaaacagttaattttttttattgataatcagggcttttggaatagggacaaacttaatcactactttgataacctctctgtctcttctatcctcaaagttcctattggaggcttgcacaggaatggtactttagtttggaaacatgaagcttcgggtgtcttcactgttaaatcggcttaccacttagctaatagcacctctcttccctcttcttcctctaacccgtctttttttacgtcttggtggaaaacattctggaatttaaatctcccccctaaggtcaagaatttctcttggagagtctttcaccacattttgcctgtagccatcaacttgtttcgtaggaaaaccattccccaaccttgttgttcattctgtaggaacccagtggaaactgtaactcatgcattgttagattgttccagagctgctaaaatttggaaagcttccccacttagaactttttatctctctaacagatatgtggatgttaaagaatttatgcttaatggttttgatcagctgaataaagacagtttgagtttattattatctattatgtgggccatttggaattctaggaataaaaagctttttgctaattcggatatggctcctactgatattgtagcttggactcactctttcatttcagattatcaggaagctttgtctaatgctaacaggtacaaatcagctcgcattcagcaaccgaatgacaaagaggtaacagttcctgctaactgctaccggcttaatacagacgcaactctatctacggagagaagcaagctgggaattggtgcagttattaaagattggaaaggcaatgtagtagccaacctagccattcctgcagctggaaccttgcagcctacattggctgaagctttagcgttaaaagctgggttaatctggtgtcaacatattaagatccccttggctttagtcgaaaccgattcc

SEQ ID NO: 207962 - DNA, 523 bp, Cannabis indica
gggtattacccatgaatgaatattattatgaaaaatttaagttttttatgcttaatatttttatctaaattaaaaaatatatctcaattttacattatatgggctagagttattccatatgctgaaagaaataataataataaaaacaatatttggagaaaaaaataagaaaaaaaaaaaaaagttgagttcgacatatataatttttatacataaacatatttttgatatattacaaaatgagatacttttttttaactaagtatctagattaagcataaaacttaaatttctgttttattatttgttattagatcaaaatctaacgaagtagtatatttaaaattagtatttatagtcaaatttctttagtaactattaatggataatactcattaaaaaagtgttcagtatatataaatatatattagggtgatctacaatgtatcccttaaaagaggtcgatgcattttctatctacttcaacatctaagaaaaacttttagtctatctagtcttgtat

SEQ ID NO: 207963 - DNA, 691 bp, Cannabis indica
ctcttttaggaattgaatagcccattggttctcaagtccacagcaattccaacttaacacattgataattcctggcgggcctgtgcaccagaacccgccccaaacaagttttttgtgttacttttcattacatcagtctccataacatcacctatgcattgattcgacccatttgtaatattatttcccacagccccttcagtccattggcccacttcaaagtcggccccatactccacattcccctccccttctgtgcgcctcctttttgtatctagaattaagatacttctttccttaataataacactttccttttcaacaaaatcttccacaattaattcctctgctaacgtgtggtcaacttgtacaactttttgttttgatcctcccaccaaatcaactctcattttattcttgtcattactcaccataattggctgattggaagatgatcccacaattggaggaaatgactgattctcctggaaagggttccccggcacgtgacttgtcggaccaccattgtttgctctgttattttcctcaactgccgtgtttttagagaaagaaacacctccctgttttgtggccacaccaattcttaaccacctctccccagtagcataattcttcctcctcgacgcttcctttatttgttccatgggagtataaaatagttgctcacaaa

SEQ ID NO: 207964 - DNA, 1432 bp, Cannabis indica
aaaattaaaattaaatatatgcagtatattaatgttgaaaccaaagcctaaaatccaactgttaatatatttataacttttacagaaaataaaacttaataatacaataatatttttatatagtataattaatataataatcttctacacatgcaaaaagtaaaagttctatacagtctatttcttttaactttgattgaattaatttatttcccaatattacgaggtaaagacactaagcctcgcagaatatttaccctatatatatactatgttattactacctacattgcacacatctttagttataattttatttttgttatatatatttttaaaaatttataaattaaaaaaaaaaattaaagttttaaaaacttgagtaaaaataaatataaagtttaagaatattaaaattgaacatactcctaatattaaaaataaagataaaaaataataatattacaaataatatattaataattctatgtatttgaattaatttaaaattagtataaattcaattaacataaaacaaataatattataaaactaaccctactaacaccattaagtttaacaaaatattcttaaaaaatattttgttaaatcaacaaaaattgttagatagtcacattttctatataataatatatacataaaggaaatcacaaaaatagttaggtggaattttatatctcgtcattctattttttaaattttgtgatagttttattattttttttcctaatagaaattaagttacactatttttttaataaacatacttttgtctcacattctttagataatatgttgttcttttaaaaacactataaatacatcatttttattgttattttttttttttttttgaacaaagggaagaatttattcaaaaacaagccaacaaaacaagctggaaaaaccagcaataccacaaccgaaagctaactgccagcaacaagcaatagcagcatctaccaatcctttacaatattaattaaaaaacttgacattctgtcctctttgaaggggcctaagcataaaattcttatcttaactaagcttctaacaactctactaatcttacaaggagtggcacaagttagattaaaaatacaatcattcctatttagccaaatctggtataaagaagcagcaatcacagagtttatcactctattccggaagttattctgagttgtcgaacatttgtcgctgagatctttgacagaaatcggccagtgcacttgcccaagccactctttcactttggcagccacctgtaaggagaaaggacattcaaaaaaagcaatgatcatagttttcctctgcttgatgacaaacctggacagtttacatcaggaattggcactatcccgttcagcagctcgtcgggttataagcgtgggagttcacgtaactgtcc

SEQ ID NO: 207965 - DNA, 875 bp, Cannabis indica
caattggtttgatttaccctagatcaacacacaaccaacatagtcgatcgcggagtcacgggcggtcagaccctgccgaacacaggtctgaccagccaaggaggcatcacgggcggccagtccctgccctttgcaggtcaggccagcgataaaggagtattgggtgaccaaaccctgcccaatgcaggtctggccggacaagcacaacaatcgggtgtaagcctggccggcttaggccaacttctatacttggaaattgctggccagggtctgcagggcatggttgatctttaccatacactctcctagggtatggccagtcagcccctatctctttaaaatctgtagcctcccaaaggaggaccagtcaatcaggtccccatagcagcagatccttcaatgcaagcacagtggaccaactcagggacgtgatccagggaatagctggcccaaagccttcagaccttaaacgtgatcagtcaaggggatcatcattctcgacatacataaatgccctacctctactgaagttcaagatgcatgtatggaagatgtatatcagacgagaggacccgctagctcacatcaaatatttcgagatgcagcttgaaccagaaggtaactggtgatgtgcgtcgtcgcatattcacagccacacagtcgaagaaagcccaagagttgtactttaacgtcaccccagggagattcaactcttgggcttagttctcacgagaattctacacacaattcttctcctcaagacttgtaccatcgcaattggaagaccttgtcgaagtcaaacagggacaaggggaacctctgaaagattacatttagagatttatagccgaagctaccaaagtcgaaggccttac

SEQ ID NO: 207966 - DNA, 719 bp, Cannabis indica
tagtccttttgtgactataatagtcgtttataaccataaaagattattttagtcatacaaatttttgtaaaattattttgctaataaaaattttcttgactatttttacaaaaacactcctcaaaagttggaattttgattaaaaagcaaacaaaaatttgccttcactataagcaataatgggccacaagcccgtacaatactggctcaatgaaaactgagaagcccaactaactcaattcgcaaattaagggagaaatacaaaaccctagcggtgcccttagaaacctcaatcacagccgtcgatctgagagggttagggtttatatatataaaggcctcactcctcattcttgagccgctctctctcctcctctttctttctctgtctctcttcctctactcaagcttcaacaatggtaagtagacatcaacccaaacttcaattgcattttactctattactccatttttaactgtaaacaaacaaatggtaattgggattcttcgtgttgcttctgctctttgttttgcgatttcaatatttacttaagactgagttactcagtgattatctgaattctccttttactcttattccgttcatgttgctatctgcttagtttctgatctagggattgctttgtttccgatgaaatatctcatttttttactctattctctcttatctatttgacctacaaataagttttgttttt

SEQ ID NO: 207967 - DNA, 602 bp, Cannabis indica
aattaaaaaccttaaattacatattaatgagtttcttttggcgattctcatcttgtatatgaatattagtaggaacactttgttgctctttagttttatacctctaagacactaactaaccaaccctcttttatttttgtacttctcatcagcctgtgtgtaatgtaatgtaatgtaattatacctagtccagtgcgtacttgattggttttttgtataatatttcttagattgtaaaatcagttcgttcttgagcatttttttttccaaaccaaaatgtatgttctccactcctggatggggttgatgttttttttcaacactgatatatataatatgggagaatttttaaaaaatattttcctttaatattttatttataattttacggtttaaaatttttaattataaaaataaatttataaaattttagaaagtaaaaaaaaaaaaaacaatacttaaaaataacaaaaaaaagtattaaaaagtcattaaaaaaaataatctcattacaattataatacaactattaataattaaaaatttcatattgatttatttttgttattttttaaaatttgttatgtaatttttttaaaaaa

SEQ ID NO: 207968 - DNA, 943 bp, Cannabis indica
ttttagcatttctctacactacatatataataaaggtagaaaaagaaaacctcaacacatgtaatataacacactctctctctctctcttacacacacaaacatatatatatatataatataaataagtagagaaacactcactcacaacctttagtgtagattagtcgggatcactatgatttgaacaagatattatcacctttgcccaaaaatttatttttcctatttttaagcactaagagaactccatgaaaatagttttgggaattattacaagacttgtgttttcaacaaatacttgttgatagaaaacttagttacccaaataaacatattagactcatttttatagtatttaggtgatcacacttagaattcacacacatcatacctcatggttgttataggcacataaattggtgtaaaatagattaaagaaaatttagtggttacatgaaagctgaaacgaatcctcgctcaaagaacatttttttaatttttacacctcaaggtgacatgtggtttgttccagtttcaacacaataaaaattgtgttttgtaacctcctttgaaccaaattaaacccaatcgttttgtacttcattttacttatataaatgagtattaatccattttataacaattatatttcatactttttaatctcatcatcaattttgtataacaattcttttattacactaattgtataatcaaaaaaagatttacaagtgacaataaattgtaactcctctcaaattacaatatgtaagttacaaagtgtaaattaaatacataggttacacattttatgtactatacacttaacatatattattcatataaccagggacggacccattaagattgatgtgggggcgtatagcccccaccgaacaaaaaataattgtcttttaaaaaattaaaatgtaaattttttt

SEQ ID NO: 207969 - DNA, 529 bp, Cannabis indica
ttttcattacaaaaccaataaacatgcaaaagatagcttattttgtgaaagaatcgccacaagtgaaacgccacatgacaggaaagaaacagatgttcaatagattcatcctctgtcccacaaagggggcatttaacatccgcaataggaaatattttatagatcttagagcgaactgggattgccttggacaataagcaccactaaaggatcttcagcctttctgagattttactattccacagcttgttccaaagtgaaggagtgacctcacaatgaggtgccctatcaaaagcttgggcaagataagctgatttactcatgaaccaaccattactttccaaagtctaaatctatctattgttgccctggccagacggagtactcctttcaagattgcagacaaagtctcctagttaaacagactatttaacttagggatattccaaccacttttatcagatagaagctcagcaactttgttcaccccaaaagtggaagaacccttagaacgagggacaaaatcttt

SEQ ID NO: 207970 - DNA, 1401 bp, Cannabis indica
tttttacaaaaattaatttatttattttttacttaacaaaaaaaaaaaatcaatcattgtcaaaaatcaccatatagaaactaaactattaatttataataattaaattattaataaccatatatttatatatagccgccaacaagtgttattatataattaattaattaattaattaagttgatagtgattgttgtgttaattgagatgatatataaaaaatgttttaattggactaaatttttgtaacgtgaaaatatatgagatgatttttttattggttggtagaaatcggtgaaagtggttggatacatataaatatataatattatgtctaagaagaaattaaccaaaacatatatataaaatctcaaaatattataaataataaaatccatactatatttttcatatctactttgaaatttaattatatataatatacacataataagtcaatatcaggtacgagatttgtgtttttcatatcaaaattcccaaaacccctttttaaataagcaacaatactatatagaatggtggcaatttggtaaatttaattacataaatgtaacaaaaataatagttttgtactttccaatttccatgaaccatctttgtcaaagtgttagctgtaataataaaaggaaaaaataatttaaaataataataataaaaaataagggaaattatctcatatacttattttttttttctttttgtaaatttacagtttgagtttctaaagtttttgtagcgctagttgtaataagggtttctatataattttttgttgtaatttaagttgcagcgctagttgtaatatatagggatttttatgtagaattccataaaaatacaaaaaaaaaaataataataagaggactactaattacagcattttatgagttaattttcatgttcaaaaattatataccgtaatattattcattatagttccaataataaatgatttaaaattagttctaaataatttaccattctaaaaataaattttttaatattttatagtgtgtgttcaaaatacttcaaatcaatttttcaaattttcagcattgtacaaactattaaaaaatttacaaaaataatattgtaattataaggaacaccaccataaaaactaaataaaaatattctaacatatattttcagattcaaattaaggtagaaagtacataaaaagtgtatggtacgtagcattcttcttcttcttctaataataataataataataataataataataataataataataataagagtatatatatatatagtagtaattaattaccacgtgagataaattaatcaattaataatttaataatattatagctagaaagagcttgaagttgaatactgaaaataataaataat

SEQ ID NO: 207971 - DNA, 732 bp, Cannabis indica
atgtgctataagctcgtgtttgggatgggggaaattactcctgtggaggtctccggaatgacatgagtatttcacttcaaattcagccaaacctgaggaaatgctttgccaagtttctcaggtctcagtcctttttcttggtgcactgagtcacatctctttccaagtttaccaagaatacgtcccctagtaaaggcagaaaacaatggcaggatggtaaagccaatctatctgtatatgcagtgcagtaataaagctctctggttcatttttcatgccttaaaccaccttttagagttttcaaatacagtgatttctctttgttcttagcagttgaagttctgcatatgatacagcattaaaacaaatctttcatacatttcctttgtcacctgctcggaatctttgggagatcaaggcttctttctgagcactaggaagtgcctcctctctctaaggaaacacatcaaagacaaaagccccctcctccacaaataatgaaaagaaatcagaatataagccaaaactgaaatgggaatgtgagatgctaaatgcattagtcacgtgtttgttttcagagcacctcatttcctgtggcttctctcccatgactggtttccacaaggttgactaagaccaaagagtgacaccgtagtgtgatgtactgggctgtcccatttgtcaactttcattgctcatgaaaaaagagagttaactccttcaccactgcct

SEQ ID NO: 207972 - DNA, 585 bp, Cannabis indica
tttttttttttttaatcttaattaattgattgcattgttaagtaattagggtgcatgtagactagtcatgaatgttaaaagatgcaaataacaaacgaataggtacaaatatatggtgtttggattcatttgattagttgaaatatatcatcaaagctgataatacttcataacaattagtctttaatttcttcgattgataattatttcttagctaaatagatataattgaagtatagctttaattactaattaatgtctttttgtgcccatttctttatgcttgcttgatacatctctccccacataacaaaccttcttcttcacttcacacattacattaatgtcactacaaaaaagtactgtaaaacagtaaacatttcaatgaaaagctcatcatcatgacaattgctgaatgaaacacatgaaagaaaaaagtaaaagaaaagtctgaaatgaaagcaaatttactaagacaaaccccaaggaaagggacagctcacactttgctctgtcattagtattctcacagtagaaaaattcaattttttcttttatctatatatatataatatatcctttgac

SEQ ID NO: 207973 - DNA, 543 bp, Cannabis indica
aatatcaatttgtcttctaatcctaatacaccattcatatatgaaagaccttaactaagagctacttagatcttctaatcttaatcagtacataatattactaagctgaataaccaaacttttatgtatggaagatcagtatctcaaaaacattttcatcaagacacaagattttggaataaagatggaacttcagtcatgacaacggtaaggtggctcgggatttttggtcagtttaattacagtaaagcaacaatttgaaaccgaaatggtaagcctccgaaacttctatcttctaaccatctcacacactcattttatcacttcctctctaattgtatggatcaatcaactcaatctacaacacaattgctggtttgatcattttaattgacactactaactaattacagaacagttaagtgttttggcaaaaactaagctaaaaacatccctattggacaattatattatcgggttcaagttccttaaaaatctttgcccaaaagaaacagatgatttataccttcaatttacatgaaa

SEQ ID NO: 207974 - DNA, 784 bp, Cannabis indica
gctggtgttggctactttttagcaccaacacgccactccttaaaagactaaatgcatttccatctgcgacattaatgtacatgtgtcactataaaaaatcttacttttaatcacaacaaaacttgtgactaaaagtaaaaaggttgcgactaaatataaattaagattcttatgttgtgactaaaaggtccatggctaaaggtattagtcacaaaaattataatttgttgtgattaaatatatttttagtcacaatacttgttgtgactaaaactaaattagtgagaatttgtgtctaaatgctatgttttagtcacaaataattttttattgtgactaaaagccacatttaatcacaaaaaatttatgttgtgactaaaattttgtcactaaatgtagcagttatttgtagtgtatgtatttaatttttgttgacacccactgatattccctttttacctatttgttttgttaagtaatttaaaataatgtattttcaatttaaatatgctttgattctttatgtcatttcttttggtaatactttttattgttctgaacattcattgtaagttcatttactaataatcttaattattatatttagtttttcttgcaggaaagtcaacatatagtaaatccgatccctcttgctaggtgtaacatattgaagcactagaagatttatacgaaaataattatttttatgatgaatttataaaatcatttgagtattattccaatgtttagtatgatataaatttggaaaaacggattgtatcca

SEQ ID NO: 207975 - DNA, 990 bp, Cannabis indica
gatggttcatttggatgatctatttatttttgtgttattctgttattagtgaacatgaatagtgtgaatgccactttgtttattttcctttcatgaataattgtatttgtttcactttgtttctttgctctatttttctataattaaatttcttatgtgctcctaattcacgtttgatcatgagacattaattttcttggctattgatttcttctaagcctcaagattatctcaaaatatgttgcataaaatgttcaacctctcatttaatctcatttaatcatggtgttttataagattatctaataatattatattcctgacaaatttaaagacacattatacccaaaattcaatattatattcagacccacatcagttaattagaaatgtagtgagaagcatttacaactataagaactctagaactccatatagttagcataagattcagttatttttctcatttttgaaactatcaaccgaattagtgccttaaaaaaaattattttgtgagagcatcttgaaactattgacaatccatcagagacaataaatcctccaagtcaaaatctaattgaaaaacctgttaaacgattgtgagtgggaatgatggttctgctcctctctatgctcttggccatcgttacccaatcttgaataagcaccattaaggtttggggtttctggtcctctctatgctcttggccaccgttacccaatcttgaataagcaccattaaagtttggagttttataacgaaataagaagaaacgtaaataattttaaaattcaaaatttaaccgatataaaactgtttaacagattatttttaaaattataaaaatattctgatatatttttaaggtttgaagcttgatatttaagtttgactttttgtttcatttgaatctttggcgagagtcaaatggcaattaccgcgctcttttggttcagatttgattccacaaaatctaattacagttgaac

SEQ ID NO: 207976 - DNA, 1027 bp, Cannabis indica
cctctctttgccaagcttggcatagtctttcgacatccttgcccacatactcatcagcaacagggtcgtgctgaacgtaaacatcgtcatgttactgaaatggggcttactttgcttgcccaagcacaacttcctctctcactttggtgggatgcttttactgctgccacctatttaattaataggttacctatacaaaagcaaaactatatcactccctatgaattgttattcattcaaaaacctgactataattttctaaaggtttttggttgtgcttgttttcctctattgaggccatatcagtcccataaattcaatttcaaaactgccacttgtgttttcttgggttacagtccatgccacaaaggctataaatgccttcacccctcaggtcgtatatatattgcaagaagtgtaacttttgatgagcacacattcccatataaatcacttttcactccacctactacccgaccaactcgaccccccactacctcacatatatgcctttccctcaacagttactcatgcatcaccatctgacctccctactgttcctatacagcctcaaacatcacacacacatactcctcttccctcatcacctcacactcaagaaactcaaccaaacatctcaccacctcctggctttcctttacccgtatatcctccttttcccacacaaaattcctccttcgtgtcagctcaagaatcccattctgtgtctcttgaaaatgttcattcttcctctcctcatgtcactcaaccagtccctcccactcccttagccacagatcagtttgctcccaacatttccacccatcccatgatcattagatcaaaaactggctccttaaagccacgggttcttgcagctgaattaactagaactaatgttaatatattttgtgagcctcttaattggcagcaggctttgaaacacccaaagtggagagcagctatggatgaagagaatacagccttaatcaagaataaaacatggattttagttccatattttgat

SEQ ID NO: 207977 - DNA, 2431 bp, Cannabis indica
caacacacaatttcaaaatattcaatattagtttaaataacgtaaactgagtatcttaagatagagctagattactaatgttgttaaattagatcttataagctttataagttactctaatcaccatcaccaccggtagaaaagcaattacgttttcacttctaggtttgtttatttttctaaattttgattatttttatcccggaagcccaaaattcaattacaactgtatataaatgctaaactattaaaatacaaaagttcaattcagcgggtttcaaaacctcatggcttgaccaggttttgaacaatatagcaaaaacatggtttggatatatttttctaggcattagagaaaaacaggttttgatgtttttgaataccattatcgatttgctttgaattttcaacagtattttatactgattcactagccaaacatatggaatgcaatgttcatccaagcatgttggttagaaccaagaaaatcgttatgttgaattcctttttggaatttcagaataattaatctttttcccaggatctttttatctcacagcgtacttgtttttgaaatcttgcagaacaatcttcttagattgcatagacatcccgcttccttcaaggctaaaataggaagccaatcagccccactttttgctgagaataaagtagatcccagtgaaaaattgagacagctgcggccatcattcacacgaaagttccactcgtatgtcctacccacaccaattgatgcaaaaagtgcggtttctactggatcagctaatcctgtgaagcacactacaataacaaatctaagcgagcgaaaacagaatttgtggcattcaacccccttggaaccaaaaatgtatgaaaaggatttgcaggctgagagcatttatgtaccaaaagttataaaattacagtctgtactgaaagaaagcaacaacaatattgcacaacatcagctacctcctccgttgttagatggccatatattttcccgccatgatcaaggttctgcttctgattccaaaaaaattaaaaggcaagccttttctggtccgttaacaagtaaacagtggtccttgaatcatccccagttatattctggacctctcctacgaaatccagtgcttcaaccttcttcgtcaccacctaaagcctctgcaggtgcttcccctacctttatgtcgtcacctaaaattagtgagcttcatgaattacccaggcctcccgctagttcctccttccagtcatcaaaatcaatgggtttggttggtcattctgcccctcttgtgtctagagctcaagtacattcttccacaaaaatggtgactaaatctcctctgccaaaaccccctcaaaccgtttctcgtagtttatccattccctcaaatgattctagggttgtggatttacaagtgtccaaaccaatggatgttcctcaaaactctccgatcacagaagatcttgtttctccacctttatcaccacttgccttatctaacaactagcaattatcagtttccagatcttcatcaatctggccaaatcagaggtaatttgactcagtttcactgttttgatttctgcataatgttgctcaaacataaacgtcagatattgtttagtggttgaaatattttatgcctcaacaccttcatgaaaagcattgggacatgttgggtttaactaggattgatggtagtccaagaaaatatcgtttggagtctgctacaaatttttttggttaatatcttgtgatgagtattgtcattcaaaaaataattggaaaaaaatagggataatttagtgtttcttttaagggtgctatatgatggaaagttagtgtagggtgtctttcttggaatctcattaggttacatactcagtactcttataatcaatagttgtgaatcaataagtgagtcttgaggtgaaccataaatgcatttaatcatatattacattatttctctattttgtattgcttttctttttccccctttaagtggtaatggtgttaaattggctacaggtgagaccattattttgtggccatgattttggttctaacttaggcaacggagagttttgggtgggaaggatcgtttctcgttaattagtttgtacaggtgctgctactgctgctgaatatgtaaatatctttttgtcttcataatttattaattaattatccgacatgatggactcattacataatttacttccatcattgaggagttttgtattcacaacactacgagctatctataatctataaacaataatcattttatattttaaaaaaactaatttttcttgatgttactattattttatttatttatttttccctgaatgttgtttaactatttgaatagctcttttcaaaatatatatatatatatatatatatatatatagg

SEQ ID NO: 207978 - DNA, 900 bp, Cannabis indica
atagttttttacgtacatactttttatgaatttatatgatgaattagggcacaaaaagaattagtaattaaactacatcatgaaacgggcgggaaaaatctcatccaaaatcaacaatataacacttaaatatttatcgtccctaaaagttttatgggtaatatttatcgtccttaaagctgttcgaagtgaaaaagaagttattaattaaatttttaaaggagtgacacattgatcaaagtcgtttataatacttatattattagaggcaatattttgtcgctcttaaaaataatcgtctctaatatttaaaattgttgtagtgaggtaccaaaccacactatctctcttggttgagaaaatatgtaaaattttcattgtggacaaattcacatctaagtttggtaaaaaaaaagttgtattatttttatttcccataacagcatcatcacgtctttaataattagaatatagacaaaaatatgactaagcttatatagaacaaaaattgtttgtcttgtgtaaattaattcgaatctcataaaatattcataacaacgtctttaaaataattcaaaaggtaaattatgaagaataaatgttaaaattgtattccatccaatcagttatataaaagcttaaaattttacattataaatattattcgaacaatattttaataatttctcgttcttctttattttctatatatatatttaatatttaatatttaatacttttaatttttttgtttatatagttaaatatataataaatatcatatttaaatgatatagagaaagaaataagaaaactggcataaggtagaagtgagaaaataaaatttaataaagtaatttagtaaaataaaataaagtataagctgatggaagtaactct

SEQ ID NO: 207979 - DNA, 732 bp, Cannabis indica
ttttttatgaaagaaaacatgtttcgctatttttcccaatggatcaatttcatttttttttagccaatatgaagatatataacatttatttttatacaataaattatgagggaaatgtgcatactaataataaaatatcagattatatgttgatcacctattatgaatttaataaaaataaataagatttacaatccttaaatttaaactgttaccattttcaaataatatcttaaaaaaaaaacaaataataacctccaaactttttttattaaaaattctccatgaactatttctttactaaatgctaataaactccttatgtaacatttgttggtgatgatatcatatatcaatgttatatgtataatttaattaaataatttttttgattgatttattatttttaaagatctttattttaaagattttttaaatatttagtttatcatttatttattttttttaattgtatttatatatgtgtagttaatataacaaataatactcatgtgaattcaattttttgttagtcaggtaagactgtaactgacataatgatttttgagcattatattaggcactaattgtatgcaacaccttatgtaggtggcgtctcacggttacttagcgatatcctttaaaatttattttctttaattatgtaaaatctgacacttaattacacgatattaacaccgaaaaaaatgctagacaccaataataattttt

SEQ ID NO: 207980 - DNA, 744 bp, Cannabis indica
agaacacagttctttattcactgaaggtctgtttatatacacaagagacaactaaaatgaaagaaacagttacaaacaaataacagaaattagttagaagaactaactgaaattacagaattaaccatctatactaacatcccccctcaaactaaatggtgtggacaccatttgaagtttggtttttagatacaaaaatcgttcaagtagacaaggcctttgtcaaaatatcggcagcctgatctaaagatggaacatatctaacagaaactttgttgtctaaaatctgttctctaacgaaatggaggtcgatttcaatgtgtttagacctcgcgtgaaagactgggttggcagcgagagtggaagcgctttggttatctacccaaatgactggagtatgcaccatagaaacttgaagttcttgcagcagcgaccgaatccatttgagttcagcagctgcattagccaaagctctgaactcactttccgtgctggaacgagcaacaacgtgttgcttctttgctgaccagctgatgagattgtctccaaggaataccaagtaaccaccagtggacctgcgatcatcaatacagctggcccaatcagcatcagagtaggcttgaagagatgtggaagaggatggccgcaaccataggccatgtttgacagtcccttttaagtatcgtagtaacttttacaagcttcccagtgtactgtagtcggtgcatgaagaaattggctcag

SEQ ID NO: 207981 - DNA, 613 bp, Cannabis indica
cataattttctctgccaaataaaccatatttgagtccatagctgctaaaagcttgttatattataaatgatattatcataattattttttactgaatgtgtttaaaataagtcatttttgaaatttttattggcacaaatggctgtgattgccaaacagattctgaaatcttggttccttttatgcattccaaagtattgttacaataatgccttaaatttgtgtcttttataagaatgttttctcacttcagatactttccaaaaagagtttgttttccaaatactttgtagtttttaaaaatactacacagtcacatcccatttaacctcactcagtctttaaaataaaagaaccctaacatataagcagggcatgtaattatcttccttttcaggtacttagagaaattgagttaatttttcagggcctcctcacagctaagaagaggctaaacaagctcttgaacccaggttgaagacagctaaacccagctctcttcatcactgttacagcagtttgacttaatagcatgtatcagtatagcactacaaacattgagaaaatctgttaaataagagttctcagaaaaatcctaagtagagaaaaaaat

SEQ ID NO: 207982 - DNA, 943 bp, Cannabis indica
agattggaaatgaaaatttggaaggaaaggcagcgacaaatatgcccataattaatactaataatattcttatttcaatattattatttttcattcccgccccttacttttttcttctgacaattcttttttgtgggacagatatgtattgatatatataaaatattacatacatatctcagtgatatacagcttaattagtcctcatcataaaatcatttaaataatacaaaaatttggatacccaattataccctgcttaatgcttattatataatatataatactgtatagaaaaattcttcataaacccttaaaaatgaatctgcatgtatttatgtatttttgttttagttggggcaggaattataactcttaattgtttttatataattttattgtagttatttagaaaaatctcatatttttacattatatagattgttccatatgctgaaaaaaataattaggaaaaaaagttaagtttgacttaagtattttgtatattaatattttttaatatagtgtaaaaagagatattttttgatattttttttaattaagtagatacattaagcatagaaattaaaatttgtcatttattattcgacattggatatcaaaatctaatggtttaatatttttaaaattcatatttatagttaaatttgtttagtatcatgaataggtattacctattgagaagtgttctcgctatgtatatatatgtatataactaatttaaataattgatattcattaaaaaaatcaataatttttttaatagaaagatgtaattttattaactcaaatcattcaaaagtatatcacgtaaactactcggagtcgtagaatccgaataggtacaactaacatttaactacgaagatctagccaaatggcgagcaacacggttagcaaattgcttgataaaaattaaaaa

SEQ ID NO: 207983 - DNA, 686 bp, Cannabis indica
tataaaaaaacctaaaaaaacttaatttaaaaaggcgttaaaatttttgactcaagacttgagaatttttgactaccaaacccccaattagtttgagaagtagttttcattaattatgagaaatgcaaaaaaatatcagtagtgtttatcactttcctatgtgttaatattgctattggtaaatatcaaatgtcatatagttttacgtaataacttttagggattatcgctagctaatcgcaagatgacatatctaaaggtactagacaccgctaatacttaataataatactcattaattatataagatacaatagttaatttcactaatattaatagttaaacaacattgattccttttatcatttctcatttcataaatgcaatgtacggctagaaccaaccgctaatttaggcaacgtattgttactgccaaaattaattaaaccattttctgcttcagacttttcaacatgtacaaatagatgcataatttgaaagttggacttgtacagttcaaagtattcaccaagtcaatatttttgtaaaaattctcacctacctcttcattttgttttattttgttcctacaaacactccatgcatatatatttcatgaaattacaatactactttaaagtttcttcactttgaaattgttgggtctgtgaagaaacaataaagga

SEQ ID NO: 207984 - DNA, 629 bp, Cannabis indica
cattaactaatttcatagcatgaatttattagtattgttatgtagttgtggtgtgctgacatgttcctttaacacttctcataatttttttttcgatgaatagctctttatatttagtttttgctcagtaaaaaatgtcattgttaacgataaagttataactcccataattttggaaagggcaagagaaaaacgacttcgtatgaattggtcaactattaaaaatagagttacccgcttattcccataatgtatttcttcatatcttgtcaacatgtttggtggattattcatacgtacacataatacatatacatatatttatgagtctataaataaaatatatatacgttatgtatattgataatcatcgtgcatgccagcataaacatacacatctatgcacatcaaacgtagttatatttgcttcagatatgaaagaaaatttcaagtcgcatccgaaaatgaaattactaattcaaacaaaggcttaattaggtaattcatttccaattaatatatacaaatagtactcgaaaatttagaaccataaaaattcagaggagttttaatggaagaaattaataattagaaagatggagaagagtttcacgtcaacaacaaaattc

SEQ ID NO: 207985 - DNA, 1182 bp, Cannabis indica
ttttggatctaagatctgaatataagagcaaaaatataaaatataatacgttcgataaaaaaaaaattaaaatttagaaaataacattttgatgtaatctatttctagttttttaaaaaaaaaattaaaaaattactgcaaatgacctctattaattttaaaaactgttttctattttttaaagttgaaaatagttttaagttatcaagtcaaacaatctcttgacttctcttaattatgtttttgatttttgtgttgctgattgtcaaacattactttcaaatttacatgatattttgttagattatataaaacaatctgcaaatcgtattactcactattatttagttaaaacttctgtttagttagcatatttcattagaaaaaatacacaaatccaaaaaagaaagggcaatacgaatatatagtatgtgatagtctctgatatacgtataatattaaaatgtgtgatgtaaggttcctctagtcacaacttttgtattttatataaagagacctcttaattacacataaatatatagttaataccaaatttaagattaagtagaagaatccttcttcttattacttattttttgaatttctaaattaaacagaaataattagcattaattatttcataaaaagaaagaaagaaaagagattgatgttacttctttatttataaatatcgtatgtatgcgagtatgaatattttgattaatgaaccaaacagacaacatatacataaaatagcataaattaaatgttgcaagaaatacaatataatatagttgccctctattgaaaaaaaattaaaaatacaatgtagtatgcatatatcttacctatcatataaaatgtctatcaaactttttttgttgtgcacttaacagaatattatgtcttttaacagaatataccaattaaaaagttaattttaatagatgtcatttctattcacaaggaaagtcacacccgttccatttacaaataaattattattcacatatggacacaaccattcgcaaggcatggttatcaaataacattcaactaaatgaaacaaataaataaatcatctctgcacatttaatttaaaaaaattaaatctcctgaacagtgtatagcaactcgacaagaatagatccatttggtaagaatctgaatagtttacaataa

SEQ ID NO: 207986 - DNA, 1297 bp, Cannabis indica
gaataaaaatatgattttttattatttgttaatattagaggagggagtttttcaatttttgaaccttttttatatttgtaaaaagaagtgtaatagaattgcggaagtgtatgattgagaaagtaaaaataagagaatgtataataaagtgtatgaaattttatttcaaaattgttgacaataacaaagtagtagtccatgtatagtatttagtatgtatgttatttgggttatgtattaaatataggctttctatattatatattaaatataaaatagcatctcagataaaaaaaactgtgatcaaatataaagattaattgtatattttttagaaaagaatgcaaagttcaatgaagcaaagaaggtgattgcgaccaaaaaaaacttgattataaatattttgaccaaaattaagtgtagtgtactattttgatatccattctcaaatataatttagcaaaacacattgagtacaaataataatagtcaaattaatctttgatcgatatccttttcaaataaataaataaatattttatgtataaaaaaaccctatacttatttataatttatttttctaacccaatatatatacattgaatattcataaaacatctaccaatttatttttatttttcttgacaaaataaaactattaaattattaatataaactttttttttttgagaaataataataaacataagataaagtaattagtaaaatcgaaaactaaaacaaaaattaattttggttttttgttttcaaatttaattttttaatgtattatcattttaaaagcggaagaaagaaaaaacgaggaagtaataatttttggttaatgatctcctccggagaataatgcaggcagtggcttgtcggctagtttttaaagtccaaaatcaaactcataatgtaaggtatgcaatgatcattagcgtgccctaatactctctatatgttttttttttttaaaaaaaaaaatactatatacatggtatacatcgatttgtcaatactgatcacatagtccctacttcaatcaatttcatctttgttcttaaataaaatgcctacgaatcactttacgtgatcatatcttattatgttgacatactctgcaaagtagcactaaacactatgtctactttttttttgttttggttgatgatttcagttataaaataatattaaataaattaaggaaatatttatcttatgcttgtatgagtaacggtagtctttataaattaagttgtatttaatttttcttctatctctggagtatactagt

SEQ ID NO: 207987 - DNA, 915 bp, Cannabis indica
atattgttgatttaagtggtataaatttttcagttgcccaccacaataggtcggttgaatccaaaagcatatatagaagcacatcacagagcatgtatatagctagttagtggcgcttgattttgattatgagtacataattatatggtgtttttttgacatcaccctctcctcatcatcatcatcatatttcaaaaaaaaaaaatcagggataaataatgatcgttaacttaaaattgggcacttgagttaggattattaatatctaccgtatgtaagaaaatgaaatgaaaagagtcatgtttaatttcaatggaactaattattgatgttcacttattactccaagccatttcacactaactagactttcggcccagttatatgtatttttatatcgagttaattgcattgaaaaaatctgtagtacattttttttttttactccaattttgtttttctttcattgattgtgtgacgttagtttaaaaaaaaaataatacattcgtataataaaatatttgaaccttattttcggtattgtaaaatatttgaatatttttaaaaatttataagtgatcataattataaaagtaattaagctaaaaagttttcttaaataccaatttaaataagaggtctaccagaagattccttcatatatagactaagagcatgtgcaaggagatggtatatattttcatatatgccgtgaatattggttcaaagagactgcatttcacacaacattttgaagttttgtctgtagatactgcatatatattatatataatttaattaatatttatatatatttatattattgtatttataaaagtaagaattgttttttgggaaattttacaatgcatatttctaaaagtgttatacaaatctattcttatttgtttcggc

SEQ ID NO: 207988 - DNA, 1177 bp, Cannabis indica
ttacaatatacactatcatatattaaaatttaaaattttagctatctcaatacctggaatacaaaggtgattgctaaatctattttgggtggtgcacaagcacctatagtttcatatatgctttgcactatgtttggtaaagagaggagagaggggaaagagttgaagggaaaggaaatacattagatttttttattttacactttaaaataagggtgtacattggatgggttctaataggtttcgtgttttcagatttttaagttcgaatttaggaattttgggaccgaacctgcccatgtggaaactagcttttttgggtttcgaatccaggtcggtggggtttggattgggataggttcgggtttcgggttaggctaggctcattttttatttttaaatatcatgtttttaacaaaaagaaacaaaataatacaattatacaatatattattattattaggctaattaggatttttaaactcccgaactttgacatgtaccaaatcatgccccctgaacttttaaggttgttaaaaataccccctatactattgagattgttgaatttaaggatttttgtttaattttagttaaaaaaacgtctaacacagatgaaaattcaaggggcataatttagtatatgtcaatgttcgaggggcgtgatttggtaggtatcaaagtgtggagagcataatttagtacataaacaatcactaaaataataaaattgaatgaaattaacaaaagtccttaaatctaacaatctcaatagttcatggagaatttttaacagtcagaaaagttcaaggggcatgatttgtacatgttaaagtttgaagggtaaaaattctaattagccttattattatatatatacatattacataaactaacattaacaatttaatacacactcacaaattcacaattaaaaaaacatatatataatataattatataatatatataaataaataaataaaatactaactaggttttggattttagatttttaaaaatattaaactcgaacccgacccggtacataatcgggttacacccaaacccactgtactaaaattgaaacctagtttttcgggtttttcgggtttctggtgggcttcaggttttgggtataaaaatgtgcacccctactttaaaacagttttttttt

SEQ ID NO: 207989 - DNA, 525 bp, Cannabis indica
aatctataggccattgaagttaccttcgatacgtcgtctgctaggaagaactttaagaaactcggctcaaagcttctcgacgttaatggctttctcaatgtcactcagcctcatgctctcaataaacaaggaccctagaatagaatttggattaatttttttaaaatataaaaacacaaatacccattgtttaatattctttaaaaaaaaaaacacccattgtttaatatgattattctctgcattttcttagaatcccatgaatgattaaaacataagagcaaataagaagacagagatgtgaaaaattgcaaggcatcaacaactacggtactaacaacgacaaaagattaagctgcccaaatcttaaaaattaagcaccaaaatgaatataacaaatcgttgctcacctggttcagccgtcgagtctgctgcgcgtacggagaagcaccggcctccgcctgagagggaggacctcgcgccagcctcagatggggaattttttttgggtctggttggggtaat

SEQ ID NO: 207990 - DNA, 1333 bp, Cannabis indica
tggaaaaatcaagtggatttccaccggggaacgtgggcccacataaggtagaatctctctccttgaattataattaaataataattatacattcaaatagaattattaaaattaaatatgttacaaattcgatatttttaaaaaaaacaattatgttacaaatttttataacattattgttcttttttttttaaggaaaattttattaaacaaagaaccaagactacaacaaattaggcaagtcagccttacaaaaattggctaaccaaccaggaaaaaaatgagagaaaacttgagaagtgtgagtttctaaactcctcttagccaacatattggcacattcattattttctctatatacatgaattattttgtaatcctgaaagtcttccaacttagtcttgatcttgtgaaggagagtgctaatagcacttaaaggaggggctggattattcagagcagccaccacagtttggcagtcggattgaatgtcgaagggccctgttatggtggctgggatgtgcttgatagcttcatgaatagcccaagcttcggccatctctgtggagcagttgcagggtatatacaccatgccagcaagctgaattttccctgtccagttacgccaaatgaacccgagaccaacaccctttgaattctggtttatcgccgcatcacagttgacacaatctcggttttgggagggtcttttccacagtttcagcttgggttggggaggaacatcaatcggattcgtggcagccttttgggcaggattgttcgggtaagcagagaaaacccaatccaaaagttgaataccattcatatgtgggagtttgttccatttccgattacggttttcccaaatcgcccacatcaccttgattgcatcttcaaattcactttgcctcagccgattatgaagggcggaaagaatatcaaacatggatccattgtccagtaactcacactttgtataccaagggagtagtttccacaccgttttagtttttggacatttccacaaagcatgagttagtgtttcagcatcgttttcacaagcctcacaaaccggatttacctccattcctctatatagaagatttgtttttgctggcagccagttgtgacaaactttccagctaaacaatttcattcggggggccagcttcatgttccatatcatcttccaccatttatgaatttcttccatgtttgagcacctcggaggatgtaaattcatttctctacccactctatacccacttttgaccaagtattggccatttggagtataaggccaatgaagtgagtcttccacatacatgtcaat

SEQ ID NO: 207991 - DNA, 936 bp, Cannabis indica
tattattattattattgtgatattaaataaagtcagatatgccttttattttattaatatactttaatgtgtcaatgtccaatttatgatcccattttgagttcacactttgaaggtagaaatagtgcatgaacatgtcgaccccctaatcctattatgatcatatggtgttgaattggtttacttcattttaagcctctgactggataaggcttgatcttttcttattcaatctaaagatctgtaattttgtcattttctcacctttttcgtttctttttttttttttcttttttcttttaatgtctaactttagatcaagttccttaaaaagaaaagaaaagaagaaaactttagatttttaagaataataatacgagtattaattgaggcactttaatttcttaccttatttattttaattatataattaataataatttgattctcgatcaaaatttgtttgaggtaattaaaaattaaaaatgggttgtgtaacttattttattttatttttgtggcaaattggcaatgaccaataacttcatcgaatgtgtgtaacttttatgcatgtattatgaaaaaacaagaaactcttatttttagatttttttttattattattatttttatatatacatttgttttttttttcaaatatggctagcttgttaagttttatttatttattttaaaagggcttgcaaataattgatacaagtgtcacatggtgtacgtaacacaagttatgtaataaacagtattaatttaatagattaataatttgtagtaattgagtgatagagaatcagtccaatgtgtttgtttattcacaagtcacctttttcatcacattcacatgatctatgtccacctctcagtcatttttacatctttattcatctttatttgctcaccttttttttttgaagtttt

SEQ ID NO: 207992 - DNA, 728 bp, Cannabis indica
ttttggtgacttaactctaattaacagtacaggtccccacttgtgatgctaatttcatttttgttttttgggtttcttccagaaccataccatatgtgtaatattttatcttacttcactattattacttacaaagtcagcttatacactaagcagcactaagcagcgacccctctatatctttctctttctacattttattattgattaaaaaaaaaaacattatttgctgtaaaattattattatgctaattaaatataaaatttgtaggaacatgactgatcaagcaagtctactgtatttaagagtgacagttggagaccttataaattaattagcttcacactttttaaaaagtaccatatatatgcacacatatatatacatgacaaaagatgtaaataattatatacttattctataaaggaataaaatggagaaaagcttaagtaagcgtggccatatatatacctctctaatattaacatggaccataatttggatttttcttttctataattcctacagtttttagtatttgtgatttgaattttctctaggaaattcatcaattccttgttgaataatatatataagcattatttttttaagaattataactttgacactctacacaatattattgaacatccattttaaattaagctaagtcataatattcaatataaataacagaaaaagtaataataaatatagttatgtttaa

SEQ ID NO: 207993 - DNA, 646 bp, Cannabis indica
gagtattttagaatgattttagcttactttggtgaaaaatatcaattttaaagagctcggttttataaggtagaacttaattgcaaatttcaatgaccttagaagtagaactggacttggagctaaacatgaaagttgtagatctcttttttaaattttcggaacatcttgaatcgccaaattctaagttgtattgaattagttatagccaaaataccaatctaaatacgcgacagaaatttttcagcagaaggctctcgcagcagcgagcctaaagctttgccgcaacgagtgttatggctgcagcgagcctaaagttttgctgcagctgctgtgcaattggaaatttaggttttctctaggaggctcttgccgcagtgagcataaactttcgccacgatgagagtgcgatttctgaaatttaaattttttttaataaatcaaaggaatttttatgaaatataaataggacttttaaggtttatttttaggcactttagactgcatttttgagagagaaactcaaagaaagaaatagagagagagagagagagagagagagagagagagagagagagagagagagagagagagagagagagagagagagagagagagagagagagagagagagagagagagagag

SEQ ID NO: 207994 - DNA, 517 bp, Cannabis indica
catttggaacacaaagtttttctacaaacctggtaaggaaactctcatcaaggtggtcgtttaggccattccttcttttgccatgtcatgttttaagatccctaaatccacttgtcactctatccagtgcctcatttctcaattctggtggggctctttcaggaacaacagtaaaattcactggaagagttggtctactatcagcacttccaaattttttggtggccttggttttcgatctctcattcatcataaccaagcgttgattgccaagtaggcttggagaatctagaatcacccttcttcgctccttcactcccttatcaaggccaaatatttcaaaaacaatgacttcctcaatgctcctattggccattgcccttctcaaacctagaaaagccttctctgggggtctaagcttcttaatcatggactcatttggaaagtgggagacgggaaatccatctccctaactagcgataagtggataccaaggctccattccctctctttcctt

SEQ ID NO: 207995 - DNA, 613 bp, Cannabis indica
aaatttaactaactaaaataatctctacatagtaaaccacgaatagataggtaaacctacaaacataataatgcttccaaagcttaaacagaacacaaataaaaaaaaaaaactacggataaatattgtattagaaaatatagagtttttgttaaatatacatgttaattatatgcagaaaccagttaaaaataatactaccttaataaatttctttgaggagaagattaaaagatgtttgtttttaaaaagaaaaaagcaaatatgaaagaacactatatattattgcatttgaactacttggttaaatacactttcaaaaaaaaaaaaaagaagaaagaaatgaatactataaatatgtgtgcattaatggcagatgagtttcttatatctgctaagggggtgcaagtgttatgtgttcaacaaccacttggcaaaataaaaagaaaaaccgtggcagtaagcttttattattgttattattattatcattaatggcaccaaaaagagaaacctcttatccttaactattgaagcgatgcattatatctgctaagacggtgcgtgtgtaatgtgctttcacaaccctcatttgcccaaaaaaaaaaaaaaa

SEQ ID NO: 207996 - DNA, 433 bp, Cannabis indica
ttactctctctctctctctctctctctctctctctctctctctaagttttcttcttcagttacagacctaaccaccaccatcacccatcgcaactcaccaccaccacaacccaataccaccaccgcacaaacccgacgaaaacccaaaaaccccgatctattgtctccaatctttctctttctccatcccttactggtctcaggacgccgatgagccacctcaagactcttaggtccccttcgtccatcatcgttttaaaactcgttgaagcttctcaacttcagtctggacacgctgagtcttagcaaaccaagtgagtttcaaaagtgggctcctttcgtgaagatcttccaaatctaaaacttacggtgggtcatggcagtggtttagaggagataaactggttgtggtgatgggatggtggaagctatg

SEQ ID NO: 207997 - DNA, 832 bp, Cannabis indica
gaaccctaattactttaatctgcaattgctatgaagctgtggtaaaaagttgagattagatttggccccatactaactaagaagtagtcaagtaagttttatagctattaactctccatttagtatattctgtcacgctttttcagtttatcagactaagcatttttaaaaacaccatgaatgaaaatcctacatatagtaatgaagaaactatgcattagctgatcaattttgccatggctgtaaatattttcttaagtataattttattaagttcctttaagtactttttaatatatttttaaatctgtgtccgtatgctctcatgtgcagaaagttcttcgcaacaactcatgtagctgctagaacatttatttcttttaaaaggaaagtattgaaaggtagattttcaatagccagctctcactactttaagaaaacattattttttctaacaaacccttttttccctacaaagcaaaattctgtccactaatgccaaaattacgcaaatacttcatagggatcaaattaatttttgcttcacatttccctgcagcactagaaccaaacaaggcacaattttatacatcactgccttcttaaagtggcattttaaaatgttagcactattatgattagatgtgaagatgtggactaagggcatggtctcctctgaatgcccccaagtctctacattaactttaagccataactggaattgggcaatatctccactttgggacttataatcttaaatacccatttatacatgatgagtctatcatatggtgtgatttgtctctaaactgccattaagcttcacaattgc

SEQ ID NO: 207998 - DNA, 747 bp, Cannabis indica
atttgtttgaatttggtttaagtttcgttttagttttgtttaatttttttgtgtgatatagatttgaaaataggttgtagtggtagtttcgttagtgagtggtggtgtttacggtagttatggatggtggtgtttcggtagtggtgagtggttgtgtttacggtggctacggatgatgtttgtttcagttatggtggtagtggtgtttacagtgactatgaatggtgatggtggtggtgacagtgtatagactaaagaagaagaataaaagaaaaatattagagaaaaaaatatttttttttcaaaaaattatgttatggttaaaaagaatatatttttttattttttatttttttaatataattatttacgtgtcaataaaattgtgccacgtgtattgtgtccatgtggacaatctaacttgacagttaacaattaaatttgaatgaaaattatgatttgttaacggtattataattttggggactttaccgctaaaatttaaattttgaaggttaattgcaagtaaaaattaaccctttatttctttattttaaaccacgtaatgtgagtattcttagctatttacatcttagctatatttttgcaatgaaggagatgttggtagtgtagtgctcctagctaattttttgttttttgttttttgtttcctgagaggtatgaggtgtttacctcttccactgtgagtgctatgtagtcacacaccatgatatatatatatatata

SEQ ID NO: 207999 - DNA, 887 bp, Cannabis indica
agatcctttgactgtggttactcgtgatcagaacaagaattccaagtattattcatagtctaaatatatcataaataatttatagaagaatatataacgaatctctacagctttatgtagttattctctatcatccacctgagactccaatatttagcatcacacttgtaagcccaataggcccatccgaaagtggcacgtccatatacatctaactgagctttcccaaatctttggtaatcttccttcgacgctcctcgcattgcaatttcaccacaccattcccctacataaatacacaatgttttcccaatcaaatgacataaatgatcatcaatggaacttaagtaataagtagacataccaacaaaagagagagggccattaggggtagtgacggcgctgagatcagaagacctttggttgtaaacgaaatcgatgttttgttgaacattcatgcttctaaacgagtctgaatataagttatagtaatgaacatcgatggctacattggcaaggcctcccgcaaaagatagcagctccttcgagtcggcgggtcccaaacgatttgataaaatcacgtacgcactcgatgtgtacttgcgcactgcgttgtaacccaattggtagtacctaatcagggtgtctagtgtcacacctggtgacattggttcattcattaacccgattgctgctaggttcgtcttattaccatatctgccaaataaattcgttgttattattattcttaattctagcctaggctagcttagttggaaaggaaaaatactaaattgaaatttttactccctaaaatttttgacatgtctaaaatgtcttttgaatttttaaggccgttaaaaaatgttcctcaactattaagattg

SEQ ID NO: 208000 - DNA, 595 bp, Cannabis indica
gattagttgaggttttgtattgcttaaatttaattgttcataattgttaatgacaggatttttagggatagtacctgtaggtaatcttctttggggaatggtggtctctcgatccatggtgtttatttccatggaatgtgcggattggatagaattgtcctctacatctgttgaatggtgtgttttgttagcctcctccctttccttattttcgtttcttcctgttaagtccacccttagccaagaaccgaaagcttgagaaagtttcccatcttcctttgtcacggtagcccgagtcatagaacattgtttcatttcgtggccaattaatccatagttaaaacacatgtatgggagcctatcatattgaaattgcaaccaaatccgccttttttcatgtggaaaaagatacccaggaaaaatcttggattgaatggagctcctcactttgaatttgaagaatccattgatggtaattcggtttacatccggttcttagatgtcaataatgtccccagccatccctaccagtctagccatattagatttggtgattgctctcactggtaaattgtaaacccttcctgagatggag

SEQ ID NO: 208001 - DNA, 811 bp, Cannabis indica
aaccacgccacacaaataactatatatacgattaatcatctacaaaaatctcatcagtagcaacactaattcttgaaatttcttacaactaaccaaatcattcaaagttaaacaaaaataaaataaaaaaaattattgtccaaaaccttcccaacaacaataaaaaatagccaaagaaaaattaaatcaaactctttcccagttaatatcaatatgagaaggacccataattactacaaaaatgaataaatcccaaaacacataacacttcccttgtgaatacaaaatcatccagccacgaccattatcttgacgcttatatatattgatatcggaaaaagagaatgccaactttggatatcctagccaatcgccatcgcaagcatctcattgatatctctagctatattaaactcaaacaacatctcaacaaaaaaaatcaaaacaaataagaaaatatcattatactgcttttaattttctaaaaaaatgaattcatggtgatttgaatattagggtagaaaatcacatattaccttacataatacctttataaatataattctactaatattgttatatattaatattattatgataataataaaatattaatgtttcgatgtgagaaaataatatataatttaatcatattttttcatggttgataaagagaaaaagagatgaaggatgaatgaataatatgaattaattaagttaagattatgccatatatatgtatgatatttatatagatatttatagtgtttttttttttaaaaaaaaaattgattatttggtaaatattaga

SEQ ID NO: 208002 - DNA, 804 bp, Cannabis indica
ttaagtgtaacataacatggatatgtcattttgctaattttctcgagtcatttgcataaagctattgtatattggcttcgttgaattaggagtttatgtcctttgtgatctcttttagtgtatttagcgtgtaagtatagctcattcggttgttgacattggaaacttgttaagattatgtttctgagaagttaggggagtgacttgttctgtggttggaaatctttcacagttgtaactgagtttcaagggttgcttgagcattggctattcattttcaaattctatgaagtttatttccttgctattgttgatcaaaattgttgttttagacgatacatatgtagaaattccaaattctttagaatgttttacatgtcgacagtaaatgcatatggaatttgttcagtcggtgtaattgtaatctatagtattcacttcttcttagaatgtgttttttcttttgcttggtgtatctttatatgttagatttggctttgatcccgtaaggatttcccctgtggcgaaaaatgtgctaactactactactcttcaagagaattttcataatttttgcgataaaatttcttggatattctttcctgcacaaaacaaatactaagtgtgtggactaaccacaataggctgaaatatttgtctgtggccaggtactagaagtcttcactcaaccggagtgaagagaatgggtggaggaggacacggggcatgacgattacgaaatctaaccttcatgcaaagcacatgtacaatttggacaggatgaagtatcagaaaagtgaagat

SEQ ID NO: 208003 - DNA, 1191 bp, Cannabis indica
cccccccagaaaaaaaatacgagaaaaaaatgtatattgatttttaatagttacaacatatatttgattaaaagatgatatttatagacataattagaaccttggtgtaatggttaaggtagttggtaaatagattagagggtaaaggttcaaaccccactaactacactttatattttctttttaaatttatttaccgcccccctcactttaaattctgggtccgccactgagtagttttgtccccatgtgactcgcaataagaattctgcaactcatggccgcaaatcatgcccttcggttagacgatgagctatcctggttcgagaatattctactgccgttgtggtttgctgctttgtaataatcatgtgtagactttgttacaccaagtcaaaaaaaatattttaaaattagatgacattgacatgcaagctcaaatgtgtgtaaagctaatgtcgtagttattgtgtggaattttttttttagataatcataatacctacatataagatctgcatcgaactatacatttttcaaataacaacatatactaaaattgtagtcttttatactatatagaacgttttgaaaagttaataaattattttagataataaaatacaataatataatataatataaaaataactaattgatatattaagacttaaatataattaagttttagtaataacaaaaaaatatttacaaattataaatacaaaaatgaagttttttcttaaaaaagttattaattgatttattattagtagttaaaattttacgtttgaaccaccaaaaaattgaataaaaaaagaaataaaattttaaaattacttctatttcaagcatattataattttaggaaaatttacatccaagtacattaattgtaatttaatttcaaaaatatggtaggtccattataattctaaattataccgtttaaacataccgtttttaaattaattggttttcattttgatgacgtcagcccatcatatccatcattccaggacgtcaatcaacctccaaaaaaatcaagctccacgtgttttgttagcttttttcaaatttgtaattagttatttttgtgtgcaatggcttataatcagattttttttaaaaaaaaaaaaataggagtgagtagagtgttcataggggtaaatataagtcatttctatcatt

SEQ ID NO: 208004 - DNA, 1013 bp, Cannabis indica
ttgatccaactcaaagcttcacgaacttcaattgcttcagccaattcaggtgtagcattcccctcgaaaagatccattcggccttgaactagaaagccatggtggtcacgagccactaagccaattccgacacatttttaatttttaaatgttcattattttaattttaaataccctaaaaaaaccattttaatacaaacaaataattaatttttatattaatagataatatatccgacacatttaatatttaaacgtttccaaattattctttttaagaaggtactagttttagcataatatctcattataacctataaatcattcatgcaattaagccaattattctaaccagtctagtcctagttactccattaatactatgtttggtaagaaccatagaaaaatttggaagaaaaaaataatatttttcttttacattgtttggtaaacaaggatagaaagtgttcttatatgaaaattactaccttatttatataaatttaattttaaaaattaattagtgagagtaatttaataaatttacttatgtataattgttatctttcattttctcttcaggacatttttctctttcaccaatttccttctcataccaaacacactaatttttatattctctccacttttctttccttcattttttccactataccaaacatagggtaaagcttgttctaatttcaaacatgattaacaaaagctcacaaatccaaatcctgtccacaatggcaaacattttataaaaataggagctgtttgatatctagaaaagccagagagttaaacatctttctttttttcaaaaatggtatctttcatcaacactaacatgtctggaactgtaagccttaacagaaaactgaagaacctgaacttaagtactctcaaacattggcacagacagcttactcagaagatagagatgactggtaaactaaaccatatactcctagctctatcacataatagatcatatatcaaatcaaact

SEQ ID NO: 208005 - DNA, 1192 bp, Cannabis indica
atacaaaaaaattaatttaattaattttgagagaatttacattcaaaaaaaaaaaaaaatatactcatttagtattctaaaaaaaagtttagcacatagtgtaatactgatactttgtttcgaaactataaatatttggtactgcaaaattaaatttaattaataaaattttatcaaatagttcgcaattatataaatcatataattaaatttcaatttaaatttatataattaaaaatagtttgattgtattaataaatatgtacgatttcaatatataagtattattaaaaatattgaacactttaaatttgtatgtatgtaaaatataaggtatcaaatgagtatattttattattttttatttttgttatattttttcttctaaattatactcattttttttcttcttcatcgtcctcacaatctaagaaaaagaatatataaagtcaaaagtatttaaatattatgaaaaaattaaatataaaaaaaatataaaattttcttagagtaaaaaattaaataattatacattatttaaaattttaataaagaaattattaacacagaagaatataaacaaagaaaccactagaggagccgaacttctttttttttttaccagaatagtaaatgtcgctaagatgtaagtatggctgtactttagttattaactaattagttttatttattgtgttgatgttaggtttaaaatagggttgttaatacaatttataatttgtagttccaaatttcaactaattcggatcaaatcttaattaatttgaactaaattatttgagattgtatcaaaagatttcggtgtcaatggttggtcaatttcgaacccttttataattttttaattcggttacgacttttaaaattctcaattagtggtttaaaatgggttgttcatccgatccaacctgtactttttagtaaacagtgcagatttcatattttgaatccaatccaatccgcgtaacagtttaaatttaatccgtaatagtgcggatttggatcggttgttttagtgtggattgcatttttaatattttaaaacaaaaaacaaaaaaaaagcaaccagtaacacaactaaaattggagatggagtttccatttgttttgatacttgtacagttgtctcaattgcagtgtaaagaaaagtaaaaacgattatgtttagaaa

SEQ ID NO: 208006 - DNA, 577 bp, Cannabis indica
ttttttttttttttgtacaatacctctttaattttacttttatttacaaatagtgtcggttaaacttcattgttaaatcctaactttttaaaattaattttgtaatatttgagtaattaaaattaatttggatcaataaaaacaataccacatgtgcttacaataacaatcctaattgatattatttaacagtaaaatttaaccaactacagataaaattagtaatgtttagaggatatatattgctacaaataaagatcatggggttaagtagtgtagagaaactaaaataaaagaaagtttggctgtaaattaacctaaatatataatatactattattattagacgcgttaagattaccacatacatttagtggtagagaaatttaatgtgaagcactataagaagtgacaaattattattggtggacgtgcattttaatattggattacacatattttgatttaatatgaaaaactactaagtaattataaagcactatattattatggtattaaataccttaaggtgtcaaatggtaatatttttattgattaataatttcttatattattt

SEQ ID NO: 208007 - DNA, 958 bp, Cannabis indica
tattattattattagtgtgattaagaagaataaacatgttacaataataaggtatttggtgttaatgatggtattattattattatttgtgagtaatagtactactactgaatcatcatcatcatcatcatcatctcaaatgttcatggtttctgattatggcaatggaaggaaactattgtaggcaaaagcagctacgtactacttcaaacaatattcatctattcatgtattttatataataaatatgtataattatggaattatttttatataacaaataaataaatatattcgtttgagacatatttttgtgtatttaatatattaacttctaatatatatttttcataatattcttatttttcgggtagatctagaaactaattattgattataatacagatgataccaaagtctgtaatttttgtaaaagaaaaagttgaaaccctaaaaataaaaggatttctttgtgttaaaattattactttttaaaaatttttactctatcaagtaaaatattctaaatttaattgactacgagctaattaccaagcttttcatgccgttgacacaatgttcaacacaagcttggattgggtaaataaataaataaataaataatcttttatattaatatataaaaaaatattaagttatatatatatttattcgtcgattatatatatacatatatatatatatactactatattgttacgtgcaatgcacgtatgctatgttttatattaagtattatattatgagttccgaaggaaataaatgaataaaaaataaataatatttaatttagagagatttaaataataaattttaaattaaacttttatgtccaataaaaacatattggaaacaataataataaggttataatatatgttgcatttgttccagttcttaaataatagcagcaagaacatctttgacctggaaaaac

SEQ ID NO: 208008 - DNA, 724 bp, Cannabis indica
atggagtcgatgagagaataatgatcaactatttactcaacaacaacaataatttatctcatcatcatcatcaacacaataatcaacaattgagttttgccgatgttatgcagttcgcggattttgggcccaaattgggcctaaaccaaactgaagaaaccgacgaagctcaacaacttgaagagaatagtatggttgacccggtttactttttgaagtttccagtgttaaacgacaacaacaacaacaacaacaataatgatattattataaacgacgtcatttgtcaacaacaacaacaacatgaagagatgatgaaggattgtgatgttggtggtgataataatgataatgatgatggttcgatgcaacatcttcagtttttgggtgaagatcttcatcagaataacggtaatggtaatggtaatggtaatagtaataataagaataagaggaaaagaccgaggacagttaagacaagcgaagaagtggaaagtcaacgaatgactcatattgctgttgagagaaatcgaaggaagcaaatgaatgaacatttgagagttcttagatctctcatgcctggttcctacgttcaaagggtaactatatatatatatatatctatatatatatatgcatgagtttttatgtttttgaataaatttattaagaatttaattagttaatattacataatgcacatgctagttagaataataaataa

SEQ ID NO: 208009 - DNA, 785 bp, Cannabis indica
tggcactttattgatcaattaactgaacgaaaattaagtgttaagtttaaaaatctgaggatatcaataggaactacaatgatgaaatcaaatttatatgattgaaatataaaaataatgcattatgaaaaaatttgattcataatctcacacctgtttcttcttctacataatctcacacttgcttttttttttgtttaattcataataaattttttctataaaaaaatatttttcctatattctgcaaattaaaaaaaaacttcacacatatatagttatgaatacatatataaataattgaataattatttaattttaatattataaatttagtttatatttattattatgtgttttttaaaaaataattaatttaagatagatattttcatagaatatttattaaaataatagtaaaatattttgtaaaatttatgctctaataaaatattgaaaaattgagagaatcaaggagaaaaaagaaaaatagctttagagagattttagaccaccacgttaccgcctcatatatagatttcaggagtttacagttttgagttagttgtacataacctctaatacttttattttccttatacataactctcaaaattcaaattttagtagaaagatttccaaaattaagaaacgtttagcaatttacagtttctatccatcttaagtgttaaataacatattggactgtctatgtgtacatatatgtgaacatgatatacacatgacacaactttattgatttatgtaaaaaattatttaaaaaa

SEQ ID NO: 208010 - DNA, 1579 bp, Cannabis indica
tttcagctgtatttcatttaagaatcaccgctgtcatgcttcccttttctgagaagactttggttcttgagacggcattggcattggcattgttaaattatgtggtcacagaaagagttcacgggtttgcttagaaaaagaatgaaaaaacagagtctatcaggaaggacacttattataataataataataataataataataattcaaggtaataccatattttataaattctattttgcaaaagttacaatttatatattgttaaatgataaattaaactttgtattagtattctgaattattttttaaaaaaataaaattttaagtaataacctaatatagagataataagataaaattaattatattttttacatttatttgtgctaaaatttatttttaagttaattgtattaaaataaaattatctaaaattaaatttaaaattctatctatactattttaaaaaatatatttaacaaaataaaaaaaataattaataactttataattttataaagtataaaaggtatttttttaaaataaataagatcaaaaatagtattaagttattaatcctaataataatatgaaaataaagttggaaaagcctcttacacagaattcacaacgtgtctctgctctcttctctctgtctgactagctcagttcatactattaaagaatgtctcaaatcgttacctctatattaatgctataaattaataaatagcattgatttagaaatttaaaacaacttaaattcaagaggacgatctagtgattatgtgttaatttctcagattgttaagttctttaaacaaataccatctgttagtaatagattatagaatagtttactatttattctaaaacttacttcccttttgtattcgaaaagattaaataaatgttcataaatataagctctgcaatgtcagtacacatacataggactaagagtttcttattaaagcgattagacctatatttatgataaccgtacttgaatatatttgcttgggttcatttcaggtctcaataatataaataatagtaaatgcatttcatttctacaagtgtaaatgttttgggtaaaaaaaaaaaacagtattgctattgtgaatagtgatattctaccaacaatactttttaacaattttaaaaaataaaataaaaaaaaaaatacaaaagaaaaatgtaacacagttgtaaactaatataaaagattggttggtctcgtgatgaatcaatgtctatcgttattacggggtctactaaataagtttccttttctagaaatatggtattcccaatctaatttctttccattcattagtcattaccaaaatagacaacaatttttgttattatcactttttcttaaaaaaagaataataatactaataataaaagaaaaaaaaatagtaatttatttattgtatgctcgaaaaaacatcgaaatagttagcaaataaattagaggatgtagaatttaagtttaatagagataattaatcatatacattacacacagtagaaacaaactacaattattataatattggagcatagt

SEQ ID NO: 208011 - DNA, 997 bp, Cannabis indica
taaataatatcttatgtatattttaaaacaagaatcacgtattcgtgtcggctgttttaaataaggctaattaataatttttttcctacgaattttgatatgtaccaaatcatgttcactgaattttttggccattaaaaactgcaactgaactattgagattgttagatttaaggacttttatctaattttaggataaaatttctaacatgtatgaaaattcaagaagcattaatttagtacatattaaagtttgacggcatgatttggtagatatcaaagtcctgggagtatgatttagtacataaacaatcactaaatagtaaaataaatgaaattagatacatgtcaaagtttaggaaaaaaattaataattagcctttaaataattacgggaactactgactacgactacatatgtttctaatagcctgttttaaagctagttaactcatttaaacaaaaaaattaaacactaatagtgtgctaaaaggttttgcaaatatggcatataataaatattatgtaaaatttagcacaatattattatgatataaaatttatattactataaatacatttaatttttattattattatttttatgttattattatctatttagctataatatttaattaaggattttttacaagtgttttttattgattttatctagtaaaactaataattaagttattattttttatgtttttaaaatattaattaaatattaaattttcaatcaaattttgtaattatgtattaaataagaatactaaatatcataagttttttttttggtgaaatataatataatttattaattttttagatgtcgagcaaacactacaccattgaccaatcataaattttttctatttcttttttttaaaagtgcaatttgcggcaaaactccttttatttaaccctttatttttttttttggcaaaactctctaatattttaatttttatatacttaacctgcttatctt

SEQ ID NO: 208012 - DNA, 699 bp, Cannabis indica
atattttagaaaaaaaaaaaaagaaactgttaaccgtttatatccatatcagttgggttgttacatggtccatctaatattttaaaaagtagaatgtgttaagctgattatacaaatatgtgtctcttacaaaaaaggaaaattatacaagtgtaaacgtttgtattttgtcaaacacgagtgataaaataaggcatgctaatcagattagcgtagtcagtctttgaattattttattactacgtaattttgacttggtcaaccaactcttttggcatatttgcctaaaagagacaaattaatacgggtgagaaatggtcaaggattatgaccttaggcaatatcatgatacatttccttttctaaggaaaagaaaataaaaacataataataataattagaaataaataaaacacttgggtttctgttgcaacttttatgaataaaatcacgttatgtatgtgatagggacctaaataagaaatatccaactttcttttacgtgtttgactcgatatttttgaccttaaactacattctttgtgactaatcaaatgtactatgaaaattttttaacttaaaaatgagatttagtatgccaattatgcttgttgcaaaattaaatccaactatacaactcccaatattgtttgattccttacatctacattaatgagatgagagaagagatttccagta

SEQ ID NO: 208013 - DNA, 575 bp, Cannabis indica
aggctcaggcaaattccttggctacatagttaatgtcaggggaatagaagcgaacccaggcaagatccaaacctttttagacatgaagttgtccacaaccattaaggaagtacaaagctcgacaagacgcgttgttgaactaagcagatttatgtctaagtccatagacaagtttgtatccttcttcaacattctcagaggcaacaaaaaatttgagtggacagaagcattccaggagctgaaaaacaattagctcaaccacctgtgttgtcaaaacccctagacaatgaagagctagatgtgtacctagaaatcacagagcatgctataactgctttcctaataagagaagaagacggtgtacaataccctgtatactacattattaaaagattaatcaacgctgaaagtcggtacccactcatggagaagttgacctacaacttgctcctagcctcgagaaagctgaggccatacttttaggcacatccaataaaggtgtacaccgatcaaccattgggacaggttttacgataacctgaagcatcaggccaaatactcaagtgggccattga

SEQ ID NO: 208014 - DNA, 770 bp, Cannabis indica
atttgcatcactttttaacacacaattaaagtatgtattttttaaaatgaattatattttaactttgtatcgttaatttgtttcactaaggatatatactaatacatacatgtaatattatatttgaaaatggtgtcttcttttctctataaaaaaagtctcatgtataatgataaaattttagtgtcaaactcaaaatcctagatttttcagtgcaccaacactgacagtctcttaccgtaattataaaggcaggtaatccctaggtaattaaggctgtataacttattagtattctattaattacttaaatgaatgcacttagaatagtgtttgtttattataatcctttctgggtagaaatcatggcttatatggtggaagtaaataagtgggaactgaaaacaaagtgaactaataattaaaaatattatatatattttgctttcagaaaaaaaatatatattatatatatacattattaatatgtattttatataaattgtatatatataatcaaaacatgattatatgcatatgctttgggaatggtttttgtccccatttttctgttatggttcgtgcatgaccacgagttatttgactatttgtttgttttgatctcatacgatgcagtacttgtctaaacccctaataataatgtccatcacccactagcaaaatacgatctctcatataaatatatatatatatatatatatatatataacatacatgtgtgtatgtgtgtgtgagtgtaggtattatag

SEQ ID NO: 208015 - DNA, 495 bp, Cannabis indica
atgacatccagtgtataccgttgcgcagatcctttgatgtttaccaccaaaatttggttatcattcgctcaatgtctctactagtttccaagggaagtaagaacacactcattgcataagttggtagggctagaagaattgttttcaccaaaatctccttacccgcccttgacaaaaacttgtcttcccatccttgtatttgtccacagactttttctttaagatatcccaagaccacagtcttatttcgagacattgtactaggaagacccaaataaaggcttccttctgccgcctcatccatgtgaagaaatgagcatatttggctcctcaaattagcttccgtattaacaactgaaaaaaattgaagacttagcaaaattaacttgttttccagaggccaacacgaacttgtggagtaactcttgtatacgggatgcttcctccattgtagctttgcaataaagatacctatcggtcggcgaagagcatatg

SEQ ID NO: 208016 - DNA, 540 bp, Cannabis indica
gaaagataagagggattgagaaaaggatggaagggaaaataaaataacaatccttataagttgtttgatagaaatgtagtcagaagtatgaaggaaagaatttatttataaaattattatattatttttataaatatttttttaagaatatattaagagggtataattataattttcaacaattgaagaaatggagtatggatcctgaaggattataaattagagatttggaaggatttactctccactaactatctcttccctcgagttgttattgaaaggttttagatggaaaattggtgatgggcaaactgttaggtgtgcaacgaatccttggttacctggaaacacttcttttactccctatcattatggttatgatcctctcttcactgttgagcactacatcaatacaagtaggcaatggatattcagctcttacagcaacattttggcgccatggacattcaacgtattctctctattccgctgagtcctattcccaaaaatgataagattatttggcatcactcggatact

SEQ ID NO: 208017 - DNA, 613 bp, Cannabis indica
ccgggtctgggtttggggttcgaatccgtgttcgggttcaggttcaagtatgaatccgagtttgggtttgggtctaagtttcggtcaaaggttagatagattcaggtcatggtatggtatagaatattaattatttttttagtaaaaaaaatctaaaatctgagccaaatattattatatttttaaaataataaaaaaaaatttcaattttcatttttgaaaaaataattttgaaaagtaaaaactaaaaacacaatcaaacaacctcatagtgttttactatatatatttaaaaaaaaaggtcttttactatattagtaaataaaaaatatataaaaatgaattaattttagaacaacgttatttagttaaaattaagagtgagcaacagttagattggtcggttttttacacaaaaaaaatccaaaattcaatcttcgattttcatggttataactcgaaaaccgaccgaccattatataaatgtaaaaaaaccgaccgatttggtcagtttaaaccgaccaaatcgagctttataatgttttttaaaaaaataagtttaatttttctataactatttaaactaaaagaaattagagtattgtatcaaata

SEQ ID NO: 208018 - DNA, 815 bp, Cannabis indica
cttcccaatcaacagacgatggcatcccactgtgcacaacgacgacgatgacagccgcctccctctgcgcacgacgacgatgacagccgcctcccactgcgcacgaggatgatgaacgaaggtctcctcccttcgattccgtcatctctctttctctatctgtcttcgatttgtgcacgtagatggactccaacgtcgtctaccacgaacctctcgcccgagtgaagaacatcagtctgtttattgttttcaaaaaagccctttttttttcttcttgcttcacttctgagaatttttatatacaactctaatttatatatttgtatttttttttattttcgtcagattgttgacgattgtggctgttcggggtggtgatttgggctatttggagtggtcggcgattgaagattcttgaacttttgggattttgataattttatgatattttgttattcttttcgtagcttttttcttgggtttgtattaaattgactactatgtatttgtcaatgttttttattatcattattggttattttttataatagaaaaaatctgtacattgaaatacatattattatttttggtttaatttggtgtacaattcaattgtataggtaattattttgtgtattgtatttataaataatatgaatctattcatatagcttaaatttttttcatatattatcataatttatatctattaaaattaatattaatattcatttaaattatataaataaaatattattaaataaaagaatatttggaaaataattttaaaagtaaaaatagatatagtgacactt

SEQ ID NO: 208019 - DNA, 602 bp, Cannabis indica
acctagtattaaatattaacttattcacataatcaaagagtgcttttatggaaattaagaaatggatgaaatggaagatttggcaaaatgataagcaaattcaaggaagcaactatattcggttaatggctctagtaacattcattgaatagtttgatgaaaaaaatactagcttactaataaattacaacaaattaattatcacatattccccataattaattaattataaattaataaaagaataattacttggagaatatggctgttttttctgaactaattgatttattaggaatagctcaatactagagagtagaactcttctggtgacaaaatatataaaattagtagaatcataaataatataataacaaaactaaatgtttttttaataaaaataaaaaataaaaatgttgatatagctagtaattatgtacgtattattctcacactatggtcctttcacattaataaattattataaagataaaagtaaaagatgctcaaagggtttttctacattagtaggtaaagctcaccaaccttggcattcaataattgttatttatatatacatatgatcatattatataatatat

SEQ ID NO: 208020 - DNA, 685 bp, Cannabis indica
aaaatttaaaaaatattagtagtttgtgtggatggattaacctgaccaatttcattagacgggttattattttctttttcttaattaggcgtgttgcacttagatttttgtaactcgatctttacattaataaaatgtagcataaaccaatcaaaccgaccgacgtacacccctagttgtcactattgtttattatcagtgaatatcgtctctaatagtgactttcagctatgaagcatcgattatgattatttagtgacgacatgtggtcactgatgctcattagtgacgaagaaaaacccttccgtgacgatttttatcctcatttttttttcttaaagtggctttagggaaaattttatcaaaagaattcacacatgaaaaataagttacataattgtattttaaatttgggtaagtctatagtagtacatcttcctaaaaggacgtttcagtagaccccttagttgtttcaatatttatgaaagtttcttagtccatctttttttttcatgattgtgtacgttgtagttatttaagattaccagtaaatttttaaaaaaattataaataatttacaaagtagaaaataaagtatgagcacattttccaaacaccaaagggaatcaagtttcttagaattaatcaccaatgcctcatcaaggttgtatagcctgttgggttt

SEQ ID NO: 208021 - DNA, 827 bp, Cannabis indica
aataagaagcaaataaaactagtcatatatttcgcaaaataggtctgttgtagaaacatcaattatgactctgaaaccataaccatgtgctggatctccataagaactgcaatgttgttcaaagtccaaaacaaagaaatacaagaaaggaaggaaaactaaacaatacaaataataggggaacgatgactatgagaaattatagtgggagacaattaattttaaaaaagattagtatgtaaagttgaaactataatttttacacaaattaggtaggctgtaggaaatccaatgttgactatgtaaaatcatgccagctacctcaatgaactcaaaaatcaaacacatagttaaaataaattaatatctaccaacacaacacataaaagataccaaacaaaatttccacatagaagatgcatacactaattatgagaatatggagggtttttcaaaaaaaaaaaattatgagaatattcttgataaaagttgaaccctaaaagtttattaaatatcctgagcaaagacatgaacgaaaaatcacaatgtaatgaaatattaagtcaattattaaaagatactatgacaagttagctcccttttgctggaactggagaagatgcagacacttattatgagaatattcttgagaaaaattgagccctgaaaattcgttgaacaccctgggcaaagacatgaacaaaaaataaaaatgtggtgaaagataaaaagtcgtcttttataagatactaagataagttcactcccttttgttgggactggagaagatgcacttgctaattatgagaacattcttgagaaaagct

SEQ ID NO: 208022 - DNA, 1069 bp, Cannabis indica
atgtattataggtacgatggtgtgacagtggacggcttcactatttatcaaaatcaactgaatgataaaaataaacctttctttgatatttgtgacggaatctttctcaattactactgggaggtaagcttttttagctatgttttcttttatatatataatatatatgaatgttttttctatagcttaatgtcttgaacttgcagtaagtaatattttgaggtcatcttaattaataatagaaagactaccctaatagctctgctgctgttgccggagatagaaagcatgatgtctactttggcatagatgtatttggaagggacacttttggaggtggacaatggaaggtaataaattatattaaaaacaaaaataaaaaaatcttataaagttatgtaatttgacccgatattgttactgtattacaagcaataactccatagctgtcacatgttcaattaaagcttaaacttttaaaggtaggaatatccgaaaatgattagtagaatagacatagcatattgtcatctcttcattctcttgatggtttgggaaattataggactcgtttggtacgtcgtataaggatcatattgtattaaataataaataatactatatttgaataaaacaatatattgtattaactattacgatcaatttttttaatacaatatatgttgtattatttaatatataacaaatggtccgtattagcttgtattataatatttacaaaaaatttcgggtcaacactgatctccgactagaatccggacttggaacccaaacccgggactcgaacctggacccggacacagaccagacccggaccccagacctacaccccgaactcaaagtcggacagggacccaggactcgggacccagacccaggacttgggactcgagacccgaatccagacccaggatttagagctggaccgggaccgggactgggacccaaacgccgacctgaggcccggacccagacccgaactcaaaccccgacccaaacctaaacccgaacccgactcggaccccgacccgaactcagacccggaccc

SEQ ID NO: 208023 - DNA, 1289 bp, Cannabis indica
agagttgtttatgtgtgtctatgttccatgaagaaagaaggtcttatgctccacaaagaaaaaaaagtgggttggggtcgagctcatggtggtggtggtggtggaggaagctgaacaaggaacaaagagtttttgaaagaaaacaaaaactgaccaaatcgtggtctttcctccatgaagaagaaggagaaaaacaaataaaaaataaaataaaaataaaaagaaaagtgttaaagtttttatttattttttaataaattaattattatttaaattatttaaattctttttaattaaaaatatgatttggaccaataaaaatttgacacgtggcatttcatttgaatttaacggatttgttagaaaaaggaccaacagacaaacaaaaattaggaccttaggtattttcaccgccaatttttgaagttgaggactaatcggcatcaacctcaagtttttggggatttttgccgcaattatcccttttttttttaactatatgcttcctattctttgaaattttgcaaactaccccctaaattttagttatttacattttagtcctgatctaatagtattttatgaatgattttcaagacctatttataccattgttaagctatttttatatgaacgtaattattattttttaagctctataggtataaaatacaatatcatatgtttgtggttatgaatgatttggaaaaatatagattttgaggtaatattatgagtgtaaaaaatgattttatacctctgatcccataaaataaaaaaatgtaaaagaataatattatagatttaaaattacatctccaaccctctaattttgtattattgtatcattcattctaatattataaataaaaaaaataaaaattatttaaaagataagcatcttaataggattatctgtctatcaaaataaaatatcatttgttagtttgtttatactatatttaattatgaaaatctaaaaaattaattaggttaaaaaaattattaaattactttttaaatttaacttactatattacttgagttagtctatattattttcactataacccaatacattactgcaattgcaaaaataaaaatgaagatagtataagtttcttttgctcctataaacaaaaaatatgatacaacaacctgtatgcttgctttatttggtaagtgctggtattcaggattagtctacttttttttttcttttaaatgtatttatttatttataactaagttgaaaaccaataagaagaaaaaataacaataatatatat

SEQ ID NO: 208024 - DNA, 728 bp, Cannabis indica
tttctctaatatttaactcctctcatctttccatgcttttaattttattatataccataaagtaaggcaatatgtaaaaacatatattatttagggagttttaatatatttctaaatcacaggtttttttttttttttttttgtgaattttatgaaaatacacataaaaactcacatagtaatttataaaaatttaaatcgcaaccaaaatttacttaacaactcatataaaaaaaatactactgaaacaatttaaactgcaaatttaaaaaattaaaattaagttccgagtctcaacatatggtactaaacactactaataactaatataattctttcttatattgagatttcctttatatacgcttcgtatgaaattgtgtagttagtatatataaatatgttaaccaattagggaatatggtggaataatattttctgactaaattagcaaaaaaacaagaatatataaccctaataataaggatgctgaatctggtagatgcataataattaatattctaattgtatatatgcatattggataagaatctaagaaaagggtatggggaaaacatgtttgttgttgcaaccaccgccaaagcagaagcttcaattcttgaggggcctttgtggtttcatacatatacatatatatatatatatatatatatgcacacacacagatatatatttatataaattgatgtgtagatcgctgcttcttc

SEQ ID NO: 208025 - DNA, 672 bp, Cannabis indica
gcatatatgtaacaatgtcaaactctttaaagatatatatgcaaagcacctgctactaaactaatattacctaacaatgaatttttagttgtgcagcaaagtggaactgttgaaatctcaagagatattgtgcttaaaaatgtgctatttgttcctaattttaaattcaacattttgtcaagctgcataaccaatgacaaccatgttaaggtgaaattcagtactaataatttttgcatccaggaaactctcagcaagagagtgattggcagaggtaaaggttgcgatggcttgtacattttggagaagcatacttcccatgcctacaatcttgctgttactgctaatgtatggcactcgagaatgggacatccttcacacaaaagacttgctttactttgtaataaattgagttgtaatatgcatgatttgcacaagattgaaccatgttatatctgtcctaaagctaaacaaagaaattgccctttgttaagcacaataattttgctgaaaacaaatttgatcttattcattgtgatgtttggggaccctatcatgtcccatctcattctaaccataaaatactttcttactcttgttgatgataaaaaaagattcacttggttatattttgatgaaaacaaaaatctgatgtggctcacattattcctc

SEQ ID NO: 208026 - DNA, 561 bp, Cannabis indica
caaaactaaaactagttatactaatcttataaaattaaaactaattatactgaccttacaaaaccaaaaactagtcatactagccttacaaaactaaaaaaacaagtatagatttttatactagccttatagatttttattgttaagataattttaatagacatgttaaaagacattatatgtgcgcggtatttttaagtattatgtcttatatatgtatatgtaatttaatataataattttaaaaaaaatatcattaattaatcgtaaaatactatattagtagatattgttatttgttaggtataataacaataatgatgttgtagggaataacgtatgatcttcattgaagttttgacgtgtttaaattgattgcttcggtgtattagattagatagggctaatgtattgaatataaaatgacggttgactagagttatggcaatgtaatctatatatgcacacttccattacgaagaaaaaaaaacaaggtatctagtattaattttagaaatgaagttgtattaatttcaatataaattttttcaaaaaataata

SEQ ID NO: 208027 - DNA, 637 bp, Cannabis indica
ggtttgcgttggaaaattggtgagggaagacaaattcgggttgcacttgatccttggatacctggcagtaatactttcactcccactctcttttctggtccagctgatgcattggtcagctgtttaatcacagatgaacgtgtgtggaatatacctctgctgcaacaatggttctcgcccttagatgtggatcgaattttgactctgccacttagttttttccagcattctgatgctcttgtttggcactacactactttaggtgtttatacggtacagtcggggtaccatctcgcaacttctctagctactgccagtgctaataattgctccagttcagtctctcaagcttcatggtggaagtatttttggtccttgcagctcccccaaaaagtcaagatcttcgcttggcgggttatccacaatgctctacctgttgcaacatctttggtaaggcgcaagatcatcacggactccacctgttcagtatgcaaatcggcgtgggaatcaattgggcatgctctatttgggtgcaagtatgcaaaagctgtgtggcgtcacatggatcagttttttgactggagtaaaagattctgcaatgacagggtgactatttggttcatctctcatcaatcta

SEQ ID NO: 208028 - DNA, 603 bp, Cannabis indica
gtattacggtactagtatataataaataagtaaatagtagttgggtgtcaaaaataaaaaaaaaaaagaagaaaaaaaaaaaaagttttagtattaccgtcaacctcatactttaatttttttcataagagttttcgttataacttacatcatcgtcctagtaaattttttgaaaacttcaaataatttacagtacgaaaaatagatttgtagatttttatgaaaacaaaattttaagtttgtaggaggggtaacttcaatgattttattagagacaaaattttaaagttggtcactataaactttgttattttcttaaatatgacacaaataaataaaattcagattctagattattggatttaaacggatatattagtatcagttatttctgaaatcttatttcaaaattttggaagaaattctcatgtgagggcacaaaaaactaccatataaaggtgatttagaaaaatcataaccttgattttttatacaatagtatatagcaagtattaattagttaagattcagccaaaaaaagtattaactagttactggtgtgtcaatatctatatattaactttaaaaaataaataaataagt

SEQ ID NO: 208029 - DNA, 944 bp, Cannabis indica
gaagatatgttcatatatgcatcttagagtgtatactgaacgtcaatcagagaggcattcagacttgagactgagagaccctatgcagtagatttctccttctttaaaaacaatatcaatagaaaaagggaaatcttttaaaaattgtgaaaaaattacagctaatagtgctgattaaattaattaaactttaaacaactaaacgattagtagtgacaaaattatcaaactaagaacaacaaatgtattgaaaatcagaaccaacaaaatgcataaaataaagaaatcaacactaagatatatactggttcaagaccgattgatcgacgtgatctatgatactactctagttgtggaacacctccataatccttctttagtgattgagcaaaaataggtacaaaacagtcgaggcgagattctctattgagttctcacaaagtgtttcaactcttacacttttcacctagaaatttttttcatttacagaaaatttttcttacaaacttaaactcaatctctctcttttctctacacctctctctctactctcaatcttatctgaatagagtactaaatctcattcttccagttcttctctagtatgataagcgcggtatttataggcttagaattaagattgtaaagttggtggttgcaagaaacaaggttgttaagttagttagaatagaactaactaacttaaccaattcctttttgagcaaaatcttcgtgttagcttacgtgccatggtctccgggaacgtgaacgagcttttggacacacagatcaaggaaatttgctgaaaatacttctagataggactaatgaattggcatatatcagaatgggatttaattttcttatatttcactctgaacgagtagcttggatacagaacttgaaaattgtagattttgtttttatatttttaaaaataaaat

SEQ ID NO: 208030 - DNA, 1020 bp, Cannabis indica
ctaggtccctgtctctatagggtcccaattcgagtgcaggtcccgatcgtgttcggtactagtccatgtctcaggtcttaaacttgtctgagtttgggttttgattcggttctcaggtctcaagttcgagtattaggtcttgggtccccgtctgggttctagtcccaatctaggttcaggtctgagtcctactcttggtttgggtccttgtcctgatctcggtctgggttcgtgtcccgagtttgagtgtgacactggcatgtgtccgggtctaggtctgggtttgggttggggtttcagtccgtgtcttggtcccgatcatggtctgggtttgacttctggtacggtttgggttctggtccagttctcgagtcacgagtctttggttctaggtactgggtcataggtcctggtgcaagtctgggtctgggtatcgatcctcgtctaagtccgggtctgtgttcggttccgcatctagatttgattttcggtccatgtcctattcatgttccagggtcctgatttcagttcttgttccgatttcgggtcttgggtccgtgtctgggtttgggtccttctctagaaattgttctaggttcgggtcttggtacgattccaagatctagacattgactacgggttgggtccaagccccgggtcgtgggtcaacatccgtatcccaatcttgggtcccggtctcgtttcgattcggatcctgggtcctggtccatgtccatgtcctggttcgggtctaggactgagaccagtgttgggtcttgggtcccagtcccagtccagggtctcgattctaattctaattttgagtttgggacttcaatctaggtttgggtcttaggtccaagtttgagactccaatctcggtcaggggtctgggtctgggtctaagtctatttctaggtttgggtttgtgtcgtgggtcctgatttgagttttgtattcgggtttgtatcctggtccgggtctaggtctgagtcagggtcaaggtctaggtccgtagtt

SEQ ID NO: 208031 - DNA, 738 bp, Cannabis indica
gacaagtacctgtgtgatttgaaaaagaagaaaagtcacaatttactctaaattgtattaaagaaaactttcatagattagactgaatgacaaaagaagaagaaaacaaaggtcaaaataagtgaaatctactggaaacgtgactacaacaactcaataacagctcagttaaatgaagatgttaatgggaactggagaagacacatatctcaacaattttcactaaaccaaaaggtatgcaataatgtacaagcgagaaacatgaatagacagagctctcggaaacctacccctgaccctttgcccagcgggataattgataaagctgtacagtttcatttgaagcatggcaagccaaaagcagatagttacgaggctgtaccatccatgcaaatctcatgaacaatgctgaatacacacacattgctgcaaaacaaaattccaagtacatgagaatctggccatctaactccaaaaagaaagaatttaaataattaaggcaattaagttttgaacctgcggtcatgttcccagaaatcatttctggtggtttttgcatgtccactagcccctgatggatccataagatatggtgacaagctaagagtaatgccataaagcaattaacaaataatggattcatatgacatcaatgattgcatacacaatcatcatagaaaaacataccgcagcaacaaacccccaattagcaatagggccccaaaaatgagttgtttt

SEQ ID NO: 208032 - DNA, 812 bp, Cannabis indica
acatttttcacttacccagcatcaagggtgacgtcatatatcaacatgggctttgagatgtcaacctgagcgcgggatgtcaacttaagcgttgggtcatgaacaacctttagtaaaacaaccataactcactcaatatttatctgattgacgcgattcaacttgcgtttcgaagctattttaatactctaccaagtcatatctcacacttcaatcccaattcataagttatccgtcccaaatttttcccccaagtgagttacaaaaataagctccaacttactcggagcgggtcccgccatcacgacccgagctccaaaaactgacgatcaatctcatgagtgaattttcaccgttaaatcatcctctacggtggaaaattgccaacttgtattttttcattattttattcttattttcaagggcctcattcacctataaaagagagctctcttaattcatttttcacatttagaaaactacacacatgattagagcttctctctctagtttctttatctagaagttaaaggtttgacacaacctttttcaataataccatctcttgagaactaaaaccttgaagtaaacgtatctctattattgttgcgatgtaggggatgaacttctataaattattcactttttacttttacttaagaaatatttcattcttgccaatctagtaagcaggtatggcttagaagtctatgtccaaatttttgagtcaacatcctccacagtcaaacataatttatacgtttccctacaattatattctcgttcataatattccttataattaaattttt

SEQ ID NO: 208033 - DNA, 1042 bp, Cannabis indica
agaatcacaacgaaatagcctctctctctctctctttctttctctctctagactcagtgaattgcgtgcatttttataaagaagcgtccactgcaagaaaactcaaatccctctctttttttaataatatttattataaatataaatatggaagaacaatagaaagatcagttttttaagagaattgatctcatttcttttcttctcattttcatttacagaatccaacccccttctcccaaacgattcatacccatttcatctaaagaatctctcttcttcatcttcatcttcttcttctttcctttttggaaatttaataaacaaaaagtaataatctcagtctctggattggattggactgaatctcgttacttcccgtttttacaaaaggtaaatgcgtttttttttccttttggaatgttaatgcatgttttactgattcgtttaattattgaaactaatatttatggaagttgcagtgattatttcgattagtggtgaatatagaaaacgagacattaaagaatgttgggggagttgatttccagaattcttgtgtaagttctttcaatctattcgtgtttttcttttctttctcttatggataaatcttgaaacactttttggattgggttatagaatggtttttgggtacgcataccctgcgtttgagtgttacaaagtggtggaaaggaacagagcccaaaatgaagaacttcgattttggtgtcaatattggtaagagcgattccctcattctttaactgaatttggaattttacttttttttttttatttaattgttctttatcactgattttccatggaatttgtatatgattctctgcattaactccgggtaatcagcgattaatttttaaacaaatataatacattttaaaataaaaataaagtagagaaacagcatatgatttggtcaaatatttagaggattttatatgattaattataaaaaaaattaacggtcattagacatggcatattcgtaggaagttatcacacattggttatgaagtaa

SEQ ID NO: 208034 - DNA, 843 bp, Cannabis indica
aaaaaaaaatctaatttattatttattaacaaaagaaaagagttaatggtacctaatttttattcatttatcaactatcatcaaaagttttattcatttcacaataaaaataaaattaaataaaatattacgttaaaataaaatttatatttcaagagatattattaatgaatcatctactatagaagacacaatttataatagtataaaaagtttaaaagcaaaaattacttattattattatttgttttaatccatgtatattatgaggacatataaatccgatcacattttactatatataataatggtaactttacgtttagttaaaaaccaagtggatcttttttttaaaaaaaaaatcaattgtagttatcttcactctcacactaatatatatttttttttttatttatatgtacatatcattattcttattaccattattcctatttttatttttacgggacgagagatataataggacacttaaaaaacttagaataaaaaaagggaacgtgcattccttttttatagttgtctcccatggtgagagccagccttttaaaaaatagtggagacaaaataaaaatacaaaatgatatgtttctcttttttcttttcttaatggtcaccccaactcactctcccttgcttccgtctagttatttgttagataaaattatactaaaaatggtaagaggtagtggtatttattatgtgcggaagtaaaaaataacaataaatataattttttattttaatatcactcaagtgtttttcacagtatttcttgaactcactaaagtatttttcaaagtttagctatacaaatgttctctc

SEQ ID NO: 208035 - DNA, 1209 bp, Cannabis indica
tatatttaactccatggtagtgaaataactattaagtttcaagttgataagtgtcatctaatgatttttttatcgacatataagtacttaatattaataaaagtataatttttctttaatttctctaatataaactctgttaatatcttaaataagatacatataaggctcgaatttttaatcattggatctagacaaaaatatgcagtttgagttacgaccaaattttcttttaataaattcaaaataagcaaaattagatgaaaattatagttttacaaacattaagtacttataccgttaaaaaaatcattcaatttatatcaattacaaacataaaatttaaggtacttgtgttgcaattattcaactctactcaactaactactataaatattgttaaattaattcatagttagcaattatattaattacagtgttaaacgaaaaataataatatatttaattaaagaataaaatatgtaaattacaataaaataattaaaaatacaaaaaaaatcaaaaaaatttaaatttgtaaaaattaagatgaacttaataaataattgaaagaatcacttttgctactcagacaataaaaaatcgaatttttttttctgtcactaaagaaatataaacaagatcgattgaagattggaaaatgtatatagagattttttgctttgatcctctcattcattaattataagttataactaggcaattgctttttggttgcttaccttaatcttatcttctaaaaatttattttgtaatgaccaaaaaatttaatttctaattaatagatgatcatttacaaaaaaaattaggcaattgattttcacgttagtttaattttattttattttagtgaaatatatacttgttatgaaaaagttatactattttttaaaataaaaaaaataaccagttataaatatattgtacttaatttttgtaaatattatattttactgagataataaatagatatttgtgttttattataaaaaaaatagtaaaaataatagtttggaatatttttcttaatttgtttattaattaatatagattaaaaagcatgaaagaaaaaagtaattttttttaaattggaacattagttcaggaagatataaattagtttagagtactattattagattgttatattactgttttttttgtacactatatatgtagatatatatg

SEQ ID NO: 208036 - DNA, 1025 bp, Cannabis indica
ggtatagaaaaaggtaacttgaagttgatatttatatatacttcatatatatatatatatttattttgttttttatttcaattgtgtaattttgctttacttgtattttaccacaatcaatatccaagcaataaggtcataattcagaggtgattttatagaagaatactagactatttttttttgttcatttcttaaagtgaaattattggaagaaatgaaaaatgggtttttttttaaaaaaaaaaaaaaaataaggaaaggggataagggggtgtttgggaggtgggaaagtgggtatgtagctttaaaagaggttttgagagtaaaacttagagagaagagaaaagcatgtgaaggagggcccaaaaaaggctgcctttgtttgttcactcgaatacattgttttccatgtgtgtggccaccatcactattcactaatgccatttctctccctctttcataataataataataataataataataataataaatgacaccaataataattaaatatcaaatacactttaatttaataactattataaaataacgttaactatttatacactgctacttcgtattaatactgaacactactgattcttaataataatacacattctctaataataagagtactaattgaaatattaaaggacacctatagtgttgaacgccattatgaagtgtaatattactattagtgtaatttaataacaaattctacttattttagtttattaaatgttataaagaatccctaacaagttataagacgtcatgttatagaggtgttgaatatcttggtgcttcataataatattcttactattatatatcagtgatgcttaacatcatctaaagataatgtcttacaattaattaacaataacgatgcgatactttagaatgtattagacaacactagtaccttttaacatttctctaataataattactattttagaaagacattaattttcattttttattatcccttctattagattggttagcat

SEQ ID NO: 208037 - DNA, 674 bp, Cannabis indica
tatttatattatcttttgtcatcagtacaaaaaatcttacatttaatcacaacaaaacttgtgactaaaagtaaaaaagttgtgactataattataaatcattattcctattgtgactaaatatcttttaatttgtttatcattctaattaattatttaatttattttattattttaggagtaaatagttgaattggttgcaaatcaaccagcgccactaaaaaaacaacttgatgagactattgtagatcccaccaagtacccccagacttgcatgttatgacataaatactaggtgggcgatcttgacatctgagaggctttggccatctcccgatattgaaggtggccaaagagcacctgcttctgcaccacagattgttactatggaatagtacgagaccttaaaaaaaaaaattgaggacgcagagcaggaaactcggtattcgaggtagtagtatgaaacataacaactctacctccagtgattccaagattagtttgagtacctgtcttgggctgtgcctggtttcaacttgtctgctatggatcttcgatccaccattccccactcctcctagtgtagttggatcgtcatcgcatcctcccaagattcaaaacaacaattgcgatgatactacccgtttttagaataatatatattttataattaa

SEQ ID NO: 208038 - DNA, 712 bp, Cannabis indica
agtatacggcaaaagtacagaaaaagtactattacattaggtgtaaaaaaaatgaattttaccaacaaaaacgtttatataagtgtaatatatatatctttttagatttatttatttgattttttttctatacaaatattattaatacaagaaaccatttgaccagctgccattataaatattctcaaagttatacactcaaaacaggagccgactgcacgtacgcgtttaaaatataaataaaattttgataattaatgatgaaatgattagtgtggtcctttctctaatttttgtatggattaaatgataattaatactgtacgtacataatatatggagctgaaaacagggcaataaaaagttacatatatttaccgtactcactttgcttatatcctttaatttaataaaattatggctttattaattaacaattgatttggatttatatgatgaagtgatcatacgaaaatattattcactaaaaacattacaaaagttagaacaagctgctgcaatatatattggggtggggattttaaaactaattaaatacaaataatgagttgttgtaatgtgattcatatcaatgtacaaagttagaagatagttatgttagttgacagttaattaactgtttagttagttacaagttttttttttctactttaattcaaatggtataaataattagtgttcaattttattt

SEQ ID NO: 208039 - DNA, 532 bp, Cannabis indica
ttaaatttgaaagttgaggctatatttccgatctttgtgatagtacctatttgtgaccaatttccatgtgttctgactgtaattgccaaattgtgtgaactttcttgttttcttcaattagattatatatacattttttttaacgtttgctccttcaggttcagatcaggggtcgtacgtcttctcttatgtctgcccttctctatgtaaaatatatctgaagattttttcaatatagagctttgtaatatcatatatatatatatataatcttactctttttgaatgatatggattacccttaatatgggtacaatacataaatgttttcaccatctataagttgatcagatctatataatttgaaaaataaaatgaactagtacagaataatgtttcaaggagaggagattatagtggtaaatccttgtttcaatatataacaatctctgtaaaatatatacaactgttaccaaaatcagttcgtatcatcatgactcctgcacaataataatattgttcactacaaatg

SEQ ID NO: 208040 - DNA, 661 bp, Cannabis indica
gacatcatctataaaagtatgtacatcttaaaaaaaatataaaaataaaggtaaaaattaaaacatgaaaaataaaattgatatataatttaattttctacaaaaaaaaaaataaggtttttattttctaattttcaaccaatatataagatgcaaatagaactcctcaaaaaattcaagttttcgttttcaaattttcaatcatttttcggtagtcttatcttaattaggtattctctacatttatatcatcaagaacaaaagaatgaggatcccaattttcaagttttccatcttaatcatttctctaatgtagaatacacgatcatcaggcaaaaaatactagcaaaattgcatagccagattgaatcatacaatattatatgcgtatatgtaatttatatagatatatatggtaaaattgtggtaagacttacataaatgtaagagcatctctaatggttaaattttgaaggatgcttatttatgtggattgcttatttggcaaaaacacaagaatgctataccattgtagcagggccggccctgagttaaaatgggctataagcaaaaaaaaaaaaaattaaccttaactataaagataaaatggtatttttaaaaattataaaaatatatgtaatattttttaaaaaaatattac

SEQ ID NO: 208041 - DNA, 538 bp, Cannabis indica
actatatttaaagtttgaagtttcaaaatctcacctaagtggtgcataataacaatcggcgggggtagaaatcagtgtaccgaaaacgtcaccaaaaataggagtgttatatatcaaaacaaccacctcgatgagtagatcacacccatgtcaaccatttttcaaaaaaatacacaatatcattggaaagttgttggaaaggggtggagctacaaaaacatcaccgaataagcagcgaactgggtgaaatggcttagtggagattgttcttctcgatgagttgaatctggtaaaggcgacgcatcaaatagacaccaaaggtggttgtaaaatgcgttcaaagtttgaacctcaaaactttgactcaaaatcccaggataacgtcagcgaaagaggcagcaccgcttacgggttaaaatcgtcgatgagtgaaggctgtgatggtgtggcgcgtggggtaagaaggtggccagaaagtggtcgtcaacgttcaccggtggtggtggttgtgggtttctttgaagagagagagagagag

SEQ ID NO: 208042 - DNA, 609 bp, Cannabis indica
tgttgtccaatccaatttctatatgtatagaaagtatagaagaagggtgtaatggtccaaaaatggtgtaataatttggagagaggagagaggagagagagagagggaggaagggatagcggtggaataatgaaaaaagatttgaaattgatgacagtcttttcttgggtttgaccgtttgtattatccaaacaatacaatacacttcactacttgacaaagctgtaacactctctccttcctttattatatttattattattaccatttcacaaatctctcctcaaaaccctaccaagcaacctttcaattctaatattatctctcctccactctcctctctctctctctttctctactctgtcttgagaagaagaagaagaagaggaatctgaaagtaaaaaacagagctttgaaggttatttttttgttttttattcttttaagctcaattccttcatcactattttattgggttttatttattttcattttttatgtcgtttaattccaagatccaaaatacccagatgctaatttttgttgaaatgctataaatttcgcttgagattttcatgaaaagattgaatttttaattttttttttctt

SEQ ID NO: 208043 - DNA, 1389 bp, Cannabis indica
atgcttaaggaaaaagtaattgaaattgtggtatattttttgcacaaaaattaattttattgttgcatcaattattaatattgtaataattgcaaaatttgatgaaaaaataaataataattgttattttatgcaagaaatatattatttttttaatatataaaaaattataatttgtcattaattttattatttagaataataaaataaataaatgtaaaatatttataatttaatattgaggaattaccccatatattattttttttcaaatttacggtttgagtttctaaagtggttgcagcgctagttacaataggggtttttatatgattttttgttacaatttatgtttcagcgctagttgcaatagaaatttctatgtagaatttcgtaaaaaatcaaaaaaaaaaaaaacttattttagaagtgtaaaattaaaaaaatactatttaatattatagctaaatataataatctgacaattaaaaatagcatgaatgtacttagaaagtcaaagagtaatgattttttttttcgaattttgcatcatagtaccttaaaagaaaaaagaattgcattgtggccacaatatttactttgttaaatttacattagtttttgatataccatttattaatagcaaattttttttacttaaatgagccatattcacttttacatcacttatcacttatttcatttgtatctatgtaggagatgttcttaaacaataatcacaagtaatacttaataagaaacttgttactacctgttgaagttgttgaatcaaatcaaagactttatgatatacatacatatatataacaattatttatcaaactaatctcaacaattcttgacattattgtgattttgtgtttgttgggtatttattaaatatttatttatttttctagttaacttttctcttgactcttttaattggtttggtaaaatcaaagctaggagttgagaataaggacaacctttggtcttttattgctacctaacaagggccagcagcatagttgttataataataataataataataataataataataataataataataataatataatttagacaaatattcttttttaatgttattaatttataaaaaggcttttctctctagaatgttcaagactcctgcgtgtgtttcctgttctggtacccgaaatgggtttttggtccacccaccggagttgtgtggtggtttatggtgccccgatcccttaatccaaccctattatgattactttcagagcattaaatgcatctttaatgctgttgatcctctcaatctttttgctttgtttttctttcccttctgtaccacattaattactctcttaatcacttagatcctcttcagcc

SEQ ID NO: 208044 - DNA, 687 bp, Cannabis indica
aaattaatgtttgcatgtgtattttcttttctctttttcatttttatatatatatatataattggtaactaaaaatattgatttgatatttcatatgtatgtatgaaatgtgtcatttctaatttatatatgtataaatagtagcaattattgtgtgtaggaaactaattatatagattccccatacaataattcaatcaaatattaattaattatatataaaataaataattaaatggttttcacatggagagagagatccatattatatattatattatatataaatatattccatattattatttttacaaaaataaaataaaatcaatatggtgtatatatatatatttttagataaatcataatcgtttgaatgttaaagtgtatttatatgcctagcataattagataacaacaacaattatttatttaatataagagatgaaaaagtcaacgaagactattttagatcataaatgagatgaagttgaatgaagaagaagatgataattgtgaggtggtctttcaatttttattttttttttcttttgggtcaaaataatttcatttcattcaaacattgtatacatatatgtattagggctagtgttttatttttttttaaattaaaaaaataggaaaaataaagtatatgttttttggaattttcaaaaatattttttt

SEQ ID NO: 208045 - DNA, 862 bp, Cannabis indica
gatgttgagtcacatgatttgttctctacaattgagcgtttgttgggtgaaactgatatgagcccagctgatgtggctgagaatttgatgccaaaatctgatgaggatgatgcagataagtgtttgaagaatttggttgatgctattgagattgctaaggaagaagctgtgaaaaagaaggctgaggaggaagaagctaagttgaaagctaaagaagaagaaaaggtaaagactgagaaagaaaagttagaaaaagagagtgaaacaaagactgatgaagtaaaagtgaaatgtaaatgtggtaatggaacattagataaggaagtaaaagaggaaaatggatcatagagtgagtttttcttttggtaagaaataagttacattagtgttttgattaagttttgatatgtattgtatggtctgatttatccatgtttattgcttttctattttagctataaagattgttttgagactctggtttgtcctgttgtacttgtagtatcatgcttttgctttcttttttttttttttttgtaaaattcagataaattggccttttcaatcagtaatggccatcttatgaccttttttgaattggtttgaccgttttgtcattttgtgttaaataaaatggccagcaagaaacccaacgtacttttctttttattaatatgcgatcacactcagactcacacattcacaccacattacataatacacccaataatttattagtttaaaatatattagtccctctctaagtctaacctaaataaatcattatagtaagtaaagcttttatttgaagataggccaattgcattgtccatgccacttggatataacaaaacaactaatt

SEQ ID NO: 208046 - DNA, 1302 bp, Cannabis indica
aaaggaatggaataaaattataaaacttgttttatttctattccatttcattttattacttccaaccaaacgcaaccttaaatatgatttttcaatttgaacctatcaacaattatgttttgattatgaatgcacaaggagtgaagaattgggaggtgattatagtaaatagtaatgttatatgaattcaccactaatcctaatgcattatactaattagtaattatcataaaaggatgagtaaagtaatagttaggggtggtgtacatctatttttacaatttacaaactttaaaattcttttttttcctaatatctttaaaattcatttatattaattagtatacaatgtagtcttttttggatactacaaacaagataagacataatcactaattcttaaaaaagaaaaaagaaaaaataatgctgaaccacttgtggtgtaaccagaaatggtttttctttcttttttttttcttttttaattccaacaaaaaactagaaatggtattttgaaatagctttatcatgtattttatttatttttgttccagcaaaataaataaaatggaaagacagtactttttactaaaacaagaaaagataaagataaaacaatacttatggaaatattatataacaattttttagcagaaaatattaaataacatttaagaaaaagacaataaacataccttaaaaatagtttatatatataactaccttaaaaagacaataaacatacgtttttataaaaatgttatataacatttaaaaataatatataacaatattttttataactaccttaaaagtagttggagtaactactaaagcaattaatttttttttttattttgtcaaaactaagcaattatttaaggagatttctatatatattaggaaaataaaaaagaaatatatatttttatatatatagactaattgcaagcgaaaatgaatttttcttctagatatcctaaattcctattacctatttaaatgactaattcaccccttttaaattttttaatacatccacttgaatgaaacggctttctattttttatttattatttttgagaaatcaaaacaacaataagtgcccatttataattaaatatttcagtctaacgaaatagaatttatgtgatataagagtgttaacatattaatttggttgatttttttatattttttgaaccaggtatagctgttttttttttttaatgttagaaattaaaccaaatcaataaattgctcaaaccaaaatgaattagtttagttcgaaactacgattta

SEQ ID NO: 208047 - DNA, 1456 bp, Cannabis indica
tagaaataagtaaaaattttaaaaaaaattaaaaacataatacaacacaagttaaagtttaagagataaaaatcataattaacttaaattaaaatatattattaacttccgtataaataaaaaaataaataaacatgacaaatattaaaaaaatagtaaataattcagtataacaaatataacaataatacaacctcatattattattattattattcaccaatatttttttaaataacattaccatctttttcatgcaaatttacaattatcttgggaataactatgcctgaaattcaatgaatcagtatggtatgaaattgctataattttttgtgctttttttttttaaaaaaaaaaatcaatttattattaactaaaacattataaaagaaataagtataaattagtattagctgtttaattaaataatttgttgatgttctctaaacgtaaattaaattttatatatgtaatatgtcataattttcttttctttttttttttttttggacaaaacataatagagaaatatacatatttccaattgttaacaaaaatgtacaaagtgaaaaagaatagttaccaaaatctaaattatagcttaatgtaataaaggtccaaacgaaaagaaacttattgttattattcatattggttactattaatacatttgatttcattgcaaattctattaattaattattagttttacattacaattgtttacgtgtcttaattaggaaaatatcataaggaaattaacaaattaaaatgaatataattaatgttttgttattatataagtcaacaattcaaaatatgatgggatcaaatttctctcaatatatgtttttttttctttcttagatgatatgatagttgaccggtttatattgtaaataatatttatttatataataattgaatgttcttatgtgtataatccaataaaataatgacaacttttgtgtaaaaataataataattagaattggtaatttggtattctttgagagtttcttgagactttgacactattaaattaagtagtattaattaagataaatattgaaaattttcaaaactttatgaatttattaattaattaatttcattttaaatatgaatctgcaaattttgacactttctcttatgccttaatctaattagttaattttatcgtaaatattttacatatttagtggcatatcgtaatattcatctacatttattagtgggaataatgttcttatttatttttaatattaaaaaataaacctaataaattaatttaaaatattattttttccattagtttcaataattatcataattttacttttaatataataattttttaaatgatgcatatagtagtgacacatagataattattagcttttgcttcatattagtagcttttttttgttacttcaaagatgatataccttat

SEQ ID NO: 208048 - DNA, 943 bp, Cannabis indica
gtgctgtagctgagctatcaaaaaggagcgatccttctgctttgagaagagaagacctatgtcacatgggcttgggctttcaacatgggttggacgctgatacacaaaataagctaaatttgattttcattattttgaatttgtcttttatttttacgaacactataaaaagaattataaggatttattagtaatttgaaaaaataagaaaaaatgttaaaataaaaaaaaaaaatgatgtaaaacgctatacttattatatttatatatataataagaaaaagagagagatatacgaataattggataattcaatcaaaataagacaaatcaataagaaatgttatttgcgaaggccgagtgaaataaaagagttttgcaagaattgtcttgatcgtcggatatcattaaaaaataagaaaaaacttgttatcgaacgatttcttgcaattcttcatagagagagagagatcagtgtggctgactgaaaaaagaaagagaaaaaggagaaaaatacagtaaaaaaagttacatagaagcttgaataaataaaagatcagtaaaaatgaataaaataaaataaaatatagatagtatgtaaaaaattattaaccacggtataaatgtaaaatttgaatgaaataaagtatttgatgtaaaaattctatataattcgcatttatgtaaattgggtgcacttttacttgtaaaactaactaaatctaatccacacatactatttgtataaatatattaaaaaattataaatgtgtaattaatatttaaaaataagagctaatatctgtgtatatatatctttttttaaaaaattacatattatatgtatatataaaaaattactaaaatagattagagtttatttattttgttgtttatgtgttatttgagctttgtttattttcatttatttgaagtatttaaa

SEQ ID NO: 208049 - DNA, 827 bp, Cannabis indica
agattaatggtcaaaggaggatgttgtgaaatttctaaagttacatcaaagaacaataaagaagagttcttcatgagatagattgttcttagtgtagtttatttcttttattccaaaaattatttttttagaaataggaaatatttattcagttcacattttatttaatatttaattaattatttgttaattgttagtacatgcatatttaattgctatacataaaatcccacacagtttgcttttgataatcatgcatctcatattaaaaacataattaattatttaagattgttccatatattttatgtgcgttgaatttatagagaaatcattttcaaatgctagaatgtattaaatattttaataatctagtaatacacactaagtgacttgctttaaaagttagtcacataattaactaatatttttcaaaatatggtattttcaaattaatttaattattttcagacctatattatagtaatataattaatgtattacaagtacttgattaaagattaatatcaattttttaaaagagattttaataaagataaacataatttaaaatagtgagtgggagaaggggttgtcatctgttatgaaactcgcggcggtctccattattagtccaacactgagggtatatggaggacctagacaattctgttttcgtccccctaaggaaggtgttgaactatacattgtcaaggttggcttcttttatgataggacaaagtgatatattttagtgcgatactgacccttaaggcggcgctactaagttaagttatgaaatccaaaataatggattacactcacaa

SEQ ID NO: 208050 - DNA, 1400 bp, Cannabis indica
cgtggttgtgtgaggcggctgggatcgggcgaagagggaccgagagagagttcgactggaagagagagaaagggattgggattttaacaaggctattttaggaatttttgaaaattggtcctattttaaaaattacctacagtactaagtattctccaagccaattatgtaattaaaaatgcataatacttcaaattttatttgagttgaaaagagttagaagcctcatgcatgaatgatcaatctcctttaccagttttccaattcaaacaaaattaaaattaaaagatttaatttaaacttaaataattattttcaagaccatgagttaagctacgcttttctcaagtggaaattcatgtgtgcatccaccatctgttctagttcaatcagagccaaaacatcatcaataataataataataataataataataataataataataataataatatagcaatgtaacccaataatttgacatcattttttttttagatattattgttgaaattgggcgatgacaacaaaatgtttgattggaatgagacgtgatgatgaagttgtggaccttatgtggtacccaccttatagtgatttatgtaaatgaaattatcatcatcaattaatccaagtttttttttaaagtattataatatatactattaattgtaagaacaaataaaatattaagtcttgatatttatattgattaactttgagattctaattggtatcaataatggcgcataatggcatctgagtatgccaatatcattctcattgcttgcttccttgtcatcaacaactcatgaattatcaaagaaaaaaaaattatttcacaaatacatataaataacgaaaaaaatacaaaaaaaaaatataattgtacggaattttaaatatttttataatttttataattttatttacaagaatacggtctttttatattatactcttgttaatttgttgttgatttttccttattgttttgatattatttagaagttatttttttgttacttttatattgttttcgtgttgtttttataaaaaattataaaaatgtaaaaaaaaaaaaatcttttaacataaaaaataatattttatgtaattatttcaaaaataaaaattctagcaaaatgaaaaaagaattatcaaacgaagaaataaaaagtagaaattacacaatatatgagaaaattataagaatttattttttcatggcataaataaacaatgttgaaaggattgtggactttttgatttttttacattaatatatttttttttagggaaattatagtaaatggttccaaatcatatacttatgttagtaaatgtcccaatttcaaaacttgtagcaaaatgagtcattttttttagattatttatta

SEQ ID NO: 208051 - DNA, 670 bp, Cannabis indica
agatgtgtgtgtgtatatatataaagaaattaaaggttgttgacgcgtggggctgagactgatcaagtgggcacacactacacacaataataataaagctacatactaagaccaagtcaattggagcttctttgctctggttttggagctattgttttatagagttaatttgcactttatcaaaaaagaaagaccaagtcaattgccatgacccctctctctctctatatatatgtaaagatttatatccacaattaatataatatattatgaactattttttttttaaaaaaaattaattagtaatttacctcacttgcttaattagcttaatggtgtcacaacttaagcatttttttttttgtgacaatgattatagtaaattacaataaacctcttgtaataagtgttcgagaaattctgaatgttgtaagtattttatttttgtttgggttatttgcagtaaaattccttaaagtagggatatttttgcaactaaccctcaattttaaaatttttgcggtaaaactcgctaaactcaagttctgttagcagttagccctttccgtctatttttggctgttaactgccatggtggaatgtccacgtgtacacagtgtacacgtcacacaattttattgctccacgtaaataaatatatttaaaaaaa

SEQ ID NO: 208052 - DNA, 677 bp, Cannabis indica
agccactgaggcaaggccacctgctgtgacgtcattactacctgttgaataaactgttagtaaaatataagaggtactatattttcgaattgagttgcggattaagtcgttttttttaagatgtttgtgatactgtttaggaatgtgcaagcagtcagaatcatccctgagataaaacagttcagtcgcattatatcagaaccccattacactgtagagcatcgtctaatacacccaaagatatttaatatggtagatagaattttagtatttatgaaaattgtatttttctttccatcagtttaattgtattatatagataaatggattgaaaaatcataacgggaagaaaaatattttctaaatcgtggagtgagttagtttgaacgtgtctatacaattaagtaatcagtttcaattaaatacgttttttaattaaattaaaaaataaaataattattttattaaataattttacaataaaaaataataaagtgtcacaccatacctaacggaggcacatgtgtgtggtggatcaaatgtttgagttttcagccattcgcataaaattgagtaaccctaaacccaactaccaaaatttcaagttcatgtgggactctttccgcttcacacacaacaaacagtagaacactattatatattttgttaaaagattc

SEQ ID NO: 208053 - DNA, 793 bp, Cannabis indica
atactgctagtctctgacgaatctgtttccatatgaggagaaaggcttttttacaagcctctgagatggatttttttgaattgctgacagaagcatttgccttagaagaacttccaattatctccttcccactagaagatgcacgcgcaaaaggcttccaaggtttggctttccagtttgggtagcctttgtggagttttggccttccattgcatccaattctgttgcagaattgggcattgttatctctgttgttaggagattctcttaaaacagacccctttctagagataacaaggtcatcaggagttcgttttccaggatactcgtccatgtatgagcttgtatagtagttaaatctgtaagaggtaataaaagtatgttatgattggttaatataatttccaggttctgcttccgacataattgccaaaaaataaaatggtcagaatcataaagctaagttgatttctctgcaagtcaattccataagagacaacatacagcatgcaatagtaactatgaagattcattggaattgacttgcagagaaatcaatctacttgaacaaatcctccccccccccaaaagattgccaaaagcattccaaacaaaataaaaaggtttatattctaagaggtgatagttctcttttgcacatgatatgcattctcctctgttaactttcataacacggagtatgtaatttgtaagcaaaagctacattagctagcaagtcactgaaaggattaagatagacacagacacacacactagagagagagagagagag

SEQ ID NO: 208054 - DNA, 680 bp, Cannabis indica
atacaataaaattattaatctcacaattacatttacgtaaattttctttattatttgtttttgaaatcttttaggaacatttaagataatataataaaataaatgataatatacaaattaattatttaaataacaaccctaaacaagcatatatagatgtgcatatatgtgtatcatctataaaggattgtatgtgtaatatttataggtcatatataaattatttttttttttttggaaaaaagtgatcaatatacatttatattatttaggtttatgacttaaaataatgctagctctttattaaaattctaaatcaaagaaaaaataatctttgataataactttgaatttaaggacaagtgagataaagtaataataacgggtttgaatatagtaacaatgtaatgaccgcagataattaatactttggattattaaataattagggttatgcatgagatttatttattatatatataatattgcatattggtaaaaaaaattattatttaattgcaatatatgttaaatatgctatatgtaaatttctcaatttctgtaattgtgttcggaagctgtggaaagcgacgttggacctttagagagtcgtattttatatgttttagagaatttagcggggttttggaaatgaccaagctacccttggttttattcct

SEQ ID NO: 208055 - DNA, 806 bp, Cannabis indica
gagtttcctaactctaatgcttgcttcaaatgggaggtcatctcggatcactattattgccttgttcatttttcatgtgcagaataatgtagggattaagccttttagatttgggaatcattggccttcttatctaggttattctcagcttgtgatggactgttggaacaaagaggcacctggtggtggtcttaaaagtctaatgaagaagttgtttcggatcaaacatgccttaaaagtttttcataggaacaaagtgggggatgttgtagtatggagattcgaaagagtaattttgcaaaattcaagaggcggctgcctcgaatcctaatgataattttctggaactttagtcaatgaaactcagcagaattttttgacagcaaaggatagaatgactcagtttcttagacagcaaagcaagatcagatggatcaagtttgatgatgaaaattctagttactttcatgctactatgaggaaaagaagattagaaaataaaataaccactttcatgaagggggatacaattgtagacgatttcgaggaggtggttaatcactttgtgaagcacttcgaaaattttatgggtagcaagagttcaacagtaatttctattgatgagacttgtataaagcagggtaactgtgtgagtttggagcaacaagttagcttggttcgtcccttcaataaaggggatgttaagaaagctctctttagcattcattcttctaaaagccctaggttagacgggtttggttcaggtttttacaaggacctttggaataaaattggtgatgatgttt

SEQ ID NO: 208056 - DNA, 880 bp, Cannabis indica
acctacaatcacatataccaaattacagtaatatgataaccataaaattcttttaatgaaaaaatactgtgtcgacagcttacaattgatgcatagactttttggagcatcatctatggctgttgtagaagctgattcaatctccaaaggtatatcactctcatgtgaatgagatgggggttcgaaaacagattcttcctcgataattaattgtctgtcatggtgtgatgcatcaagagctttctcaataacattttgatctgctgcttccacatgaacaatttcaggaactggtgcaggaggggcaggaacatgagttgactctgcaaacatcatttatgaaacttaaaaggagttcaatgtaaaacatgaaacgataattatagggaaaacgaacaaaaaaaaaaagagagagagagagagatagagagaaagggggaggggacaactaaccaggatcagtgtttaatgggaccttggcatcatcaactttattaactggagtattcaccaagaggtctccatcatctatgtacctgaagacatcattcaagacaaagtacccactgtcctgtggggcgaggaaaaatgattgagcaaacttccttttcaagttatccttgccagtcaagcatccagtaactaatacaatcaccgcattttcataagacttttgagcatcagcagtttttatctcagccttatactccttataattcatcgaacggatcttctcatcaataccctgttccattgaaaaaacaaagtaataatggattagctgtatgtcatgtcaaacaacactcagtaactatcatttcctattttaagaaagaaaaaagggggacgagacaaattccatcagcagttgattgtgaaa

SEQ ID NO: 208057 - DNA, 1090 bp, Cannabis indica
atcgatgcacttctatttatttccgcatctgagagagtttttaatctaatttttttatggtcgtgtacgttatagttatataagacatcatacaaaattttgagaaatttgaaaaaatttaatacgttaaaaataaggtttaagtagtttgttacacatgtgacacttttattttatacacgtgtgaaataaacgggttgaatactattttctttgtaaattatttataatttcttaaaatttacaagatatgttaaataactatatcatatatacaattatgaaaaatttagattgaatttttttttaagaagcagaaaaaaataaggattttatgaaaagaataaaatttattaaaaatataacattttaataatatggaaaaaattaaagaaattgatggtgtaatgttaattgttttaggtggaatagagaaatagttagaggatagagtatagtagtatacacacatagataagaaatgctaaaaggtaatattgtatcaatcggcaaaatttgagtttatatgcatacatttggggtatattaaaattttgaacacaagattacaaaaataaaaaaaaaataaaacatattttatattcatagccattatactcttctttcttctcttctcttctaattttaccatccatactctgtattctcatctacactgatggtgacccgataatggcccgatactacccattttttttttaatgtttttgtacatgaaaaaaaaattacatcaaatgactatcggatcactatcggaatgtgtcacctaataacaatgctccacatttatataagtgctaattttaattttttatttttacacaatgggtgttagtcaataaaattaaataatgttatagtaataatatttttaaaaaaaattagatggagatattgttgtaggaattttgttatacagtgaggccagacaaacattaaataagggaccattaggcaggcaatgtacccgatccctaggcctggtggactataccctctattctattcccttcatcaaggctaaacttgtcttttcattcctttcttccctaatattattattattatt

SEQ ID NO: 208058 - DNA, 547 bp, Cannabis indica
tttcttactgctaataaatcaatcacaatctttagaaaattttccaaaaaatatcatttttttttgaaaaaaaaaatctaataattaataagaaatataagaaaaatgactattaaagaaaaaaaaaaaattgatcgtttattttgttgtgatcaatattcacaactttaaaaagaaacaaagcttaaaagaattttttttcttttttattatgaatgcaaacaagttgtaaaaagtactaattaagattttctttagtgcttttgtttagtgcttctgttttgagtcgaaaaaatactagttaagattttttacattataatttttttagggtaatattctacatatataatactaataataacaacatttttttttgccaattaaatactaaatgaaaggatgctagatggaatccagcatattatatgaagaagaatcattgttcatattcacgcttcatcgagaatgaaaaaaaaaaatgcaaaactgcaaaagcaaattaatctattcatgtaagatatttaatagattctaatgagaatag

SEQ ID NO: 208059 - DNA, 667 bp, Cannabis indica
aaaatacaaatgactaaaatgcctctcgaagatggatatttttttctctatatttgtgggctattatggcccaattcgtggtcagtcttactgtccacgtataaaacctgcacaccaaaatcctgttagaccaaaggttggtcagccatgcacctgttgagtgcatgttggccagcaatgagatgttcagaagctaaccgacctatgctggccatagggcggggaggccagggtggtcggccagcccctttgaggtagctggttcgtcactttgtcgtcccgcctgagtactcagacctctcgttggttgaagtgctgagtagatggtttggccctattgttggagagctgtactgctacttcaagtgggtaaaaatcggataacataccccttataatgtttcgacatttgaaaaaaaaaaagtttaactttttttttttttcatatttgtctatgttgtagttatttaggacattttgcaaaattttaagaaatttaaaaaagttaacacatcaaaaataaggtttaaacaatctatttcacatgctataaataaaagagtcttgcgtctgtttaaatcctgttttctcgtgttaaattttctaaatcatttaaaaattgtaacatatcttaaataactagaacgtagacgactatgaaaaaatc

SEQ ID NO: 208060 - DNA, 591 bp, Cannabis indica
tacggtttttataagagataaaagcgtgttagaatttagaagtgtagtggcagaaatgaggtttcgaaagtaagatgaaggtgggtgtttgataaggtgtaagggattttatttcaaaactaattatataataaaaatgtgtattgtatatgattagtgagtgtatagtaatgcataacattttataagtagtatgatatatcttttaggttaagtctacagtacatcttataaaagagtgtttcggtaaactgttttagcatttagaaaaaaaaattagtttaattttttttataaccgtgtatattatagttatttaggaccatctgttttatgtatatatatacacgcatggtaagtaattgtttaaattttatttttagtattgtaaattatccgaaatttttttaaaatttacaagtaatcctaaatagctataatgtacgcgattatgaaaaaacaaatttagatatcaaaatagataaaagatctaccaaaacggagtagggccgtgtacattaaaaccaagaagaaaaagaagaagaagattctacacttattcaatgttggatactcaaattcacactgctt

SEQ ID NO: 208061 - DNA, 1261 bp, Cannabis indica
acataacatacacataaacttataattaaactcaaagttaaatatagaaaagtgaaattaatagaagatttagttacatacttttcttggctatatatgtagtacatacaaactggtttttgttataaatatttaattggcttacattctacaatttccttcatcaacacgtttgtgatgattgttctgattattttttctacacaattataagatgaaatgtgatccacaaaaattaaagataaatgggtgtacagaaattacagacaaaaaaattagctttcaactccatctcatgctttaaacacacttagactaacaacagaaccagggtaattacctaaatacgacaatataagccaaaagctcatttagtgaaaatgaatttgcaagaaaaatgataaaaagtgtagacaaacgggtatgaattcagaaaatccttaagccctgtttacaaattgctaagataatataagatatttcaaaaaggtatactaaatttgtaatacccatagattaagaatttgattagcaaatcctaactagttaaatctgtatttattatagaattatattattatataatttataatatgtgaatgaaattggaaaatgacatgataagaccccattggtgagcccaaggcattttcgtaattttgacctgagagaggtaaaactatatattgaatttaattgcgtgcttatggactatattattataaagtatacttgttgtgtccttttttgggtattttctgacaagtcggtgcagtatagtcacaatcgggtattttgagctgaaccgggttcagggcgaaatacatttttgggattttatagtggcattttatggtagagtgaataacttgaaatttatttaagtatgtatgtgatgaaaatgacttttttgcccttgataaagtatatgtcatatataggttctatgagcattttggtcttttgacccattagttaattattatctaaaagggaatttttacaaaatgagaaattcatttttctggtttgtttagccctagccaaacccctttttctcttcctagttaatcatttttaatttttgctttaatcttgaaatcttacttggaatggagttaattgttggtgatggaagcgtgtgggtgatggaagcttgtgggtgatggtaagcttcaaactttgctactcttgagtttaattctgagttttgttgctgaaattgatgatcataaaatcatgtctttgggtattgagtgtt

SEQ ID NO: 208062 - DNA, 567 bp, Cannabis indica
aaattttggatttttagtgagtattgtaggctagatttggtttttgaattaacttaggtgtaagtttgagttttctgatcttattttctacctgagatttctaatcatgtttttcttttcaatcaaattttgaattaacttaggaatgtgctaaaaatttgatctttattggcattttactataattttgatattatttcggcttttcacttgtgtatttcattcacttaggctatgtttggtgttggattttggtgaggaaagaaagaagtaaggaaaatatagatagaaaaaacaaaagtagtgaaaaaaaaagatcaatttcttatgtttggtatggaaagaattgtattatgagaaagaaaagttgatttttcttttatttttcactttttcttccctacattttccttatttttttttgtttccctaccgaaattcaacttccaaacattgccttaaatgaaaaatctttgctgaatcccaagtttgaaacttactattttgtgtttgtttaatttctctctttatcttcattcatatgccaaagaggcttaattttatgat

SEQ ID NO: 208063 - DNA, 1316 bp, Cannabis indica
atttcattttagttacgtacaaatagtgttgtgacattaaaaatataaggaaaatttatggtgtacgtacctgctaaaaaagcaatgtatcgatgcattcttttgtgttttcgatattctgataattttattattaagtgttaatatgaaaaaaagataaaaaaaaaattatatattaaaaaaaaaggcttttattataatgtagaaaatatattttcctttttacttttttttttttggttgtttttctagtaattgttttacttggaactcaaggtctccaaaaattaaaaagttagaagttaataatgaatataatttacaaaaagagaaataaaattaaaggtggtaccctttcacctaaagttgttgggcaataattccttgatataaaagcatttcagaatttgaatgattagatttatataatagtacttttgcataaacattgaattaatggatcatataatcttaacacgtttgataaaataatactcaatagtaaatccaatatgatataattaatggtaaagaacaagacattaaatattgttaatacaacaattcaaccactacaaaaaattattatactatttaaattatatataataaaatattattaaaattactcgtactataatattagacaccaataataatatcgatatttatataattgagagatataataattactctcgaaattataaatgatcgagcggatcttaatttaaaaaatagtaataataataattaagtaattgtattaatattagaaagtaataccgtcaatctcttattataatctcttagtcaatgtcggaaaatacatgctagaatatttttttcatgtcagtgtttgttatgcttatagcaacatcattcttgtaatttttgaaaaatttcgaatcgtgtacagtgccgaaaatacatttaaagttttttgaacacgcgtagtgaactggaatatcatgaaattctgttttcggtaccgtaaactattcgaaattttttaaaaatttacaggaatggtactataatcataacaaataccactatgaaaaaaaaatgaaaaaaaaaatcccaaaatgtaatttcaaacgtaaaaattaactacaagattataattaacactcttcttaaaatttcattattcaatacaataaaacttcatattcacatctcaaacatctcgaaaaaacataatgaaataattaaataataatggacttaattatattttattttatttatttatttaaagtagagaagacatgtgcatatgacatgattgttaaagtccaatacaacttaat

SEQ ID NO: 208064 - DNA, 898 bp, Cannabis indica
acaatatggcttgttatgctagggttattctgttcctaaattcttagccgaagcccgaaagaggttgtgcttttcctctggccaggtccgttgatcctccttggacttaggtacttggtcggggtttgtggtgttgctactatgattatgtttttactactataattagtcttgtgtgagataattttgaatattttttgtgtaggttactgcggttagtattctcttggtaatgtgattttgtttagttttgtattgcgttattaattcgtcatttttattctttgatgactcaccatcaaattaatgtttgacaataacaaattctttgtgactatgaattattagtagtacaatgacatactttacaatagttagtgctcatactaattgtgttttttgagcagtgaagaaatatagagatattcttgattctgcaattttttttttttttttgttttagttttttttttttgtcaaaaaaatcataattaattggctcgtttttttaaattttaattttaagtgtgtgtttccaaaaaaaaatatcgtaattaaattatcgactattattttaactgattgtaaacaaacaacaaaaacaaatcttaagtatttacttatatgcttttagtttctcttttatttttatttaaaagaatatttcatcactccatatttttttatatgcatctatgaatgaaaaagcttatgtcataattcactaactttttgtcgtgtgctttctctggccttttcgttctacgcccatttttattacctcttagaatatactcaagactatgttcacaagactatgttaaatatatatagatgaagttttcttttaattactcgttgtcttctccactgatcatattctaattctaaatatctc

SEQ ID NO: 208065 - DNA, 839 bp, Cannabis indica
attattattattattatctttctataaactaattactattatatatataacttgataagtttaaaaacaaaaattaaaacctaagtctccttctccttctctcttatccaaatcaaaccaccaccaccactattttcttcttactcccttctgtccagaccagcttcttaaccttctagtaatagatagaggtgaagcaagtggaggttagagcttaaggtaagtgtatattctattttaatctttgaaagcttaggtgttaaaatttgattttgtgttttgtggctgttatggagtctgtgagcgtttagttttgactttgaggtgctatacgattggttttaatattaatttgataggtttgctactgttttgaggtaagagccaagtttgagcttttaagctcaaagcttggtctctcgtggcgaattttgattgagagcatgatttagatttctcctacatagagaatgttatatggcaatgtatgattgttctctgaagtttggcatgatttggttagattctggtgggattttgagaagttgaaagtcgacgtttcccattcttgtgaaaacggtagactgtttttggagcagaaaaaaatggtctgccatttttggtatttttgtgaggatcaaaattcgtattttggtcataatttttcacccagatgtctattttaaatgttttatataccgttttgaagcttgtgaagagttctacaatatggtatatattttagagccagagtataatttggtcaagtatcaatagtttttatttgtttgggtatgtttcaatacctcatttatactatttctctttttcttttttct

SEQ ID NO: 208066 - DNA, 927 bp, Cannabis indica
ctcctcctcatcattacagagagggcaacagacagagggaattgccatgaactgccccaatttggctctagttgggagcgcatcccttagaatctgccaacaaaagtatcttcaaaccttgtatgcatttgagtattccacactaatttccactgccaagcgggggtaatgatcttggaccattcttcactaagtggtaaacggatttaatcgaaaattttccgctggtttcgcctgccacatccaaaaatcatcctccttatagcggtaaggcgatgttaagaatgtgcttggcatcgatcgatccaaaccactctctaattcttggttcgttccaagtgagattctcgtttatgaagtccttcaccagattaactcctttggtggcgtcaagaagaggacatggtttgtgatcccctgagggtacccaagcatcaaatgtagtttttccatcacctatccttctacaaatgccttcattaagtgtcactctgtgtttcagcattgctttccatagtttcgaatcagttttttttgggagccacatcaaaaaaattagcatccttcaaatatttagctttcattgttgcactccataagctagtagagtcattgataatcttccacccccatttcagaatgaaagcactgttgatgtcgctaattttcctgaacccaaggcctcctaaaaaatttgatttacacaaagagctccacgacatagtatggatcggttttctactatccgctccattccaccaaaaattcctcaggcacttatcaatggtagatgcaaattccacaaggaatgatatctgcagcagctgcatatattggcaacgatcctcccacagattgtattaagcaagttcttccagccttagatagaagcctcgattaccacccatcgattctattaagaacttt

SEQ ID NO: 208067 - DNA, 1812 bp, Cannabis indica
tggaggtggaggcgtaggaggagccgaaggcggtggagccgacgaagacgacgacgacgatcgagtttcgggttcttcttcttctaccggaacaacaactttaactacattgagaacttgatgatcttcccctgagtaaaggaatctcttgaacagcttcattccttctccggcgacgattatcatcattaccattttcttttaaatttattattattattattattttttcatctcaagttttctccaatacaaaacatcaagaccattttcatcaacaatgaaacccttaaaaccaccatcatacctcacaaactcactccgaccaatcgtctgcacaaccggccctccgccaccgccaccggccaccgccgccagccgcagcgccggcgacagcgaccgcgacggcaccattctctctcttcctcttagcgaccatatatcgttgaacgaaaaagagagctgcggcagtaaccaccacagtactgaccgccgtagcggctaccaccttagctatcttcccttttgatgacgtggaaggacccgtcgtcgccgctggttcgaccggcgtcggaagttgagtgggtgaatttgaagatgggggttttgatggaaggggagaagaggttggtggagatgggtttgggtatgggtaggtggtttctatgttttgaggagagaaagagagaactgtgagagtgagattgatgaagatgaaggtgagaatccatggcggaaatttgttttgccatggatgtaattttgagtagagaatttagagaagaagaaagtaattagtgaaatgtaaggaaaatctgttttgggaatatttgttgttaggcatattattatggggaggtttttttggttacataattaacaaagttcaaattgttgaaatggtacaatattagaattttttatatatatatataatatagtatttgtgattgtggaccttgtaaatgataattataataatatttttatgatatatattaattaatatgtagtgtcattaagaaaaataaaaaattatgtacttaggttgtattgacacaaaaatatattggagggatgtaattcattttaaaatataagttgataaaattatggttttttttttaattttgggaaaattttaaaaaaatgttcaaaaaatatataaaaaattaccctagagtacttagttatctttatttagttttttatatttttttaaacttttacacaaaatagtataatggtcattatattgtgaaagaactataatgttgttttgaataaaaatttattgtataattaattaagcaaattatctaacaaaacaaataacgatgaattgaaaaaaaaaataaataaataaataaatgtacgaaataattgatcgtcttattagtagatcgtttaataaatttgtaaaactaaataatattttactacaatatttttaaaactaaatttaacatcagaatttaatagtgatgtcctattaattttaatttaataaataatataaaaaaaattattaagtaaatgtgcatttaattataatattaaatactttaaagtgttaaataagaatgcggttataattggaattgttaattaatacgtactagtgtcatattaaaaaaaaaaattgatattaagtatttatagtgtctagtactatttagaaatgacatctcacaattagtaaacgacactctacataatttaataaaatttgatatttaattgtaccaacaacaataacatacacgttaaaaaaatattactcatatcttaacatttctaaaaaaaaactgt

SEQ ID NO: 208068 - DNA, 609 bp, Cannabis indica
taataataataataatacattcaattcattttatcatacaaattcacgtaaagtttcactttcacgtagagagagtagagaccacgttgtctatttcttttgaaaaaaaaaaaaaaaacgtcaaacgagattttattccataactttctaattaaacaacattcaaacttaattattttataatcaaattaatatttcaaaactaaaaataacaaatgttcaaaaagatccttacatttgttcaaaaaaaaatgtttgtttcttaaaaaaaaaagtgaaataaaatagaaaaatttacataataaacaaaactttgaaaaaataaattatttttactctttttaatttttttattttaaaaaataactctttaacaaaaataataaactatttttaattattttatagtttatttataattgtattatagctgttattgggttatttttttaaatttttttattaattttatagtttatttataattttcgtaaaattattttttttgtttttttttaaattattttttcaattgaacaaaccgtaaaaattgtaaataaaacataaaaaaaataatatatatatatatatatatatactaattaacta

SEQ ID NO: 208069 - DNA, 850 bp, Cannabis indica
aatttatatatataattttgtttaatttgcttcattattcgactaattaatatacacggccacttttaattccaagtggaaaatttcatttgctacttaatcaggtgacgtttacatttaatggcacacaaattaatgcctccaaattcttggtaaacttaattattaattaatttaaaacataaatatatataagattaaataaattatatatttagagatgacacttgtatatttcataaaatttaataggatattaagtagatctagtgtttttatagcctttctcaaatttttaacatgtccagctagctagattagatatgttaattccatgcatgcgatgatcgttgaacaaattaattatatcatgggcctgcatgcatgcatgcatcatcatgaatcaatatctcctcttaaaaatatgtgtatcatattgtgttaaataaatttaaaattaacatattaattaatttttcatttattaaaaaattaatcatctatgtacagtttttttttttcttataatgctcaaattaattgatgtgttacaataataatagtttagtacattataaaacacaatattttagaagatcatcttgattccatgatcatgatataatattgtatatatatatatattatttttttttgtacaaagtgatctaaattactcatgaatttacgacgcccacgttcgccaccagcgctggaacctcctcgaaccaggatagctcattgtctaaccgcagagcatgctttgccaaccatgggccgcgcgctaaaatcatagagcgagccccatgggacaaaactgcccctgaaaatttagacaataaagctatac

SEQ ID NO: 208070 - DNA, 1298 bp, Cannabis indica
aaatggaggccatctctaggcggcatcgccatcgtgatatgtgtgtccaaacaatataaatttgacttaattttaatgcaatttcttccattgatcattcatcatctccttcttattaatattataatagtcttccctttcttttcgcaaagttattaatattatagtacttagcgtctcaaaataaatactgaatattatataaaatagaatataactcattaataacgtcttgtcgttgcctgttggtgatgtggaccgatggcgattattgaacatagttcattattattagttgctctattttgaccaaacatttagagtaaagtactctacactttcttagtttaaaatacttcatttaaattttattttctttatttatattgtatcctaacttattaatttttctttctacatcatttaaatattttatccaaaagaaatagaatattaaaaaggagaaaaagatttacagaagaacaaaataatattttaatacatgaatagttgtaactaacgaaaaaaaatagtccttaaactaaaatagctaagcatatacttcatttaatggaaagtaaattttgacattcttaactatatttttacatagttggcaaaaaaaaattatattttcacataagttattttaactcacctgcaagtgttttataaagctaagagcatctttaatacatctgtaaataagtaagtaaaaaactaaaatatagcttacttaataaaaaatatactctaatagtatatcaaaaagtgatataaatttagcattatatttactttgatgtaaaatttacaccacaataaatacacttacttttttatttatatttatgttatttatattatttattaatatatttaactatcatattaaattatgaaacatttatattattttttattgttttacatattaaaataataataaaattgattataaagtaattagattttattttaaaaaaaaattaattaaatattaaattttacaacaaaattttataattatacattgaagtataaagctaaaatttagtataaatttactacaaaattatattttataaatataatacaatttttaaatctctagagatggtctaatctgtcaaatatatttcaaaagtttaaaaaataaatgcaaaatgaaaaattaatttacctcatctatagcgttgatttgcatatagcgacattattttattattttttcctttgcacttcttctaatctctgtaaataagagattggaatgacaagtattttttgtcatcttg

SEQ ID NO: 208071 - DNA, 534 bp, Cannabis indica
tgtgtgtgtatgttattgttttgttaataatattttcaataatggaattcagggtaaaccaccagattggcaagattttgtgggtattgtttcattactcataataaactctacaataagtttcattgaagaaaacaatgctgggaatgctgctgcagcacttatggctggtctagcaccaaaaaccaaggttgacccttttgtcaaatcatcatcaattgacttttagttttgtttgattgattgatgttttttccaactgaactgaactgaacaatttttttgtgtttgggtttttttaggttctaagagatggtagatggggtgagcaagaggctgcaatcttggttccaggagatgtgattagtattaagttgggagatattgtcccagcagatgctaggctattggaaggagaccctttaaagattgatcagtctgcactcactggtgagtctttaccagttacaaggtatgcaggtgatgtaagttttctctggctctacagttaagcaaggtgagattgaggcaatt

SEQ ID NO: 208072 - DNA, 639 bp, Cannabis indica
attgaggaagaagtatgttttcatgccaatgccaatgctaatttttatttttattctttgattaagaaaatgatattgattgtccacacacaaaaacatgaaacaatattaatgcgaagcttgcaaaggcaattattttacataccctgattgtcaccagaagggtttcctttactgccatgattgtaggcaataactccagcccccttttttgctatgatacggctttggtgctgcgggtatgtaaaaaaaatgaaataataatgagattgcaatctttttaaaaccggatgaatcagttattataattgtttttgaaaaagagaaagaggccatttgtcttagactggcccctcactgatatgtattaagaacctctcttgtggcgggggaatcagttattaaattagagttggagtcttaaattgatgcattatatcttcggctgaaatgacagaaaataataattcaataactttagctctcaaaaactccagttacaaatactaacacaagctgcgagtccacaattaacaaccttggctggactgtctgtgtcagttaaacaatgcaacttctaaatgagtaaaacattttacatgctttttatattttactgatttccctagtccacagtcc

SEQ ID NO: 208073 - DNA, 666 bp, Cannabis indica
aaaaaaattaaaaatttctgtattaaacttcttaaaaaagttgttttggtacattcttatgtacttcgatatcccgaaaaagaattagtttagtttttttcggtgtatattgtagctattttaaattatttgtaaatttttaattttttttgaatagtttataatgcaataaataagctttaaacagttacttactatgtatataagaaaaaacgtacaataaaatatgtaaatcttatttttgacattgtaaactactcagaattttttgaaattttacaagcagtcttaaataattatagcatacacgatcataaaaaaaatactaaaaaattgtgctaaaacagataaaaaatctattgaaacacacctctaaaaaagatgtattggggactcaccaaaagaaaaaatatatatatttggaagaaaatattggagcttcctttaatgtgggataatcataaataattatcaccaaagtgaacttttttgaatagaaaggtgtttttgttcattgtaaagttgaatttcttttcatttttcttgcattggatcttgtatattttttggatgtaatggctataaaatgacacataattaatgttcaatatatatatggattataaacacataattatgtttggtaaaacaaacttctttggtcgg

SEQ ID NO: 208074 - DNA, 1787 bp, Cannabis indica
tttgaaattaaaaaattgtaaattgaaaaaaattgtaaaagaaaaggaagaaaaaaatatctaaggaaaagaaaaagaatatgttttcattgttaatttttttttaaaaaataaaattatgcgtacaaatacaattgagccacgtatacactatgtacacgtggacaatccaacatgacacttaatatctaaaatggatgaaaattgtaaattgctaacggctttatattttgggggttttgccgtcaaaatttgagtgttgagggttaagtgctatcaaagtgaaagtattgggagttttactgctaatttaactttttttttttatctagctttgaaatgatcattcattctatttcaaaatagaatagtcattcctctaaaatgatggaaaagtcattctattggaatgacattctaatactttaaatgcaactaaacaaatgaatagaataatctttccattccattccattttattttatttttatttattttcagtcatggttactatgccaaaccttattgttttaatagcacttgaaaaattgaatggtgataatttcttaaattaaaatcaatttgaatttgatgttggtttatgagaactacaaatttgttcttatcgaggagtgttttgaagagctcattgccaatgccctaaagaatttatgggacaaatataatgcttggattcaatctaacaacatgacaaggtgtttcatgcttgtcagcatggatgacattatgcgcaaaacgcatgaattgatggagaatgcatatgagattatggattctttgcagtacatgtttgggtagtagtccgatcaaactaaacatgatgttacttgtagctacatgaatagtaagacaaagaagggtgtcccatgatgttacttgtagctacatgaatagtaagacaaagaagggtgtccttgtaagaactcatgtattgcatattgcagatgcatgaggcaaagatacattgggttgtgattgatgagaggattgtgcatcattcttgagtctttttctcattgctttaaaatgttcaccactaattatgtgatgaacaaactccaattcaacatgactaaattgttgaatgagttaatgatatttaagaacctcaacaataagaagagtgaatctaataatgttgaagcaaaatttgcttctccttcttctttagataagaaaaggaaattggatggtaagtacaacaacagtggtaagcgcaagaaagtaaagcaagcacctaaagctaagaagaagaaaaaaggcccaaagtccaatgacaagaaggccaaagacaagtgtttccattgtggcgtgatgagacactggaagagaagctataacaattatctctcagagataaaaaaagaaaggtaaatcttatttacatgtttatgaaactaatttataaatgatgataaatccttatggattgttgattctggaaccactaatcactatttttcttctatgaaaatatttgattcttcaaggaagctggctgatggagagttgaccatgcgagtggacaatgaagcacgagtgtctaccaagagtgttgacaaagcccgtttaaatttcaaaaataaattttggttttgaacatatttatttattcctgattgtatcagaaatattatttctttatctcttttgtcatgaacaacattatcatattctttttatggacaatgagattattattttaagaattggaatgcctattgttgtgctaaaaacagaaatacaagactctatgtgctttagac

SEQ ID NO: 208075 - DNA, 1083 bp, Cannabis indica
ccgaaccctgacccggaccctaaaattggacctggacccggacctcaacctggaccccgaccttggacccgggccggacccaaatcttgacccaaatctcgaaattagactcggacccggaccaggacacagacctcgaaccccgaaatcggacttagaccctggccaaggacctagctcaggtctggggtccggggtctggagttcgggtccggtttggggtctaggtccaggtccgggtccgggttcatgttttgggtctgtgtccgggttcgagttcaggccgagttctgggtttgggtcttggtcgagggtccgacccgaaattagatgggttcatgtcatggtatgatgtagaatatcaatttttttagtaaaaaaatttaaaaatagttttaaaaacctaagccaaacattattaaatttttaagataataaaaaactgttttttgttttcatttctaacaatacaattctgaaaactaaaaactgaatcctataagtaattactatcagtgacggatctagttatagccctcactaataaaaatattgtctttttaatttgataaaatagtaaaaatatccccacaaaattagataaatttaataatagtaattataatataaatataaatatttttttatgataaataaattccacaaaataaaaattctagacccattattactttttctcttttaaagacgttctcagagagcacgcaagtattcaaataccgtttgtgtttcatttgttgtaatatatgctatcttgatttgtaacttacattactaatatgttgtttgtaccattatcagttattataatatgtaccgaattaaaatattaaaaataaattaattcaaaagccatgcacattttattctatacatatacactaatatcatacattttggtcggtactttgtcgtatgacatcaatcacgcaccaaaaaataaataaaaactgttaatagaattatattatagcactacaaggcttgatactctttactattctatatcacaataatagactctttttcttgaactcttgttttggttgtgattttctgact

SEQ ID NO: 208076 - DNA, 514 bp, Cannabis indica
ggttaagtgttttgttcatctccagatgatgggcctacttttcccatgtgccctatattgcgactgccacatatattgggtaagaccttggggcaacacatatcaataccataaaataatttgatggcatgagtataattacattttcaattaataaatgacatataataaaattgtgaaattataattactagaaaacattagtttaatataattatatgattatggatcaattagttatttaaattggccaaactcaaaatataatcacataattgagtgggacaattaaaattgagtaagatggtgaaaaatattcataaaaggaccctacacacgccccacacgcccctttttttcttttttttttttctagccatgaaaacaacacgttatttttttgtaaaagacgtgtcgattacctaaaacatggcgacatcccataaatgccaaatggcttgttgtttttgcctggggggtttgaacccttcttcttcacccattgggtctcgat

SEQ ID NO: 208077 - DNA, 1203 bp, Cannabis indica
cttgagaaatttgcgccatgaagccagcctatcttcctctaactcgacttgcaccaccttacccgccaactcccccaacaggttaccatttgcttagaaaagtattcatgggggagattatgtatttgaatccatagacggattattttaaagtcaatcggtccatcaatggacggagtccaggcttgaagaatcagggtatatccacgcacacaccatggtccattgtcaagggcccagttcctatgttccacacattcaaaaccgaacttgaacacattagatgtcttctcttcatccaccagtgccactaccgaaacttgcatcttccagtttttggccacaaaatcagtaacatttatttcctccaccaccatgggtgcaactactttcccaaacaagcagcacgaggccaaagccttgagagaagtatcagaaggagataggttgacagaggtttcaaggcgagaaaaacatttgcctttatgaggggagttggaaacaatgattgactccataaatacaagacaaagagaacaaagaaaatcttgtgacagacaaaaacaaacacaccaaaccgaatcttaccaaccacagtaaataccaaaagaaaccacccaaatacgaacgaaacaacaagattacaagacaccaagcattacagacacacacaccaagacaagagaaaaagcacaacaccagccaacaaaacccaacactggaagatcagactaacacacacaggaacaaatgagagaaagtgaaaatataagtaaaactaggacgaacactagatggacacgaagtgaaatgggacacacactagagagaaagtagatgaccatctctctattctttggtatcttacatttgtgtagatctatagttttttctttccctattacttttatttttataaacatacggacaattggctttttattattttaaaaataaatgttaaaggttgtttttaagttgttaacacattatattatattttggcggaataatatattatttttcacaaattaaaaaatataaataattttaaatactttatctaaatttctcatatttgtatacacgattatataccttcctcacttaaatctaacatggatttgtcacttgatcttgtctataataatttcaataatatgcaagtattgtagatatttagaacatttggaaataatcttc

SEQ ID NO: 208078 - DNA, 496 bp, Cannabis indica
caatacaagcaacacaaagctgggatttttatttttatgatgtaaaaatataatttttttcaaaaaattattttataagattgtttttaaaaaaatcaaaaaatatggaagaactagtataaggtaactagttacatttttttttatagtaattgattaccctatagttacgtagttacccttagatagtataaaaactctttgaaatatcctcaattattgaaatgaggtcatgaaaatctctatttataaagacaattttattctattccttatagatatcttatgtgtatatatatatgtcttacaaaaaaaaaaaattcataaactacttttttggcaaattatatatacatttacattttatttttttttaaaatttttttggtgctctataaaaataacacaaaaataataaaaaattacacaagaaaataatatcctaaacaacatcaaaatatcaaacaaaaaataatatataaataacaaaaaaatt

SEQ ID NO: 208079 - DNA, 1530 bp, Cannabis indica
atataagaaaaatttttatttatacatgaggttgtaacttgtattatatgaaaaattaagatcatttagccatgaataaaacagttaacaacatattaaagtttaggaatctttaatcaacggttgctagtacggttcactgatacccgttatgtagtatgacatctaagtgaaggtgttgtatataatcgagattatatatgacatggaccgatatgtaattaaattgtcttatcaaacatgtcgtttactataaagacttaattcgtatcataaagatgatcaatagtagatcgacctgaatcctgagtaatcatgaatttctattcatattattaatttttttgattcacttgttaattcttataacatctgttttaggaatctaataatgtggatggttggaaacatgatctacgattatggaattctaacttttctaacggatagaatgtttgttctttttaagtgttaattctaaaaagttgtgcacaaatttagattggatctaagttattttactaatgaattaacagtactaaaggataaataagtaattataagggtaaaacaataatttaacctaaactaattatgaaccgacacaaggagggctaatcactagaattgaatatatcaacggacactacagtaaaactcagtaaatataattttataattactaagagttaaattctatatttatagtggagtaatcatagaattaataaacatgattatttggttaatgagattcaataaatagtctaatttattgaagcttagtattataggtccatggtcctcaaatagtcaccttgaaatactgtcaagggtatggataaaagttgtataatgatggttgaaaaaatctattttgatttgtcaaaatagtaattatttattctgcaaaaaataattatttttaaatttattatttatataaataggagaaaagataaaagttgtctggacaaaaataccatcactgtctagttaggacagaggtggcgccactatcaatgtgttaggacacagtgagagattccttcaatcaattattagatatttaattcgaacctaaatatctaaattcagaataaatgtctaaacatattcggttataaaaatttatttaaatatttttattgaattcaaatatttattttaaataaaacctttattaatttttattaatatgttgtataaacctaaaaactatacatataagttttgaggaaacctaaaaataccaaatttaaatatcttttccatcatcattcatccttaatgttcttgctcatgagttgagataaaaccaagaacaatattatagttaatcttattactccacactaatccttgtgtgtggtggaaggttcagaagatcacgatgtgagtcttcatcaccatcccgcagatacaacttacgaaaagaaacaaggataccctgattcgcttcaagaggtaactatttcttttcgtctatttattttcaaatttgaatatatatatatatatatatataca

SEQ ID NO: 208080 - DNA, 1002 bp, Cannabis indica
tggaaaaaaatttgtattacacattttggtagattccctatctatttttacatcgacgtaaactttttaatcttttttatttttcataatagtatacgttgtagttatttaattataattatttgtaatttttcaaaaaatccagaataatttttacagcgttaaaattaaaggtcagacaaatatttaccatgcaataaaaaaaataatcacatgtacaataaaatatttaactttattataggagtctatcgaaatatctctttaaacatgatttttcttttctgtagttttgttctctcaattttttatattttgaaaaaaaaaaatattattccaacattaaaaccgttacaaattgcaggtctatctttaattacatactcacaaatataattacatggtcttttgacaaacttatgataaacaaaatttaatttattgacactaaacatacaaattattaattctaagaatgtaaatacatatttccagaatttattattatactgctatttatgtatatagttttttgcttgaaactcttgatctttgtcggattaatatcacattaacatcactaaattgctataaaaaaataaatagaatgtaattaaatgggtacatttgcaataatttatatagtttggagatatattttctaaaaaaaattaaaaattaaaattctacaaagatcataattcagaagaataatatttattctacaagtcaaaatttatgtttgttgctattttttttattatgatacacttaaccctattagtagtagtgactaagatgatgataatgttcatgtagaatagaagttcttcaatgtatattaattgccaaattaattaaaacagctagcttatatatattccaataagatattttgaactttaaagacatggattgaaataataataatcattataattacaaatagtacacctggtgtgttcctagaatcatatattaacaacaacaataataataata

SEQ ID NO: 208081 - DNA, 1806 bp, Cannabis indica
ttgaggtggttctgaaaaaatttgcatctgtgttgccgttctaggggttgttaaaggtcagtttagcacagtcgttctagaattgttaatggggttagcaacatagctatataaggatcctatggcaacagttattactaaataaccgacatcataaatctatggcaacgaatgagtattatttaattaataactgctgtcattgggccttgacaacgattattatgtaataaccgttgtcataggagttttgtggcttttatacagctttggcattttgtgtaatagccattttcttaaaattttttaaatttgattttttttttcatataaatatacatatattttgattattatatatttaaattaagtatagattatatataataaatataattataagttaaatttacaagtttaataaatacatcatttttaaagggttattttgattccctaatcccaccaaactaataggtcaattcagtttttttttttttaaaaaaaataaatgaaataaaacgttgcacttttaaatgaacaaattaagttccattttgaaaggctattttaattctctaatggtaatgccacttttaatattaaattgttaattaatatacatttagtcaaaccctcaaaccgtttgctttgatcgtatcgtttgccttcatcatatgtgtgtatatataatattaattatattaatggtaaaatgtgatgaagggaaaggcattggtagaatagattttaatagtaagtgaaaggctgattttttatttattttttatttttttgaggttggctcaccatcaagctagcatcaacatcaatttagtgtcaaagacatcaacttctccatcaaggcattaaaattaaactaaggcatgcatctatataataattttaactttttaatatatatgaagaacaagaagtgaaatatgaattaattttttttttgtcatagtattttttaaagaaagataatttgtcatagtgttttattctttcttattttcttgattttctttttggctttttgttatatacaatctatatataatgactaaaattattagagaaaaaaatatgtaatatatattttaatgttgaattgaatgttcattctcctttaatatcattaattcgttctattaattattattttattttaattgtctatttttttaaatttgtaaaattaatctatttattttttttagttattaattagtcactactcattagtacgtactaatgtactactcttttctttttttttttttttttttttattagttgtagaaatattactgcataaattagataattaattgaaaaacgtaattgggcaaactgacgactcttaatttgtgatagggaattatttaaatttgatgctttaaaatttgaagatagaatcggcagcaaataccatgatcttttgttctttttctacttctaatttaataaattattactgtatatattgattgtattttgaaatattatattaactcttgtgttttttctagctatgcctcctataattagaaaacatgaatttgggttaaattacttaagaaaaaaaaattagaagagttaagtactcaaatctcaaagaaaaactacttaataaatttattataaaagaaccacatattctttagaaaatacataatcatgacattgttgatgttgtaaatctttgaaaataatggttccaaatgagtaatgttaccaaaactaacccacgaccaacatagtataaagttgcggatctaggtcaattgtcacaattgt

SEQ ID NO: 208082 - DNA, 1028 bp, Cannabis indica
cacttgataaaccattaaagatagcctcaatgtcgtcttgagcaaatagaggatgacctatagaaggtaaggtattgacaaggctattgatcttgagtagaaaatcactcaaagatcctttcatgcgtagattttgaagctaagttctgtatttacctacatttgcacgattcagtgcaatgtagtattattgagatgaagctaaatttgtgcagcagtatcagatcccaccattcgagttaagattatctcagacatggaagacaatagccaagaaactaggatactgtcttgttgatcccagtcttcaaattctggactgactcaattgagtcttcgatcttcattggtgagagatttaggtggagcttgatctggatcaagatgcttctagagtcgactgcctttgattgctgcatagacttggtgacgccatggcacgtagttgtgctcatctaatcgaacagaatgggaatgagagaatgtaactggagatgttttaggaagagtgtattgattgtgtgagaaaaacctccttgagcagccatgaacgattttgcaggaactaagaggaaaaaaaagagaaagagaaaaagcttaggctctgataccattgtgaacaaaggaaataaatgaatctcttgtattgatagagaaaaggacttcagattttatatacacaagttttaacaactaacaaccaacaatcaagctaactaacacacagttacaataagaaaatttagttaaatacttaactaacttaactgccaaaactaactcttagcagaaaatactttactgaatacaaattcggtctgaattatatatctttgctttataaattttttatatgcagatatttaaaatatttttgactaaattagagtttgaaaattttatttttaattattttgacataatatacataatccaaacataattttttgaagtaaaatactttttttttttattttaaaaaaaactaaaaaactaaagtaaaaaacgaagtagacaaatctagatca

SEQ ID NO: 208083 - DNA, 1285 bp, Cannabis indica
tattgtaaacactaatcaaagttatcacctttagggatgagtcaacaagattttgtatttacaaaatacttatctcacgagatctaacactattaatttgttcaacggatgaccatcccaatactaagttcaaccaacaataaagatttaaaattgatactacataatcaataatagagatcaaagaaatgttcaatataacatctattcacatatatttaaaaaattataaacatataatcaagtatggaagatataggaaaaatactaaaactaaacatatttcaaattttcaaagattttaaactcaatgatataaagtgtcccgtttaggcgagagttaatgatatcactagttaaacagagtagtgagctcttctaaaatcgacactaatttagcaaccttttattcgatcaaacagaatctagcgttatcccgtttaggcgagagtaaaggtcaatcctttttcatgagcttctattattatttcatattcataaaccttttgctaagtagtcatctttagggatgagtctactagaaaaaaaatctatgaagtacttatcttgcgagagctaacgatgttaaattgtgtaatcgtgaccatccattagggggacaacaagcacctcgaggtctcattagaaaaataaccatgtaagaccaacaatgaagatcgaatgtcttataaaataaaactcattatttgaagaaagtagtatttttattcaactatttattttgacaatttattttaatatattcattaaaattactaacttagaaataaaagaattataaaattaattttatacccaatgtataaattttaatctgtattaataaaaattactaactatggtagttctgaaaataaataaattatttttcaaccttaggtataaaatttaaaattaaataaattactataaaaattacttaatttatgtaggtctgaaattaataaactagtttccaacccaaataaaataattactttagtatcttaaatattaattactaaaattaattttcaatacttatgcattaattttctatcaaaataaattcttgaaaaattaataacttaagtagatttaaaattaattaaaaaattgtaggttgttgttgctggcagttcgtagctttggtttgtaattggttttgtttgattaatgaagtttttccttcgtgataaaaaaaaataattaaaaaattaactattaacttaagtattatttttgtatatttttattttaatctataatattaatatatttattt

SEQ ID NO: 208084 - DNA, 793 bp, Cannabis indica
ttttttttttcttaaaaaaacaacatttttttgttatagtacatttaataagggaaagatatatatttatttattgacttttaatatatactatgtgtaatcaaattgaatcaatttttaattaaattttaactgatttcattatttgccatctaattcaatacaattaaaattcagtgattcaaatttaatctaatcataattagatattcaatttattataattagattagtttggtgtaattggactggtagggatgttactccatcagttcctgcacaagattctacagagttcagttcatcacagcctattcaagttcacttgattatatgtaatgattgatactgttatcacatatatactaggaaattgttgggggtaaaaagttaaattgcatcattcttagtatcttacattataaaagtgaagtaaaggctattaagaaatccgatctctaccataaaagaattgtaaataaacaaggctttcctctgtacactaaaacttgtaagcttttataaggtaaagcaagatagcaaactcgattactctcaacggcacaagctgatgcccctgataaagttggtccctcttaaagatctcctttccaacactccaggagaagctcgcaaaatatgaatattgaaacaaaagtcagaaaattcaataaaggctgtacccaaagaactggctgataatgatggcgaatccaagagcaatggctacaatggaagacgcccacgtcagcttctcagtaattctgggaatcctatcctttaatgcctgact

SEQ ID NO: 208085 - DNA, 629 bp, Cannabis indica
atgaatattacttagtgtcaatctatatatacaaaaagttattatgataataaaatttaattttaagaaaaatcataaatagatttgttattagggatccacacggagtggggaattagccaagagtactctcccgtcctcattctcattaaggattttaattctcatcttcgctctatcctcatttattccccaccggcaagaaattttctaattaatataaaattaaaattatttatattaaaaattaaaatatataaaaataaataaaataaataaaattaaaatattacatattatttattattcaatatattacttattactctttaacacaatttaaaaatttgtaaaaattatactaaaaaactaaaaatgtacaaatataaactataaaatataaaaaaaattaaataaaatattaaatggttcctgtcgggataggagtgtcattctgtccatgtttaatatttagagacaaaaaataatcttcattttccatttaaacaaaaaatctttagggtgggttcccggtagtacccatccccataaaaaaacatgtgcatccctatcaaaaccttaaaatatttaacatacctaatcttgcacataaataataataataataa

SEQ ID NO: 208086 - DNA, 886 bp, Cannabis indica
cgagcaaagtcctcacgaatgcagaccgtgaaggaggtgtctgcgagtcagcaaccctctccccccgaaggcgggaccttttgctctcatgaagatcacaggccgtccatcaagatatattggtccaggatactcctttgactcgcggaggctcagtccgcacgcgacaggctaagggcccactgctcgctcctttccaatgtactatgtcaaaggttgtcccctcagccacatagaacgtgcatgtccttgtgtaccgtacaaaacgatctaacggctaagagcaggggtaattcaaatgagaaaggccctaaagtgacacacgtccaaagcatcgtcagtatagccagtacactctgacatcggtaaagaccacgtggaaaatatgccacctaccgatcctacattgggggtttgcccttgtgaagatccatcaatgacgatccttgcgagggaattggcttataaataccccctaaagacacacaatagaggggatcggaatggggatttcttctcctttaatccctacgactctccttcaaaggtgaaccctttgtaaacacactactgtaattttattaactctagaatattcctactaagcttccttttcttcaagaggaacacaacgggtcggagtaaagtccattcattttgtatttgtatcaacattcaccaaccagagagcctaataatatggactagtggactaaggataattaacggctgaactgcgtaaaaaatcagctacctatattcctatcatttacgcttttattactttctcaagctctataattattcaatttctgaaaacttgataaacatttggtgctttcattgagagctgaagaaaggaaatatacacggcagttactggagc

SEQ ID NO: 208087 - DNA, 605 bp, Cannabis indica
cacaccattattattaagtgtcgtatatttaactttgaatcacttatgcatctctattagatatgttcttcactaaatttaacaagatactcacttagatataaagtatttaaaacgaattgagaaaagttgaagagaagatacaaaacaatattttataaaaaaaaatggtaaaaaaataaaaaaatcattattacttttcataaagataaaaatagtgaaaaaaattacatacaaacttaacatatactcgataaatacaaaatttattatcaatacatttagtaacacttttttaatcagtattgtaactttttaattagaaaagtaaaaatattttcaaaaaacatattctataaacctcttcttcacctttcaattttttaagtgagaatcaaaattttaataattttgaaaaaaaaattaattttaaaatttttttaaatattttttttttcttaatcaatatcttggactccgacctcaacttagatcttaggactcagacttcggccttgaccccagtctcggactaggaccacggccccagcccaaacccgtacttgaactcgactacttaaaaaaaatgaaaatgaaagttatag

SEQ ID NO: 208088 - DNA, 609 bp, Cannabis indica
tttttatttttttttatatattacaacatataatttggactccctccaacacatacgcatcctgctatggccaattgagctagcctgtaaaagtgtagttaagaaagtattagaatatttctatttatagaataaaataaagaattaattttgtgataaatgaatattttatatttattgaatttagacaaaattaattagtaatattctataaatggttagattttaatatttattacctaatttaatttcttgaattaattgtcaagaataaaataaagaattgattttgtgataaataaatattttatattaattaaatttgaacaaaattaattacataatgttctacatatggtcaaattttaatatttattatctgatttaatttcttaaattaattctcaaatattctgataattactatgccttaacatagttattctaacaatattaagaattaatgtaacgaggataacaaacatagttattaatattattactataccttactaaattcaggtgcaaatgaagttttttttttttgtagatgtgttgtgtaagaatttttattaccataaaaagaaagaaaactgacatattaatagt

SEQ ID NO: 208089 - DNA, 1062 bp, Cannabis indica
tacataacgttgcgaagcttctatacgcataatgtgattcccaaagggggagtgggtggatccttccatcctcgcccaatcgctgtgtattcccatgtgacttttttgctttcaaggccaacaacttattccacatcatttcttgcaacttttctgtcatcgttgaggggtttttcgtggctattggtttagtagtttgtttcttgggagccgtgcagagcgcttctgcctctgttatctcttccacttctttcctggttttccttggctgttcttgccaacattcagttgttccttgtgccacttggttttcttttctcacagacccttcatgcatgtagttggtacagttgttggtgtggttgttgctgtcgttgtttcctttttgagtggtttatcctgtttgttgattgtttatttcttctgcatgtggtgggtgttgatatccttcgagaaccactttcatctggttattttcattttttgagcctttggatgtgttccttttggagagcgatttctcctccttgtgttgccatcatgtcatcttgatgctttaatctttctagaatctcatgccatggtgggcttcggagtgttgtttcattgctagtgttttcggtattttttaggagtttctcgagaattgtcaggatcatctgggggtgagcttttcttgttcatttgtcatcatttctttaaagtaaccggggggtttctgtggactggtgcgatctcatgacgaaaaaatctcctgaaaaaactgggttcccatagacggcaccaaactattttgaccaaaaatagtcaattttttttttgtgggggatctctcttcttttttttttttttttagatgttaattcaccccgtttttttatgtaaaaaatctcttatttatgttctatgttcttttgtttgcatgtgtgacatgtccttctttttggtatttgcctgacgcgtgtcctttatttttttctaattatgtctgccacgtgtctgttatagcagggtagagtgtgttcctttccatgtcttgcttctatttgatccatcggtttc

SEQ ID NO: 208090 - DNA, 835 bp, Cannabis indica
attaaagaattagaagtttttatattagttgggtaccattattacactatttagtatttaatattagttaattgttaataatttgttacagtttgattgcttcactaaaaaaataaataaataacggaggtacaaagataatacaaatttaaaatattagtttttcaaatatctatgaaatatatttatgtgttaataaattatgatatgatgatgaatataaaaggttcgtacattaaatattgagttttcattatgtaaatatatattataaatgacttatgataatttatgctaatgagccattattatgattttttttctacaaaaattgaataaaaatctaattgaattagaaaaattgagtgaaaaaaaaaaataaaaaaaaaaaatcatataatctaccacatcaccttgtttaatttttggattatatatacaattaaatatagattaaatattgatataagtaaatgaataaatatcttttaattatatgtaatttatagcttgtaaattaatgtatgtatatgtacaatttataaattaatctgtatctaactactatatataatatatatgtgccaaaaaatgaaactaaaaaatttaacttgtaaactaatgtaaatcatatatatgtattattaagaaaaataaataaattaaattacataaaagtgtaactgttgaccgagattttcgacaactattagaatatgattatattaaagagctgtaagaaagtgagattagattttttacgtggttgggcggttaatgagccttagtccacgagtcttgttattatggatgtatttaatctaagattccacac

SEQ ID NO: 208091 - DNA, 1285 bp, Cannabis indica
tttcgttttttttttttttttctctgcttgtaaaacataaatatggttagtgttacttacttcctatatacattctttccaaatatccacgttataagagccaaatctctcttatcatattcttaaatttccatacattcttaactcgtcattcataagcttcctactttctgtcacaatcattgccagttggaattatggatggtggacccaattataccagccacttttgatgggcatcaacatcaaagccaacttcaaactttggatggttcttggatggaccagttaccagctaatctaatgaaagctatgctgctacaaattaacttgttcatgttcgttttcccttaccccgtggtaggaccaccagcaaggtgggataatccttatatctagtattggaaatgtgggcatggtgttggttttccatcaatgacataacatgtcctttgttttttcctttattcttttcctttttcttatttttggggtttcatttattgctgaaattttcttttgaataaattttcaagagtaagaagcaggacatcattgttttgtggggggtggtcttttttgttgttttgctccagcctgcaacattaaaaaagtgattatttttggtcatttggtcttcttcttcttctgaaccagtcttccaaattaattttttgttcttctcttttctatgcttttgccctgtgatcaagcaacccttttaaaaagtttgtctacatgtgtggttatcttatattacatttatataacaactggcaattaatacttttaatctatattctaattggttaaatatagattattaaaaaaaattgctggaaaaatggcaatgaaagtttttgttttctttgtttgcttttgttaaagggaaagttgctcaaagtggaggaacttggttttttagtcctctttctgaaagttgctgcctagtgccaataagggcaaaaattatgaaaataaaataaatcactttaaaataaattagagttttttcaattcctagttgcattgtgcaatttattccacaaggaacccacttccctaaactcaaagtaagcaaccatacatcatccatttgtatattgattttgacttttgtcacctcttaacttggtttgggaatttatttatttatttattattactatttttaattaaaataaataaaatttattggtttagttctattggtaggtgcaatttgaatgagggaatcttccagtcctgtgatctctgtaattacttgcaagttataaaacttgta

SEQ ID NO: 208092 - DNA, 1303 bp, Cannabis indica
cctgatgtgatcgaaaaatgcgttcaatgtttgaacctcaaaactttgactcgcgatcccaagctaacggcggcaaaagaggtggcgctgcttgggggttgagatcgtcggtgactggaggttctgatggtgtggatcgtggggtcggaaggtggccagaaagtggttgtcggagttcgtcggtagtggtggttataagtttttcttttggtgttttgaagagagaggggggagaatttgaataaataaaaaaaattatgggtcccactttatttatttatttattattttattctttctttcttctttttttattcaattttaccgagtcttcaaagtaccaccatcaggcacgctaaaggtaaatattgatgccgcattagacgccaagaagagaaagatataggattttgggcaattgtaaggaacaacaaaagagagatagttgctagctgctcaactctaattttgagtaaggtgtcttccatttttgttgaagctttagcattgtaattggctgactttccaattgcagaaattggaatcagattgtacagttgtagtaaacaaagtaagcataaattgtaggataaatcctatcggtcagatttgatatagagtattgtaatctctttctctatatctcttaatgtgtctcttagttatatgtacctagggatttaaacactactcacaatctttctaggagagctttaggattaaatcaagagatagtttagagtagttgtgttccaaatattctaatggtgtataattttattaaggtaaaaaaaaaatggaaggatggtacttaaagtaattaggggtctcatcacatcaacactaatattcattttgttttcttataatcagatcactatcaattgataatagcaacgctaatttttcttttattaatttcaactaatatatagataacaataacttttacttgatatttatatcgattttatgtctcatccaaatgtttttcagattctattatcatttcaaacatcttttcactgtatttttccacgtgaatctttatatttttatttttattatttttcttttttggtaggggagtctctcctttaaatacatgccgttacttgctttcaaaaataaataaataaataaataaataaatataaatccttacaaaaataaataaataaataaatatatgccgttacttaaattagtttaaattttttgttagggtgcagtgtactgtattgtagtagcagttatattactcgattattacttctcaaacttacaggtgatattcctgtga

SEQ ID NO: 208093 - DNA, 858 bp, Cannabis indica
taagtttgacttgacaataaggtcccgaatactgcatgttcacactacaataatcatattattaataattgccttatataagctattactttagctgaaaaagtccaaaaagaactgagatcacctctcccactaatatgtctcatctcattctttgtctcggacttaagatttaaagtggggtgtaatttttttggtagatgagggggataaaagtaaattttaaaaaaaataaataccattagtgggattaaaatctttatttttcaacttacataacttaatattatgcttattattttttattataaatatatgttgtaattaattaaaatatatatatttttttttaattttttttttttgtacaaacaattgtctcacttcgcttatatgtgagttcgcccgtgctgtgtgacatctcatttaaaattacaaaataattgacagcctttacctttatattcacggtcgtttaggtattaatcaatttccatttatatatttttaaaagagagcttgaaaacactaattcaaacaacaatccagcaacttgagagatctttaactgtcaaaaaaaaaataataataataataataataatgcccaaagtttttatcacataccgtccttacaaaataatatctacatttataactttgtattttattatgtatttttttttttggtaaattatcatattttttttcattgaagaaaactccatcattctcttctattataacattagcaaaacgactttggacaaaatccacgactgttgactttgaagaacgactttgattgccatcggcattacggttgatgcgtttgttactattaaatataatataatt

SEQ ID NO: 208094 - DNA, 720 bp, Cannabis indica
aagtatacctctatataagaataattacatcttaataaaatatatacatatatttttataaatttatttacgtaaaattaataactttattccaaattataatacacatataaatattatatttattctaaaataattctattatgatataatattaattactgttacattaatatattttagtattttattattttttttctagtgtaactttatttagttataacctcttaattagaatataatttgtttggttccaagtgtattcttagatagaggttctactgtatataaaaatacgtacactactttgtacattagacgccataataaatattcaaaaagccataataaatatactcagttaaaatatcatttttatctaacttacaaataagaagaaattacaaattttatgggtttttatacaatctttgtaataatatgacttttttttaaaaaaaaaaaaaactaaataaattttaggaaaagttcaataaaaagtagaaaaaaaaatatggaaaaaaacatgtaagggttacccttaagtaattagagaagtaaccagttaccttatattatattttgtacatttttttaaactatttttcaaattttatacaaaaaaaaatacacattttaaaaaacttagtatcttaaaaaccataaaattacatattgcaaattttacaagttcttataaaatttgtgcaaaatatg

SEQ ID NO: 208095 - DNA, 764 bp, Cannabis indica
gggtgttcatcaaatcgctcacactgcacaaactctccgcaccaccacacatcacataaaaatgcagattgaaattctttgcagtgccattgcggtttgtattttctccaaatcgcgcggtgcgatgcagttttcagtcttgaattttataattgcaattcaaaccgcaccgcaccgcactatatattattaagttactaatttttacaatataatttttattctcttttttatataaaaataaatatatgtaatatattcatatattacagagacaattcaatataataacttgattaatatatatgctatgatattaaaattttaacaagattatttttgtattgttaaaactttatagatttttaaatgtttattataatgttcgataatgataatagtatagactgctcaaactgtaccgcactataccgaatttttacgatgtgatttttgtagattttaaatctcgcggtgcaggtgcagttgcgatttgaaaaaattacaaaaaccgcatattggtatgaagaaaaggttacaactcgcaccgctagttcgtttacaaccttggttatagaattgggattggacaattttgctctaacattatccaaaattctaactaatgtcgaaacaaggggacgatatatctcactaaataggtgggttgactttgtcccaaccattgctcctttttttttaatatataaaaatatttttatagtatttttatttttaaagtaataaagtatgtctaccataaa

SEQ ID NO: 208096 - DNA, 1094 bp, Cannabis indica
ttctttgagaaactttaatgagtgaatcaaagaactcaatgaacacaaatagaagtttatgtatacttaggattcagactgatctactaatgatcatcattatgatattaataactcatggtaaatggcatgttaaataaaagatgttattcacatatcggtccagtcatgtataatcaaataatacacaacacctttactacataattatccatatatgtgattcgaatcaaaaatcacacacactagagtatagtgtatagtaaattgtacttagtagttccatattaaagatcccttactttaatacactaccaacttgttttattcatattgtataattttaattctcttgcacgatttttaattcatttatcttataatttcatttcatataatctatccattaaaatacttaatttttaaggctataatcccaacagaaagtctaagaggactaggcatttattgtctcacatagagagaggtgttcattaagaaatgcccaacttgccactaatcctagtgcaactgtaaaccctttagttacattcatttttccctgatttaggaaggatcgaatttgctcaaatgaatgttaagcatgaatacccctgttcatggtgggtctatagagttaagtactctatgtcccatgtttcaaattggtgtcaaggaatacagtttggtctgacatcatgaaaatgtataagactgagaaagaaagacaggatttgggagaaaaaaataagagcagaatagtcgtaactagtgatatatggactccaaatcatcagaagatggagtatatgactgtaacagactattttattgatgattcttgaaaattacacagtcagattttaaattttaaatatgtttcgtgtcctcatgatgctccaacactacttgaggcactatgatcttgtcttaatgaataataataataaaaaaaatcagtacaatgtctctagataattgtactgcaaatgatgccataattgagcttttgaaatgacaatttgagtctgacagttttattttgaagggaaagttgcatgtgcaatgttgtgcatatattttgaatctaattg

SEQ ID NO: 208097 - DNA, 583 bp, Cannabis indica
gaaattaagaaaaaaaatccagttactatattcctgtcctgagtttgtatttttgtttggtatgtgtaccacctggttctacaaaaacggtaagcatgatgtaataaatgtgagatttttttttgaaatagtgagaaatatatttatacatttttttaagaaaaatattaatatacaaacaaaaaaaaactcaatataaatatatgaaaaatccctaaatatattttgaaatcctgaaattaaattcatatttttgcagatttttagtgtataatttggtattaatttttagtatataagaattatataattaatgcaaaccttttatatcagtctttttatgttataaaataaaaggaataatatcaagatcaaagggaaagggcaaattgagatcaccaaatgccaagagaaaacttgttagataatagtcctttttgagatgggacaaattttttaaaatacactacttcgagttagtagtcaaacttccaaattgaactaaaagttctatttacccattccctatccaacaataactacaccattacatacttatactaactagataatactaacaatt

SEQ ID NO: 208098 - DNA, 1123 bp, Cannabis indica
gttagtctgccaccaataactcgccatcatactttcaatacttcgactgatttctttggggaggagaaaaacactcatcgcataacttggtagtgcctgggccacagttttcaccaaaacttccttcccagcccttgagaggaacttgccttcccattgttgtaaccttttcctgactttatctttgaggtagccaaggacaacggtttttttgcgggacatggtgcttgggagccccaaatagaaactatcctcagttgcaatattcatttgtagtctcaaattgcaaataacaataatggaaaataaataaattatattgtgtgatttttttaaaagtgttacttttataatattttttaattttttttttcaaattgacagttttagtaattactctagtagtttctatgtggataattattatataaatttcaattgcgatctaagttgctctattaattgctatgtgagtttttatgtaaattttcgtaaaaatatatatatataaaaaaaaaactagcttttaagtgtaaaaaaaaactaccaatttattttatcttcaagattttggtttttcgcaaacaaattttgcctcaacaaactttttgagatttttaatactttattttgtatacattattttatgtaacaacatattacatttcttttcttttctttacttttttttcttaaagaaaagttataatccaataattatttggttcttagagtaagcatcttaaaagctttcatggttagtagcacacttttttaatagtgaagttttcttctttcatctttttccaaatgaatatcatttacatgtttcaaaaagaaataaatatgctatataatgtagataattttcttctcacaatttgtgtagaaagattggtcgttattaaactaaaaaagtagaattccttctaacatataatacaataatatgtactttacaatacacaataaaaacaaataaatcatataattatactttaaaaaatacttacttttagtcacaataaatttgtgactaaaagtaaaataaaaaatgtgactaattataaatcgtcattctcatgttgtgactaaaaaattccgtgactaaaaatattagtca

SEQ ID NO: 208099 - DNA, 560 bp, Cannabis indica
atctacttgattcttacctctacagaaatcatttaggttcatctacaaaagagggaaagagaggtaagaactaggcatggccacaagattgaaaacatctttaatactctaacttgaatagttaaacgatcaaagtgaagaaattttgtcccaatgacgagaattctaatttgaaggtgctcaagaatacgagactaacatagaattcatacgaagcaccgcacaaaatatatttaaaggaatttctcaagaaaagtaggggaattcatgggaatttgacaattttagtatgtgcacatatattcagtaagtatcaaaatctaaattctaatcccgagaaatcaagaacaacctagtttgaaacctagatattcccaaaaatatttacagaagcaattcaaagtaaaatgaaataaattaaaagaaaattgaataaaagctcaagaacttattcactattggagaattatcgactagaagtgcacttgaaaatcctttgaagcttcaacaaatgcttaaagatttgaaagagaattgaatttcactatgatattctcaag

SEQ ID NO: 208100 - DNA, 1254 bp, Cannabis indica
ccgttttattgacatgatcatattaattatagtcgtttattattacctagcggagtggaagatatatatatatatatatatatattcatatatttatacaatttaatatgctattattaaataaaaccattattgttggattccgaaaattgtaatttaataacaagattccaataagggtatagcactaagtttgctagtccaaatttgtattttaataaaaaaagaaccaaaaacaatatatatatatatagaaataatacaaaaaactataaaaataagatagattatatctgagtggtagtgtggataagataagagtagaagtactaggttggaatggccatgcccaaatttagtgtcccttaatattataattataaacctctaaataattaatttagtttgattcattttgttaaaaaattaataataataaaaaaaattgtatatatatgtaaatagatagatagatgatcatgcatgtacaaatataatttacatatatatatatataaatatgcatgtttaatttggactaccttcttgttaattacttcttttgtattgtggactaataaatgtctaatatattacctcttataaaatatcacaatgattaataatttgtgaagagggtaagggaggaagcataaacttgatcatttggtatcattatgaaaatatattttatcttgagagaaaagaccagaaaaaagaaaaaagaaaatggtgtatatattgttagataaattaatataaaccccaagatcaatttgtatataacatagaacacaataataagatataataattaggtatgtgtacctgattgatccatagcaattatctctgtttgatccacagcagttactccactttgatagtgcaatactatcaactaagtcttcctccctagatctctaaatcagaagcagtttatttatctgattatcaaaaggtatacaattgtgatgagacaatatgtatttatagagttagggaggggacttagctacaaaaccctagttgggctgggcctgctcatcaaaggcttcagtcaactagaaaagcccacacttctgcttcacctagactttacacacagatgctaagcccattaacaattgatcaccaacaacatgggctaacacagcaaagaactatccaatcaacccaagttttaataaaaccaataaaatttaatgtaagcccaaataaaagtctaacattctcccacttgggctacattga

SEQ ID NO: 208101 - DNA, 817 bp, Cannabis indica
ttttaattacaaatgaaattttaagtgttataatttttttttccttttttaagaatatgttatatatttatgtaaaatctgttatatgtgattattacaaacattaattataataaaataaaaataaaagtgagataaaattatcaattaatatatataaaggataagtataaggcggtgacataacgctctaaaatctcttcaaatacattgttaacggtttgaacttgtaaataatataattagattttctaactaacacttagacaaagaacttaaaagaaaactcaactcaaagaacgtttagaaaatttggaataaggatcatatatctttccaagtgttactgtttcattgctctaagaaaattcaaaaaattctccccctacaataaacttaagggttctatttatagtgagtaggggtgtacgtcggtcggtttagtcgggttatagcatatttttatcaacccaatataaatatcgggttgcaaaatatttaaccataacccgcccaatcaaaaaattagaaaaagttcaacccgcccaatgatttcgtcggtttggtcgggttaacccgtccaaaccgttcttcacttttttttatataattattattgttagtttctactattcaaataattagattttttaaaaaataaaaatatattatttatatttcaagttaaaaaatactatagtttaaattaattttaagaaccttaatataaagataaaatataaattgagtaaaacataaaaataaattgaaaaaaaaataattaaaaataatggtaagagattttaaaactttaaac

SEQ ID NO: 208102 - DNA, 1578 bp, Cannabis indica
gaatatctaagaatttggcttggtggagttagcaaattgttaaaaggcacaaatttattgatatgtttttggaatttaatttataattatgattatgtggagttagaatataacttttataaagaattttattatttttaacaatggtgtggaatttgattatatatataaaagatgttatataaatacatacgagcaaaacaaaagagagatgaaaatttgaaaattaaataacagtggggtagtggggtgttataaataacgctgccatgggacttgctagactagacaaatatattgaataatatataaatattagcacaggataggaaataaaagaatataatatgtagttaatttaatatttagtactattattattattattgaataattgaatcaagagagagaatataacattaattgtaggataaaagataactgtctgttaactttagttaatctattttaacgttttaaatttttaatgaagtatctattaaatgaagaaaataggtggtttaaatttattggtgggacagggtggagacatggttttggggacagaagatttttttcctgatttaggagtccatactctgtctccaacttcaacttgatatttatgggatacgggtgtgtgtctcgctctctcattctctgatcattaaatggtttggttaattgtaccaatcatgtaatatggaatttcatgtaaataattttcttatatgcaaacaagtcataaaggtgaatttgttttaacaaatcagaaagagtttcatatctttagggcactgctggtataatattatatttgagttttgttggattaaaattctattatggtatatatatgttattatataagtagatataaaattaagtaactaattatattataagtattataaggatatttaattatcatagaataatgtgtagatactatatattaatttataatttattgagtgaccaagttataaatacttcaaacttataatgatattataaataagtagtattgttgtattctctccttaaaaaataactttaaaaaaatattgtatccttgaaagattatgaccttgtttgtaatctccaacaaaaatttcaaattagtgtatccactcatctcgttatcatgttaatttttttaattaagtaaaagttctattaaaaaaatttaattcaaagttttctatattaaaatactaaaaatgattaaatttatgattatatataaatccacataattagaaaaagtaagccttgtaaacatgaaaatgtaaaaacattgtactgtttcattgattgaggatatgatcttcaaatctaaattatatgatagcattggtgaaacaaaataataaagatgcctgacatgttcggtaatagtaaccatccatgcctaattgccacgtgtatatgaaatataccaattaaaaaaagctttatagctccccaatagttttgctgatcaactcaaagtctcaaactcacttgcttccttccataatatcataactcattgctttgcttagagactgtgaagatggattcagtgattgagag

SEQ ID NO: 208103 - DNA, 989 bp, Cannabis indica
acaaaataatatatgtcatgtatatgcactttaattccatgtcattgcccccctatctcataataagttgctaaattgtctatagtctatatttttaatgtgtatactaatactagtcactacctatatgtccactagttatttatttattttgaaaggaagtgcaggaaataaaatcaaagatattaatggtggaatttgtcttaactgtaaactaattattgtgatttctaaaaaaaataaaaactaattattgtgtgaatttaaataatagattttctgttcagtggaaaatgttaaaggccacaaattaattaatattcccattgatcatttatttaatattttctaatacgagtattaaaattatatttgctgctgggatctcaatatacaccgtattgcttcatgtataaggaaataatatacctatatgtagagagagcaataattgtagtaagggtgttattttgcgtctattagggatatttattggaccacatccaatgttttaggtatattcggatccgatctaattatatattgaatgttagattttactatcggatccgatctaattagtttcagtcattggatcggttttatccatatatatttattgatctaatttatgtttattcaatattttagaccaagtattttttggatcagatcggatgcatttaatattttaggtccagtatctactggattagactggatccatccaatctaagaaaaaaagtaaaattttaatgttaattttatatatacatagagatgttacgtataacaatataaaatctgattactcatccaaactaaatgaaaatactaattaatttgattggatgttagatgtattggattgttagacacctcatctaccatccgatccgatccaattggatatttaaaaaaaacatccaatccgatcacaattggatattcaatgtttgacggtcggttgtaattggatcggtcggttc

SEQ ID NO: 208104 - DNA, 500 bp, Cannabis indica
gtagatttttgtgggggctcacccaacttgtctttacttttatcctcacaaggatttgaggttttggctttcttttgtttgtgagcatgctcttcagccattacatccactgaaggtttgtcattcgaatttgccaagtcgtcgaactcgttttgaaggtgttccatcattcttttaatttttgcggtgagcttcctctgttctactaactcattctgagtagcttctaactctttggttactcacagcagattcaggtcgtggtcataataataaccatctttgtagtactcgtatctcacatagtcattgccatcatcctcttcttttccatctttggggggctggttgtcgtcgaggccatcaaacacattctcgacatcctcccttcagttttcagcattgatcgtgcctttttctcttacactacccgtctgggggccagggggagggagtttgcttcttccatgacagtgtccaatggaattttattgcttata

SEQ ID NO: 208105 - DNA, 1251 bp, Cannabis indica
aacacacaaacaaacacccttatctcataaatctataattgattggaatcaatcccactaaaagaaaaaaacaaaacttgtaaagattcaaatctcaaacacccaataaaaaataaaaatcagatcttgaagcaacccaagttcttctaaagctgaaaagccagaaattagatatgcccaaatggagaattgactttttttttccttcttcttttggcaggtaggaaaattgggataataataacaataagaagaagaagaaaagaggtgggtattgggtaaaggggaaagagagaaaagggaaatagatttggggaaaggaaggaagaagaagaagattagatgttgatgttcatgagttgatgagttgatgtagaaggggtaagggtttgtttagatatgaatcagagatacctaagaaagaaaaatgacatatcaaaagaaaagggcaaaaagtgcatagttggtgggctcttctcttcaactctctacacacaactacacctattttcatcatcatattattattattataaattattattaaaatggatcaattcaatttcaaaaataaaataaggtagatattattttgtattctgtattttacaaaattatagatgaaaattatagatgagattttctattttgtaaatgataaaataaatcatgtatttttaaaatggtacaaataagaccttaaactgatttttgtcaaaataaaactaaataataatctaacttagaggtattatgataaaattgattaaatttctacatctataacttttgcaaaatagaaattctaaaataatatttaccctaaaataatttcattaccaaatttgttcaacttacctttgctaatttttttcccctttaaaaattagagtaatactaacacatttgctaattaatatgttttacttcatatgttatttttatgatatagaaaagacaatttttttttttttgaatagttaagattgataaaaacaccaatgatgcacaagaaccattaaacaattttgaaattcttttagacccatttaaagaatcgttttgacagacttcctatctattttagcatctaaaaacattttttatctatttttttttataattgcgtacattatagtcatttaagattacttgtaaatttttaaataattctgaataatttacaatactaaaaataagatttaaataattatttaccatgcatataagaaaaaatagtcgcgcgtataa

SEQ ID NO: 208106 - DNA, 483 bp, Cannabis indica
atctgcaatatatatctttgtgttaaaaccaataattaataaataaagttccattttcaaaataaatacataaactttaaatatactcgtatcaaggacatagtataccaatgcaaattaagttcaatatctgtgttatggatatatgaatatatatatatatatatttatatattgtatattaggtattaaagtgaaaatgtttagcatgcgtatacagacaccaagaagaatttgaaataaaaaagtagttgaaatgaaaatcttgcaattaaaattgggttaacataagatacaggactaaacccatgcaaatgtgtatacatgtttacaaacatacatgtatatatataatcttaattttgggggaccatctctaaaccctagctagcaaagcagagagcaccaaccccaaagtttcttttgcttatgttattatgcctcttttatacatgtctcgatctacatataaatatatgtata

SEQ ID NO: 208107 - DNA, 1673 bp, Cannabis indica
atgtgttctaagttttttatggcttcaactataatacggcgtagaaggaactatgtccaatgtatcaaagctacttcagatggcggttggatacgtgaccaagaccaaattgcccaatgctttctcaaccgatttacggagatattcaagaaagaccaacaaaatcccgttcctttgtgccaagaccttttccagaaaattctatcggagcaagataatggcttcttgaatgagatactgaatgaggatgaagtgaagagagctattaattccattggaaaggacaaggccccgggccccgatggcttccctccaagtttctacatccatcactgggaaacagtacatgaagatctcaccgagatggtaattcactttttcacacatttggagcttccgaacttcattaacgacacatcattagtcctagtcccaaaaaaggactctccagccacggtcaatgacttccggcccattgctttatgcaatgtggcttacaaaataatttccaagatcattgcttcaagactgagatacatcctccctagaattatatctccaaaccaagcagtgtttgttcaaggaaggcacattgctgaaaatacaatgattgcaagagaggtggttcactccatgaacaaaaggaggggaaagcggggatgcatgcttatgaaactagacttggaaaaggcctatgacaaacttcattgggaatttatcatctctgtactccatcaaattaggttttatagttccttcatcgactggattaaagcttgtatctctatagccgatatcaaactgtttctgaaagcttatgtggttggaaaatttagtccggagagaggcctccggcaaggggatccgttatcgccatctctttatataatggcagctgaagccctttctcgtctactcattcgaaaggaaaatgaaggtggtctcaaaggatttaaactggctagaaacggaactccgataacccatttaatgttcgctgatgacatcattctgttcgtcgaggctactattcgtgaggctagatccttcctagactgccttgatgcttactgcagtagctcgggtcaaaaaatcaatttcctcaagtcctctgtttacttctccaaaggagtgtcaggtagaaaagctcaacaaattgcagagaccctgggtgtgaaaaggatgaatagattggccacttacttggggctgcctctattccgttcactcaaaaggacagaggataccaatcatttggtagaccgagtgatgagaagagtacaaggatggaaagtcaagctcctatcaaatgctggtaagacctgtttgatcaaggcagtcggttcaagtttggctaactatgttgcttcatctgatgtcattccagtaaccactgctaataagattgataagttacttcgagacttttgggggggcgatacagaagacaagagaaaactccacacaatagcctgggagcgcctttgcaagccaaaaactaatgggggattgggtttagaaccacggagaccatgaataaggtattccttatgaagtgggcttggaaagtgctaaccaatgatgagtcactgtgcgccaacttatgaacgacaatacatcaagaacgtgaacttctttgagttgagatgaagtcgtccgatacaacgctttag

SEQ ID NO: 208108 - DNA, 667 bp, Cannabis indica
atagttcaatagtaaaattttataaatatattaatataacaattagttgcttatgatgcttatacgatatcgatgaattatcttttataaaaatatattttttacttttatgagtaaggtaacattttagttacttataaagtcaataggataccaatgagttaccttctcatgaaaaggcccactttaagataaaaataatttcatatatatattttggttacattttttttgtttagttagtactttttaaattatgtgttaatttttagattatattatgttattttgttattaaagaaattttatattatatttttttttagaaatatctatgttactttcaagtgtatttgagaaactgatttgttacaataaaattatatgtttatttttagaatattatgttgttttttttttttaattaattaattttcacattattttctttagcaacatttatgttacctttaaagttatttaaatttattgtataaaacaataattgacatatagttttcatttatttttttggttagaaactatttaattgtccagtcaattaaattttaaaaataaacttaaattgtaaacttaaataaaaatatagtaattaattagtgtataattggtattatgagcaattcaatatattttttttttttgg

SEQ ID NO: 208109 - DNA, 563 bp, Cannabis indica
ttatagacacaagaggtcattgtggagatttactatatgagctattttgctcattgcactaattaattttaagataaaattttatattcttatcgaacaaaaaatttgagtaaaaaaaatcacttgtacatgattcgagaaactaagagtcaaaaaaatatatatatatatatttataatcgagttatctaaaattataatgaataatagtcattatcttcataaagataataaaaaaatatattaaaaaatctcacattaataaatgcaaatatataaatttaatatggtatataaaagtatgagttactccaatcattatggattagttttattaacatgcatgaaacctaactaatatttttgaaataaatatattagttatgaaccttcgataggaaattttgtgacacattctgaccattgttatacaagcaatgtataaatataaatatttatataaatatatctattatcttcaataataatattaataattattaagaagaaaaaagataataaccaaattaaacctaagttattagaatgtgaagaagatgatt

SEQ ID NO: 208110 - DNA, 419 bp, Cannabis indica
atttaaataaaaggtaaaataaatttgtgagtttttttaattatattttattataatattatattaattttgtaatagattgtaattgtaatcagcattacaaatattttttattttaatgagtattactctatacaatatgataaccactacaatgtaatgaattacaaaataataataataaaaaaaaagcagacaaagtaatgaacatgttaattactattataagaaattggccataaaagcattactatggtcttgttggaaaaataatgaatttgttttgtacacacaaattatacttaaatagaaaatttacaaaaaatttactttaatgtagattggtccttaactttgagaaatagtgacaataatctaaattcatgtttgttataagtctgctaatcttaaatttaatt

SEQ ID NO: 208111 - DNA, 1192 bp, Cannabis indica
aaaagtcctaacagaaagtgttaatatttacaatgtgtcacattattgcctaattaagatccccttttgaaaattggtatttcatactatgttaacacatcaattaatttaatttataataaatatgttaactaatttttgttaactttattaaggtttaagtttttcataaataaaaaattaattgacgtgtcaaactttaattggttaaatatatgggacaccaatttttaataaaaaaaattgattcattattgaccggtcgaaattacggtcctttataaaaaaaaattacggtgttagagaaggcgcctaatgacaatgttcttaattaacatatttatatttttaaatattcatatatagagaattaataaaatacggtagattaattgaataaattctatatttagtgtcatttataaacaaaataaaatgtacggtagattaataaagtaggtaaaagaatatatctttataacaaaaattgcattagacaataagaggaccatctattgtttttttttttttttttttttttgtattatttggtctgattaaaagccacaaaaaagcaaacaaccacacgaacagagttcgaaactgaaacaaaaaccagactagcatgcagctaatccccaactactaatgaacaaaacagaagcagggaagaacctaacaaaacaaatctagcaagcctaagaaaacgaaaaacagtaaagtaaagaaatgaacagccatccgctcaagagttaagcagggaactgtcaaaattggacagatcaataaacccgaactggtttgtatcgagtgcccacttggctaccgtatgcgccacaccattgttggtccgagggatccaagagacctcccaaagaccaagttgattagcagtatcttgaaatatcctgaccaagtcttgtatattatggtggagtgaggtggatcggccctgcatagtcttacaacaaactgaattaactgcttctactgagtcacttaggaagacaacattagaaatggccatcctatgagctgattcagcaccccatgtcaatgcagcaacttcccctggtagagattcagagtaatagaagcgcttagtgaatatatgcgagactaccccttggtcactcctagaaatggcagctccagcagacattgtattgccaattgcgatatcagtgttgca

SEQ ID NO: 208112 - DNA, 532 bp, Cannabis indica
gttctggtcagtaatgttggcggcgttcagaagagagacactcggccggtcgtatacggtgccaaaaaatgatcggtaggagtagcgcaattggcactcgtcgtaccatatcacggcctccttctgcacagggcaccggttgaaggcatctatggcaacaaaggtcacgcagactcggcaggtggtgatgttgacgtctccgcggcagaaaaagctgccgtagacgggggaggaggagtcttcaccggcgctggtattatgagattcgctgggggcactagaaagggaggagaggacaatccggagatgattttggtagatactgttaggtgcgtaagtgggggcgttggtgcagttgtggtagaggtaagttgggacaaaatctccaacactaagctcaatcgagatgattagtaacgacgaaagaaacaaaaggctatttggaaattttgtggaaattagcatcattacttttgttcagctatttgtgcttttgataagctcataaagattttgataaaaaaaaaaaaaa

SEQ ID NO: 208113 - DNA, 615 bp, Cannabis indica
tctctctctctctctcttcattgcatttttcaggtgaatctttctttctctgtctaatctttctatgaattttcaatttcatgttcactttactataattgttaaacaacttctcatgatctctttcttcttattttgttcattctggatgaatttgtgagaaaactactcataattgattttattttctttagttttctggcacaattcgattgattaagctacaacaacatggatttcagagacaaggttaatatacatttatatatatatatatatatttatatacttaattttaggttcttgggattataatgtttacattatgcgtgcagttcaaacaactggacttaggaattggaacgagtttaagcagacgacccatattcaagtatttggataaagaaactggtaaaacaattgctttgaagagaatcatcctcaggcacgaactacttcaagctctccctctcactggatcatcaaattcacgtcaagaacaacccattgatgttgggattcctgctaacacaattcgacaaatctccctttacaggattctcgatcatccaaatattgctaggtatatttatcttcctttctttctttctttct

SEQ ID NO: 208114 - DNA, 721 bp, Cannabis indica
gagttcgtattggactaggaagacttgcggtgaagtttaataatatttctattttctaagatgggaggattggaatgaattatcgaatatctttatttctattttctatttttaattactttatatattattttttaattttttttttaaaaaaatttacggtttggataataaaaataaatatttcaatttttttttcaagtaataagaatcctcttatctttatacgaaatagtttcttttttcttttttagggaatttacattatttatcactaaatagtaaatatcttcaaataaatttcattccaataaggaaataccgaatgattttgttcactaaatttgtatgccgaatgattttccacaattaccatctccattgttaatttatttatttttgaacaattttaggttagatgtataaccatacttttattgaaaacttaaaaaacattattttataaaatatatatttttaatctttgctaactcttttattatttttttttttccatctcatattcataaataatatattttaaatattcatacaacaaaaattaaataaaaaactatattaaattattagaataaataaaataaaattatacatcatttaaatatatatataaaagtaaaagtaaaataaaaataattagctaatttattccctaaactttttatactttctgattctgtctcttaaaatatacggcttg

SEQ ID NO: 208115 - DNA, 1053 bp, Cannabis indica
  modified_base (1008)..(1008): a, c, t, g, unknown or other
tttctaacttttcatttatgtaaaaaaataaatctagttaaattaataaataatccaattagttaattagattctaataataatcaaataaactattaaaatttcatgtattaaattatagggaaactacctatataatatgtgagttgctatgtgaatttttttgtaaaaaaaaataaaataaaataatttaaagtagtaaaaaaaaaaaaacctttaaattatattttctatataataagcattaatttgaaattccatacgatggttttgggaatacaattgagtaattagagaaaatatgccattttttattatatgctattttacaaaataatctttcatatttttgatattttttttcccatagtctcagttaagaaacgtattgtgttaagaattttttatatatttgaaaaagaaaaaaatacagggtgttaaaaatttctaacaaaaataacgagtggcatcgagagtgtttggtgtcatttggtaaaaaaatatatatcaaaataagattattatgtaaaattaacgactatacaaaaatgttattttacctaactccccttaattaattatttagtgcactaataatatactcttattgtatgtagcatgaaatatattatttatttttacttaaatcaaatgaactaattaatttaacacttagcacgtaaaggcatcaatcttctgaaaaaaatatatacatatatataataaacattattctatatttaaacttattcacatatatagtcatgatgatcacctaattataatattttcctttctcagaataaccttaatatactagaaacaaatatatcccaactaaattgggatcatatatatatatatatcatccaaattaaataataataaaattactattaattaataattatttgtgacatggcatattagtgcaaaaaatcgaaagatatcacatcgatcaaataatgcaaaatcacacaatatagcacacattagttgtttgggagngatagatagatgaatatatacgtatatatattctcacataatata

SEQ ID NO: 208116 - DNA, 633 bp, Cannabis indica
ataccaatttttcattgaaagtggtctggtttgttcatctattggttgcccccacataagttagtaagattatgaaagggattgaccaaaaaatataaattttattagcaaaagaaaacaactgcaaaattagaaaaatgacttaggaatgtttctacggtacactccaaaaatgagtttagtgatgcatccctttcgtgttttgatatccaaatagttataatatcaaattttgttatataatcttgcaaaattatgaaaaaattcagaataatatacaatagaaaaagtaagattcaaaacaatatatttcacatgtctataaaaaaaaggatcaagcatacaaccaatgatttgaaccttgttctcggtaaattaaattattctaaatttctagaaagtttgcaagatttgtcatataaaaaaattaacatacactttgaccaagtgaaagaaacaatgaaatataaccattttgctcattttcatttctgatcaaagtaaacatctttaatatattgtcttatgcaaatcacatttaactttgacaaaacattttgcattgaaaatctcatctttactgattaatagtatcaaaattgatacaaaatttaccttataaacaagaccagc

SEQ ID NO: 208117 - DNA, 1747 bp, Cannabis indica
attcagaatcttccacccccacttggccaagaaggccatgttcatttctttcgtttttcgaaagcctagtcctcctaaagactttggaagacataatttatcccacgctcttagatgtagcccatggttccctttctcaaaaccccaccaaaagtccctgacaagaccatctattcttttaaccaagcgatcagagagtttggtagtttgcatggcataaatcggcagcgacaggcctacagacttaatcagggtagcttctcctgccttggatagcgtcttcgctttccatccctgtaatttggaggtaagtcagtcgaggatgaaattgaaatccgcatccttttgtctagatctgaaaagcggtagacccagatatttaatgacaccctccggagaaccaatgcccaaagcatccttaatacctcttctcatcccgttggggtgtttttgctaaaaaagaatgacgttttaagtttgttcactttttgacatgaccaggagcaaaacttctccaaacagttccaaagacactttgcttcaatcacattggcacgacctaccacaataaggtcatccgcaaagaataagtgcgtaaggaccggacctcccttgcttagcttaataccctgaaaatcccccttcctaaggccttcttccaagagtctagacaacacttctgcagcacaaatgaagaggtaaggggagagaggatcacccagtcgaagaccacaagagggcaaaatcttcccaatcattcctccattaaggcacacattgagcgaggtggtggagatgcactgagtgacccaattacgaaacttttgggggaaaccaaaacaatcaagagcgtgatcaatggacctccagctaagcctatcataagctttaacaagatcaatttttattgcaaaatattcctccttgccctttttcctgttaaaagagtggatgatctcctgcacaatcacattgttatcctggatattcttacccagaacaaaggctgcttgagtagggcaaattagcgaaggaagaataggtttaattctatttgcaattattttggaaataaccttatacaacacattacacagagatatgggcctgaaatgattaggtcttttcggattctgagtttttgggatgagaaccacatttgttgaatactttttttttttctctttttgtatttggatttttcgggatttgagtggtttttccttgagatctacatctttttcagatctgatttccctggtttttaaaagaaaatggttgagattaggttgtttggggtttctcagcaggatcacgaagaaggaggtctctcttccgtttttttatgggcgtatttttgtaaatagaaacttttatatttattttccttttttaggttataaatataaattggtaaaaaaatccccttttatttctccacatatatatttaaattaatgtgagcggatccggccgccggagctgtgattgggttgacccaatttacaaaccctggtgagccttaaccagcgcacaaagagaagaaaagaaaagtctgttttcgttttccggtggcgacctgagtctgtctgatctccgcctccacccaggggccctttcaaatcaatctctcatctgtattgggattcaaaaatctcgaagaagatggatcagcccttcctactcatgctctcgaatctcctacatctccagaactccctcgacccaacaacttctttgctctccg

SEQ ID NO: 208118 - DNA, 939 bp, Cannabis indica
atttttattgaatctgaatttttgtaaataaaaaagtttaaagtataaaaataaaaaaatttcgtgttaacgtaatttgttattttttttatttttagtttattatataacattttctataaaatttataagaattatgctgaagtttagtaacacttatttatttttttttaacaaaaataaaagtagaatttttgtttttgaaaaaaaaatgtatttagtaattatttttgttttttttttaatttttaaaaacaaaaaaaataagaagtgttctgtaaattttattttttatttttatttgaagtcaggtcgtggtctggagtcggagttcggagtcgaggtctgggtccgagtccagatttaggtttagagtttggggtttgagattcaggcaacaagcaaggatttggggctgaggtccagggccgggattcgggttcggttttgggtcgtggtttgtggccaaggttcaaatcatgggttcaagtctagagttcagacgtggtttcaggtctggggtcgggatccgaatctgaatccagcattagagcaataagggtccaaaaatattaatgaaaaaaaatcaaaatagattataatttaaaaaaaattgtataatttttcttaaagtaattttttttttgtttttctattttaaaaattaaaagtaaaaatatttttatataacatgtttttttaaaagtatttttcaatttttaattgaaaaaagttattagagaacacagcctaacaacaattcactatataaactttttcttaaggtagatcaaaagactatgtgcatgtttgacatcataaacaaaaaacctgttttttgttttttaaaaaacagaaaatttatttttaaaaaacaatttggcttgtttggccttgtttttaaaaactagttttctgaaaaataagttaaaaaaaacc

SEQ ID NO: 208119 - DNA, 722 bp, Cannabis indica
aaataaaaactaatatagaataagtttttgtgccacacactcacaacatgccacaaattgaatacttcaatgtctctcatcactatatatttatttatatttattttggttgaaataatccttttttttttttacttaagtactattttgtatttaattacaaaatgaattagtcccctaaaaaaagtgtctttttgccaaaagactcttactttttttttcatttacataaatattaattaattaatgattaataatattataataagatggtttaatgtgtgaaaatatcgatataagccaggtggcagagattgaaagtaggagctagtggtcctcatgataaacacatattgaagtaactaaatcagaattaattataaataataaatgtaatacataaaaatttgtctcatcataaattatcattatatatatattttgattaaaataaaattattaataataatttatatttaaatattgtatttgagtcaaaaataattttttattataattaaaaattacgaaaatttatgttatagttaagatattatgattaaatgtaattttttttagtagtgatatatagactttattcttgagtattgtgcatttatattatatatatatagataaatgttagaaatgcactaatgcaggtgtcgagtattaccataagaagcattacattcattagtgtctacaatatttttgacgtg

SEQ ID NO: 208120 - DNA, 1128 bp, Cannabis indica
atatatatatatacacacacttcattttcagattcttcttcagtttatttcattttaatatatgcttccattttaatttcacgtcatatttttatttcaattttacgtaatttctcttaatacgtatataattttttcgagtgcaatcactataaataattttattcatattgaatatatatttatatatataatttttatttatgcaattcttacatataccatattttaaaattctagtttacagaaattattttcaaatatgtaaaattaatgttagaatgagaatgaaaccatcctccccaaccccaccaaaaaaaataaagatcaatcattggatcaaaaaataaaaataaatcaccgctctgttataccatcattttagtcgacaaagtaatgctattaacgttgacaaatgtaatcactcggtaacgttattattattactattatttaaagtaaaattcataaggaactttttattactttccactctccagctcatgagagataaatattgcagataaattaaacacagcgaaaaggattaaaaaaaaaaaaatagagaaagaaagtataatggcactaataaagactgaaattaattatttttaagcttattaggtgatcatttatttgaaaaaaaaaaaaaagtttaatatctcagtaattaactgccggccggtagccttttggaaaatttatgaacagagcatagagaaattaaggagagtgagtgtgtaaaaataaagcatagtttttacttcgattacttcgtggacatttccatagagaaaaaaacataagcaagaaacttttaaaattcatttaaaccgcaaaaagagaaaattaacaatatgcagatcgtcgtggtcgagacgttgacatcgtcaatatcttatatagatatacatatatataaaaatttattaaaaagttacgtactaattaagatcgtcctcatcatcaacagtagcagtagtagtagttctggtagtcttccctttgcgaacccttctacggctgagggtccttgcttcgtgtggaagatttccatcgttgaagatcaagggcaagtcgttggcatcgtcaccgtcgtctacagtggctatgcggatacaagaacac

SEQ ID NO: 208121 - DNA, 921 bp, Cannabis indica
gacctaaacaaggcctgcccaaatgattgtttctactcccacggatcgattagacgatagatgctacatttaggtacaagtttctcaccttcatggacgcctcctctgggtataatcagatcaaaatacatatagttgataaggagcatggaaattaatttacaaaactagttactcataaattggtttcaacaaaaaatataataaagtgatgagaatatgtaaaaaattaacaaacacaaactatgagaagaaacaagctataactattaaattggcaaaaaaatgtaaagttgatataataatgcaaatgagtattgttgtaaattaataatgttaactaaaaatttaaaatgtcataatcttttttccaaagtatttatggttttattctctaattaattaacatattcctatgcccaattaattttaagaataccaatttaagcacaattccttcaagtcatacaaggtaaataatatattcctatgccatttacaaattatattttttcaaggtgatattcatgcatcattcaagtaattctactaatcctatttttccaaaatcaagattagcttgtcactttgtaatgttgatcaagcaaaattaagcaattacacaaaatactgttgaatgaacaaaatcaattcactaaacatagcaacaaaatactaaatcacaatttaagtcaacaaaataattctaacaaaataaaagttaactcataattaaaattacaaagtttaaaagtgaagagatagagaaagacccatatggagtttgtcacaatactccaaactttctttgtcaaaatcttctacttcttcctcttaattttttccaatctcaaaataaaaataactaaactaaaatcctaaatagcactcaaataaaactcttcttttttttttcttttt

SEQ ID NO: 208122 - DNA, 647 bp, Cannabis indica
cctatgcctacgggaccggccctatacatacatatattagaatacttttaatggtagttgtaattagtgttactatattaaataaataaataataataattgaaacaaagtaatttagagaaattattatgaatttgacgtacgtattttaatttgtttttatttattattttctaaaataaagttaagagacaaaatacaacacaccacagtatattaatttgtttttattatatgtttttgtagagagagagagaggctgctttcattaattctatattttacattagtttatatttattcattcatttaatgtaaaactatattacattaagaaaatgtaaatagtttttttttttaaaaaaaaaaaacattattatactcgacggtgaggatatatatagggagacttttatttttggcagacattttaagaaattattataagataatctatttcatatatataacggtttatgtccagttagttaaaaaatttcacattattaatgtgtgaataaataaaagaatatataagatgaataaattatatattattcttattattaattagttttgagatcccgaattctaatagttacatcattaacattttatcatgaatttttttaaataatttagggtac

SEQ ID NO: 208123 - DNA, 1255 bp, Cannabis indica
ggagtgaactgttataaatccttgtgtctctcttatatatacttaacttataattcattctcgtcaatctagcaagcgggtgtggctcagatatctatgtccaaatttttgcgtcaatacatttaataaagtgaaaaagtccttgtaatgttaagctagtgatatgagttttccgttaatttctaagtttgctttttaatttttatttttaagattgtcattctaatataactttgttttttggtttggtgttgcgatattttttcagatttggtgacaactattattaatgggaaggtgttctttcaatgtgatgaggctctgtttaaagatgttatagcttttattgtctaaatttcgagagcggttttgtcccatgtggctcgcgattagttttttgcagctcatggtttgacaaaacatgcccttcagttagacaatgagctatcctagttcgaggatgtctaccgctgattgtagtttactgcattgttaatcatgtgtgattctgttcatcgcgtcaaaaaaaaaaaaaaaaaagtcctttacatctctcctcaaggtcaatgtttatatctttgatacttcaaaaaaatccaaaaaattaggtgaaagataatattaaaaatatgtacatattaaagattaaaacattgattaagtttgccattagattaaatttatatatataaataataggaagcgtctggagcccagtatattttatttctagtacaaatattcctaaatactggcacaatttaaatattttaatcctaattctttccatgatagtgttcaacataattatagtgttatagtgaaactcgtgtacttttttattttatttttaatgcattttaatgctagaaataagatttaaataattcattattttcgtgatttttttttcttttacctgagtaaaagaagttgtttcaaaatctgaattcgacggtacaaactattcacaattttttttaaaaatattcgtaaagttcaatgtaataaaccccatcataaaaataaaagggaattaccccatatactatttttttaacttttttttttttaaattttacggttttgggtttcttaaagaagttgcagcgctagttgcaataggggtttctgtacgattttctgttgcaatttagattgcagcgctaattgcaatagaggtttctatgtagaattccgtaaaaatacaaaaaaaaactggtttaaagtgtaaaaataaaaaaactccaaaaat

SEQ ID NO: 208124 - DNA, 681 bp, Cannabis indica
tcattttacatgtaattattattgtatatataaatatataactaatgacgtacgtgtatgcaacttgtgataattggctatgccaagtcttaaaaaaaacagaactaattaacaaacaaaaaggagtgatataactaattgattgagatgattgatgcatatagaaattaactagtatgaaatttgaataaagttattggttaagacattattatttaagatattttgagtaaaaaaaaaacaataatttacaccactgccgcgctagctttaattgactaaataaatatataaatataaataagagttattatcaatcaaaaaatatatatagtattcacaatcaatcaaaaaatataacggaagaaaagaaataatgatgaaaattaatatttgtaatatattattttttggaaatgaaatgataatatgttgttttttttttttaagtaaaatgtaattaaaatacttaaattaattaaattatcttttaagttagttattttgtatcatatttttaaggaaaacttgtaattatatatttaattttaaaaaattaaaataaaagtaaataaaaatcattatccttgatatattccttggaaaaaccaatgggaaatttctttatttattgatttaatcaagttctattatttttaattttttaaaagtctatactac

SEQ ID NO: 208125 - DNA, 883 bp, Cannabis indica
agaaccttattgagtcagaaattctaacgaactccccaacatttaacattgttaattttaactataagaagattctaattttattttaatgtggtagagctagtatataccaattatggatcacatgtaaaaatagggtcttcactataattttttgtatatgttactatgtaactattcattaattgtgtttgtagctataatttttttttcacgatttttaaaattttgaataatttaaaaaatgaccccccacacatataatattttgtttgtaggtcatctacaatgttagctacacctcagcttaaatggccccaccatttcatctcaaccaattaattttgtttaaaaaaaaattaataaccagctacctggcaacttaactaatcacccttttaagtattcaacaccataatattattcaaaagttgaagttgcaataacttattttgatttaattagcatcattgttgttcattttatttatttctttttttttagaaaattatagtaactatcatataaaaaaaaaactaaaaaaataaaaaaaaagatgttttaggataacattaacaaattttgaatgataaacatagtttaaaattttgaatcataaaatttattttcttataattgaatgagttcgtgcgactcttctgtcccaaccaaagtacacaaatatcataaaatgaaataggagtagacgagtttgatttatttatttccattttccacgaaaactaagatttgactatttgattctttttttcttatttatttaaaatcaacagcttaataatatgatcatttattaaataaattaaaaaaaaaaaaacgcaatattagttataactatacgtctatgatgagcgtgatgcat

SEQ ID NO: 208126 - DNA, 1134 bp, Cannabis indica
gtacattatagttatataaaatattttataaatttttgagaaataaattgtttaaattttactattgtaaattattttaaatttttttaaaaatttacaaaatgtgttaaataataaaaaaaaaatgaactgtcatataaaaaaaaattaaaaaatataaaagaggtatatcaacacaatttttaaaggatatcttatccaccctaaatatacccaaatatatatacatttatataataaaaaataaaattaaataagagatgtatatatttcaagtattattatttaacatataattagttaaaggattctttaatattatttattaaattaaaatatgaaattattatgaaaaagtggctaaagtaccctctaatcaatttctttcactaattttttttttttgaaaacatttctttcacaatctttgattaggtcatactcataatctgcaagtacgtcagaaaggacagtataccaatattatagtaaaaaaaattatcacaaataaaataaataataataacaataaaaaataaataatattggaaaattttggtaaatggggtccacatattgcaatgttaatacacaatcttaggacattattaattaggaatttaggacccatttagagtggtaacttttttttttaatttatattaaaaattaattacattaaaaataaaatgttaggacccatcactttcattatcaataatattatctttccaaattgccttaccatgattctttctaaggtccatgacaaagaaaatgacctataatgctatatgaaccaaaaaaaaataaaaaaataataataaaaggacacttgtttgtcttatgctatgacaaacacaactttttttttattattattattgtttttttaactaaagtataggaattaggaatgttcatcaaatcgtcaagaccgcatcacactgtaaaaaaaaaaatgcggtttaaatttttttacggtacggtcgcggtttgaatttttcttaaaccgtgcagtacggtgcagttttcaattgttaatatgcggttcaaaccgcaccgcatactataaaaataccaatttttatatttatttaggttcaatatgtgaaggcccaacctaagcccact

SEQ ID NO: 208127 - DNA, 621 bp, Cannabis indica
accacagtaataagatcaaaaacgacataacaaaacaaaagagagaatgtttaagattaccatgaaaacattacaccataccaaacaacctcagattatattgtaaaattataaaatctaaaaacgaattgatattgttatttagtgtatgtatatgtgagatagtaataagtgtacaatctcatcaaagtaaactctaactaaaaggaccaacataagaaccaacaacactatgaggatcacaaggaaaatatcatatatatttacaaaatatgcattcaattatgtaaagagaatagttaatggaaatgtatgtgttttaggtttcaagtttgcttcaagtctcaagttttttatcaaacatagtatccaacaagacataagcaaataaaactaaaaagaaaattagattatattaattctgacgaaaccaatagattctcacatgcatcaaaggcagtattaatattcaaaatacaaaaaaactaaaatcaaaactagtctccacactaatctcacaagcaaaaaaaactagaaactttactacgttttacttgtacagtcccaaaattctttcactatagtcaaaattatgccttgtatccttccatagtcttctgc

SEQ ID NO: 208128 - DNA, 591 bp, Cannabis indica
aaatcacaatttattattgtttcaaagtttattttttaaaaattaattttttaaagttgccaatatattttactgaatcttctaatattaaaaatatggtggtccactcccccaccaaaaatcaaagaacagtcaaaataaaaattaaataaaattaagagccaataaaactattgtttttccgtcaatgtgaggagcaaaatgagatgacaaaactaatatcaaattttaatatgcagtggtcaactgagattattcagattagaccgatgctataatttttaacaaaaagactccctaaaatatttaagaacagtagttattacaaaatatatacgtcaatcaaagcaaataaataaataaaaaatccataaatccttattttttatgcacaaatatttaactgtaaataatataataagtttgaaattataagtgcaacaattagcatgatatatatagcaaagcgagcatgaagagttttgttggtaaataatggaaagtataacaaaaaaaggtattgattgagaaatgttgaatttaatatttaatttattatcagactaaaataattgtatatgtatatatatg

SEQ ID NO: 208129 - DNA, 1076 bp, Cannabis indica
atacgtgtataaaatagatggtttgaaatttattttggcgtgttaagttttttttaaaaaaaaaaaaaaattgtagaatgccataaaaagctataacgtagacaaacataaaaaaaaaaataaattaatttttttttctaaatgttggaatagatagatagggtacatcagtagacccttttaaggtgccttgtacaaatttttaaatatatgttgaaatagtaaaatgtagcaccataagattataattaagtattggatctcacatatttttaattggctaattaagattaattttacttaactttaatatgtaccaaattgtgtgagtcaaaatttttgaggttgttaaaaaaattgttgaattattgagattattagatttaataatttttcgttcaattttactaacgcacacctgacacggataaaaattctggagatacgatttagtatatgggcaatcaccatattaagcatttgctagtaaacttgaatgaaattaggcaaaagtcttgaatctaataattttaataatttggtaagaacttttaacgacctaaaaagctcaagttgtacgatttggtaaagttaaagttcgaaaaaaaaattataaataactttttcaatttaatacttaaaattaaaaaattgctaattatttataaaataacacctcctcatagtgttaggtaaaattgatgtttaattagtataatttattattttgaggcaataagactttcattagggaagaggtgggagtgtagtgtgggacttaaatataaatataagtattatctatttttttatgttttttctttggtaagaagtattgatttatataatatacatgttatagattttgttttggattcatacataatttatttatttaaagtctatgatttaaatatgtgtttaagattgcaatgtatgaataaacaaattatgataatttattattaaaaaataatcattgatccatatttattggttgtatctgattcctcaaggaatagatcaatttcccatgatataatgtgtgtatatacactagccatgtttgtcgagtc

SEQ ID NO: 208130 - DNA, 966 bp, Cannabis indica
attgtctctaaaaaaataatgcaatatgtacatgtattacatgtatttgttcttacataaaaaaataataaaaattttattgtaaaaattggtaaatttgtaatatatagtgcggtgcggtttaaactataattattaaattcaaaactacaaacaatactgcaccacacggtttggaaaaatgcaaaccgcaaccacactaccatggatttcaaactacgttttttatgcaatgtggtgcagtgcgggcagtttgtgtggtgtgaacggtttgatgaacactctaaattatattcaatcaatacctttggggatgattggtccatacgaataggaattataatggtaatcaacgtgtccattactttgtttgctattctttttaaaattttgtaatcaattacattgtaatggttgtataaggtaatattcattatgctgaaaaaattataaatggtcattacaattatactacattacaaaattaatataataatataataaaagaaactcaaaaggatactttactttttatttaaatattttataattataaaaataaaagtaatagagatattttggtcaatatacattttattatattacattttcacaccaaacaaaataaaataattttgattacagtactcaattcaacaacaaatcaaatattataattagttatcattcatattcctattccacacacaagatgcatattttgaatagagcattgttattgggcaccaatagtatccaacatcttctataggtggcgtcccacgattggttagcgatattccctaaaagctattttctgtaagttatatgagatccgatacttaattacaccaatattgtaatatgacaccgagaagattgctagacactagtggtggttttttttttttttttgtataattaagaagtttatttaaaccaaaaaaccttaaagagcagtcacaa

SEQ ID NO: 208131 - DNA, 626 bp, Cannabis indica
ttccacttaatttaatttcattagaaaaataacaacactgttataagtgtgcccaggttagccataaatatgttatatatatatatatatatttatatatatatatatatcttttgttaggcttagcccttgcataacaataagctgtggtgggtttcttttaacagattaatgattatattcattaatatattagagattgatgaacatatggaagaccagtttggactgattctcctttttgtgagctctgggtaaatgaacccgatcaattaagtaaaggattattctgtttctttaacaaatatctaaaacatataatgtcgtttaatcttttcttgtcgttttcaaatttttttaaaacgttgtcacatatttactagctaaaattattcttttcacactttaattaaaaaggtacaagagatattaagaggagacaaaaacaaaaaaaaaaaaaaaaaattagagtaaaaagtataccatccatgattttgataattgtttatccaatttttcgaaagctgaatataataaagattgaggtaaagaaaataatactataagatgaaaaagacagttttttaagggttgagtatcatcgggttctatctcaaaattaattg

SEQ ID NO: 208132 - DNA, 1059 bp, Cannabis indica
atttttatatatatatatatttattgattatttaaattttgcattaaaattggtaaattttcatgagtttgccacgatgcaataaattaaaaataaaatctaaaatataatttaattcgatagtttataaaaaataataaaattattatttgagctttttcaattgtttatttttcttttattttggtatatttgaaaaaaaaaatacatataaataaaaaaatatatctttattcaatttgttaatatattaataatataaaattatttaaaataaatacaaaaataaataaataaataagatactatcaattaagagtggggactttatgtttctaagaaaataaaaatttggagaccaattactaaaaaataaaatttgatgaccaactggccaaaatttatatagtttgtggactaatttgctaaaaaataaagtttagagaccaacttgtcaaaatatatatagtttaaggatctgtggtactatatataaaacacttctgaatatgtgctctgatagttactatataaaaaataaactatatataaatatcaattttttaaaaaattaaactattttgatctagtaatcaataataaaaaaaattgaatttctatacctaatttaggtacataattaaaaacaatctattttttaaatactatatcaaaaatatataactcaaactcaatcttttttatttctcttaacctataataacctcatatcataaaatagtagtgtaaaaatgagaatttgtttttaatttgatagtaaaactaaaagtagagactcaaattttcaaaataatatctatttataggtaatacatatatgttatttagtaatttttgatttatggactgaaccaacgactcacatcttaattcatgatttagtgtatgccaatggcaaattggctatgatatgacctttactagaggccttataatgtggggaatagatagagataaaattatcagggaactacaaattttatgggtttattttactttgtgcaaataaatgaattttttatttttacaaaaaagtta

SEQ ID NO: 208133 - DNA, 698 bp, Cannabis indica
aacaaatcattaataagttcaatatcctaacatcttaatcctgggatcattaaactattaactttaatatttgaaagagtagggtgtgacgaaatgacatgggggtcacttgggtcgggtagccaagcatcacctagaacacttatgttgttgccgtcccccacacacatctagttttgatgactaattgttgtgcctcccatatgctcctccatacaaagctaggattatttcctaaagaagcattgagaaacgatccttgtggatagtaccgggccttgaagactttggaaaccaaagagtccgttctagtaaggaggcgccaaccttgtttacccagaagagccaagttaaaatctctcaagtttctgaaacccatccaatgaattccgccattgttcatgtttgaggattttcaccaaaacttttccatcaattgctcaatctctctactgatctctaaaggtaacaaaaaaacgctcattgcgtagctagggagagtttgagcaactgttttaaccagattttccttgccagcccgagagagaaacttgccttcccaaccttgaagtctcttgcgaacccggtctttaagaaagcccgattctgccattttcgttccttcccatggtgctaggaagccccaaataagtgctatctcagtggcctgtctcatctgaagagcttgatccagaaga

SEQ ID NO: 208134 - DNA, 713 bp, Cannabis indica
acccttaaattaaggggcttttaaagatattatgacaaagttgttgtgttcggaaggggatctcaccattaaggagtctgaataaaggttttattgtgtttctttgatttagattcggacagattagaggttttaaataatgagccatcacactttgataatggtttattagtccataaactgctagatgatggtatcaataaaggtacgtgtttactgaaattttcgcaaaactaattaaaatagagcttaagaaataataaatgaagtaagtaaaatagacaaagagttttatgttgttcaattgttaatgagtcctagtccacgagtcagtgtgttttccttaagagggtacgttaaatgtattttacaatggtgtttacaataaaaccctagctcaaccctcctggattctcttgaagaagaaaaaaaaaggcttaatggaaattggacagagcttcgactattaattttttgatcctctctttgtatgaaaatcacagggtatttataggctaagttgcggctatgaacatacccatgacctacctacagttttgtcaaaaagcccactattggggtaaaatacatgtaaataaaaagtagcacctaggcaatgaggattgttgctggcagtgtacacgtgtcgccaaaaggttcaccttcaaaaagagataccaagaaaaaccatcaggcaaaaaggtatgtttaga

SEQ ID NO: 208135 - DNA, 750 bp, Cannabis indica
taaatataaattatatatcattccattaatgtccattattaaaaaaattagtcacaaacttattacaatttgttatcattaaatgtatttttagcccaatagttattaaaattaaattaacaacaatttatctctaaataattatcattataaagatatttaattttaatcataaaaaataatatatgttaaaggttaaaaaattatcactaaaataataatttttagtaatatttatatatataaaaacttttagaaaaaatgcacacgaaggtgaaataaaatagtattatataatatattctagatctatggccaatcaaaagtgttattaagatatgacttatgagatctttgttatttgtatctttcttggatgatatttttagtttgttatctaattttttttttaagatatttctaatttatgttcgtgttgtatatgtatgaattagccatttgtgcacttaaggtggatgaaaaagtaatttaaatggataatttttcttttttttattaataatatattaaactcaaattattttcaataaatgttcatttttttttaaaaaaaaaaataatttgagttattgacttatgagcatgttctttaaaataatttaaactctaaattgagttatgagcatgtgacattattaccattcaacaaaagaaagaaaaaacaattcaattctatttttttttttttagttaaactaacttggtcgtattttagtttttaagtttttt

SEQ ID NO: 208136 - DNA, 1246 bp, Cannabis indica
cagaatattaggagagagaataccggagtcgtgcaggtgagctggatcctggaaattttaagagcaaaagagtcaagaaccctcaaacatacacatatatatatagatagatagagagaaagagagaaagagagagaccaaaagaggggcgagcgggcttgctgactttcctgttagctggatgcttggttctcatctctctctgagaaagcttggtctttaatggagtcttttctttggtggagtatgaggaattgaggagggagagagagtcgttaggagcgtttgaaattttgatgtaaaatcatttaaaaaaaaaagaaataaaaaatggtagcaaacgaggtttcactttcttggttaaaagaaatttcaccaatgaaattatttattatattaaaaattgttttttattaaaaaaatccttagttaaattttttttcttttgaaaaaacaagagttcaattaaaccaaaagaaagatgggaaatatagggggatttccctcctcttcaatcataattggaaaattgttagtcactctaacatttttagctatctgatcggcatctacatttaaattatgactaatgtaaaagaactcacaacttaaaaacttcttactactatccaaaatagctaaagatcttccaatttgaggggcattgcttgtttctcagagcctggattgcttggaaacaatccgaaagcacacatatttcttcccacttttcttccaaagcccattgcagagttaacaaaatgacctttaattcaacttgcagagctggatacgccttgattctcgaagtcttgtgtgtccaaaaatctgaatttttcattcgcattactgctgccagcccagcttcatctttcatccaaaaagcatcagtacagataacctgcttcccgtccaatactctcttccaatctactttctcaattcagtcctctaagtgaactgctattccatccaaggattcatctctaccattaaaggtggaatagtcatggaaagccaattgaattttcctcattaccatctcaaagttaattcttgtacctctcctgcagatatcgtttctagttctccagacttgttccaaaacacatcctagataggtgattatttctttcctcccaatatttgagttttcgaacactgcaacaatattctctgtgaaatggatcatgctctctcaagggattttaagagttaaaatgtgtcttttatgagctcctgttgg

SEQ ID NO: 208137 - DNA, 1053 bp, Cannabis indica
gaaaaatataactaaatatatacatgtaatacacgtaacaaaacttaataacctaatatatatacatatatttatatgcacgtatgtagaggagaccatgtgtataaattattaatgtcttaatgtttaaatattgaattcttttttttttctagtttctttttttttttttacttatttttttattatgtgatgggtttggcttttcttatttactaaaaatataaaaacaattgtaattttttaataatttaattatagaaaaatacattaatttagacgttgcattcaaacctaatatatattttcatgccagtctagtaattctattttctttattcaaagaaaaaaaaccactcatcttctacatttttcttttcaacatattagtgttgtcaaagaattttatacaagtaaaaatattttatatggactaacataattaagtactgcttactcagtgttggtatttacgtataataactataatcagtaattcagagtattatcatcaggctataataagataaacgttacatactaacatgttcaggacccataaacacgttctaaaacatttttagtcagcccatgaagctaaaacaactacacctacattgggcatgtaggcccatttttgacacataattcctcataaaagggatgtgcccttttatttagtaattaatgtgaaatgtgtgtttcaaagatatgtgaagagtataaaagagttgtgttcataaaatccttgcatctcattcttctcttttgagtgcgtagatttcatgattaaaggagcacaagtgatgatatattaagacaatagtgatttacaaggtaatatattttattcactaatattttgatgccttaaatatgtggtatttttgataattattgagtataattgtcgtattatataatctttgattaatattgtagtgctcaattaatttttaacaattgataccaagactttggtcatctgatttactgctaaaacctatttttttaacttttatattttttacccatatatttttgaatactcac

SEQ ID NO: 208138 - DNA, 1555 bp, Cannabis indica
acaccagaccccaaaccctagacctcgaccccgaaccccagaccatgaaacctggacctagaaccccagaccccaaactccagacccaataacctagaccatggaacccagaccctgaccctagacccgggaccccagactctaaccccgaccctagacccagaccccgacccctgaaccccaaacccaagaccccggaccctggaccccggacccagacccctggactttcgaaccccaaacacggacctagactcggaccaccgaaccccagactcagacctggactcagacccctggacctcgaaccccagacctcgacccagacctaaactcagaatccaacctggacccggactcagacctcaacccggacccaaactcggaccccaacctagacccagacctggactcggacccggaccccgacctagacccaaacttagacttaaaccctaaacccgaacccggacccgaactcagaccccaacctgtactcagacctagacttagacctcgaccccgacccgaaccccaacgataggcacagacttagacccgacctgaacctagatcctagaccccgacctagacccgaacccgaatctcaaacaccagaccccgtccccagaccctgacctgacccagaccaagactcgaatcccgaatcccaactcgaaccccgaaccccgacctgactcgaaccccaaaactagagctggaccccaacccagttttgacttcgggtctgggccaagtttgggtttggggtctggggccgggtctagggtctggggtctggatccgggtctgggttcgagttcaggtctgagtctgggtttagatctaagtccgaggttggatgggttcatgtcataatatgatgtagaatattcattttttttagtaaaaaacatctaaaaatagttctaaaaaaaactgagctaaacaccattaaatttttaaaatgatacaaaattattttctattctcacttttgaaaactaaaaactgaaaatacaaccgtacagactctaattatttcactatacttttggttagctacaaataataaataaatacaataaaatctctatttaagaatacaattataattcaattgaaatacacgagaaaaaaaaatcaaaacattaaaaagtatcaaatataacaacaataataatgaataatacttaacactatatcataataaaattatttttgaataaatataatatttatacatgtattacaatttaaaataaaattattaattctacataaataaatttataaactatatatatattttattaaaatataattattcttatataaatttacattttcttaatacaacaatatataattaattacaatttagatattattttttggtctaaattaaaacttagttttgtttgtaataaactagtttgtcatttgagcatgcaaattaataaccaataattctttgtgttctaatgtgcgctgtcatgatttacagttgcttatcatgattatcatagtaactaatgttgctggatggtttatt

SEQ ID NO: 208139 - DNA, 708 bp, Cannabis indica
cgctggttttgatttgagctgaggagtttgttctttctattcacctcctaccatttccgaaaatttctgctccaacctttcacgggacagttttacaagaaaccttgtctggaaaaatcgttttctcaccacagttgggagcggcagctaggaccggcgaataataccttacccagaccggtaaaaaaacagaccaaaagcccgaaaataggattgggaaaatatttttatatttatatttcttgatagcctcctcgattaacatgtcaataatatgtggaggggtcatcggctttttggcaagtcattattgtaaaaaggaaaaaaaaaaagttaggttcaaattgtatatgtaaaatttcctactacatttgtgtaaataagaagtttgcattatttatgacatgttatggtagaatatcctttgtgatcttttaagaagccttaagaagataatgccattgcttagttggtttagatgcatttcttggtaatacaatagacccaaaatagtaaactatgcaagtttcttaatagatatggtgatatatgcaaccaaacaaaagaatggaatgaagattgttttcttttcattccatttcatagcctccaactaaacgccacctaagaagcttagagaaagaagcaaaagaacaacttggaacaactctattctctattgattggatcagcccttggcaatctgag

SEQ ID NO: 208140 - DNA, 1523 bp, Cannabis indica
atcatctgcagccgttgatttggtgatgatgaatattgttaataaagctagtgattgtaataaggaggagtgcctagtaatagtagaatcctccattgttgttatgttgttctgtgttttgtttatacaaatatttatattgatatgacttgaatatattattatgactagaatatatttatattagagaattgtcaaatattattattggtataattaagtatccaattctatatatcactaattaattagtgttatctataaaaagtattaaatactactaatatttaataataatatttttttgagaaattattttatatattatttttttaattttttttttttacttgaatttatagtttgaattattttaatagtttcatgtgaattattacgtagattttagttgccatttaaattcttttgttaattgctatagaatttttatgtagattttctgagaaaattattttagagtataaaaagtaaaaaattcataatcttttctattcatatgactatattaggtaagaataagggacatggataaatggtcagtagtcaaagtaattaggcggccggtttatgatatttattgtattgattgggtcgggtcataaagtatactttattattaataaattcatatatagtttccaacaacataaataaaattatatatagttaattatgtactagagtgtttgatgtagtcaatattgttttcttgtagaaactattgattttttcttaattaacagggaatatacttatatatttatgtcttttttttaaagagggaatatacttatattttagggaaaaaaaaaaaaaatacaaaaaagaaaaaaaattacaaaaatactttgggccggcccattaaacatttatacagtccacatacaaatatttacaaaaataccacatgcactaagccttcagctgtacagagcgaaccatgaagatgaaaatacgcgctcgtttcaaaaccgcaaaacaaccaaaatgaaaccaaaacgagaaaaatacaactattaattctggcaaaatcaactggaaaagaatacctgcaatgatctaaactgaaaatgacgaaaaaaaaaatcagaaaaactgtgaagaaactgaaattacacatttgttttctgttttattcgatcaaaacaactccccctaatatcgaaatccagattcatgaaatgtagatctgtaacaaacagatctggacctcccaccaaattcaaaacaatgtatgatgtgaaaatttttaaaaaaactcatgaataatacatctacgttatatacagttacattttgatttattttttgttttggttgccttatagttgcattatcgttttatgatagtttatatattatgcaagaatttaatttgatggggactaagaaatagtagttatacatagtaagttttgtgcaaatagttgcatataattttatagtgaaataacatatgcaagtagcaaaactataataaaactacaaaacaaactgattgc

SEQ ID NO: 208141 - DNA, 936 bp, Cannabis indica
gtaaacatgtcaaataatgttttgtttcttcattgttatggaaacattgttaaacatacaaacttactggagactctatcaatctcttctttttgttttactgggaaactctattaatcccttatgttattgagtttggccaaaaaaatcttgcctcatagctagaattgctgtacgaactatttcgaaacatgcatagatagatacttaagaaagtgcaatattcactgctaaatgtaaagaacttaccttagatgttgaagaatttaccacccatcttcctgttttgcttagaaaaaagttttcctttttttttgtttttcacttgtcatggccttcctcattcgcgatctcaagtctcgaatttcaatgttacaactgcaaacaaagagttcttctcatatcaatatgaaaggttcttgcatatccagagctggtaaccaacttcctgtcatagttcatccaaagcaacaaggtacataatccactttccaaatctgctaggttttttgtctctttgtttcgggttagaatatcagtccagtttcgttcattgttaagttcaccaaccaaattagatattgttatcaacatggttcttaggtgtttcgtttttctgtagctcatctctgtcacaatacaatattttctcatcaccagtacagtgttcggttgcttcggcttcttttcctactaaaagtactgttttgtcaaccaagtcatgcccaataggatcgatttgctcctcaacaattggaacctcatggattgaaagagaatctgcatcattttccatgtggttatagccagaatcagcattgactgtcatttggagcattagttgtgaatctggacttgaataatgtgaagataaaggcctttgtccccattcatccattgtctcgctaaaatcaccctgcgattgctcgtctcctg

SEQ ID NO: 208142 - DNA, 989 bp, Cannabis indica
agaagaacaagcaacagccatatacttacagctgatacagccttcacattcggttatctctcttgaactctttcctgaattcctcactatatcacacaataagtttcaatggtcaaataaatcaataaaagttagcaaaattcaatacttttcaaagaaacatattagagagagatagatggtcaaacaggaaaacaaagaaggcactaggtggcctcttgggtttgttggggtccttcttggctttcttttccatctttgcctttcgtttgctgctcttgtcagcttggacagcagtagcctttctcttcccaactactctgaaaaagaaaaaagatatatttgatcggtcacaacaatattccagggttttctacaacatcagatataattaagccagccctctcaacagtagccatgaacatatccataaatacagagctacaaaagatatactcttagtctcttttacatggttgcgtaataagtaaaataatctaaactaaccaaattaaaacaagcaaagaaaaaataaataaatgaaacaattgaactaacctgtcatccacaggtttcaaagcatcccttgaactttttggtgcccccttacccttgacaaccttcattataatttttttttggacctgtttaaaaagaaactgtaatttaccattcaaatctcagctataatatttgtacagtacatgcaaaatatacataataagttcattctatagtcagttttccctttacatattaagaaacaaggaccaaaaagttcatgacattaggtcaacaaaccaaataagtcaactcaaaaacaggaaggaacaaccataggcacttttgacctcttacaacatcatcaggatgagttgacaataattcctatgcagattttaaacacatacatatgtatatttatagaaaaattaaattatatacatgatgtttagtgatgataacactaaaaaaatgaataaataaat

SEQ ID NO: 208143 - DNA, 702 bp, Cannabis indica
aataattaatattatgtgcaccactaaaaattctacacgtgtacgtgtacgcttttgtatatgtatttttgaatttgaattttagttcttggcttttgtacatgtattagttgattgtattataaaattaaattctttgtgtagttattgcttttgctattttacatatttggttgtaagatttattttttaatttggttaatatatataacttgtttctcaatgttatatttttaattagttgataaatttcagtctcaaattccaatgctcaactctggcgacaactctaacatccaatactggtgacaactctaatgtttaactccggtgactctacggtaacagtgacaatcccgacgatttttctgacaatgataacaactttgacagatatttttattttatttttttgtcttaatggatagtgactatttaggtagtgagttgatggtcgaatcttagagcttcttacaagtttgcaactgggttttaatttggttattgtgttggttttatctttattagtgggttgatagttaagttaagcatgtaaaatttatatataagttttggtctccgtaactagttttgttattaagaaaccagttttaattatatgtaattaaataatttattaatttgttgcattaataaaattgtttttaatattgctttaaattctctaatttggttttaatt

SEQ ID NO: 208144 - DNA, 748 bp, Cannabis indica
ccaatgcacaataatattttatgttgcaaattatgataaaaataaaatattattaataaatataaattaaatatttttaaaaaaagatattgatacaatgctaattaaaaagttacatttattgtgtactaaatttaacataattttttgtatgggtcaaatttaatacacaattagaaaactaattttcttaaaactattaaaatataacactacactatttaaatactccattggagttttggagatgcttttacaagacaaaaacacttgctaagtgcataggcaattaggtattgaccccttatcattgaccattgattaattttaccttctattttttttttctttcttttgtctaaataagggtggttatgataatattttagtggaatagagatattctttcttaaaaagtgactcaaactctaccattggaaatttgcaggttgtaatcaagcatgtgggtccaaattatttgtcaatcacatttgagtagaaaatgatagatgcaaaaaagaaaaggcaatgaagatttttcttttcttttctttttattagttatagaataataattagtaataaccacaatagtccatagtaaagaggattctctttgtcttgttgtcttgggtaaacaacctttcatttctagtgtctactactcaagactggccctaaaaataaatcgaccttaaaaaataaaaataattgaatttatctatttaaaatatataatatttttaaa

SEQ ID NO: 208145 - DNA, 726 bp, Cannabis indica
cttcaaaaaatttcaaaaagctgagaattcattagataatcaatagtacaatatatggttatacccccctatactcaatatatttagaaagttcaaagacttcgaagccatggctaaaaagcaattaggtaaatcattaaagacagtgatcatatcgtggtgacaaactgacaagtagttagattctaaattcaaagactacttgctggaagaggggatcttatcccaacttacaacacttgaaacacctcagcagaacagtgttgcagagagaaaaccagaacttgttagacatgttcagatcaatgattacttgttactgccactaagcttctagggatacgcactttaagaggctacctacattttgaatatagtaccctcgaagagcataaccaagactctaatataattatagaatgggataaaattttgattgaaatatttccgtatttggggttgttctgctcatgtaaatttatgtatcacagtgtattcttaattcatgagatactgtaattgagataggattgatcacaatctcagaccacccttgatggtgttaggcatgtgagatgaggagagagaaagtgtgtgtgtggcgtgcaagagagagagagagagaggagtgaaaaaaacaattcatattttctctcttgttagcgtattattttctcttgtatctggttgttgtatttctctttttatttatgatactatatatca

SEQ ID NO: 208146 - DNA, 927 bp, Cannabis indica
taaacgtccctgcaaattttgaaatcaaatatgccacatttctaattttctattgttaattaaaaaaaaaatatgacctttgaccatgaattcatgcaagcaaatttgtagaccgtctgttaattgttgttattattattaatattttgtatatcttttgaatttattgaccttattttctctttcttcaatatagaaaataagagtttggtataaagttttaatgcatataggctaaaattagtgtatgtttgttatgataatttatcttttattagcaaaaaaaaacaaaatgataagaatatataattcagagccgaaaaaataaacaagcctaaaataaattgttatgaaaatagctagaaatagtttaaaattaagttcacttgaaaatattttaactctctaatatatgtatttagtacacattattgtatatgttgagactgttatggcagaaaaaattgtacatttagactctttgaagaaccaccaacctcccaaagatattgagatgttgtattattctctatgagataaattttagtcaagatatgttaattaattgaatctaataatagaatttttaaaatcagcgcataccaaaacattgcggacaataataccgtacttaccatttctagaaaatatcaaagtttgtttgtccaaaagagcaaaaaaaaaatgaaggatgtagtttttatttattaaaatacacacaaatatttcataaatagcaataaatttttattaattgtcttaatattatattaacaaactatttaatataataatatttacatgttatttttacaatttggagcatttggtcgacaatgacaaaaaagatttattaccattacagcaagaatagttaaaaaaaaaatgattttgcacatttacgataatagaagacttaagagtttt

SEQ ID NO: 208147 - DNA, 1616 bp, Cannabis indica
atgttaatgaaacatacttggtagtaaatctagatcctggtaaaatatttccaacaccctaaaccctaagccctaaaccctaaatccataagcactaaaccaaagaccctaaaccctaaaccctaacctagacacgggctcagacccatacccataccgagatcagaacctaggacctagaccctgatgcggatccaaacccgaacctagacccaaactcaagacctgaaccgagacccaaacaaagaccagaaccttgtccgggacctagaccttgattgggacccggattaggatcacgaccaggactcggacccaaactcaaacttgaactcgtactaggacctagactcggactaaaactcgggatcaaaacccgaacctgaacttggacctagaccgggacctaggatccagacctagatggggaacctgggccctaaacttgaacttggacctagacctggaccaaggattcggacctagatgggggacttagacccgaaactaggcccagaacctaggacctgaccactgggacacaaccccaaacctagacccaaacccaaatataggacgcggtccaagactcggtacccgaactggaataagaccgagattcaaaatatggacctgaggcttcaacctgacccgtagtcagtgtttgaatctaggactcagacctggatccgtacccagacccaaacccgaaccgaaactgagatttagacccgatcctggacccgaaataagaatcagataaggtttgggactaggtaccaaacttgggacagtaacaggacccaaacctaaacccgaacatagaccagaacccatatcgcgacttggacccgggccaggacctgtgacttgggtcctaaacaaagaccaagagttggacccagacccaaaccgggacccagacctagacccaaacaaaaaaatagggtctagacccaggacctaagaaccagactcggacctggcactgaaactcagacccacactggactaggactcgaactcggacccaaacccaaatcgagacctagacacagactaggactcaagacccgaacttcaaccggaacacgaacttggacccaaaccgggatctaggacctgaacatagatgggggacctagacctgggaattgggtccctaaaccgggacaagaacttgggcctcagaacttggatggggatccgagacccaaccccacacccaaacctggacctaggacccacctcgggacttcagatccgggactcaatgcttggatcgaacccgttgtcggtgtctggatttgggacttatactagaacccgaacccaaactcgaactcaaaccaggacccggacacatactcagacccagatccacactcgagaaccacaactgaaacttggactggaatgggaccgggatcttggaacgggaccgggacctagaatcgaaccagaacctggaattggacccatcctcagaccctaaccgagaccgaaacccgaacctaaacctcgcccttgacccaattcaggacccaaacccagactcgaacccaaactagacacgaactcgtaccccgtgacttggaactggaatcaaaaccaaa

SEQ ID NO: 208148 - DNA, 844 bp, Cannabis indica
attaatatttataacagtttttatgtttttgttttttttggaatatagtgttttcatgaaatgaaacacatatttggtacgggtaaatattattttggtctctattttgtaaaagttactaattgtaccttttgttttattaaatgacacaatagatcttatattttttaaaatggtaaaaatagaacctgaattcaattttcaactattttttttttaatataatcaattttaagataatttttaatcgaacaaatatagaaaatgtaactagttttatcataatatttttagattatattattatcaagttttattttgacaaaaaattaatttagggtcttatttgtataatttttaaaaatatagtctattttgttatttaacaaaacagatagttcaattggtaacttttgcaaaacacatggtccaaaatagtatttaccctttggtaccctatgttcttaataatacttaattggtactttatatttttaaattgtacatatttagtactttaaaatgaaattgaatcaatactgttttatcaattaactaaatagttctcaattatattatatgcaattaaataattaaatttgtattaaaaattcataaaattttagagtgccgattgtattgataaaattttatcaaaaaatttgaatttaaagtatcaaataggtatgattttaaaatacaggtataataagtattattaaaaatacataatattaaacttgtatttagataaaacataaggtactaaatgtattgatactcttatgttttttcttcactaaagtgaatttgatattataaaatattattgtatatatagggg

SEQ ID NO: 208149 - DNA, 565 bp, Cannabis indica
tagctattgagcattgcatatatgcctagtatgcaatgcactagaattaccagtgtaaacaacatatgtgattttatatagtgtaggttggagatgccctaaaagaattttggacaaaatagaaagaggagatgatagactttttgggcaaaatagaaaatataattttagggattctcaagtttttattgaccacatggtttatgtgcgattgtttatcacgattgttatcgctatagatagccatttgcttatttccatttattttaggttaaataataaacttgttatgtcccaatttttattgtaagatcattggctgatagttattaatagatagattgtgtcaaatgtttttttgatttaaaagcctagtatacatcacacttctttaatacttgatcgttagtcgcttattgaattcttaactgagattattgttaggattaaacagcttaatatacctaatttttatgattttactttttgaactagatcttcatgtaaaaaaaaaaatagtaagtaggaagtaagtaaaaatagctccaataatttaataagaagc

SEQ ID NO: 208150 - DNA, 627 bp, Cannabis indica
ttaaacagtttagtaattagtttgtgcaaactgttaccatataacagacatttctcttatattacgtgactctttaacaaaaatagtacggtatttttttatttatccgttaaaattaacactaaattaatcaattaattatttttttaaaaattaaatatttaaatttaatttaaaaatataacaaaattaaataattatttttttattgtatagaacttaatttaaatttgaatttaacgttaatctaattaattaatcataatttataataaatttattagttatattatttaaaatatttaactttatttacttattatttaataaaactagtttgatataatttttttataaataaatttaaaaaatataattgatttatatgagatttaatgttattattgttattattatttaaattaacaattaaataataacacctttaatataactttaaataaacatgcactgcatgttaataatatacctagtatattaatatatattaacctacaaatatttcctctctttacttactcaactcaagctatagttaaccatattattcacacatatattaatatataatggtattgctccacatcaaagccgcctcttttgaaa

SEQ ID NO: 208151 - DNA, 764 bp, Cannabis indica
aaatggctggcgtgattcagagaggtaaaaacagtaacatggattcatgggcaacccgaacttcggacacttcttctgtctcttccttttgccttccatcttgtatcttttttaaattttatctcagtttatacataaagaaaatgcaaaaatgaaataacacagtgcttatctgtgtaaatcgaaattcatcgttatggttttctttgattctcctgtctttccaatgccatgtttagattgtataaaggaaaatactaaaacaaaaccaaacaaaacagaaaaagaatgtagtctaaacacaaacaacatagagcatatgttcattctgtaaatgatttttaaatgtgagtaaatatcattgtatttaatgctccctgtacccccttttgaagctatgccagctacgtaatcagcacccatgtgaaaactgtttttaaagtcactgatttcagtgtcttgaggtcaaacacaaataattgaagtaaaaaatgtttttattttcaaataaatctttatctactaccctacacaccatataagaatggaccaagaaatgttattccctttaaatacatctccacagcttagcctctctgacaattaactggtttgaaatgacgccactagtgtcctgttattttaaaggtataaattgcatgttgaagcctagatgcaataagaaatgtggtgagttggaggacaaaacactgaattaaaagagtgtttttaaaatatgtactctccacatgctcaatgcctag

SEQ ID NO: 208152 - DNA, 607 bp, Cannabis indica
ccagtaaaattatatgaccttatgatgtactccattgttactaattcctgttgatgatcaatacagttatagagctggaagagtatagtaatttaatgaagaaggtagttgtacatcaagggatctctttgtcttagtttttctttgtttgataaattcttcgtcaacagctgaattggtctgtttgaaactttaattggattatatatgaatagacgaagagtcgagtatgctatatgatcatttgagagaaaatagtggtataagagagactgctattatatgtgtttaaaaaattctccaaatttgtgtaaccaatttctagagacttagcattgttattagtgactttaacgagtccaacactatacacgtatgtggctttgtgagtgattagcagtttctcctattatttatcaaatcaaaacgtgtggaattcgtacaccaataattatatacatctgttgtaatatttgggtacgggtgccacttgattaattaatttctcatgtttatataatgtcataggattgagaccacttaataatatatctacatgtaattaggacgacattatagataatatagatccagctttgatgttaac

SEQ ID NO: 208153 - DNA, 921 bp, Cannabis indica
agccattttcaggtaccgatcaagctttaatgcaagaagtttatatttcaagtggtaatttagattcacaacatgaaatttgtcattacaaatcaacatttctaaaactacactattaaaaaaaaaaaaaaaaggaaaaagaaatgggacctgtttaggcaacacagcagattctccatagtcaccacgagcacagttctccacatactgcaaagcaaccttaccacccaaagaatggcctacaacaacatccggccatctccaaccttgagactcaactaaattagctaagtccttagcggcattagtcaaatcatgaggagggttaagaccttccacctccgctgatctcccatggttccttaaatccacaagcaccgctctccatgcttccaataaaaaataataagcacaaatgagctccagttcgtatcactttcaaaataaaaaatccagagagagagagagagataccagatggatttgagattgtggagaggagattacgagagaaagttttccaatttcggccagatcccaaaaggccatggataatgagagcagtacggtggtagggttggtcagttgatactcggacctcttcgaaggctagggttcctttggatctttgtggtgtggtgagaaaacgagttagaagtgtgttaaagataacagtatttctttctgaggagactcgtcgccatggctggctgctacatcagaataataataaatttaaaagaagaatatgaagtagaaaaaggaagaaacgatcgaacagaaataaaaaaaaaaatgaaaaaaaatgacagctgtggatttgaacccacgccctttcggaccagagcctaaatctggcgccttagaccactcggccaaactgtcttctatgcaattgttagttacatacaactcatatca

SEQ ID NO: 208154 - DNA, 1076 bp, Cannabis indica
tttttcttatactcatagtaagcaactgtctgaactttattttcagtatataaaatatttaaaaatttctaaaaatttacaagatcataaaaaatttagatgagaaaactctcatgatactaaaataaataggatggtctggtagactctctatttattttcgcatctaggagagctatttaattttttttatttatttatgaacatgtacattgtagttatttaggtcatttataatttcaaaaaaaaaaaattgaacaatttatagtgttgaaaatatttgaactttactttcaaaacggtaaactattcaaaattttctgacaatttacaagtgatcttaaataagtacaatgtacattatcataggaaaaaaaatgaacaaaacaattctcttgaatgtcaaaagagactcctaactatttcttatgtaggtcattatcaatggcagaactcgaacttgaatgtaaggggccaagttttaaaatttagtatcaaataaaatttttataacgcatatttatattcaatattaaaatttaaaatgatttttttgttatgtaaaaaattatctatattatacaaatttttactctatattattcaaactggaaatattaatacacttctaatcaaagcacacgtttaattttaaatttttagtaaatatttaatacaacaaaaatatttatatgaataaaataatttttatatttaacaaaatttaatgcttaactaaaggagatcataaatctcaacttttaatttaataatgaaagttatcaattagtgaatgatgtagaaaaaaaaaaaaataacaataataggtgtactaacttattggtaaatgattttttctatttttactatttctaaagtaattatttttattatttttacgtaaaattactacatagcaacctacatagcaaccaattgagcaacttaaatcacagtttaaatactacataacaactaccggaacaactacaaactgtaaaaaataaaataaaaaaataaaaaaataaagtaataatagaatgaattccaaaaaaaaacaaaattaaataaacaaa

SEQ ID NO: 208155 - DNA, 1100 bp, Cannabis indica
gcagaggttaagaatcaacgatgatgacctctttttattttaaaattaaataaaatttaataaaataaattaattctatcatatcatatgataaaactggtcactaatttatttttttttcttttcctttttttgctattattttttttttaattaataatacttggtttttggatgtttctcccaaataaaaaatattgtgtaataaggagaattttatttgctaaccacctcatttaataatttcattttacataaatatttatatcaatttttctttgttcttatatttttaaaaaatacacataaattaaaataaaatatattttaaatattaaataaataagagtaattggtcctaaaatttacttctttttttttggcaaaaattctttcagtttattttttttttttattaaatttgaggcgttagttaattatcactgttaaatactaacgagatgactgttgtgtatatctgtgtatacgtaaaagtataattttgaagtcaatacagtaataattcagttaataataaagaaattttgtcaaaaaaataaataaaaaaattaagtgcgaaaaattaagacataataatttcgttacaaataagtcaaaaaataaataaattttattatatttttttttactttttaaaaaaatatatattaaaagaaaattaaaataattattcaagattaatttaaattgattttcttaaaattaaatatgtttatttctacaaaattgttttggtttaccataaaaagatatatataattttgagaattattttttataattattaattggtgttggtgtggaaagtagagaagttagatgacaaagcaattgttgcttattggacgaaagccacgaggcaataaaagatagttccaatggggatgctttcttaaaaaactaaaataattaattaattaaatgcaattttaatttttaatcaaatactttagtagagtttcaattaattaattttaattattaattagatataggggcatcggatcttgtaaccaatagaatagtatatatattattaagctagtttggcatagagtggataatttggttttgtgatt

SEQ ID NO: 208156 - DNA, 1316 bp, Cannabis indica
agtagttactttgacttttttttaactaattctttttttcttattttttattttatttttattttataatttccatggtgagacagagatggattcctttgattttatagtgacagaatttattagctagcttgggttaggatatatctttaaaagggtatttatacattataaaaaaagtacaattattgcttactatatatacatatatatatacatgtatatatatataaataaataaccaaaaatatataaaagagatcgaaacgagtttattataattacttttcctttcccataggaaacgagaatttttttttttactaacaaaaaaatagtccaaaacgaagaaataaaaaaaaagtactcattttcagacagatataaaaaatctaaccctaaatcttgtttgtgatatacatacacacgtatacatatatatatatatttatatatttatcatcactttccaagaaaagaaaaatcaagatatggattccttaagatttatagcaagaaaaccatgctcttaataatttgctttcacttgccttagacaacactactttttatagttcactttataatattttaatatataaatatagatatagatacagcttaaatgtgtaatgtgtgcctttatataaatatatatatatgtatatatatttaaggtggtgaactagactggccaacttttttataatctcgtgatacataacaggaacttattaagacaaaaaaataagagaattaaatctcttttttaatataaatatatgtgtgtgtaataaaagagaaactaataagattagaataaaagcaaaattattacatgcatagcaaaatgtcactttaacttttgaccatatgcctagtgcatgactcaattcatgaatattataattacctttatatatatatatattgtgttgatgatgaattaatttgtaatataattaatttgaaattatgttatgtatgtttaataataataataataataataataataatttgtgtatgttatgttaatagatgtggctaagctgaacgcgagtgagtggtacttctttagttttcgggaccgtaagtacgcgacaggatatcgaacgaatagggcaacaacatgtggatactggaaagccactggaaaagatcgtaccgttgtggatcctctcactaaggatattgtagggatgagaaagactttggtcttttatcgaaaccgagctcctaatggtgtcaaaactggttggatcatgcatgagtttcgtcttgaaacccctcacatgcctcctaaggtagttttt

SEQ ID NO: 208157 - DNA, 741 bp, Cannabis indica
ctaacagaaagactaaatttttgcatatgtacgttcaagaaaaattcttaacaagtcgtatattttaaccgtcatatcagatttgcaaataaagtgaagttaataaaatggtattgccaaaaaaaatttaaatgcaaacaaatttaaacatatatgatataattttcaagaagctcaatttaatttaactctgattgttcatgtgaagccgagtgtggttgggctctctaatggctcgactgagactttgaggttaaatgattttaatctatttgtggatggtggtatcaaatgaggaccactattgtatatgggtctcggccggggtggtggtgatagaccgtgacaaggtagtttatttgtgttcttcgagtgtttcagtgacggcctccttttatattctcatgtggcgaaggtagcagttcttttaaaaggttgctaccgtgtcgctgtttggggtacaactccattgctattttcttagactatattttttttgtgttattcggtctctattatgtatatgtaagcatgcataatccatattaattagttggaaacatttataaaataatttttcttttaatagcttctttttttttgcaagcatagtaaataaatatatatacgttgcttttgcaaacctgtacgtcttaagatccatggttacctacatagtgaagaaaaagtataaaattctctaaaaatctttgatctttaattttgttatataaaaataag

SEQ ID NO: 208158 - DNA, 1221 bp, Cannabis indica
caacatgtcaaaaactcatataggaataccacactaagttggttaggtaacatttttttaattagcttccagtttttaaaattaaaaattaaaaatatttttcattataaaattgtttcactttttaattttttaataaggaattataattttaaaaacaaaaaaagtcacttattttaatgtttttttttgagcagtttttttaatcaatattttgaatttcgactatattgaactgagccctaaatctggcattggccctgttaccgaacctgacttctcactcggattcggactcaatcctagatgtagactcgatttaaataaaatcaaaaaataaaaataaaaacaaattttacatagcatacttttatttttatttttaaaattaaaaataaaataattatacaaaatattttatttttaaaataaaattttattattatttttatgatttaaaaatataaaagtaaaaatattactaaacaccatcaaataagaaacccatatgcaattaattctctattctgtcaacaccattatgatatgggacaattgtgatatcacataattaggaaacatgataatcgtaactcatttatttaattcatgcttttttggagtcatgtctttgtgttgacatgacttatactaccaaccctaaaacaaataatatattttcaataattgctataatttagttcaatttcccaacgaaaatattcaagtagcgacaataataattaattattggtgtcaatatgataaatgcaatatgacgtacacatatccaaaactatttttatttaagataggttgcagctatcaaaaaaataacttctcacagtagatattatatttatttatagtttataggtgcataaatactataaatatttaatatccaaacatataatttatgcaaacttaatacatatttattgacaaatattgataactaattatttttatttaaaataagtctcaataaatattaatcactaattatttttatttaaaataggtgtgacatatcaaaaactaacttgccagtgtatgcatattattactaaaaattagtgttgaagaacacgtatgaagcagtactattcttggaaaaaaaaattataagtaacatcaatcaaaatgactcacatattcgttaaataaaaaaaaaaaaaacttactcatgcatgtgtccattgctggccagttagaggc

SEQ ID NO: 208159 - DNA, 907 bp, Cannabis indica
atctttaataaaggcccatcggctgaataggtaaaaagaaaagatttaaactgtaggggtcttaggctccttgtacggatcagcttggtagctcaatattcttgttggtaggggctagggtctcagtgttcaggtcggtcggcgctgtggaattggatgccttgaggtttcctttggctgcttgatccgtgcagtaactaagatacgcctctttagtatcttcgaggtaattaaagtttccttctgggttcgcccttcaaaattcataaaagacttccacggaaatagttcccaagctctcgacctccttcagaagctcctcttccctagtttgtttgcccgtggttagggtcgcgagaagagcgcagagaccctccctcttgtctttgagcctattgacctccttggataaggcgtcgttgtttgctttgagctaggcggtggatgacatctctaaaatttccttagtcagctcctcaattcgttgttggcagctaaagttcttattcccttcacccagctcagtccttacagtatcgatctccttcttggccatatctgcctctttctattggttggtggtggtggtgatattcttcaaagcagtacatttggctcaagagtaagtttaggccaactttatattaagctacacaggaaaaagttaaaacccacaatggtaagaagacaagataaaaatcgagaaaaaaaatacttactcgagttgcctcctttaggagcccgcccatcaaaagctccacgaacatctcattagccttgggcagatgttcattcacctcaggaagtagtcagtcctgatagtgctgaagcatctccttgcccttcttattttcacgctccagcaccataggagtggtggaagacttggtcagaccagatccatccg

SEQ ID NO: 208160 - DNA, 1433 bp, Cannabis indica
gcgtccgttgtttataacccgtttagcgtcgccctgattaatgtcggtagcgaatttcaccaaaaccgacgctgaaagggcttaaaaacctcctctaaagggggtttttgtagtagggagatcacatgtggaaatttttctgggccctctctctgcctttgaaagtcaagatatttttatggaaggctatccataattgtcttccggtggcagcactgctttttaaaaggcatatcagtagcttcgtcccagatgtgttctctgcaattgtgcttgggatacagtccttcatgctctcttccattgtaagagaccaaaaaaagttttggggaaactcaacctttcaggttgttcaactctcctctggcagcaacagttttcacgaattctttgctcatatatcgggcatctggtctcaactggaagtagaaaaattctcctgtatcctattgagtttgtggaatggaagaaacaaagaaactcacggcaccaatcctaaaccagcagaattcattcagcattcgaccatttttgttggaagagtttcattctgctaaatactcaatcgccaactgtaataaagagagtgtatcatcttcaagagctattggcaattcaaagtggctgaatcctccatcaggaaaaatgaaaactcaacactgatgccgcttgcaatactatgaaatcaaaaatttggttttggagctcttttaaggaattcatcaggtgaaattttggctgctatgtcaaaatcttatcatgggtgtttaaactagaagtaatggaagcactagcgattatgtttagtctgcatgtggcttaaagatttgaatctacctattcactacatcgagacggactctctgtaggttgtacaaggattgcacactagttctcctagtctttatgattttcatagtttgcttcatgacatttcttttcttatgtccaacctccctggagttcagatctctcatgtttataaatctgctaatatgttgctgattctttagcaaagtatggtctttcggtggacagagaatatttatggttggagaaatttccacctcctctaatgtctattgtattttaactctttaatataatatcattttatctacaaaaaaaaaaaaaaaaaactaaaactaataaaataaataaatgtgttaattatatttctctcttaaaaaatgtgttaattatttttatggaggatagaaaatttgaaactttaagatttttgttttattttatttttaaagtaaaaattagtgacaaagtcacgtatcttttagaaattctctcgtgatttatataaccgataagcttttcaggttttattcatttattcaacgtaactcatttcaaatacctatatatatatgtacaaataaagaaagagaaaaataaggaatattcttttaaaattttga

SEQ ID NO: 208161 - DNA, 378 bp, Cannabis indica
taatttattatgtctaattattagagttaagtcttttaagacagaactataatagccaatataacatgcactatatatatgtttcttttctctcgtaaacttatttggtatatatacattattattgtctattttggtataataataatgtattttatatagctatttaaaattacttataaatttttaaaaaattatataaatatttaaatattattttctacgttataaactacttaaaatttttagaaaatttacatgtaatcctaaataattataatgtacacgaaattgaattaaaaaactctcctaaatactgaaacaaataagagatctactgaagcacttttgaaagggtttactataacttaccctata

SEQ ID NO: 208162 - DNA, 981 bp, Cannabis indica
tataaaaggagagctcatctagcacttttttcatattcaaaaaaagtgtccataaggtcagagcatctctctctagaagttagagctttcagacaatcaatttttttgtaattctcgtgaaaaataaaaattcaaaataaacgtaactccattaccaacgcgacatggggagtgaatataaattcttgtgtttgctctctattttacttagttatttctagctttcatctcttctatacatacgaacgagttgatcatttttcagtatcaacacatatactaaaaattatataaacattcaactcatttatgtctatcacatgattcatgacaacaaaaataaaaatctttttaattagtatatattcctcttaatttataattaaattacttgtgattaatttattatatttaacttgtactaatcaaatatttttctttttctcaatttgattcttaatttatgcagctatatcgggcttaagatgttgaaagaaagaacatagccagtcaaaattgaaaacctcacaagagatatatatttcaaattacaagaattggatacatgcattccaaaatttacatgtagtgatcatgcatgtaatttgtacgtagtactaattaatgacagtttacaataatatatattattttgtatttaatattattactattattattaacgtgtcatgtcaatcaaatttattgtttttttttgtacatttttcgtattattttttatattttaaaagttatattttggttactatagtattgataaaaactgacgtcataaaattatatttcagtaattaattagttatttttaaatttatattatagtagattataatttaaaatacatttaaataatcttaaaattaatacgttgtataatataacaagctatattttattatatattaattattttattatgcttttaattattttgtaaagttaattaattatcgtatatat

SEQ ID NO: 208163 - DNA, 757 bp, Cannabis indica
aagaaaacgaaaaaggttaaatagggttatattgggaaatttaataattaaatatggataattttgactttttaaaatatttattaaaagggaaaccaaattctaaaagctaaaacttcattaaacctagcttttccatacagcttatttaaaaagttgattttagcttacccaaaatccaaaccaaacaagcccttaataatttttaagtaagtaggaacgattctaggtttttattatcatttattatttttttactatatgttgtatctgtaattcattggattttctaatcatttaatatatttttcaattgaggaacattctttttctttctttgttcttcgttctttgtgttgttggttggtattggtatttgataggtcaataatttatggctgaagaaagagttacaacaacatccatggtggaagacttcgataatgaatacagaatttcgaaattacctaatacactcattctacatatactgtcatttctttctactactgatgtcgttaaaacttgttctctttcaaaggattagaaattcatgtgggattctgcagtggcagaggtagaaaataaaacttcggaaagggactaaatgtaaaagaattaatttcgatcgggtagtataattattatttttatgttgatataaagaccattatagtcacatgtattgattcaatcataaaactatttttgtaagtaaacctcataaaatcaatgttttcttacactatatatttgt

SEQ ID NO: 208164 - DNA, 1190 bp, Cannabis indica
acaaatcgtaaagttcaggtggtttagccgcaatatcccatctcttattacgattaatctccgtacctaaaacatgtactagaatattttttttttttaatttttttttcatggtggtgtttgttatgcttacaacattatttctgtacatttttgaaaaatttcaaataattttcagtgccaaaaatacatttaaagttttttaaatacgcgtagcaaattgaaatatcaggaactctattttcggtactataaattattcgaaatttctcaaaaatatacaggaatgatattgtaactatgacagataccgtcatgaaaagaatttaaaaaaaaaaatattgcaacatgtgattttaagcaattaactaaaaacttataattagaaaacttctaataaagtacctacgatagagtgttctctatgataattaactatatctagatatgaaaaccataaaaaatttcaaatatttatataatatgtgtatattatagtaatatttagtaatatttttatttattttttaatttttaaataatacaaataaaattaaaagttgtgtttttaagaaataaaaatgtgttctctaactaattttatttataaattttaaaaacagagaataaaagtgtattatataatttttacttttattttttattttttgattttatttaagtctgatccaagtttctcgcccgtggtttgagtttggaaatcagagccggagccaaaatctggatcccaaagtctaaattgaagttggagtccaaaaaatatttattaaaaaaaactatttaaaaaaaatttaagtgatttttttttcaaaaattttaaatgaaaatataaaaacagttttatagaatatatttttaaaaatatttttattttttatttaaaaaattaaaaaattagtaaaaaaattataactaaaacgcaccgtatattaatataaacttggaattttgtttctttcttactaaatactagcctctagaatctatcaaaaggatataatattgataaaggagagtttcattacagagttttcagatgagtaaagtaagcgacttcatctggtattggtccaattaaaccgacgtcgcgcaaccacctttgagtcaaaattaacacattaattaattattttttcgtaacaatacaaatttttattattaaatattac

SEQ ID NO: 208165 - DNA, 747 bp, Cannabis indica
aaagacaaaatatattttgcaaagtacaatagttacccttaaaaaaataataaaattttatttttaaaaggataattttgtaattttactaatcaattttttctccatccttcccacctcacatctaatacaaaagagattaacaatcctctcgattcctcttactcctcattctctctaacctctccatccatcctactctccctccctcctaccaaacatagctaaatgttttttagaaataaatgctacaaataatgtgtaaaaaacataaaataaaatattatatctttcgatgatgtaaaaatatataacaccaatgttacgattagagatgttcttaattcatctatagcctcaatattatagttaatataagagagaaatactttaagaaagctagataataaagctttaaatgtttaaaaataaaatactgagcccatctcaattctactaacaaaacaataatttatgtttaaaaactattaaccattcacagtaaaccacgtggcaaaaaataagctgcatattagaaaatatattgggaaatatataaagtgattatggtatttgaatgagtcaactaaatctcgatttttctatatatgtttcccactattattaagatttttttttacatataaaatgttaagtactttaacaagtattgtttggttggtggcagcattatgttttcagaatttaattttggttgatgccacttttaatgagtactattttttt

SEQ ID NO: 208166 - DNA, 558 bp, Cannabis indica
agaatgggttttacaaacgttgaccatatataatttcatcatcgtatgtatgttaaatcaatattttcttttttttttttgaagatagtcaatactcttcttagtataataatataaaaggacagttttttctagtctcgtgaaacatgaagaatcctcgtagctaaagtagaattgatattaatttttttttaaaaaatagcattgatatatatcacacttatataagttatgtacatatgtattttatttcattttatcaaaattattttgtaattggacaaaaaaggatttatacttttttttattttttattattatttggtaaccgtagattggtggggaccttaggcatgtgggacaagtgtaaaacataaatgttaatacttgtctgtacaatattaaaacacttctccaattttttccttctccaaataacaaaacaagaaaaaaaaaattgatatgtgctaaaaaatagggaaattagatgatattgtttaatcctttacacctaaaagcataacattctttaaagatattaaaaatttacatattatt

SEQ ID NO: 208167 - DNA, 1664 bp, Cannabis indica
taaacttttctatgtaatcatatcgattgtattataactatttctgataatgaaactttttcatttcactggtttctatggctctcctaatgcttctcaacatgtgtttacttgggagctgcttgataaacttattataatgctccaaatctcccttggcgtatcatgggggattttaatagttatcttttttatagtgatgaaattggtagtgatcattataatgttacaaatatggatactttttctaatttcttaaacaaatttcatctattacctctttcttttataggcaataaatatacttggaacaataataccattttcaaaagaattgattgggccattggctctgattcttggtttaacttatttccttctgccgttctttaccatttaccatattatggctctgatcatagagccttgaaagtaatgactaatcaacatgttcctaaccgtaatcctcatagtaataagcgatttcattttaagaatatttggcttgagaatccggatttttataccacccttagtaatgcttggtcccataatgattccactttaggtgcttatcctaggttccttcattcccaaaaggcttctattacctctcttgcttcttggggtaggtcaattagaaatgactctaagcttcgaatttcctatcttcaacaggatattgagagaatccaatcctcccatcatagggatagggatacaatttctcacatcaaatatcttcaatcacaacttgatgctcttttatatagggaggagatttattggcatcaaagggctagagttacttggcttagggctggggataggaatactacattcttccatcgttatgcctctaagaggaagtgtaataatactatttcatttcttagagatgaaaatggtaatactgcaagtagtttggaagatttgagtactcttgttacttcttattttgaggatctctttcattgtgatggttgtgacacggagactgttaatagcatggtccccctcttgaggatttggaggttgattttttgcagcagccttttacgtttgatgaggttctaaaggctgtattccagctctcgggagataaggctcctggtcttgatgggcttaatgcctatttctatcaaaggaattgggacactgttggtagtgatcttattcatgcagtcttagattgtctaaataatggggttggtttttctgaggttaactctactttgattgtccttattcctaaaaagaagagggctagatctcttagagattttagaccaattagcctttgttccaccttttataaagttatttctaaagtcttagcaaataggctgaaattggttctacacaaaattatctctcctttctaaagtgcgtttgtggctggtagagtcatttttgataatattttgattgcacaagaggtggtccatgctattaattctcggaagaaaggtaaaagtggatgggcagccttgaagcttgatatggctaaggcttttgacagggttaattggcactatttggaaagtgtaatgcttcatttcaatttccctgtctcttttgtttccttgattatgaaatgtgtcaccacttccactctttcctttttgattaatggctcaattctggatcggttaaactcccgt

SEQ ID NO: 208168 - DNA, 942 bp, Cannabis indica
atataatgctgcatccgttaaattttttcatctaaatattcttatttttgttaaaaaaataataattcatttaatatcttcttgggtgaagataaatgttttgaaggagagtacaaaattatttcatacaagaaggaaaaaaaattaaaataaagagagatttcatactcataccagactctataaataaataaatatttatatatatatttcaacagaaggaaaaggaaccgaattgtaataagtataaattatatttcaaaagaatgttcattcagtaatataatttgtgattaaatttattatttttagttaaactaaggttattaattattatatttgacatatgaaattaataagtaaaaaacaagaatgattgagaggttaaaataattattattgttcatattttgtaattatttttaaatatttatatttcttaagttttaaatcaaaataaaccacctttttagtaataatgttatattaaaagaattaaaaaaaaaaatcaagatacgagttcatttcctttcaaataataataaaaaagggaaaatcaacacttttaaaccataattaaattttgtaaatgaaaataagattatttaatttagagagttttaagtaactacatgtattagtaagaaattaatttacaaaaaaagaaaaagaaaaaaagagtaattagtgactaaaatgctttatattttcaaaatattagatggtagcagtgacaaaataaacgtatttgataaatttgaaaatattatgtaagaaaaagattaagtataaaagtacaatattttgaaaacattagacatatttacctaaaaaaatacagcagtacaacacttctaataaaatgtagtattttgaccgtaatttactagaaaagaaaaaggtttcaaatagtctttactcattctttttttttttaaaaaa

SEQ ID NO: 208169 - DNA, 854 bp, Cannabis indica
atgactcatagagccaattatggaggtaaaagaaaaaactaaatgttggtaatagtaatcaactcatcatctctcatactagttatggtacttcataaaaatacatgtagtcatttactgttaaaagatatgcttcatgttccacaagtagtcattatctcattagtagactaccaacacctgttttaaatggtaaaataccctttgaaattgtcaactctaaaaagccagattacaagtttctcaaggtctttcggatagtttgatttccatgtctaattaggccatatcaaaatcataagtttcaattccactccaaaaagtgtgttaaccttgggtataatgagtctcacatagattataagtgtctaagctcaatatggagcttatatattttaagggatgtagtgtttaatgagaaagaatttccctacaaaattgatttcttcaacacttaccaaaaagagtcaactgttaaaattcaaactctacattcccggacatatctacctgttttaattccaaccaaaaaatgagtcaccagtcattacaaatactgccactcagagtcaaaactctattcaattagaaactcactctcaatttgatacaaatcacacaacaagtgaacctaaagcatcactgctacatacaaaagttaggttgatctctcaactagtgtctttgttaatcttgatttcactgactatgataccaatgatatgagacaatagtcacaagatttatctacatcatcacgagttgctttagcaactcaaacacagaacaactactcaagtgggcatcctcaggtaatcatgtctaaagctagagttttcaagccaaaggtttat

SEQ ID NO: 208170 - DNA, 766 bp, Cannabis indica
gaaaaataaaactctaaacccacaggaaaaaaaaaaaacagtagagttgagcatagcgaacctggatgcaagattggaatgtaaacgacagaaggtgtgttctcctgaaaaagacgaactgtggcgagctcatcggactgcaacttcctcggcgtggtgaccacaaatgcggaggccgggtccacatcggcgatgcagagggaaaaagacaaagcagggaggtacagagaacgaggaaggaatcgagagaaattgaaaggggcttaatggaggagagtagtttggagagggaagaaggttcgaaggaattaagtggagtgatgtggtgtgtctgattttgatgggacttgtggcggagaagagagacgatagagatgggagttctgcggaaggaggaagatggtggtgatgatgatgatgatgatgatggtgaagaagatgaagatttagacaagtagagagttggggtcctgtttgttgagcgagaaagtgaagagaaagttggagaagtgtggaagaccgtagaaatgagtgaatatgcagccatctctggtctttcctttttttccggacagatgctcaaaagggattgaattatatgattattcttatatttgcctcctttttcctcattttcttaaaattatttttattttcaatgtcaaaaaaaacactataataaaaaggatgatattcatataagagtaatttacaattcaaataaatatagcaaaataactttggaaaaataaataaataaagatag

SEQ ID NO: 208171 - DNA, 1865 bp, Cannabis indica
ccaaaacaatagcattccatgaaaccaatcaaaaacccttgttacgaagttgatgtattctagagagagaaacaaaaacaaaaaccttgtaagaagagtataagagagagagaaattaccttagagagagaaagtaccacccaatccaaaatccaaaatccaaatccaatttggtttgtagcagttgtgaggaagaacccttggaatagaaaggggaaaactttatgtatatatattatttccaaagaggaaataagaaaacgacgtgtcgtttggatcacgagcagagttagagagagagtgaccggtcgtcgtttttgatgtcgtgagtctgaggttgtcgttttggctgaatactagtactgccgattagagctgctcatcaaactgcacaaatcgccaataccgtaccacactgcataaaatatgcagtttgaaatatttcacggtgcggttgcagttgtagtttgtacttttgccaaaccgtacagtgcagtgtggtttgcaattttgaatttaataacttgatgattattatacatgttgtgatgttaaaacttcaataagatttttttgttttatattgttaaagctgtatagtttgatttttaaattttcattataatgtttgatacctatgatagtgtaaaccgctcaaactgtaccgtaccacactgtattttttcggtgtaatttttgcagttttaagatctcgcagtgcggttgcggtttaagaaattataaaaaccgcacatgtagtttggtttgaaaaaatagctacaacctgcaccacccacactgtgaacaccaagtgtcaatagctgagatagggagagaaaccaattagaaggagacaacaagaagtgaaaaaaaaaggtctacttagaatatttgacgctgccgaatttatatcaaatcgtgtcttctaacctttttaggtcaataaaaaaaattaaattattgagattattaaatttaaaaaattttgtttaattttatttaattttactaatgtgagaattcttcatgtactaaattgtgccctaacctttaatgtatacaaaatcatacccttcgaattttgatatgtaccaaatcgtgtttcttaaattgttcgttaataaaattgaacaaaaatcttttaatataattaaggtacgtgttttttttttttttagttgggaaattgaatcaaaatttgttttttcttttttttttattatgttttgtttttaaatcttttaaaatcacacatataaatgtagaaaaataaaaatatgtttcataaatgtttttattttttttatttttaaaataacaaataaaaatgtttctcataatttatttttaatttttcttattttatttaagtgagaatgaataactgaggtaaaaacaagtggatcgggatccaaggtcgggctgcagaatttaggctccgagatctaaagtcccaagtccaaaaatacagctcaagatcgagggtcgtagccaagtcagaggtccagatacgagttcgtgggcaaggtgggaataaatttatagtaaaaattgtataatttcacacaacctattaatataaataatattgtattaaatatactacaatacaatacaatataccaaatagacctcatttatgtaataagaaatgttaaaaatcacaagtggtgcttagcactaccaatatgtaatatatggtacaattaaatattaagtctcatataatttaatataataatttttaaaaaatattattaaacaatcacaagacaacatatcaaatgctgaatactatgttggtaattatgtgtttgcttgtatgtttagtggttgtaatacgcattgccaagtgggcgttgaag

SEQ ID NO: 208172 - DNA, 519 bp, Cannabis indica
ttctctttcttttttttggacatgtatattacataaataggaaaattctatgatagagaaccactcttgttcctattttttgcaaatatgtacattgtagttataacaagcattccacccatttttggaaaatctaaaagtgttcagttgtatgtgtgtttgttttgtttataattgactgttgtgaactttgttttcgatattgtatattattcgtaattttttcaaaatgcataagatatctactataactataatgtgaaaaaattagattattataatttcttcaaaggttaaaaacataaatgctcaggacaaaagtgacaaccctgccataatgggtttctatatatatatttatatatactatgttattctttcatggaaattcatggtgttgaaagtatctctacatgctgtagaaaagagttggcataggaattctttttttagagagaaaatttggagaaagttctttttaacaaatttggtaagaaatttttttttacatatttataa

SEQ ID NO: 208173 - DNA, 1176 bp, Cannabis indica
aggtttccaatgtaacatgataacattcttgttgcttaattataatattgcttaaaacttctctaacactaattgctttagctagttttggccgaacaacactaataaagtatcgtgtgattccttccagcaaaaaattatcgtgtggttttaaattacattatttttttttattaattttaaaaaacattatatatttttttcctgacttagagtccaaaaataatttttttatagcttactaaatttcaaaccaactctgaccataaccttaaatataaatgtaactaaatcgactgtaacattctttaaatagttatgctttttaagaaagataaattagagaactaatattttttttctttcttcaaattcaaatttcagtttggattcttcaaagcaaatatatcaggcacgacttgacaactcttagatttgtcggttatccgttatttacccaatttaattatgaattggttaattaataaatacaacaaaagcatgtaaaaaataataataaattactttagataattttacaaccagttatattaaaatatgcatcaatatagaatgaaaaaaatataacatacaaaataaaatgcaaacaaagatgataataaaagttattattatacgaggaaactttaatcggacgagtgagtcataaataagttaactaataaactataaggcaaatggaatcactttactttgcttttgtctcttatattcaataaataaataaataattattggttactgatcttaaaacaattgtttattttctagaaatcaggaagaaagcattattttttaaaaagaaaaaatacttattagctatataatataccttatgaaatacatatatttattttaattattataaaatagtaataatgatcaacatctttccctaatactccgtttagtgtacttatgaaataattcctttatacaatccgaccgggccgggcttactagacataattattggtccctcattaatgtaaataattatttacccttagctaataaaatatacatactttattgtatagatattatttaaaataaaataagcatactattatcctagcttaactacaaaattaagacccttcaatcataaagaaaagaaaaagtcaattatttctttcttttctctctctctct

SEQ ID NO: 208174 - DNA, 632 bp, Cannabis indica
ttaattgtggtaagtttatttgtatcacataggggtgtaattagttaatttaaggtttttatattagatgccttgcaaaaaattataatagttgcattacagtttctagaaaattggtttatagttgacataccaagcttgatgtttgaaattgtcttattttataatggactgtttgattaaggaatgaattatgtaaattacgaaactagtggccaattcatctcaatggattgcaaatatgcaagactagtgtgtgtatattacggaataaattatgtaaattatgaagctaatatcaacctccgtttctcatctcgtctctaacaattgaaactacaattttatttttagttgtaaattaacctctcccagctactacaaagtgctcgaagttagagacttcttgtgtgagactcaatttttgaggcacccaacttttttagcaaaaatcaatgggtaagtgatttttttatttttatttttggttcttatatttagtttagattgttgttttagagattgatatgtggattgttgctatttttatgttgttttgtgtttaaatggttgttgtctggtttgttctagttaatctgcatttttatcgtctagtctgatggggcccgata

SEQ ID NO: 208175 - DNA, 807 bp, Cannabis indica
gatccatcaaaatcaattcatatcatttccatacaatcaataaaaactttatccatatcaatattgaggctgctggtgccacattgaacgtgtttcttcctatatattatgtcattattataatatataattctattagaatttaataatttattatatatgttaaaaaaaaattaaaataattaattataatttatatgtggagtaatttgcggcataaatatacttatgtttaattcttagttacaaataaatacttaagtttaatttttggcggaaataaacttagatatattttttgaactttgtaagtacctaatagttaaatattaagtcattatctacaagtcattttcttattggtatattagtatttatgccgcatattactcctaatatgtgtataaaacattagatgcatgaaatatataattatttagaatttttgaaaaaatttgtagtaatctcctattcctttatgaaatctacctggttaattcaataattaaaaaaaaaatacaaaaaaatatcatagcaaaaaaattatatgaacgattttacataaggtatatcatctttgaagtaacaaaaaaaagctactaatatgaagcaaaagctaataattatctatgtgtcactactatatgcatcatttaaaaaattattatattaaaagtaaaattatgataattattgaaactaatggaaaaaataatattttaaaattaatttattaggtttattttttaatattaaaaataaataagaacattattcccactaataaatgtagatgaatattacgat

SEQ ID NO: 208176 - DNA, 679 bp, Cannabis indica
agttactatacgtaccattaaaagtactcgaaatggttacgttacctacttaaggaaaagtaattttagtttaaattaattagtaagtttacgtaggaagggaacgtttagggttaggtaattttaggttaaaaaagtaaaaagtaaatttttttaaacgtaacttagttagtaagtaatttacttttaactttagttcgaaaaccctttaagggtaaaggttccgaaattttttggttaagttaggtacggttaattcgtacccttgggtaaacgactaaggtaaagggttcccgacggaaccaaggtttaagttaacctaagtaaaacttaattttaaggaagttttactaaagttttaattcgggtacgttaaccctactaagttttaaagttttcgtaggtaaggttaaactaattaggtttaggactacctaagtaaacttaatttcgaagttttagtttaaggttaaggtacctaacgtttacctaaccaaactttgggtaattggacttaagtcggaaagtacttaagtagtacttaaggttaaaaaaattaaaaaaatttaaaagttcccgactttcctaagttaatttagttaaccttagtagtaccgaaaacgtttaagttaaaaaatttcgtaggaagttaaaacggaaggtttttaaggtaccttta

SEQ ID NO: 208177 - DNA, 639 bp, Cannabis indica
catatttatgaaaaaacccctaaaatcattgggttaagtgccgttaggtagcccatgaagccaaactggtgaacccataaagtgtctcaatctgaaacagacggcggctcatcacaaaaacagcttgcgtaactccaccaccttaatcctcgtgcctatccttccacctctacattaaccaccttatttggctacgtattacgtaacgtaactacaccaatattatccatttccctcttcttctttttttttttctttttttttttaattaatagacttttcttttcttttaacaaaaaagaaaatacttttcttttcttatatataagaaaaaggaaaattcaaaggcattgtttagatagtcaaataaaacacgtcttttcattattattattattaatgacaccattgaattttgttttcaatattaatttaatacatcaattaatactagtatcatttaaaagatttcaaaattatttacatattcaaatcaagtgttacaaaatgagtaaatactattaacaataataatatacataaaaaataaaatacttgatactatttatttatttacattttatttatctaaacagaaaaaaaaaaaaaaaaaaaacttaaaaagaaaagaaagaaaag

SEQ ID NO: 208178 - DNA, 870 bp, Cannabis indica
ggttacggttcttcgtttagtttaaagtttaacttagttattacaaaaaataaaaaaaaaaaaaagaaaaaacttgtatatcccattcccccaccccactaatgagaatagtcaaaacaacgactttggtacggaaatatgcatgcatcaattaattccacactgcgattaagatagtgccataattattcaacaaagtgggctctctttcataatttatttcccaccacttcctaacattttacaatgatcccttaaataaatcatttttatttaatttatattttgaatatattaattatttctcaacttgcaacaaatttcaaatactaattttgattgtttgcatttaaaagtttaattagattgtatatgtggaaaacatgccctcattcctatacctaatatgtaaaataatattggtcaaacattaaaaaaaaaaaaaaaaaatgtctaaaatattgttaattgcaagtagtgattttcacgggacggaaaattagcgaaaaatattcccctgtttttatttccgttaagaattttaatttccatccccatttaattttattgggaatagggtagggaatcccctaattgaggcagggacgggcatagtagggaatcacctaataaaaaataaaaatttataataaaaattcaaatatataaaaatattaaaatacataaaaaaattaaaatattacacattaattattatctaaaatacaacttaaaatttataaaagagatactattatactaaaaaaagatataaatataaactacaaattataaaatattgttagaaatataaaataaaatactaaatgtgtccctattagagtggaaagtgtcatcccccattcctat

SEQ ID NO: 208179 - DNA, 1106 bp, Cannabis indica
ataagagctgctggaaacacgagggacttcaggcagagcttctttttcccactttttgtagaaaacctatcaatacggtcaagaccgaaacaagaatgcaataaatttcaggtgatgttcccttcttagggaaaagactgaaaacgtattggttgtgcattactatccttgtttagtagtagggctttatccatttatggtacctaagatattttagtcttgtttctttttgagatattagaagaaactcaattggttcaaagtatatgtttgtgttagtagtattattattcttgtttatgttcaaatttaggagatttttttatttttattggcccgtgatttatgatgagattgtttcttataattgttatcgctatgattaatcgtttaattatttatttttattttagattaaataataaggttgttatcacttaattttatacaaaaaaaaatttataatagtcattgataatgtaatttatcacatgttcatttaattcgatatatcttacattcttcgcctttttttagtgtttcaacagtgtcaacttattagtatcttaattaaaagtgtcattaaaatcttcattcgtattttgtaaatagtatgatttgctgtctcatattcgtattcgtattttcattcatttgagtgatatatcatgtttaatagaggtatcgtctaatttgcctaacaaaaatttccattattctcagaaaaagattacaatatacaaaatgcatacatgaaatgaccaaattatcctcacgttggccactgttttatgcgtgatccaatgtggctgtttccatgtttaagaaaaagtagaaggcgtcggtgtaaaagaaaaaagcctctttcgtactttcacctctattccactccactccaccacacctcacctctaactcacctttttcacctcttttttttttaaaaaaaaaacaataaaataaaataaacaaataaaaagaaaaggactacgttcattattcatttcatatataaaccatcaaactcaattcactctctttcaattttctcatatatttttatatatatataaacacgctctctctctctctctctctgtctgtac

SEQ ID NO: 208180 - DNA, 619 bp, Cannabis indica
caaggagatggtgcgaagagaagaggcagttatcgtaaaagagggggaggctcgggaagtgggcgaagaggaggaaagcaaggaaattcgaattgtcagagtaagaagaacaccgcttttggggtgttacaaattgaaggtacgtctagcactaatttggatgaggttttagttgatattacggttaatgaagcaacccaattattttcgggcgaggaggcggcctttatcaagccccctctgtcgccatgaggcttttatcgtggaattgccgggggtgatgcgaaccccggcaacccaagctctcttggcttgggtaaggaggtacaagccggagtgtatcttcttgatggaaacaaaaacaaatgtggagggaataatgggaatttctaggtctttgggttatcaatactcctctattatccctgcggatggaataggaggtgggttttgtttgttgtggaatggatatgttgtattgaaggtaattgatgcttcagacggggtgtttgaagcaggaattcaggactcaatctctaatcttaggtggagattgtttgtggtttatggcagacctgtatgaaaatgagaaaaagtctttctgggagttaatggaagg

SEQ ID NO: 208181 - DNA, 560 bp, Cannabis indica
gatgattacaataatactttcactcttattttccattttatatcattcttaatttgtatatctttctatattcttagttgttttttctgacttgatttgttaattaattcatggacagatggtagagatgaataataataattataaatatgaattcattgaggaaatggatccttattatgatggtaaaacattcctaccatcagattccgatgatgattctgaagatgaagctggttggttaacggttataaatcaacttaaacttactgatgtatgtattaattaattacaatctcatatatatatatatattaatctttatttgttatgtatacaatgtactaacttgctaagtaatatttcttatgaatatttatagggttttcaggttgatcatctccctaatagcaaagcaatctggagttggttggttgttgagtcttttataagacttatgataagcatacaattgaagcagctcatgcagccgttactgaatttaacaaactcaaggttatctttgttacttagttagtttgtttaataattttataatc

SEQ ID NO: 208182 - DNA, 557 bp, Cannabis indica
agttaatatggaaaatgatgattatctggctgggttggagagagggtgccatcttattaaggaactgtctcgattgtatgaagcaaattatcaaggttttgtttttttttttctgctttgttagaaaataataatatcatgtattatacaagagtcctaataatgattaaagaaatttgcactaaaatctgttgtatgttttaatatttatacacttaaccttttattttttagtggcaaaattctaaataacaactagattattactgtatcgattttgaagttttactgttacatatatacaagtgtatacaacaatcatccaattgataaatttgatattcaattagtgtgtaaaatttacaaaaaaaataaacataaagaaattttgctactaaaaaaatataagagagttaagtgtataaaaattaaaacaataagagaatttcgctacaaatggcttaaataagtacatgaacattgattattattaccatttttgtatacttcacaataatagatcagaaaagaaaaaggtaacaaagtaattgcaaaag

SEQ ID NO: 208183 - DNA, 950 bp, Cannabis indica
atttgatctactccaccatcccagcacttgttcagtatctgcaataataattataatacaagctattgtttttgtttataccatatatatgttatgatatatagggttaaagaagttttataatattttaaataattaacctcacagattgctctaatcatccttcttggaagttctttgtgcatgctttgataatgatcaggtaattcagttgcagccatattgttaccctgtttatttatctatttttttctaataaaaattaagacttcattgaaataaatcatttacttaatataaatcaactacatattgatgcttaccatgataaatatttgagcagaaagatgatcagttacgccattattaaagatgatatccataatgttaagaagaggccttacatgaagaatagtacaatttccggagtgaagaatgctactattaacaatgtcatgatattcatcatcatcattatcattgttgataatatcatgatcactacccgctgctgcgttattattattgttattattattattattattattattattattattattattattattgtgtggtgattccatttggtgtatatgtaggactctaataagtggcattttggctactctcttgagaccttttatagcaacaacttaatctataacaattaaagcacttttatatgacacctcgtaattaaaagtaatcgatattcgatactataagtgtcatttagtatgtagagtgttgttttgggcattagtaacattaccgatattttttaaaagttattattatattaaaatatatatgaaattccatatttaattgaccaacagataataattttttattatgttaaatggtaaaattaattacatttaatggtaaaataaataaaaaagggtgaaaattcttttggatcgatatgtataaataccttg

SEQ ID NO: 208184 - DNA, 874 bp, Cannabis indica
aaaaattatttcgaatgttaaaatagatacgagcatatcaatgtgtctattttaagaaagtgcattgtgtaatttttctatattatttttgttcagaaaaatccaattattattattaattttgcaagagaatgactatagaaagtattggacagtttaactaaaattagtggggtgcgcatgcaaatgcaatagtgcaaaacttaagccacactggaaagttccaatagaattaaaaaggttcttctccttaaaaaattaaaagggattattttataaatacacaaaaaataattaaaaaaaaaattacaaaatacaaaattttaaatatgttttacaggttttagagttttatttataaaaataaattttttaatatttttaagattatatttttattattttattattaattttttgttatttatatattatttttatgttgtttaaattagacttaatttgatttggattcaaaggcttgcatatttctcctttcttagcctcataaatatataaataaatatttatatgcatgcagtaatattctttctaaaatgtgcttagtgtgaaatataaaggtacttgggaaagaatatctctttgtcaagattaataaaataactcagtagagaattatatatatggaaattgtattcattcatctcaatcttagggacaatgatcaatatatacatggcaatggcattggtattgtttttgcctcacaaaaattgtaacaatcatttttattagagattgtcaataatcattgtgtatgagtgtgtgtgcaaatcattaggcattaattaaaacgagaaataagatcgatgaaggcattttctgtgcaaggaatggtaagagctcccattgg

SEQ ID NO: 208185 - DNA, 612 bp, Cannabis indica
attattatttttttatttttgtttaggattttttcacaaaataaaaataaatacacaaggcagagcagcagatgagacccactctctcatgggtccacagtaaaatgaggcttgcatgacgagtaaatactactagtactacactccccttttactctgaactataaataaaaatattgaaaaggaaaaaacaaaaaaacaaagagaaatataagtaaaagaaagcacctccatatatatccccaccaccattaccagcttcccaaaaaaaagaaaaaagagaaaaaattcggagagagaaagagaaagacaaagacaaagaacgaaagagaaagatttgatcataataacaacagaataagcaacagcaacatgagtaattggttaggtttttctttgactcctcacctgagaatccatgaggattttcaaaatggaagagaagaagaccaaaacgtccatggagatcatcatggcttttctcattctcatcattctactatgtctgccatgcctttgcgctctgatggctctctttgtgttcctgctcaaggtatatataatatatatagtggtgtatatatatatataaagaccttgcatgttcaaaac

SEQ ID NO: 208186 - DNA, 550 bp, Cannabis indica
ccagagacctccaaaatgtgtagttcgatcgatctaagcggagatttagcggaagcaagttgttgttgggtagtcctgctggtggagcctcattcgcaggaggattcggtggtggagcattcgtaggagcgccattaccgtcgacttggccttgggtactggagaaatttgctccattcaacgccatgaatggcaagctgataccatgtaagaatattaacagagagagaaatggaagaatgaaagaaatggaaaaaggctcatctgaaactgatgagaccaaagcctttatatagatgaatgagataacagaaagtggttacaacagctggcaaactgcacagctaaaaaacagttaaacactaactgaaataacagacaaaggaaccaacataatcctaacattaaaccttaaaagttaaatctgtaataagtattcttactttataaaactcaaatctgtaccaagtaatcttgctctttaaatctcaaatctggaataaatattcttacattttaattctctgtatcaagtaatcttccttaatta

SEQ ID NO: 208187 - DNA, 682 bp, Cannabis indica
caagaaacaccatacattagattttatttgaagagaagtttctcaatgtcaccaaacacttaatcaataccaagatgtagaattatcccaaactcaaacacagtactgaaataaaatatattttggaacagatactatactaatgggactcacatgaaagaaaaagaattttttttatcaaaccaaaatcagaaaattatggaagtttctttggccctggccctggccctaacgtttcaaatctttccatccatattagaacaaactctcttatgattattaagaacacaatattcatattattatagcgtttcaaatgataataatatacccaatttctcaatcttagaactactgaccattataaaggaaaacctaactattattaaaaagaagaacaaaagaaaagagaattaaataatagctaaaatcatatccttgtcgaatacgaaagtagaactctatacaaacaaagtttgcatcgtctctctgtatttaatcctcattagcagccttaaaagcgtaagtagagtacctgttgtgagtgaaacggaattcctgctctccggtctcccatctccgatctccgataagttagttaacgaggttgataaagtttctagggtaccgttggtccgatgagttagtcacacagaaccgaagattgagagagagagagaga

SEQ ID NO: 208188 - DNA, 724 bp, Cannabis indica
actatttaatttaatatttttgattactttgttatgagttctttccattaacattggaagtttacaagattgcagtgagcaagtcttgttgtgttactcagtgcttttgcgtttctctcggagcaggtcttacggttctttgtcatggctgataacagtctcagccatttatttgaggaaacagttcaggtgtctacagctgaccttacatgtcggttggatccgggagaagtcgataatcaagaacctcaaggaaagattctgttggggaaattaatatgtcgtggtaaacttagcagaaatgtcattgccggtactctcaaaaaggcttgggcctcgtttaaagggtggagctggaaagaagacaacgatggaatactccacttctcgtttgccactaaggaagatgcgtggaatgtgcttcagagacgcccttggattgtttgtggagccttgttgatcatcatgccttggccttcctagttagccccggctgagattgtatttgataagtctcctgtctgggtgaggctgagcggaataccaccgttctactggaacaagacgaatctggaagagctggctgcaaaagtatccccaaactcaagctacctaggtacatcgattttgaacggggttcttttggtatggggactgttcgattccgggcaaccatagatgtggataaaccattgttctctggcgttctttatgaaagaggaac

SEQ ID NO: 208189 - DNA, 1037 bp, Cannabis indica
atggatattcgttgtcttttatcctttattccttaagctgttgtttcttatattaggaaaaatgttaactaaactgttcatgatttagctaaatataatttagagttggatcaagacttttattagataatagaaatttttttttttattttcactattattgtaaattacggttaatttataataataatgataatttgttaaaaaataaaaacattatggtgctcttataattttgtgagaaaaaaaaaaaaaaaaaaaaaaaaaaacataaataaaactaatataaaacctcaaaaaagttccctacggcccaaaccaaaaaagattagcacttattcagttgagcctcttagcagtcatccttgtcccatcttcttcctccattgtcactcctccaaatccttcccgccataaccaccattacacccaccttctcaaagcttccaaatcccgaatcccaaacctttctccctctaacttacctcctccaccttggtcgtcttctcgctctcctcccctctccaccgccctccgatgggaccccaccaaaacccacccacgaagcttggccgacttcgccaacaacctcgctcgagatgggaagcttgtagacttcgcaatggtggtcgagactgttgcggattcaggcgttgaggcgtcgcagtttaagtctgcgctgagagcagattttgtggagaagggcctttcggaatttcttcgagacgggaaagttcagagctttgttaatgttttgaacaagttggatgagtttgggtttcctcctttggagatctttactgggtcggccatggacttgcttaggaaggagtgtcgagggattttgaaatgccgtgaagtggatgaactagttgaactcgttgaggttcttgcaggtaatttttttatgttccattttgtagtctaaacatttttttttccaattacctaaaagaacaatttttatttcaaattttttatcggtaaaggtatggtgtaagagttttgaggctgtttgggatgtactttagttattg

SEQ ID NO: 208190 - DNA, 704 bp, Cannabis indica
ttagagatggagagaaaatggctgcgttatgcgtggcatgtaatgtataacgttgaagagagagaaagaaagcgctttggctttttctaacttctttacaaaaaaaaattatcaaacaatatattgatttcatatatatcctcttctctatcttatcaacaaaaataatcaccacctatctttactatatatgctcatgataaataaaattaaaattataacatatattattttactcttaaatttttcaatctcttgtaaataatttctgaattatatattcacaataatataaattatctttccgtcaagttttatcataaacatataaaataatgatataattacttaatttaatattaaaccacttgaggcggactcaagtagccatagggtgggtgtgtgcagggcccggccctggacatagggcgggctaggcccgttcctagggcccacccagcctaggggcccaattttttttcctcttttaaaattatacattttttttaccgattttgaaaaataccacattttttctaacataagggcccaaaatttttttttccttatgacccactttgtttgagggccggtccctgggtttgtgttttagaggtcctggattcgagtcccaagtaaaacataattgcaatatataaacgcttaaataaaaaaaaaatacttaatttaacattaaaaaaaat

SEQ ID NO: 208191 - DNA, 777 bp, Cannabis indica
ttttttttttttggtatatatagaaaggacatatatactgatctaattatttaatttccatttcttcttgatctcttttctttgaaaagattttgtattaattaaacacaaattaacctaacaaaaattttgtatctacatattgaatatgtatagtgcatgtacacctaattaattaattaatgtttaacaatgtttgcaaattgcatgcatattggtctcaatcattataattagctaataattattttttaatatatatatatatatgtattgttttcttggattccttttattattatctgtctttttcaattggatatgtacaaaattacaccaataataaacctaatgtaaacaatttttattgagggccaaataattatcagaagggttgaaattaatatttggagttaaataaattaaaaaaaataattaattattgatcaggacaaaattatcatggagttgaacaggatctggttttaacaaatgttttttttaatcacttgttatataaagtcaataatattttatttttcttaataattcagaaagttcttgaaaattaaaaattagggcaaatgtgcatgcatgcaactgaaatgggtaatcattaattaatttcttgatatatattaatatatacatgattattgaatagtatttttgagtaaattttggtaaattcaaaacaaaattatgttagaagaacatattatatattgaattgaattaactaatacattatttgaaccattaattgctacaaaatat

SEQ ID NO: 208192 - DNA, 631 bp, Cannabis indica
attatatagcttaaattttacatttgtcataaatatgagaaggtacgtggaagagtataggtgtataagtatacttctcaattattatattatattaattagctttaaagttgttatgaggtttaattaataaaataataaaatagaatataagttataagaatgaaaagtcactattttttttacatgattaaatgaaaaattaacaaaaaatgagaaaaaattgatagagtgaagaaaataaaaggaaaccattataagatgtcacatcacattgtcttgtaaaaggattatataaatgtataaactttttttagagataatttgtttgttacttcgtaaattattaaagtaaaataatacattcaaaatgttattttcatgcataatatatatagctgctttaaaattaagtataataaattgcgaaaaaaaaaatataattaacttgttagtaaaatatcataagatattgtatgcttttaataaaaattagtaaatatgaataaatggtatattaagagaattggagatgaaaaaaaaacattatataaatagttgaaatttaatatgtttctatttattagttagcatattaacataactaatatttatgaaattaaagctagaa

SEQ ID NO: 208193 - DNA, 813 bp, Cannabis indica
gtttcaacttgccaatagaattcgatactaacttcatacttgaacgttttaaagccaaacagcgaataaccttacaatttgatattattgcatcacaaaatgtttggtccttgaaaataccaagaactgatcgaaactttttggcatgaaccaacagaactgaaagttcatatgctgaataagtattaccataaaaagacacatgatgagaagtttccttgatatttccttgaccatttgaaattgcaaaagtagcacattcctctcctgctacttgaacagcaagatcatgcatcaaatcatgcattttgcatttctctacaattccacattcatctacttcgacatcttgaaaggaggatccttccaacagaatcataaccattcataacccacgtcttctaaacattgatcttgacttggatccatgaacttgagaaatccttgccccatccaaaggttattaaagtctcacatcaatttttggtctttaagaaataaactacaattggcaaagcaaagtttcaaatgagagggaagatgatgataactcaatttgagggtggataagatatcatcttcactttgatatgttattcttgagaattccttattaaaggatgaccattctgattctaaacttttcccatgtaataaattacctattgttttgatggcgagggggattcctttacacctttccacaatctcctttccaacctggacaatgctagagttatctagctcttgtgagccatcttcaaaagccacctttctcaacaaagaccaggattcaacttcatcaagaacccc

SEQ ID NO: 208194 - DNA, 1087 bp, Cannabis indica
attttattcttagtttaaatatataaattattccaaatttttttcctattaaaaatcatggtgccaactaacattgacaggtaatatatttaccgaatcatgtccactagtgacaataagaaaatacaatactctaataatttcattttatgaccaaattaatcaattatgaactatattatgcgtactaattaaatacattttcaaatgtcaagtagttaagttgtagctagcgttgatgattatttcgaaaagtactaaaggtcccaataatataaaaagaatgtgtaataattcagaaattaataaattttaacgttgctatttgctagtcgaaaggaatggaatttatctaatattcaaactatctagcatgcatatgaaactagtgttaattattcaatatatatagcaaaaattattgatttttttatatccatatataacaagaacaaatatatatatatatatacaattaataaattgataattaagtaaactaatgaactcgtctatcatcacaattatatgcattatattaatatgtatgtgattaattgagaagattaaaaaaaaaagaagtagaagaaggagagaaagcttactaagaatcaaggcaacttgtgggacagtgccgagcaagtggaatatagttgctaccaaaaaaaccagttccgaaggtctcaaagaaaaggttggaaccagccgtaatatattgctctcctaacgacagcaaaacctcatacacgattatcatgaaaagcatctcccacaaactactcgtacaaggcaagaacccatacattggctcacagtgctcacactcaaaaccagtactcacgcccaacgctgtcgttttcggactcctgatcatcatgcccatcgctgccattgtcgtttcgctcacacaagggataataatgatcaggagaatcagaaacagcaagcttgtgtttcttgccattctttctggccggggcatatgatgatctagtgagatataaaagaaattaccaactctatctagctagctagcaagagatcatataaactaacattttttacttttgtttattcaaagctggga

SEQ ID NO: 208195 - DNA, 816 bp, Cannabis indica
gcaacatccagttggaactaaccccctttcaaatccatctctgggagtatataatgtgttttatgtttgttatggaaatctttagggtaggtggatccacttctcggcctccaacactggagggagcgaattatccttattgcaagaccaagataagtgcatttttcaaagtaattgataagagagtttggatggttgtcggagatggttggcaatgtccttctattgtggaagaagcaaatccaaaccaatgagcacatggactcctgaagaaatgcataaggctaatcacaattcaaaagctatgcatgcactattcaatgtagtctccacaaatcaacttaaagtaatcgccaactatgaggtagccaaatacgctttggaaaaatggagaataaaaaatgaagggactaattctttaagaaattctaggttgtggtatttggcaaaggcattcgaaaatttgtctacggaagaagatgagacagtagcttaattccatgccaagttgtgtgacatttcgaatgagtcttatgcattagggaagacttactctaatgctaaagttgttcgaaagtgataggtttttcccaataagttcaagtccaaagtcacctctatagaagaaatgaaagatgttgaagagcttgacttggataagctaattgggtcactgcataatgaaatgactcttacaaagtggaatgtaaggtagaagtagaaagaatttgagaaagaaaaaccatagtataaccatgcttttgttcataaagaggatagaaacaaatctcagatctatctggatgtctaacagat

SEQ ID NO: 208196 - DNA, 1538 bp, Cannabis indica
aaacttaagtatttatgccgacaaattaactctaaataaaataaaatttaaatcaaaaacttacactaatcaaaaacttaaatttaaaatatgaacaaaacccatatgctccaaccaaaaattatataaaagaaaaatctaagtttgtgaagaaaaaaaaaataaaatttaagaatttacttgggaaagatgaattttatgatgaaacaaaacaaaaaaattcttatactccaattaaaaagtggagataaaataaaaggcaaaatgagagaataaattagttaattaatatttataaattgaataaaaaataaaaaatgagagaattaagaatagaacaaataaggcaaaatgtgatatttttagaaaatgatatttttaaaaatgttatagtttttaaaaaaaaaaaagaaaaacaaaaaaccaaaaagccaaaaacaaaaaaagcaaaacgtgatatttttgttgcttctctttgtagaagttcatttggttgtattgagttgagttgattaataaagtttcttcgtgataaaaaaaaataataataataatttaaaaacgtggaaggtttttttctttaaaaaagttttttattagttattgaattaattaatatttaatgtgattaaaaattgagaaaaatattagagcagaataaagagaaaaaataacactacttaagtttctattacagtgtgaataactgaatattaacgagtacctttaaaaaataaaaagagaaaaaaaaaaagaaaaataaattagtaaagaagaagggcatagatattttttctttaatgtgtatacattttacggtttttttctttaattgtatatatcactacttattcaaataagataaaaattaaatgcaatagtcagtacacctattttcaatagaattagaactttaattttttaaaacaaaaactatttttattattatctaatctcaacgagcataaaataaagattacaaatatatcataattattactattccctagttaaattctcataaatttatattcaagattatattatttaatttttttttttttttgtctaaacaagattaaaaaaagaaaaggatagaaaatttaaatttaaatatttattttatgtgttatatttacattaggagtagacgatatttatttatatatagtcattatatattgaaagatcagaatagaagaagttgagaaaaacgtgaatatcatcactctcaaatctcacttgctcagtctttctctttgggtccgttcacgtggcagacattgaaaccagcatttctctcttcaactttccaaaatatttatttatttattttcattcatttgattatatcttggccagagaaccaaacatgctccgctccgctaacttctccaaactatccttctcattaccgatctccgcctttctctgctccggggtaacgtcattctctattctccttattctttctttctaattttaatttgtatgttgttttgttactaagtatataatgaatatatgtgcctgaaaag

SEQ ID NO: 208197 - DNA, 713 bp, Cannabis indica
gtaataattgataccatataataattagaaagattataattttataaatatttaatatttataccgttaaaattaaactttaagtactgctaaatacccattctttattttaatgaattcatttcttttgacattattaagcttcttttatttatttatttataataaaagtcatcatctgattctgatataatctaagcaacttaattaaataaaggtgatgaaatttatgtacttgtatatagtacgcgtattcgtatattatttatttattaataaccttttacattttcctatataatataattaacttcagcattaatggattgtttggctattcaattattatttgatattgatttgattacaagctataaatatatatgtatatcaaacaatattatttcatgattcattgatttgatatgacttgatcacaaacaaagaaacaattaaaatacatacacattaaatataacaaatttattaattgaacaagcagaattaatggaatcaatcgaaagatatatataacatgatttccttgcatatgttgccatatatatactactcatatatatatatatattaattagttgatataaattataataaaatagaaataatataaattagtttttagttttttagttaaagggaaattagaaaattagcagtcaaactaaggtagcaatatataaatactatgtcta

SEQ ID NO: 208198 - DNA, 599 bp, Cannabis indica
agtatatataagtagatttgattataaaaacgtttttgaatataataacttttgtttgtttgatatgtttttattgtagtttaagaaaataaaaaattatttaatttaattaaatttaataaatattcattgaaaatatctatgatatataatttaaattttataataatcaacctaaaataagtcattttgcaccgcacaaagaattttccaacccaaattataagttaaaagaatatttcacatgtataataacatcatgaattgtaaactatattttgctacctctagcaattaatgatatgattctttaaaagtttgaacgaaaagacatgtttttgactttatagccgcaacttatgactcaaaataagcttataattcatatggaccaatatgtgaggttcaaagaattttcctacccaaaataaaatatgagttgaagaatattcatcgtatttgtataaatagtgttttttgcatatactaatttttattttctttttattgtattatattttgtaatatttttacagttaatagattgaaaaatttattacaaatagagtacatacttacagtaacaaaatcaaaaaaac

SEQ ID NO: 208199 - DNA, 817 bp, Cannabis indica
aaaaaataatacttgggaggatgatgcagatggtatccacggtccgtaaacgtaggaaacggggtagtcaacactaatcaccagcgtggccggacgaacaaccattttcgatgcacgacacaccaggaatcgcactgcagtttgcacttcgactaaaagctgcagggatgaagcaaagggacgatgtgaagaaaaaaaacagggactgaactcaagccaaaatctagaacacaacagtctccacaagcccccggtcatagcaagaccatggaaaaatcctattgggtgagcaattactatgtaatggattctgtcaatctacatattaatggaatttaggattgtttggggatattttatgataaataactccctaaatttttagagaaacttttttggctaggttttagtcgtggttatgcttatgtttacgggtgtttattggagcacatttagtattttttaagcctattcatattcgatccaattatatattgaatgttaaattttaccatccgattcgatccaatcatccaatcgtggattggatcggttatccattgaatgtattatatatatatatatttattagtttaatttgaatttattcaatattttagatctagtattttttaagatcgaatccacccaatactttaggtccattatatattgaattagataggatctatccaatctaaaaaaaaaatgttaatttttatatatacatatatgggtatgctcttaatgggtattacccatgaataggtattttaatattggccattagattaaatctaaaggctcacgtatatac

SEQ ID NO: 208200 - DNA, 774 bp, Cannabis indica
attattaacaagttgtgtactatatggggaatagctgtaaatacatccgtgccaatctgatccgccatatatgaaaagcactcaataatatgagtcgtgccgtgctggcccataaaaagatatcgtcgtgccatgccatactattattttgaagggtaaacccagcacgacctgtaagctcacatttttcgttgctatgctcacatttttcataaatgggtcagtccgtttttttatacgagtcgaactcgggcttcacttttctactattttttttttacaattaatgagttaatcactaaatcatatgtattttttatagtttcaattttgtatagtttttcaataatactttacacataattatataaaaatttaattaaaataattaaaatttaaatatttattagtaaatacatttgtagtattattatagctataaatacgtgtgtgtcggtctggcccgacccatattttgaaaatcccgaaataatatgggtggaaagatatgggttgtgctgtgccgtgccaatattttaaaggataagcccgacatggcctgtaagcccatattttcgtgtcatgctcggactcagtcgtgctttacttgggccgaattcatttttctataaatgagtcagctcgttttcttatactggtcgaacttgggcttcactttttcactattctttttacaattaatgagttaatcactaaattatatgtatttttataattttaattatctttgtataattttttaacaatacttta

SEQ ID NO: 208201 - DNA, 650 bp, Cannabis indica
ctctggccttccaacaacgaagctaagtttttatattttattttcagtctgcttattttaatcaacgttactgacttgacagagtctttttggcggcagcacctcagtgtctcaaaaactttaacggtctactttctttttgttgtgtgcaaattgtcagtgcccagcttcaattattgtagatttgtgtacattataatagttaatgtataattagcgacacaaattaaaatttacattatttttgtttttattatgtttattcaaagttgatagtaatgttatattattaattagggttcataagaagaattaaataggtttatgggctattttggcatagttttgcaagcagttgtagctgtgttatgagaaaaaacaattgtagctgtgttatgaaaaaaaaaaacagttgtggacaacaaaaaaataaattaattttttaagcttcatatgaaattttttgttgaattggatgtttttctacacaatttttctttccataataattattatttttcactaatttttttctttacatttttcctacttttttcctttcacaaaaattcaactttcaaacataatcttagagttctttatatgcattcttttaaaaatatatatatatatatacttaaaataatgtc

SEQ ID NO: 208202 - DNA, 815 bp, Cannabis indica
aaaaaaagtattaaataaattaaaaaaagcaagaacccaccttagagcaaccgaaagcggctgaggaagaatcgagaaaatctttggctgcagttgcggttgccgccggaaaactggtgttggtggctgccatcgacggaaaagaacaaaggcaaaaggagaaaggaggaggaagaagaagaagagaaagggttgggggttggtgggtttctgacagtgagaagaagaagaagaagaaaggaaaaaaaagaaattattttaaaattatttatttatatttttttaaattaaaataataatttggaccaataatatttcgacacgtggcatttgaattaggtttaacggatctgctaacttggagaccaacggacaaatgaaaaacatgaccttgaggactattgccgctatttctggaggttggggacttatctgtattaaactgaactttttggggacttttgccgcaaatttcccttaaaataacaataaaacaaccatggaaatttaacatataaaatttacatagtattttttaaaaaaattccgcctaagagtaaaaagtaaaaaggttaaaaaattcaatatgttagtgtaaaaatctttaaatatatggaaatattcattcatatgattttttttttcaaaaatttaccaaattatgcccttttttgggaaaaaaatatatattttgtggaaaaaaagggttaagaaagtatgcgaaaaaagttttgggtaactagtaataattagttatcttatactgttttcttgtattttttaagttttacccaaaatcatatatatatatatat

SEQ ID NO: 208203 - DNA, 764 bp, Cannabis indica
attttaacattgaagtggaaattaggatggaaattagaatatggcggctgccgccctttcaattcataacctaacattattcctcaaattacactcactttctttttttaaattgcactaccaaattcctttatcctttccttgcatgtattacaacttcttaacaaatatataaatacctctaaatttttttacagtaagatatcaatttgtccaacaagattccactcctttttgtttgttttttttttttataaatatatatatatatatatatatatatgtatatgtataaaaaaaaaagaagaagacagaagaagatgtttttgttttggaataagatgtcataatagcttgaacataaattattgactgtcaatgtgatttccttttaaaattatttcaaagtttgaatgcaaatgcatagcttgaaatagcattacatacacatgacatttttacttaaaattgaagacatccttcttggaaaaagataaacataagaaagaatgggaaaaagaatattatatatatatgcatgattgtcaaaactatagtttgaaatggcaagcaattatttaattgaagttgaaggaaccatatagagcaatatcttttactcgttcattggatttaggtttagttaatatttatatatatatatatataacaacaattattaattaatcctagttattagctacaaatatgaatacaaataacttttcttcatgtccaatgaattaataaatgacatgttttta

SEQ ID NO: 208204 - DNA, 1636 bp, Cannabis indica
ctctctctctccaaacatgtatgtagaaagaactttggtcaattatgcgtaattttggtcaatacattaaaaatatattttctttgcaatgaaaaattttaatttgtttttttttttttgaagaaaagtaatcagtatttttttttttttttgtaacaaattgaattttattaaacaaaccaaatcagtacaaaaccaagccagctaggggtgttcataaaaaccgataaattgaaacggtcggttacggttttcgtacaataaaaattctaaccgaccagtcggttataaaattgtaaaaaccgaccataactgaccgattttcacccctaagccagccaaactggctgctcaaaaccagcaggtcaccaactctcagccgtgacctttacatactgacctgccttgttgtctcttttatcaataaaactcaaaactctatacttaatcaactgtttgatcatcaagctaacactatcaacagtcatacatttagattcaaaaacacaaagatttcttttccaccacacaaagtacaacactgctgctaaaacaccattttgaagttgatttctcaaagtgaaagcagctttcggggtccctttttgcagctccaaggtgttcttcgggcactgaaagttaccaaaccaactgttagttgcagcagcaagcctctttgtgtaaaggcagtccacaaataaatggtcatgtgtctcaatctgcttttcagaaactggacaaagatccaatgcaatattcatcagtttcctcaagttatctctagttaagagatgattattacacacctaccaatagatgaatctatgtttgggcataatcaatctatgtcaaacattccttgcataatcaactcttggaactgtcagcaggtttgtataaaaaaagtttggcccgaaacttaccttttttgacagcttgttgaggctttgctcgttagttctatgtctgagtctcaacaattttttgaagtaccaactcatgtaatcaaaaactttattaaccttcaaactctattatcaaacaagatagaaaatcagaagggacatcccccatactgaaaaacatgatcaggataaaaactagaagctcttgcgaaagtgtgagctactaagtttgttgaacgttttacaaaatagatcaaaacattattcaagtccataagtaaatccttacaatcttgaataacagagccaaaactaaagatcatggtgaaaggacttcagatagcttgaatggccaccaaaaagtcagcttcaagaatcccttgttgccagcctttgattttaatccaacttaaagcctctctaattccaatcgcctccgctaactcgggccgaaaacactcccggataagagcgtgtgactccctcaataaggtaaccgaattcattcctagcaacagcaccataaccatagccttgagagtcttcaaaaattgaagcatcgacattaaccttgataccatttgatacgggggggctccaccgctcggccccatcaccagcagccagctgagatggctccacaggagtttgagcggtcttccattgaccaaggtagtaacggcaaaagcaacagtagcaaaagcattaggcatcttgtattccacacttta

SEQ ID NO: 208205 - DNA, 673 bp, Cannabis indica
acttatttcgaagtataatttggattctcaagtattttactgttactagacctaatgtagctttaatcatcaacaaattgagccattcatccacactcctactgtacattgagaagccaccaagaggctgtttcagcaccttaaaggcacaatttttgaaagcctcttactcaaaccagacaagacaaggctattagaatgcagattgggctaataactctgaagattgaaaatcaagtagtggctatgtcatgtttttagggagaaacttggtctcctggtctactaagaaacaacctgtaattgcgcgctctgataccaaaagtgagttttgtactttagccaatgttgtgtctgaagtcaaatggcttgtcttgttgctcactgggctttatatccaacttcatgcacctccaatattgtgggtggacaatcaggggtagcaacattagttgctaatccgatctttcatagcttgttgcaagcatatcgaaatacgatatgcattttgttcatcctagcaaactcaacttcatgtttttatgtgtgccttctattaaccaaattgcggatgtacttaccgaggttttactgtgaaccgattcaattacttgaaaacttaaattcaaagtcgtctctactccctttcgtttgaggagataataactaattc

SEQ ID NO: 208206 - DNA, 690 bp, Cannabis indica
ttaatcatcaagctgttaattagctaggtaagtagggtttattatttatgtgagcataatgaaagataatcaacaaccaattacaccccttcctaatggaaacaactcatttgttgctaaaactgatcatgataaaattgatccaaagtcttcttcacaaactgtgaccatgccaactccatcccaagtactcaccacgccgccgccgccgccgccgccgccgccgccacaacaaacaccaactgcaaagttggggtcaccagtgattatgcccagttcaactcagaccatgacaccccgacctggtagtttctattatagtttgattttttaaaagtatatgtgggaattattaatactaatatttgtttttctttttgtatgaaaaatattaatattgattttggttctatatacagtaaaatttgtgataaaaaaaacacatatctattctatataaaacgtggctatataacagaattcttggttatgagaaattattgggtaaattttttttaaataaaaaaaatacaaattattagatgttgccacgtaaagggttaacattaatgttgttagttaaacctaaatataattaatccacctaaagtgttgcaattagtataaatttgttcatattgtttaattttttattaaaaattatttttcaaaatttttgatattttagaa

SEQ ID NO: 208207 - DNA, 552 bp, Cannabis indica
tcacatcaaaaataaaatatagattttgaagtcaaagcaagaagaagaaactataatcatgtctagtactgctcacttaattaaacctagtaacccaagatctccatcatgttattacaagtttatgagctttacactaaagatattcactttctcattgagcttatccatctaaccttatctaattaaaaagataatcaaaggataatcttcaacttttattattttgagtttctgtttttcaactaaaagtttaagtttaatatttttaaaattaatattgaaaattaaatatttatattaatatagttttttttttgtgtaaaatttttacatgttgcctatttatagcaaatctagtgtgaatatattgaaccattccataattggtgtgaattaattatacttttttgatttttgtgaattaattatatatacacaatcattactaataagtacaagattttagcaccacggccgatcttgaattgaaatatattattggtaaaaaaaaaacgtttttagatctttactataaaaataaataatatt

SEQ ID NO: 208208 - DNA, 881 bp, Cannabis indica
ctagctctctataaataatataattgtaaatgtgtattaatattctcaaaggtgaggtgtcatatattatataggtttcgaagacttttttaaattaattcctataaatgctggcaggcggcccctttaatgcgtactataggtcagtactgttaattttaaattatatagacactttgactttaactttaatttttataattcgcctttagaaaaattatttatagaccaaaattaactaataatgacatgtacacatatagtgacttacaaatttaatcttagaaatattattcattatcaatgtattataattatatagcgaggttaaggtccatagatatggggatatagttaagtatatataatcttctattatacatgagttcaattataaactacatatatatagtttaaggttcatacttacaataattaaggtcaagtagtagcgaccagccgaccacatttaaaagaatcttgcacgtttgttatcactatttatatatactgcctttgctgccttaacaaatgggtgtatgcatgttataaatttataaaacaccataatatatagtaaatcacatacaatttagaacttcatgagtaattgaataatgtagaagacacaacactaacttactaattatgagataattgcttaattgagtacttgcttttatgagataatatgagaaatgatgaatgtgggtagtacaacactaacctactattggtcacactcttcactaacctactaatatgtttgagatattggtaaaaaaaaaaattggaaaaatgtaaggaaaaaaaactagaaaataaaaaacaaaaaattctcatatttagtataaaagaaagtgaaatttacatggtatact

SEQ ID NO: 208209 - DNA, 526 bp, Cannabis indica
gtccagtttgctggtagtgtccagccttttaaacctaaaatggtttgtcaccattgtggtatcactggccacatcatgtccaagtgttataggctgtatggatatcctcctggacacaaattgtatggcaaatttcctaatcaaaatgttaaacctgttggaaatagtaatgtcaagccatctgctgcaaatgttgagactaagtttgaaggaaatgagaacagcaatggagatgctattaaaggagatcaagacctagtttcaagtctgagtgctatggagtgtcaaagactaatggaattattgtctcaaagaatatcagatcaatctgctaatccttcaaaagaagcaccacttgtttcttcatttttttggttgagaacctttttcttcctaaatcccaatagattattgatactggtgctacgtatcatggttgttttgatagaaatttgtttaataatattcacactgatagttttattactcatgttaagttaccgcatggtggtaatgcaagagtaga

SEQ ID NO: 208210 - DNA, 784 bp, Cannabis indica
aaagccttactcatatctagcttcagagccacaataccatttcgaccatttgtcctatgcttgatggcatgaactaattcaacagccaccaagatgttatcttcaatgagtctatttggcaggaaggtactttgtgtttcagaaataacaatcaggagaacatgtttaaaatgagctattaagaccttgaagacgagtttagagatggcattacaaaggcctgtaatttgccattcgcttaggatttttcatttttggaataactttgatgatggttcggttcattggtgatgggttagaaccatcatttaaaacacccaacattgctcttatgacctccgtgcccacaatatacaattgtgttggtaaaatatagcgacatatcataaattctcaggcttttatcagatcccattgaaaataaggctgccttaactttagaagcattaaaggttgtaagagcacatgattcatataatttgagacagtgtaaggaatggttgctaaagtgtcatgtagggtagattcatcaagtgtacaacttgaaaaatatcagcaaaataaccttggttaacactagctatctcatgcttggaagaaacttttgcatcagaatcagaaataaaaatttaatttgttgtctacttccttgcagaagatttagcgtggaagaattttgtatttcgatcacccagacccaattaatcaactcttgatcgctactgccaatatatttcttcttattccaaaaggtcatcaataatcacttcaaagtgttgaagag

SEQ ID NO: 208211 - DNA, 1256 bp, Cannabis indica
atatattttgtttggttatattatgaagtattggaatgacgttctattattttagtagaatgattattctatatttttaaataaaatgaatgacaattataatgcaagataagaaataatttaataattttttttataatttttttatttattttaaatttgattccatttaattcttatttttattcctattcatataattttattcctccaatcaatcgtcacctaagtattgataatatatacttttttttggtttcgacaaatgaatactttgacaaatatatatatgtattatataaaaagataaaaatataaaaaaaaaaaaaaaaacatggacagctttatttttcaaaaaataatttcttagctttgatttatttataattttacagtctaaaatttttatttacaaaaatataattttaaagttttaaaattataaaaatataattttttttcaaaaaaaaaaaaagaaaataacttaaatgagaaattaacctcacaataaccttaaataaactataacactcaactaaaaacaccgataaaactaatatataaaaaaatatataaaataactaaaaaactaatatcaaatattttattgaagtacgtatttttcgacaaaaaaaaaattcaaactaagaaaataaaaatttctccacatcaacttattttattattttttttaaaaaaaaattagtctattatttaaaaatcataattatatacattatatatataagtaaatatgataatatataattttataatttgccccctcaaaataaatctgttaacaatttgcccctactttttattttttttgccccctacttttctatctactattatagtcaatgaatcccaaccatacaataatttaaaaataataaagatatatatttaatatatgattaattacacatatacattaaaaaagagaatgctactttatttgtttgacatatcttgctaggtgtttttaaaattattatagctgatgataagggtactagtggagtctagtactttcttatatgttaatgtcgttattgattaattaaatatcaaatttcatataatttaatgtaataatatttagaaaataatactaattaatcacaaaacgatatatctaaatagtactagacattactattacctaatagtaatgttcattaaaaaaaaaagaataaataaaataagcataagcatgtgcccacatatatatccttcattgcatctgcatt

SEQ ID NO: 208212 - DNA, 561 bp, Cannabis indica
acaatgtcgattgtggcaacaacgtaatcttgaaaacggggatgtcgagatctcatggacaactatgacagcaatggatacttagcgacgatgatatgattgtgtaaagttatgagattgaattttatcgcgcatatatatggtatcaatttacatatataattatttttttcttttgaaactttaattagaatataaaaaaaaaaaaaaaaacaaaatttgaaaatctaaagatattttctaaaagaaaaaatagattagttgttcaaaaaaatctattatttttttcaattaattaatcttgttaaaattttaatttattaaaaaatagaaaactaataaaataataaattagaaagagagaaaccacaaaaaaacatatgtttgttaatattgagttgtgatagatgcaaactcattatcattagaattctatttcactcacaatttttaatatagatattttaccaaagactatggagtaaaatatagaaaccactaaccttcattatcaactttcatttattttgttaattaatcgtgtcaatcatcctgctcatg

SEQ ID NO: 208213 - DNA, 781 bp, Cannabis indica
ttataattaattaaaatctaaaaaaaggaaagtctatctattagaaccttgctattacgggttaaagaaaaatgtaaaccatatagttacaaaataaaaatgtaaaccattgaatagtcacccatatatatatatacaaaaatatatatatatataaaaaatatattttaatatatactcactcgatgtctcgttgttacatcgatagtcgattagctatacaattacaagccatgtgcattatgcgtataaacccattcattgtgtttcttttgccaaatctaaaacaatagttaaatgggatccctcaaaaccaaatcaatagcagtactagtgatagtaacaataattaatatattaaaagaataatgaagacataaaagtgatattgtatacatgggatgctcaattaggattatgaatgccaggaatgtaggttttttgtcgacatgtacccgtctctagttcatgctcatctctctttttctttcttttatatctgtaagatctacattctcaacaaatacaattagatgaggaaaaaacaatgcctggcccatccatggttccatcctcttgtcccctagtaactaataatgcatatattatagcaggtgtaactaaagcatccaattaagcatcctatatatcttcacctttctcattccctttgattgccctccctcagtgctaatgtggaaactgagtctaatggctacttttaatttgtggagcaattaattccaacccaataaaacgatttaagtctcaaatgttacat

SEQ ID NO: 208214 - DNA, 1424 bp, Cannabis indica
aatggtagtcagagaaggagaaagggcagcgaactatccaagcatccttcatggcattggcaacccagtcagctttgatagttttaggggtcaagatttttggcaacaaggaaaaaagattgaagggatgcatcagggcgaaccgagatgttgtcaaattcatgaactaaagcttcttcttcagtaagattaagagtttagttcgtggtgatgagaggagatactcatggctaggggttgggagggaattgtagaaatatagaacaggaaggaaaataaagagtggagaggtatagcagtaatcccataaatggttaaccttaaatagacaaaaagaaaaagagaaatacctggatgaaagaggcttcattacgaaccaaggagaacccagatcaggccatcctagccatagctctggacttggaagagaagatcttttactgtagaatatcccaatagaagaaggatcgaagggaattaaatggctgattggatggtagaaaggattttggccaaagattaaaccctacagcaataaattgaactcgagaaaagagggattagcagccaaaattaaatgcacattaaaaagatcctctttgcttctgaaatcaacacaaagagacaaaagaagactgctgaggagagagaggagaatggtatcaacaataaatgcacaaaaatgaaagggaagagaaagattaaaaacgagaaaagaaagcaaaagattaaaaaatcaaactggaagatgaagccatatgaagagggaggaacccctaggaagtttctagagcaagttggagaaaatctctatttattatgatagacttgatagtttacattaactttgaatatgatgatgatattatgagtttatcattaagtttacgttaatttatttaattgtcatattatgataataaaatgtattaatcaaatgggtagtagttatgtgaatgaaaaggaaattaatacaaaacatgtttttatattggagaaaatgataagctcaaaaaatattagaaaaaaaagaaattaatttttaccccaaaggtaagtatcatgatcaaataattctaaaaaataccaacaaacttccattattacaaatatagaacccttagcatttatattttgcacaacttatattttaaataaataatagaaaaacatttcccatgtacttgttgttgttgcctccattctttaaaaatgattatcaattttgcatttctacactaatgagatgggacaacaatctctataaaaaaagtatatatatagtaagatcaagaaattatacaaatattattttaatttcaatgaatcatgttaatatttgatgaggtaaaaaaagtatatagtatgaccaagaaattacacaaatattatgaaagatgaaaaatgagaaactatctaatgtt

SEQ ID NO: 208215 - DNA, 998 bp, Cannabis indica
atatttactattttgttttaacaatacaacaaaagaatattttgaaatggtataatttgatattttggtaattgttttggtgtgagaattttttttaatacaaatatattatcacatattaaaataattgaatcaactcaattgttgaacatatttatatataattttatcggatatctatataaaaaaattatagaaaaaaaaaataaaattaagaaataataatttagagatattatatataaaattaaagagataattctacattataaattataagatagggcatatataacttactattaaaaagtaaaaattaaaatatataaacacttaattatttttcaaacttgtatttaattaaaaaaaaaataaacaaacgtagattaaaaataaatgtggccacaaacatgcataatatataagtttgtgaaagagagagagtgagagatatgaaaaatgagaagttttgagaatttatagaggaaatattttattctatcacttatagaactacataaatatatacacacacaattatttaaaagataaacaaaaaagaaaaaaaataatgaaaaaattatacgtaataaaatttatcaataaagctattgtattttgtatctcactcttaacttgttgtgattattatttctttaaatctatatgtgtatatatagtgataaaaatacaataatattcaaaagaattatgggtaagtgaaaaggttgtaacttaagcttttatgtttatgtatttatatatagtgataaatatgctggaaatattattaattaagaagtggaaaagatattattaaattatttattatttgtggtgattatatactggtgcaattgatgttagttggacaggttttactgttatgttagttagtaaaactggttgagttagttagctcttgtactcttttattcggtctatatataaatgccattttgtaattctttcaaagagagattgaggggtgtgagctg

SEQ ID NO: 208216 - DNA, 550 bp, Cannabis indica
gtttggattagaaaagttcttatgggataactggctgaaaaagacatttatgactaggatatggttttagggaaaatatttaagtgtggctgtgacatcatggttggtttgctttgatgtttacttcagtagaagtgttatctcagtgatatggcagtcttgtcttgttctaaatatgttccttttataaaacgaacatgtgtactaatgaaaatatcttttggttaggtgtatgaacgcattaaagctcctctcctaacactagtgagttcgggtagtccagagcaatcttatgcagttctaagccacttgcatctcttggtgatgcgagcaccatatatattttcgaatgattacaagcatttctattgccagtacaatgagccaacttatgtaaaaaaattgaagctcgacatgttgactgcagtggcaaatgagagcaacacttatgaaattggaaatcgaacaacatttgtatgacatgtagaatctgcatcctgttatgttaggtgacctttccctggtcgcagactcataggtgcagatattc

SEQ ID NO: 208217 - DNA, 1534 bp, Cannabis indica
atggatgaataactctcttaaaatacacaatatatatataaaataatatttttctatctacatatatcaaaaaaaatacagacaaaaaaatattacaatattatatattctaagttgttaaatcaaattgcaagttgccaacaatattggagtagtcttttatgttatatacacaatattgttatattagaatttgatatgtttgctctattaataaaatatagaatatgataagataaggctttaataaattgcgtccatatgcaataaatgatttagatcgatctcttacttttatgctactttttgttaataacctaataaatatttatgtagtcagtatcatgaatcttttattataattttttagttaacctttatacttaaaaatacttgataaatttgacccaaaaaaaatacttgataattttttttaaaaatttgttattcatagctagcggtgttcgttataaatattataatattatttctgtaattttttaaaatattttgaatagtttttgaaaatatatttaaaacaattttgaacccacatgataaactagaatattaaaaactctattttccataatgtaaactattcgaaattttttagaaatttacatggataatactgtaattataacaccactataaaaaaattaagaaaaaattaattccggtatatgatttcaaacgtagaaattcactaacacaaattgtaataaaagattataattagcactcctctaatttttttttttttttgtctaagaaagttaataagtaatctcttgggaaggtaagtaatatattgaaatgcatgtattgttagacagagttttttcattgttttattttagggttaatattagattttatgttttataaaagttattgaatggatcctctgttttgttttgttaaatgataagataaatcttgtattttttaaaatggtataaataggactctgaactcaattttcgacaatttttttaatataataaacttgaagacaattcataatacgaataaatacataaacataattaattttgtcattactaaagatccaatcaataacttttgcaaaatacaaaattcaaaatgatatttatttttattttattatcttcatcttaccatttgattctaatttatttttaatattaccaaacatccctattttaattaaacatataatataaatagtctagtacattaacaaaattaatattaatttttatattaaaattgatttaattttcataaaaataaaaacatataaataatgttaattaattaattaaacgctcagaataaaataaaatattaaatattaactattaaattaaggctttttttggctgatctatacacctttttttcccaaaaaaaaatattaataaaataattattagctactttttagttgagtaatataactaaaatttaccttttcaaacatatttctttaatgaatattggtcacaaaaatattttatttagttgattttccacacataggaag

SEQ ID NO: 208218 - DNA, 879 bp, Cannabis indica
attttttttatttattaaataaagaattctatgattatttttttttttttacatttttgaatagaaaaatagtaaaataattactcatctttttattaaaaaagtatcaaattttaaaatttaatatatcattaaacaagatatacttgcatgcgcgagtttcctaatattattaaagagtgatagaatttataattattaaataattaattaaatactgttatcgatatatttaaacagacgtagaaattatatttaaatagaaagctaacaaagaataaaaacaaacataaaaaaacagagattacacatcgtatcaacaattatttcaaattgctactaattaaaaaaacaaatgtgaaaatagtgttgaagaaacaaaactttttgaatgataacaaaatatgagaagttaatttaatctcacaaataaaatatttgaaattaaaaatagaaagataaaataatgaatttattactttatttatttttgaaaaaaaaattaaactctattagataattcctaaataattgttttaaattaatatatatttttttataagttaaaacatgtgatagcgatgtcattattttttattatgttttataatattctgaaaaaattaggcatatattaaaacaattacaacaattgaatatgttgaaaaactaaaaaagattgatatatatgtttaaaaaaatagtagaccgcatgtgttaaaatgtaccaaaatgttaaaataagaagtagacttattgagttgtaatgtttttatttacttgggacattgatacacctaataattgggacagggaattgggatccattttgtacagggtatgatttcactttgtcccaattattatccatctcagtgt

SEQ ID NO: 208219 - DNA, 707 bp, Cannabis indica
atgactaagtagtaacggattatagtgtgcgcaatttggattttcctttgcagctgcaggactgcaagtgcttcaagaaaagcatctcattcacagggatttaaaaccacaggtatttttctttcttgccaagaagctggatttatatggttttgcaggctatttggatgattttttttttttttttgttgttagtttaaatgggattcatgattctatgtcattaactatccgagagtttgtttagtttctggtcatcgggtttccaggctgtggttgattagtcaaccgtggttttacatatttggtttttggagtgatatccgcattgttttctgtttaacttgcagaacttactcttgtcaacgcatgaatccactccactactgaagataggggattttggttttgcaaggtaaaaataatatgtgataggctgtttggctttgtgatttagagtagttatggagattttgacttcatagaattattctttgaaagttatgggactagttttgatgtttacttgttaaatttgaggtgattttgagttagatatcacgtttggagctttttaaagcttagtcaaaatgttaatggtagtttccgtttaagggctcaattttaatttctattacgtaaggattgtagtatttatgatatatatatatatgtctcctgtaaagttacaaataatttggataagt

SEQ ID NO: 208220 - DNA, 801 bp, Cannabis indica
agggtttattttaaaattaattgataattaaagtagtaattcatacattttatatatgttaatgtgagttatgatacactattctcacatttgagcttgaaagtgtgagtacaataatcgacttttaagagacaacgtcagggccgaaatgtgacatattaaaaaatctcacaagatcaaatcgataaatatgtgagtatatatggtggaaaatttggagatacaacataaacgtttaattgcgcgttgataatatgttaagttccatctcaaaattaattaataataaaaaaagtaatttatgcatcctatatacgatattatctttctacatattagtatgagactatttagaatttttatccctcaaagattaaaactataaaatcgttctcataaaaccattttatctattaaaaatttcttctaaactattcacaataatattgttaaaataaataattttgttaaattttatcgcattgccatataagccccgcaagtactatttgaatgaaaattcttgtaagccttaagaaatttattttcttatccgtaattaattaaaaaaaaattgaaaaaattattttgttttattagtaattaataatgaaataatttttttaaaatttatatttacatgtgtataaaaataacattttaattacatcaatatattttgttaactacataaaataaaacttttaacaaaatttaaaataatagaaattgggaggaattttaaggtggaaaatattcagaatagagtatgcaaaaaaaattccattaataattatttaa

SEQ ID NO: 208221 - DNA, 554 bp, Cannabis indica
aactcgatcccaacaccacttacgggctgggtccgaatctcaatccagtttgggtccgagtttgagtttgggtttgggtcttaagtctaggttcatgtcccgggtcttgggtcccgtgttcgggtccggtcttaagttcaggcctcgggtctttggtctcaggtttgggttcgggtctcaagcctccagtccgaatcttgattcttgagtacggatctcgagtctcgactttgagtcccgggcttgggttcggattcgtgtttgagtcccagaatctaggtttgaattcgtgttagggtccaggttcaatctcgggtccaggtttgaatcccgggcaagtccggtccgaggctgggtcctaagtcacaggggtttagattcgagttccgagtcttaaattaagttttatttaatatattaaaatttaaatggatctttttgatatgtttactaatgtataaaaactttataccataaataaaatatatagactacttctctcattatcaattaattataagattatcattattaattaattatgagattaaaac

SEQ ID NO: 208222 - DNA, 1170 bp, Cannabis indica
cagaaagaaatgctaacgtgtcattgtactacttaagattctcttttctttgcctaattcacgattcatttaacaaatcttaggtgcaatacatattatttagagtaattggtggccaagttttagtttttatgcacattaattcgtttttttttttttggtcaaaaccctcagaaatttgattgacaattcaaatatacaaagaaaagtagacagggaagttttgttaaaaaaaaaagaaaaaaagagttaagtgtaaaaaaatcaaaatataaaaagatttttccgacaaataatagaaaaataactattatttatttgttcatttattcatactcaaagtccttaatcctttaggcagataaaaaaaaatatatttaaaaagaagtcaaacaaagtatgtgttgagtaaaattccaatcagaaagagaaaaatgtaaaaataccatataaatatataatgtggtaaaactataaaatataaaaagaaaatccagattcacaaatttattttttcttcacttattggagggaacaaagaccgaccccttaatacagttagctgtcataaattaaagatctgaattattgaaacagacaaatgctcaaatccaacggtatctcaagatgtatatatatataatatttagttaatccacatcatattgattttataaatatcttctaaaccaattaaatttatgtcaaacagttccaccttcatgtgaatttatttatgattgttaatactgagaaagggaataagttaaaaaagagataatctgagtttctgctggcatgtttgtattataaatatacatatatttatccccagccattaatttctttgagctgcatgttagaaataagggtaattattttgcgttactcttgagaatatgctttgttttagctgtttttcttttgttgtttcggtttaatatattcccttaattatctcaaaaagaataaaaaattgaagaagaagaaggcaatttttcgtcttctaattcttaattaaataaaagagtcttctagttcatagaaaagtgaaatttttatacaataactaaaacgaaaatacattttttaaaaaaaaattaaaaaaacgaaaacgaaaacgaaaatacgtattccaagattgaatttttatttttttgtttgcagaaa

SEQ ID NO: 208223 - DNA, 985 bp, Cannabis indica
attgatttattatcaacatcaaaagtaagcaaattaatattacttttaaaacgcaggaaaattaaaaaataaaagaattttgggattagtttaatttcaagcgtattatctgtaaaaaattctcttaatatttttatatttttacgtgataatcatattttttttaaaaaaaaatatattggtacttcttatcattcaattgttaaagctttcaatttgaaattaaatcaaccaatttaaagaaaaaaaacgactttacatattcatataacaatataactgaaaacatatataatataattatataaattatttattaattttgcaaaaaaaatataaattatttattaatttatttgattttaagactttaaataaaaattagatatatggttaaaaacatactacaatgtaatcatataaattctctgctaatttgtttaacggtttttttttttttttgttctactttaactctttaaatatgaatgaattagaacctcatactttctctttaattataataactttcataactgttattaattaattattaattgatttaggaattcaacttaaaagtataacaactttaatgtaactatgaaattataaaataaattgtacaaatacttttatatttttatacttgactttttatattttatacttttgtaaattgattttttattcatttataaaaatataaacaacataatctcgaaatgaaaacaacataacttcgaaatggaagcaatttttataaaataaaacagcataatctcgaaataaaaacatcataaccttaaaatgtaaacaccttttataaaataaaaaatatatataaaaattgcataaaagtaaaaaaaaattaaaaatgtcgtatacatggcaattccctaaatatactattgtattttcttttatttcattcatttaaattcctattagtataaatgggattcactccattataataaactag

SEQ ID NO: 208224 - DNA, 562 bp, Cannabis indica
ttacaaccgaaaagagaatgactgagctgatgtacagctggagtaacaaactaacaaaaacagttagaatcagttggtaactgaagttggttgatcacttgtcttgacacaaacaaacttacatcctaacagcatccttatcatagacctactctttattataaaagatcaaacctacactatatcctgtgtggctactttttttggcaaaatacttttgattctactttttatatcatatttaattcttttaacaattacatctattgtatcaattttcatgttccaaagagcatcatttccaccaaatgtggtatattgtcgtcgctaatgtttctaaaaatactttgcgccgaaatctattcaatttcgctctagctagccacttttgtcgtgttccaatgcatccacagttctatttcaacccaacatgaacactcaagtggcaataaaagtttccctattcagtctacaaattggacatttctcatcttggcatatgttgtacttaaacaattgtgatttaaatctcaatctatctaataccaccagccacaacatg

SEQ ID NO: 208225 - DNA, 1121 bp, Cannabis indica
aactctttagtgagtaaaaataacacattgtttatcaattaatgtgataaaacatttagagacttatttataaattactatttctttcattttggtttatgcaaaattaatattacatagtttttatctttttctattatcgtccttagctctatgtccgtcctatctctttattaattgatgtaataatatagtttctcctccatttgcacttttaattagaaataaaaaaggcaaaagaatgggaaaagaagatgttgggggatcagttgatcaagttaagattgacgttgatgcattagctagtaaaatggataatttctcaccaaaacgtactactccatgcatctttagagtgccaaccataccgtctcgacatattccagaagcttatacacccaaagcattttcaattggtcctttccactacaacaaacctcatctccaagccacccagaaaattaaaaatgagatacatgcatgaactcatctcctcctgctttccacattcagatcgcaagaccaaattgaaggatctcatagttgccgtttgtgaggttcaagatgaggctcgggagtgctacgagggatctatcgatatgaatgtggaggaattcgttaatgttttgggacttgatggatgctttctcattgagcttttccgcaggggcgacaatgtggagcttcgaaaatcagatgatcccatcttgggggtgaattgcatgatggcgtctctctggggtgacttagttttgttggaaaaccaaataccttggttggtgcttgattgtttgtttcaaaagattgtgactactccagaagtagtatcaaaggatgagctccctttgactacacttgtcacaaatttcttcagtggttggttgttttcttccgatgtagataataattatgaagagattcacaaatgtgaaaaacaagcacattcttgatctattgagaaactcattggtgtaccttcaactaaaagcaaaaacaaaaccacgacaatatgtaattggaaaatgatgacagctacaagcctacgagaggcgggaataagttaagaaggcaaaaaagtggtatactaactctaggatctctagtatttttagatattcaaa

SEQ ID NO: 208226 - DNA, 569 bp, Cannabis indica
taacaacaaaattaacatattatcaactataaactaatgaccccacaatcatatctacgatgacttgattaacaacaatagcttgactcacaaacataaattattttctgacctttatcatttggaggatttctctgccagtcatgttgtagtttgttgctttgtttctcagagaagttcagttttgagagaatggaagaaattgagatttttttttcttttgttttatcacacgagaaataagagaagagagagaaataagagaattgcatttgtataaatagaaagtgtttgactttgtcacacgtgacctgcctgtgacttactgttcgtttttttcattgcgcgtttctttgaaaactacgcgtgttgccgacgacttttcttactcctaaaaataaaaaattaattactcaaatcagaggatgcaatgcagctaaataatacttaattaaaatataaaaataaacaaaattttgtatttttctttctttatgaaaatggatttatcatttaataaaaggataattagcgcatatatattaatgttttaatttaagtttgctaag

SEQ ID NO: 208227 - DNA, 960 bp, Cannabis indica
aatgtctcataagttgagtacacgctgtgatagaaattcttcttcttatcatatctataagcccactcttattctgtgtgttgagactgatttagaagactatgctgtgaagtcttcatcattgttcatagcaaggattggatgattgatattttgtacaagaagatttgaggatcccatgataggctacaagagttatattttcttttcatgtagtttaggtttaatctatatattattatgttgagatccttgaggattatgactcatattgattaaatcaatttttattaaaatccacttccgctttcaactctgatatggaccattaaaactaacacttggttccttggagttggccaccactccattgttgtgatagtagagtactagtgtttttctatttctggaactacttccaaatcagtgtagaatttcttcaaccaagctgcttccttagctgtttaacaagctactatatattcaacttccatggttgaatctacaatactggtttagttaatgcttctccagactacagatccaccaccaagagtgaatattgacccagatgtcgaattttaactatttttgtcagattgaaaaccataattagtatatccaatagaatttaactcttctcctgaatgtacaagaatgagatctctcgttctccaaaaatacatgagaatgtgctcacaactatccagtgttccaaacctagattagattggtaacgataaataatctcaacagcatagcatatctcaagccttgtacacaacattgcatacatcaagcttcaaacttcttatgcataagggtactttctgatgtcctccatctcatgatgtgtctttggacattgatccttgcatagagtaatttcatgtctggacgataactgtcctttctttgaattctccattgagaatctttcgagcaccttatctatataag

SEQ ID NO: 208228 - DNA, 1307 bp, Cannabis indica
acattgtttagaaatcaatatggcattgtacttagagattatgtatacatcactatttcattgactttggtttgtgctaaaattaatattgcattgtctttgtatgggtaattcatgactcttgcccaattaattgtaattttttagttgaatgcaacacatatttttgtatttttcaatctttgtcaaaatttaaaatttaaaattattatttttaattagttttaacaagtaaaaatattttattaaattttgttaatttaagttttttaaattatacttctttatttaaaaaaatattcatttttaactttatacaataatcaaaagttgaattattcacaataatttataaatatatatttatatttatatcaaagaaatgtgagacatttagaagaaacacattatttagtgtatttttctatgtgggaatgtggtaggctccatagactttttgtgggtaatgtaaatacctttatgaacttgagcttcatattctctcattctcttgcccacatttctatgcaaactaaaacttttaaaaaatatccatacaccttaagatttagaatgttctactaatgatcaaacaaatagttatctttaaatacccgcacattccaatacttcccctcataataaatacattaggagtttatgtgacatgttctaattcttacattttaattcatcaattttgtgcttatcatattttttaatctcatattctaatttttgatgtttatatgctctatatatttatataaacaaaaacatgaggtattatcctataatgatttttatactattcatttgttatattaaaatgttgacgagattgtgtttctttttataattttatatatgttaaataatatgtttctaagtaatttttttctgtaaaagtctcacattgtttacaaactatgtgaggattatacttattgactttaagtaaattaagtattttacattcacttcaatttatccaaaaattattgttatttttcatgtatgggtgattggatacatcaattttacccaattaattatatatacatatatatacatacatattttagttgatcaaatattataaatatctaattttttcctatatatttaatttatttttcttatttacttattatttttgttaatttttttattttctatagttcctttctaatatgcatcttaattaatttatgtataaatttaaattagagtagtaaaaaattgtaagcactaagaaagagaagagacaaaaataatcacttagaataatatattaatagttattt

SEQ ID NO: 208229 - DNA, 1047 bp, Cannabis indica
agatcaccaattcgaaaagtacctgtttttggacacaaatatataagtgacaaattctttacatgattatttttcataacgtcctaatccatgtttctagcccctacaatcacaagtgaataataacttgtacacgtagcttcactcatcatcgtaaataataaatatattttatcaattagttttatagaaaataatatatttttatattttaaaagccaaaaaaccttcggtttttttttttttttttaattataagaagtgattgctatcctagtcgtctttggtcgtccacatgtctatatctggtctcaactattaaggtacgaaattctgttatatatgttatatatgtgtagtcagatatttttgcgccgttactgttactactatttttttccactaaaaaaaacaaaactcataaaagcacttttgttaaattgtattgtacattccctaaaataaaaattactattaaattttttttttgaaaaaaaattgtatggtaagtgatcagtagagtggtggtggtatagatttctaaccacccaatacatcgatctagaccattagatagtgtacacaaatattcgatcagatgatgactctttcttctagggaattatgaatcaaatgagcagcaaatttaagaccctaaaaaagaagaagacaaaactgaattatgatcaacaatattactactcttctaaaataatattaggaaaattactcatttacccttttctctaactagctattttcccctatccatcatcacttaacataaaatgcccaaaagaagaaaaaaaagaaaaagaaattaatgctcataatattttaaaattaattttaaattgaatattatgaaattgctaaatatatatacaccttatttttattttctttttatctttttagttcaacgtaaattcaatggtaaaatctaatctttacctaaaaatggtaagagagttagttaatatatatcaaattatgcaaatcatgacgaagtctaattgtggtgtgtatttattctatgtcaattaa

SEQ ID NO: 208230 - DNA, 605 bp, Cannabis indica
aaaaccaaaagcatgcacaaatagtagaaaattaaagcttctttgaatgccaccaactaatggtattatcattaaacgggttgagattaactttttttcttctttcaaatagatttgtaccttataatttcatatgattatttaaattccaagcaagcaccctctttagctaaggttttgaaacatattaatcatctcacaatctttattgttattttaaaatatgttgatataaatctacaacaccagaacatcagaaaatataaaataaaattaaaaaaaaaaaatagaaaagaagagtaatataccctatattttcttgtgattgagaaagatatttgggatgtgagcaataattggccagtcctccccggtctccctctggagtagtggtgttagccatgaacaattataaatgtgtagttcagaaagagaagtgggtagttcttttggcaagcatcggaggttaaaacaacgtccaattgtcaacttctcaagggaggtgaggtgctgaaaggtggcctcatctaagtgcgtcaagtttaaacaattgacaattctaatcttctttaaagtgatcaaaggggcctgcatgagttgagctc

SEQ ID NO: 208231 - DNA, 1112 bp, Cannabis indica
gttaagttagttataacttaacaaacttctcgtaacatatattcacgtcagcttaagttgaagtgctttggatgagacttgcgcttcttagagacaagtcaaaccgtacgttgaaaggacttcccggataggagaggcaatagctggggtcaaatattcggggttcccttccaagagagaacaactggtcatctggaactccttttcgaagggattctagcttcactgaaaacttcatccgggtggacacgatagacatccaagaacgcctttccggatgacacctatcattccacgagactacttctagatagacaagttaacttttgagaacgccattctggatgaaatctaacttttcataaccaaaacaactttgaagacctttttattttagaggaactataccacaaagggtgttaagttttgggactaagcaagacttgagttggtattagcgtaaattgtgtcaattaagactgaagatagagcaaaaattacaagttacaggtagaagtggtaagttcaaatcaactgttctttataacagcttgctccaagaaaactcgacacattacatgagggctttttggtgtagcataagtattcccgaacatagatttatattttgacaagctgttaattctcaatttttaactagaaaccagtatttttggttttatatttccttagtttctttgttgtgtcccgggtgtggaatggggaatgagagctatgaacacttgttctttgatgtatatttgattggttgggaggttaggtatggcctatgaagtttgctattagttggctcacttggatcacaattcagaggaaagaaggtgttgtctataatacatattacaatagcttatgacctaacatgaattgatgcatatatgatggttattcttttacaattttgcataaaaggatatccaataattatttaaatacagatggtatatatagtttaataaacaaaaagttagaatgttgatgagcatatattttttttctctatttttttcattagtgtttgtaattcctttttctttgatacagaaaaaaaaaaaaaaatatatatatatatatataggtgagtattcaat

SEQ ID NO: 208232 - DNA, 569 bp, Cannabis indica
aggatattattaatgtttgttttgttttggttccatcacttatcactcttagttaattattcaaaaccctaaaaaaagaaggaaaaagttaaatcaattcccacttaataagtcaaaaagaattatcaagtaagcagatttttggactaagtctagacatgtagagcctttatgaacccttttagacagaccatttctttttttttcagagaccattaatagttttttttttcttcctttttttcatgtcatagactttgttaagattgatgatgtgatataaatttgcatacaatattgaaaaaacaatgcacccttttaaaaggctctacctatacattttttttttttttggtatttaagatattttttagtctaattttttttttttattattatatagttattaagatattttgtaaaattttaaaaaattttaaaaaatttaacacgccaaaagtagggttcaaacagtctattttacacgcatatataaaagagtttctcgtacaacaaactgttttaacttgttttcagtgtgttatattttttttttaaatctctcaaaa

SEQ ID NO: 208233 - DNA, 705 bp, Cannabis indica
gaaattgtgagtgggggatgtatggtactaacaatgatgggcagtattataagcaatgatcctaaacataagatggaaatattaggaagggctttggacgacatggtctcccaggtatatacatatcttttatctaacaatttttacaaaatatttttaaaatataacaataattgttaataaagttagtttttttaaaatatatatatataaatattaatataatttattttagattaatttaaatatataaaaatattaatatattatttgtaatcttatttttaatataaggatgtatgttcaattttaatatttttaaattttatttatttttcttaaattttaaaaaatttaaatattgttttttgaaaaaatataaaaaataaaatactaataagtggtttctattttatttataacattttaaaaatatacataacaaaaataaaattaaaaatataactaagtgtacttgtaatattgcacctaacaataacttaatatatatagtataagattggatttgtttatttttttcttataaagtatagtactatcatatatatataatgaattaattaattaataatctgttatatattttagggcataattgaagcgaaatgtttggctaattttaacataccagtgtattgtcctactgcgaaggaggtgagagaagtgattgaagaagaaggatct

SEQ ID NO: 208234 - DNA, 521 bp, Cannabis indica
gcagaaaaagcattaaagtcattaaagatataatctgacataaaacaagactttcaagtaacacaatgagtagtcttatttatagatcgcttaacaaacagtaaagaaacattatttagagaagatcaacaaccgacaatcattcaccaataacccaaactgagatggcatttgaatggagttattaacagcctgaaccaccatcaaagcatctgactcaataatcacatcagacaaaccctttcgtttgatccaacttaaagcttctcccaccctaatcaacttagcgattttaggcttaaccgaaccaagccgacagctggagattacctcaattagcttgccgtccataccacaagccacggaaccaaaccaaatctatgtttggaatcaaaaatggtaccatccatgttaaccgtgatcttatgcaactctagtttacgccactgctcactaccattatcagcctcaaaaactaacaacagacccaacttttgagattgagcaacactccaatgacc

SEQ ID NO: 208235 - DNA, 584 bp, Cannabis indica
taaaagtaacattttttttttttatagtgatacatgtattattaatttataattaataaatttatgggtgggccaaaaaatatatagcagcctttaaaagtattttctatatatcaattgatttttttgcaacttattgtaatatttctcatatgctttaaaaagattaatcttgaaaataaaagcattagaaaaaaaatattttattttattttatagaagtatcaattacctcattgacttttgtactaattattttaccaattattactgtcataataaggagtattttcttatatgaaataataacaaatagacaatatatatgcatgtgattgaatatatataagagacttataataattcatattcaaaaatatttatatatatcttttataatgtagttgacaataagggaaaattataattagtgtgtacctatattatatataataataactatacttaattttgtaatgtcattttcttttaattttgcttagatatataggatcgagtgcattcgaaaaaagcaattacaaacacatttttttcaattttatttttatttttcttgttattat

SEQ ID NO: 208236 - DNA, 1578 bp, Cannabis indica
attgattatattttcttaaaaaaaataatgatagttgagtttaggtattattttttactaggttctaattcatcatttaataaaaaaaaaatatcaaattaataattttttgaaaacacaaagtataaaatgatatttactataaaagtttccttaataatttttttaggctaattaaaatttttacccttcgaattttgatatctactaaatcatgtcccttgaacttttaatgtcgttaaaaatgctccctgaactattgaaattattggatttaaggatttttgtctaattttaataaaaaaatctaacatggatgaaagttcaggggcatgatttagtacatgtcaaagttcgaggggcatgacttgatagatatcaaagtctagggagtatgatttagtacataaataatcaaatagtaaaattgaataaaattagacaaaagttcttaaatttaacactttaatattttaggagaaatttaaatggccagaaaaatttaaagagtataatttgatacatattaaagtttatgggtaaaaatgctaattgtaaatccttaataatttttttaagaaaataataaataatgtgttgttgtcgacccgatatccggatccgaatccgagacccatgaccgaatgttctaacaagtgaagtgacacctaaacctttgttgtctctcttctctttctctttcttcagagaaaccctaaaaccttaaaccctaaccttttctctttctgcaacaaaaccttcaacgccatttctgacacccaatcttcttcttcctctcattgctctgctctgctgagctctccaccatgaacaacaagagaggctccggccctaagggatcaaagaagggcaaggcttcttccatctccgacgaagcattcttcggcaacgatcccaagaagcggcggaagaagaccaaaaatgacgactttattgagagcagcgattccgatgacgattttttcggcggttccgatggagatgacggagctaatggggatttggtggaagagactgtggacgaaactaggaagaggttggcgactgagcttttggaaaaaatgaggaagtcggctaaggaagaaggtgatgacgatgatgagggaggtgatagtgataaggaaattgaggaaggtgagagagactctttggttgctcagcttttgcagcagaagcagctcgaggagagtggcaggcttcggagattagttgcatcgaggtaatctcttcacaaaaatgccaatgttgatttttcatccactcattgaagtgtttttcgttcatggttcaagttgaatcacctattagcattgtgagatttgctattaaagactaatcccaataaaaggcgaagttttctgagtgaatctcttcaaatttagtgacccaacttattatcaaatcgaaattcattaggaggttttatttgtaacaatgttgaagacagttcttagctgatttgaactttgtaaagggtaatctaaatcgtgataatcatgcgtaggagtgtataactatagttttaacttatgttaatgaatatgttttttttttttg

SEQ ID NO: 208237 - DNA, 990 bp, Cannabis indica
tctttgatttgtttaaccacctagtctgcattgggtattttcttttgccatatacatctcatttcagcttctccaaatgtgatagacaaggctggcaagagctgatgccattactttcctcttgaatttgctcatttgaactctttgcatccacctggttaggcaggataaattcttattccagtgcctccattctagccaatttgctagaccagaaaaacactgcaatgtccagaagcagccaaagaataagtgctcctttgactcttcttgattgctgcagaatacacaatcaacattatctataatgccaaacatgtgtaacctgtccttagttctcagttttccaagcattgcaatccaaagaatgacattatgctttggtagattgaatctaccccaaaccagttcactccatctcaatttctcctggacaggacaaaataaagagtagccagttgcaatattgtatgtacctgcctcaaatcggtgagtgtccacaagagagctaagctggttttttattgctaccaatcttctccaataccagctcccgtgtatgggtattcagtagcaccactagtttgtatctttgatgtaaaatgtgtgcacccatttaacccataagttttcttcctttttggcaacaacccaaatatacttcaccattgcagccatgttccattccttcactcttttgaagccaatacctccagctgccttcctctgacaaactgtatcccaagcaatggcaccagcaccctaaaacatgtgttgccccttccatagaaatgccctacaaattgattctatttccttaatcactttgttaggtaacaacatcacctggctccagtaagcatggatagacattagaattgaattgatcaacacaactcttccagcaaaagagcagtgtctagtactccaggttcagattctccatgtcatcttctcggctagtattgcacagtctttgctagatatcct

SEQ ID NO: 208238 - DNA, 1022 bp, Cannabis indica
gtgtacgtattatatttagttgtattatatgttttattttcatagaatattatggtttaatattgagttatatatgttcataaaaatatataatattttcatataaataaaaatttaatatactattatataaaaataaataatttgtggtataaatatttaaatttaattttcggttgcaaataaatatttaactttaattttttacggtaataatacttaaattatatttctaaaacttgtattggtacctaatcgtcaagtgtcaaattattattcacttgttatttttttattaatatatttaaattaatttttaaatgataaataaaaatttaatcacctggatgatcaatcaatgactgtattatgactattgacttaacacttaacgataaggtcctaccaaaattttagacatataacttaggttgtgacactgtgtagtcttgtggtccataagtggaagtactagataagttgtgcaatttcacatcatgagactgtgtatatatatgaaactacacaattgaagatgtcttaaaatgaattgatgagtagtacctatattatattgttttcgagaatctatcacttaaaaattcttaaattaagtatgtttaacttgaaataattttaaaataagtgactgtttgagtacaaaacacgttgtaaattaaaattactctaataaacatataatataaaatacaagtgaatataatattacacaataacatacatctaatatcatacataaaatataaaattttgtgtcaaagtatgtgaaaatttccaaagttttgaatgttgtaattgttagacatttatatgtataatataaaatatatgtatgtgtataaacatgcggaataaataaacatatacactatatgaatataaggatcgaaatacctccagccattgattctttgagcattaatcccacataagcttgatctgcaaaagaaaccgaattgatgtggggtaatcgggcttcctcgctctctcaactctcttta

SEQ ID NO: 208239 - DNA, 546 bp, Cannabis indica
atagtactaattccaaagaagaagcttttctctctttttcttctcccatgagtgagttgttggtgatccaattgtgagtgttctactctgtttctttctttgctttggtgctatgactgagaatagtcttgcgaagggtcctatggacaacgacgagagttcgcttactaatgagaatattgaagggttacgattacagttcattgaggatgcctctctggagttggaggccgatcttgagattaatgaagaagtttttaagacggggtcctggcttctttggttgggtcacgcaacctttctaagggccggtgaaacaaatactaacgggtatctggtctatgattgggaactggagaatcaaaacgatggaacaggggttgtgggggttttcttcgacaacttgaaagacaaggaggagattctgagtcggagaccttggatagtggcgggtcagctcttaaacattcgtgagtggccgactgatggtttttggcagggtgtacccatgaataaggcagttttttgggttgagattcatgggct

SEQ ID NO: 208240 - DNA, 882 bp, Cannabis indica
gacacgtttatatattggtacactcagtgacggacccagaatttttactttgtgggggcttatttatcataaaaaaatatttataactacattataatcacttttattaaatttatctaattttatgggggctattctactattttggtttataattattaaattgaaaaatatatatttaattttttaaaagacaatatttttgttagtgggggctatagcccccacattattgtaatgggtccgtccctgggtacacttaatattattatttcaaaaccataaaaaatcatttcaatttataatatttttaattttttaaattattttatttttatttttattaattttaaaatgaattttgaaataaaaatattaagtgtatcaatataaacgtctcacgtgtataagaatatacacgtaaggagtgtatggtggcagttaactggatgttttcttaaatttgctaacagttcagtagtttgaaagattttactgccaaattttgagcttaaaagattaagtgtaagtgaaacgataagagaatttagttgctaaaagtttaatagataataagatggtatgagattatatagcattttcttacttgaaaaattatatattatatataaaaaatcatatacaatgttgtataaaaaagagaaaaatagaatatcaaacatcttataaatataaaagatgtataaatgaattgtaaatatgaagaaaagaagacgtgattaatatacctatgataaatgttgagcgatgagagactgaaatactattcttccactcgagaagagttgataagtgattagcgataaattgtatttatagaagaattttttttaatttaatctttttgaataataaacaatt

SEQ ID NO: 208241 - DNA, 981 bp, Cannabis indica
ggactctggcgctgattctacaggattactgtttttcctcattctgtttcgatcacgtaaaggaaccttttctttttctttttttggtggaaaggaatgtggcttcacagatagggtgtcatgccattaatggctgaaaacaagtttatgcatttgttacttgtgagagtttttatttattttttattattatttggttttgtgtaggtagtcttttttttaagaaataaaaataaaatttaaaattcataaaaaattaatgagatttttaaaaaaatctcatctagtattagaatatttaaccattctatttgaatataaataaaaaaataagaagaaatgtggtgacattccttctaaaccaatcaagtcaacttgtggattactaaattccaaagtccaaataggaaatattatgtgctatccccatgtctgtctcaccatgttaactactattaattaactctatataacttccgttaaatatcaaataaggaaagtaaattatcattattactactttccttttctattttttttaagtctagctacgattagtgtatacttttaattataaaaaacattcttactttctattttttttttttttttgtataatttaataacattagattataaaaaaaaattctaattgaccataaaatcattcaaaaaaaaattcctttttcaaaacgattatacttattggttgaaagattcatggcttataatttctgcttgtatccataacttcattggaatggatgccaattttatctatattatatgtgaaaaaaaaaagaaaacaaaagaggaaactgtactaaaagaagaaattaggaaatgatagtacttattttttaaacggatattaggaaaataaaatgatttttaagggataacaatagatatttttcctattaaaagtaaaaaaaaaaaaaaaaaaaaaaaaaaacaaaaaaaaaaaacctagtatttttc

SEQ ID NO: 208242 - DNA, 648 bp, Cannabis indica
gtgagtttggtaggttttgccatcaaaaaaactagtttatgaggttaagtgtcacaaatcatatagttcatgtagttttgctgctaatatcccttataaaaatttggataatttgtgaccaaactccttggacttctaagtttgatataatctaactcctatactagataaaattgtcattataaatttaattttacaaaataaaataaaaataaataaaagccattacttttaaatatgacattccttagaaaattggtggggaaattctccctttcttttctctcttattcaatcaagtttttatttttttttaaatcttataaattaaataaacaaatataggggatgactcccttactataattctcattgtttaaccgttaacatgtcatgcaaccaaacaataaaataaaataaaaattgtttcatttttattccattacctctaatgaaacgccgcctaaatttatcttttgtaataattatgtgaaccgcttagttcacaatgttgcaaaagtgtggtggctggactatgcttgtgctttgcaccttttactgaaaaattcattacaaattaaaaaaaaaaaaaaaaaaacggaagtttactaatattcttcttttttttaattatttttaattatttta

SEQ ID NO: 208243 - DNA, 479 bp, Cannabis indica
aaaactttattaatttctttaaattttattactataattaactgaagatcactgttaaatatatttttttattatactagaaggaaaataaatgaaaaaagctcattattatttaataaaaaatcactcttaaatatatatatatatattaattaaattaccaacttaaaaatacttgtgcaaatgttctatatattgtttttatgtatttattatgtgtaacccggtcagatatatcaaatttgtttttatttttatttttttatctttaattattagtattttatcatgtgtattctaacaattattttttttccctttgaataaaaatatattaattaatattataacttaaatgatcactatccaatttaaaaaaatgatcataaatagaaattagaattatatatactaatataagctcgatctaaattaaagttatttgaaagagaaaaagaaataattaaagtatcatataa

SEQ ID NO: 208244 - DNA, 727 bp, Cannabis indica
cgatcttggatcgggactgggatctggacctgaacccatacctggacaaactcagacctaccaggacttgggactcgaaccttgacctggatcgggacctaggactcgaacctggatgggggacctggacccgagactcaagcttcgtaaccatgacagggactgggacccagaattaggaccgagatccaggactcgaccctagacccgaactcggaactaggacctagctaaagacccgcgacccgaactagaaccagactaggacctgagattgggattcagatttagacctgggactttgacctgagttttagtaagtgtctagagttgggacccgtacccaaacccgaaccaagactcgcacctttacccaaactgtaccaggacccggacctgaacctagacctggactaaaactcggtcccaaacccgtaccccatgactcgaaacaggaaccgaaaccagaagtagctgggaccaggacaaagaccaggacccagacccgaacttagaacaggaacaagaccaggactcagacctgaagccagacccggactcagacccacactagaacaaaacccgaactgagactcggggcccaaccctaaacctgaactgagctcggacttgaacctcgacctaggaccatgacttggattggggacccagacccaaacacaagacccagaactgggacccaggatctagatttgggacctgagac

SEQ ID NO: 208245 - DNA, 583 bp, Cannabis indica
ctttattcaatacatttgttatcagtctacaatgaaatcctactcgacgatttcatctcttattttgaaatctctttgattgaaatccaactcacactcaatctccaatggtaatcgattgggagatatgattggaaacggtgttaaagtggactgggatgaggataaaccagtatattggggtggctttcttagagttctaattgatattaacattcataccccactggtatctggtcggttctttgatatctatctggggtcaaacggtggatcaaattaaatatggaaagatgggcattgtttgttatatatgtggctgcttgggccaccagaggaggggttgtacattgtcttctccggttactgtggagaattttgaaggaacctctgttcctttgattggtccttggatgtctacggcttctaggtaccatgatgagttttctggtgtgagttcgaagcctctcttggtctcgccctctgttaatcggctggcggtgtctctcggggtggcctgtcgtccgtcaaggtcgtgggtggtgccgaggttcggcttcaaggtcgtttgtcgtccagcgtg

SEQ ID NO: 208246 - DNA, 768 bp, Cannabis indica
acacctttttttttgaaatgatgttgttcacaccttaatatttcttttatagtgtacacaccgcaaaaccccatatgaaacctccatcttcaatatttacagacctaatcacagagcaacaccagaacagccaaaaaccaactactttttcaatcagaacgtaagtatttaaaatttcaatccttgaacaataacataaaaaattactaagacaacattaaatctacaaaataaaataaccaaataaaattacaaaaataaactataactcaataactcttttgccagggaggactaccaaaacatcacgagagggaagcttcacatggaaaattttctcttaccctaaatacttttaaaaaaaattcagaacaaccaaaaaacaaccgttcaaaaatataaaaattaagtattgtaacgtcctaatctataggaacaccacatgcgtgattttataaactaatttaatactaatagattaattaaatactaaaaatcatgataatattaaaacttgactataataaaacactaaaaacggacattataacgacataaaaagcgtgttctagggatccctattataaaaagttttacaaaagaactataaacgatgatgcctcaaaaacataaaaccaaaatacaacataaatacagcccaaaacaactcctgacaactcgacacgtagaccggtagggtcaatatgtacattgttggagaaggcagtcatctcatggcagctcaaacttttccttgcctttacctgc

SEQ ID NO: 208247 - DNA, 510 bp, Cannabis indica
ccgaataattgatattttaagggaacgattgtcaatggtgagggcgttgttgactcaatatattgaagattcattgaattctgcaacagcaaggatgattcttctcgggaggaagctgtaattcatcagcggcttgcccttaagcctcatcaaccaaaactaggggaccataccttcaatattgatgcttcttggaagaacggtattgcaggcttggctgctgtttggagtaacaaaacctcaaactcctagatttctaaagctgatcaatgtgttgctatctctgcattggatggagaggctcactcatgcccttctcatggtgctttcctgcgcaaaggagaatgacctccacaatattactattctctcaaactctatgattttggtgaatgttgttttaacaaagtcgtattctggattggcgactatggaatgtttccctctcaattctgtagttagttggttaatgaattttatactcggcctcgtttggtacgtcatattata

SEQ ID NO: 208248 - DNA, 875 bp, Cannabis indica
aaattttttttaaaaaaaaacttacataacttattggtaaaattgataagcatttaaattgctaattaattatttcaaagttatatatttagtcatctttaagtttacaaaatctaattaattttcatatagtataacagatatgcatagatgaaatagttttatttactacacttgtagtaatatttaaataaaactatataacatatatttaatctttgatattttttattatatatattgattaatatatataaaacaaaagtaaaatttacaagttacttttaaatcaaacaaataatacacattttttttaaaaaaaaataataagataaaataaatgtaactataaaattatttccatacataatacaatttagttaactgaattttaaaaataaacttaacttgttaactaaataaaagaggaacttacaaaaatactgaattttgggatagttttatatttatactgacacatgaaatttttacaaaattagtgtccccaccttaatttttttcttttatactatacacatccccaaaatacatacaaagcctctattttcaataccttcgatccgaaccaccagagaaataccagaacggtcagaaaataaccattattctaatcagaacgtaagtatttcagattccaatcttagaacataacataaaaaatcaactaaaataactgtaaaacaacaataaaactacaaaacaaaataactaaataaaatcaaaaaaatactatacctcaataattcttttgccagtggagacttccataacatcacgagagggaacctccaccttggaaaatttctcgttaccctaaatgcagataaaaataatgcagaacaactaaaaaataa

SEQ ID NO: 208249 - DNA, 519 bp, Cannabis indica
aagtactgtaataacaaaaactatgtccaccaaaagaaatgataaggcacatacagatgacttcaatggaaagcccatcaccattaggttattcaactgtatccataaattaaatatgcccacttgcaacaattcagagagaaaaagataaacgcaaaagggggattccctaaacatgaatcattctcaacttaacaaaatcagaaaaagtaacccacaagacactcaaaatttaaggccaaaaggttctttccccaaataaaaagtttttcttagtccaacatttaatttattcaccaattatcttcatacagagatggttaaattcgattaatacacacctacattcaatacaacactcaagattaacaacacattggctcaaaaacagaatcagtcaaaatggttatcccttttctgagcatgccaatgagaaaaatcaacactaaaagccaaaaattacctagctacaagcaatgacataggaacaaacaacatgaactatttcaacaacaattg

SEQ ID NO: 208250 - DNA, 978 bp, Cannabis indica
accttttactcaactaaagttccatatgctccccacttctgaactaccttatttattcattattcaactatcccaattttctaaatagtaaaacggtgtcgtattcattcttttcattggtaccaactaccattcatcaacctatgataattggtattaagcaataagcaccttaatatcaacgtggcaccttgtaaatcactagtatttttttcatattaattatttaattaaaatatttaacacttaatattaaattacactaatattaatgtattatttcttgtaatctttatattttaaagtacttttattagcactacctaactatattatatcgctattggtataattaatcatcaattttcacataatttaatttagtaactagtatataatatcattaatcatttattagtattaagcactattgatactaaattactataatttttaatctaaagtaatttgttatgtaaatatttaaatttaaatttctatcgtaaataaatacttaaatataattttttacggttataatagttatatttatgaaatatcaatatcaaacagttaaatataaaatcattattcacgtgttcttttattaacatattaaaattaatttttaaataaaaataaaaattcaataatttaaaccaataaaaaactaaattctaataaacatatacctaaaagaaattccgaaaatatctaacatattaattctgttaaaaataaaacttaaatttttatatccaaccaaaaattaaactttgtaacaccctttcatagttggtagatgatattatttatcttttattctcttttcctgtagcaaaaaagcagctcatgctttagtaaaatttgctcttccattagaagatattttttggttggggaaattccctccccagatattttttggttgggggaaattccctctccaatctactctgttgttcaattttaataata

SEQ ID NO: 208251 - DNA, 706 bp, Cannabis indica
gttacaagattcatctgtcgagttttttgccctgagttttagaaccctataaagcatagaaaaatgactacagaacgacaaagaaccatactcaaaccattacaaacaaaattaacacttccaaggcaaacaaaaattttccatataatcctaccctagaaagaaaactctatgggcaacacttcaccactcaaacatgcaaatatctttgtacctagcttgaactaagcatttctatcttacatacaaaatagaaaatagtcagcagagcgttgagatacttactagttgtacaactcaagaaagtgaggttattgtgataatctgcccatgaatgcagaacccagtcaataacacgatcaaggctagcctaaacttcaaagcttttgtcggcctaggggtggaacaattcgaggtctaatagctctgcttctggaaaatgtgctaaacggaggtttaaaatgatttggatcaggcagtcaaagacctctgacattcactgttagagacgatgacgaaggggagcctttttaaaaaaaataaagaggtctggcttggaaactcaaaaatgggattttgaaagtctgagatagtgaaagagaagaaagcgattggggaaatcttcttatacctcggtcaggatccttgcaacttgagatggatggcccaattctcctcttccaaaaagcatttctatcttagatat

SEQ ID NO: 208252 - DNA, 864 bp, Cannabis indica
accacaaagttacataacaagttaatactaataaatatttaaaatttataagataggcatgatgtaaagttaatttaaacaaatttatttaaattatatattatttctttaattatatcgaaaaagttatcctctatatgaatagttttatagtgttagtttaattaaataatttacttacataatatttaaaatgtataaataaacttaactgacaaataaaaagtaaagcactacaagataattaactttttattatgataaagctaaaaataaagtaaagatattgatatctgtttttcataatatagtatatcataaaataaaattgaattttctctttatactactaaagcattttgtcttcaatatgatttgggctatcaaaagataactttacatttgtatcttgtctttaaacataatatgtaaatttatgttaaaataaataaataaatttttattaacattgggaggaagaaattcgaacttgggacttttttttttaagaaaaaaatagaactactaaactatatctataaccacaaataaataataaataaataaactcattttttttgtagctatatctacctcattctaaaaaaaagtttaaaatttgtagttagttttttcttttggggtggggacaagaaaataagttatacttattacttaaaagttaaaagtatcacaattggacatatctagtgagataatgtgtttgtttgatacaaatatgtaatagttgagattaaagaagtgtcaatcataaccttcaattataatgttttagttaatttttacattcaaaatcacacgtcgaagtaatttttttatttttttactagtgatattcttcat

SEQ ID NO: 208253 - DNA, 784 bp, Cannabis indica
taatatatcaattttaatatttactaaattaagggggaaaaagaagaaatggtaaataagcaaaatcctatttcaaccatttaataatttttttatttttttttcaaaatagacttaaaagccacatgggtcctaaccattatagaaatattagtggaggatcttagtttaaaaaaaagtgtatttaaaattaatattcaaattaaaaactttttgcagcccccaagtactattcatatcatccctatagaaaaagcttgatcacttaatgtattattttattgttgagagattgagaccatttaatattatatatatataaatatgtatacaataaaattataccatacaataaatttataggagtacttgttctagggtagggctatggctagtagtgaaaaaaataaaaaaaagctttgcattcaatcaaagtcttctcatgttaattattcaatttaattaggttaattaggctgctaacatgtaattctattgttaataagattaagattaaagaaatactaggtcacgaaatttaattatataagttattagtataattaattgtattagattttatattttaatttaatatttataaagtaattttctcaaaataatattagatattaaacaccgttagtatctaataacaataataattaatattaaatatataaactataatgacaataataattaatcttaatatttaaatttataatttattatgtaagcaagtagactaatgtcactaccatgcatgattattaagattatt

SEQ ID NO: 208254 - DNA, 531 bp, Cannabis indica
tagctcatgttcttatatatgatccaataatctatttattccgcgtgggataatattcacaatattttccctcaagataattttgctgataagtggagtagctcatgttcttataaatgactcaatatcatgtcgagtatacggatttcgaaaattttgctgccaaaatataaattttgaggatttattactggcgaaataaaagtattgaaaattttacactatttactcttacaaaaatatatatcattatgcaaataaactaaataattattagaaaattaataaatgttattaaatcgtaatatttcttttatgagcattgttattggacactagtgttatctagcactttctataggtagtgtcttataattggttagcgatattacctaaaagttataagttatatagaacctgattcttaattatattaatagtagtatgacatcaaagaaaatattagacactattaatatctttagtcaactctcatcccttaatactaaacacatacatcttgacatttcc

SEQ ID NO: 208255 - DNA, 1285 bp, Cannabis indica
gttgattattattattttaaaaaaattgataactggactcgtgaacacctacaaactctgtctgtactctgtgatatgattccaaattgaactttgtgtgctttctaatttatgttttttgtctcagccagttacataaaaaaccatttaactgtattttctaattcagatagataacagaaataataacaataatattaattcatttggctattgtaactatagggtcgtcataattttggcatattgtgtttgttgggatatgcatatatatatttgtagattattattattattatatacatggattttgacctcaaatttatggatgcataaaagggatatttgtttgatatgaccataattgagtcgattcttaagattcctcttattactgttattattcattggcggctgacagcctcaaaaccttaaaaacattggtttcatttttgtttttgtagcatattgtggtacttgcataattgagtttttgagttttttgttctggatgataagtgaaaaggaataaactaagtttgaggatcatttttactgtttttaaggtacttgtttctcataaaaagtcatattgcttgccttgacatcatcttagaaaactgttttttcagaattgtcattttttctttttctttcttttgattttgtgcaggttctagctttggagtaacactaatgctacgaatatgggaaagaaaggaggttggttttctgcaatcaagagggcttttactccccactccaaggagaagccagtaaatgtaagtgcattcacttgggcatgtgtgttttgtagaaatgaatgtgacttgttggttcatttgagcctttttttgttatagattgagtctttcgagaatgaatgtaatcatatatgttgcaggattccgataagaaaaccagcaaggagaaggagaagaagaagaagagtggaggaaaacttaggcatggagacaccaattccttcattcctctttttcagagagcctagcagcattgagaaaatctttggggatttcgaaagagagcaacagagattaaccttgaggactccattatctcctgagcagcagcagcagcccaagacttcatcttttgtgcctcctcctagagttgttactccaagagcttcttcgccaagggttgtatcacctcgggttgcttctcctagagctccttctccgagggttcgatctcccagagctgtttctcctaaacctccatctcctagaattgtacaccatcatagggacgatcagctaca

SEQ ID NO: 208256 - DNA, 729 bp, Cannabis indica
caaaaatatatataaaatgtttttattaggttactcattcgcaatgcatgcatgcatacgtcataaatagatataataatttcaattaattaattaaaataaatataattaattagttaggaccttaacaggataatgacagagaagaggaagattggtaaaatcacccgtctgtgcataattaatcccaataaatgggcaagcatttaccctgtattaattaattaattaattaattaattaattacaatttacgattgataatttcaataaactataattatatttattctaattatacttacttggcatgggaaggagatatcatggcgacccaatcgtcatcggaagggaataagacgccggagacggtgacggtgacgatttgatcatcaccaagattagaattagaagccacactaatcctctggtatggatttaaatcgacgcaatcgttgagaattctccgattcactaatcgaaaatctgatatggctgtgaagttacggtgtcttctcttgattttccaatcaaagagttcatataataataataatcattattataattagaaattgatgatgatgatgaagaacaagcaaatgagagtattaatattaatattagcttcacaccataaactactctatcaaatatatgatccatattttaataataattaatatgatatataatatatgtggatatatatatatatataggtaggta

SEQ ID NO: 208257 - DNA, 1656 bp, Cannabis indica
acataaattttttgtaactaaatatcatttttagtcacaacaaaaattacttgtcattaaaaagtagtattttgataacaattgtaactaatttagttttagtcacaacaagtgttgtggcgaaaaatacatttagtgacaacaaattataattttggtgactaattctttaaattaaacttttttagtgatatcataaagatgatttatactttgttttttttagcttaattaggagatgatttatgcttagtcaaaaattttattgtgactaaatgtaaaaaaaatttgtaatgtgtgttagtctagttgtcatgtcttactatataagtaactagttacccaaaattgatatagtggtccaaccaaatcagttacttctttttttattttcgaattgcatggtaacaaattatttatatttgcagtaaaatgagttactagtcacatatatttatattaatgtaggaaaaatgttacctctcaggggtaactagttacccttcccaaggtattagattgcccctcacatggtcattaattggtaactagtacccctccaaggataattgatgataactagttagcttaattataacatgttaagaaaggcacaataaagaagctaaatatataaatatcctattagaagatctaatcaacatattaatgtatatcaaacatcctctccaattaaattgtttgaactttgaaatcaatttactatcgagaggcatctatataaattataattatgccatatatcaatttgggtgctgctttagaaatgtatacattcattatttttattggttaaaagtccaattaaagcagttgaatattaatcttgtaaaacttacacaactgtctctttcatatatcattatcaagagctcaagctaaatcaacattaattagtaaaagatattaagccattaatgcaacaaacaacatctccaactcgtttctactcttacctgactaaaaaaaaaaaaatttaaataaagtacttaaaatcgtacccttttttttttaaatgtttttacggatttttatttttattttttagtatttttgttgactagtattacactatatttccacaatgtgtaaacgtcttttctagaacaatctaaaaataagttatatttccacaatgtttaaatgtctttcctagaacaatctaaaaataagtcaataagaaattttttttaacaaaaagtaaaaataaataaaaaaaaatggtcaataaaaatgcataatttttattatttttaaatagatctaaaataacttctccctaaaaacttaacacaatacacagtataaaacttacataatatttttgaaaaaaattctaacccacagtaaaaaaaagtaaaaaaaaaataaaatttaaattttctacagtattactttatttttaaaaaatcaataatttcaacaaaacttgttaaatgattttatttatgacaaacataggaaaaccagttattttgagtcaaacttattttaaattactgtgattatacttatggaataagtaattgttcatcgaagtgtacagttctctaaaaaatgtaagtggattagtgaatgaattacattttggaaatgctcaagtattaagtgcatcttttttttggaagaatatta

SEQ ID NO: 208258 - DNA, 514 bp, Cannabis indica
ttattttttattatttgattcttcttattacactagcggaccaaaaaaagactcaaccaattttgatttatgattataaatactattttggttgacttaattggtaattatgacttaaaagatcaatgttttttcaatatagacaaaaaaaaaaaaatacagttattataatgatgtttagtaacacttttatttttaaattttttaatcataaaaataaaagcaaaattttgtttttaaaattttattattgaaaaataaaaatgtgttatataactacttttattttttaattttaaaaacaaaaaacaaaaatgtattctgtaaatttcattttcatttgttgattttatttaagtcgggtctgaggctgggtacgagatcgggattgagggagggtccaagtgtggggttgggtacggtttcgatttctaaagtctaagttggggtcggagttcaaaatattaattaaaaaagaattgtttaacaaaatttaaagtgattttttttgttt

SEQ ID NO: 208259 - DNA, 643 bp, Cannabis indica
atactattttaaaaaatacatagggtctattttgttttttaacaaaattaacgttaaattagtaatttttacaaaatacaaaatttaaagtaacatacattaatataacaaattaattaataacatttttcataataaaaaattaataacatttaattttttttaatatatatacatgacttttctaccttgtatcgatggtattcatcatttgccacatctccattactgcggtccgttacttttcctgtgcaatttaattatcacatataaaaatgttaattaaagaaaatttttattggatactattactagtagtgtcgtatttttttggatgtgtcgttttgtaattgattaacgatatattttaaaaaattattatattaaagggattcgatatttaagtaatttccttatattaagttatatgagactcgatatttagttggactaatagtgatattgatacgtaaaagggtgttaggcgtcactggtaccgtgtagtatttctcttaatataatatgaagagaattactatttctcttaatataaaacgcattatttgtgtctagcaccctcctcgatatcataatactattggtgtataattaagtatcgcatcttatataacttaattttttt

SEQ ID NO: 208260 - DNA, 1228 bp, Cannabis indica
caaatcaatgggccctgactgagctaataaaccacccatacatcattagaaaagcaagagaagaagtagaagagtcagatatcatcagtaaccttcattatattcaagctaaagtaaaagagacactaaggcttcatccaacagggccattactagtgagagagtcatctaaaagaagcactattaatggctatgacataccagaaaagactagtttttttgttaacatctgggctattggaagggatcaaaatcactgggaaaacccagttgagttcaagtcagagagatttcatattagtgaagatcatgagagtacaaagcttccattttttgccttttgggagtggaatttcacttgctttgaggctagttcaaaacactcttgctgctatgattcagtgctttgagttgaaagttgatggcactgttgacatggaagagggttaacccttctaaaggctcatcccttcctctgtttaccaattgctcggcataatccattaccaatatgagatgttttaacttttaaaatgtttagtatcatttagtagtttttatattgtgatatgtattctattatttactccatatatttttgaggacagagattaagaaagatgtttaaataggaagtagaccgtaaccctcctcttgttattcttgttgattttcttcttatttttgtctaatttgatagcattcttcctatttattctctgttttgtcgctgtaaaagcaatggctataaaataaatatgttcttcattttcatgctacataatgttacaagatgaagtggagtatataatttttatatagacacaacaggggtgagttttgattttttattttaaatacttaatttggcttggatcccatatgggaatctctgatcactatataaactttcatgctatacagatccaatttggaccatatattatgagacttggtcatattgttgtagtgtatacatacatcattgcatgttcttctaaccttatatctatcaaggacggctgttaccccattatggaactaatcatattatatgttagcattaaaatacttaaaattctagtatagctttaataggtacggcattgaccaattctaaaggacaagattccattataagaaaaaaactacttctctaagtctcattgcaataataaatctaacttgcacaaaatttgttgttttcctctatgtaattgcaggcctc

SEQ ID NO: 208261 - DNA, 1369 bp, Cannabis indica
taatttttttctgttgttacattggaaaaataagaaaaaaatgtaaattttctaccattttttttcatgcattaattttcaaatttttacaaatttataaagtaataataattaaactaacacaagtgttgataaagctaatcatctaaatttatttacaaaattatataattacaatatttttttatgaatcagcatgaaattcattatccaaacaacatttcctatgagcaccttcaagaatgaaggtctgtaacaaaatctatacatcagtaaataatgacatatgcatatacataacttttaacatatcaaaccgatcccaatccttttgtgtaaccttctttagcatgacacaagtgttaataacttaatctatagtaacaatagttgaaatagtgtaagtatcaataacttaattaaaaatatacaaatcgttaattataattaattagttaatgttagtataaatataaattgagatatattgatcattataataacttttgttgcatcacttttactttcacttaatcaacctactgatcacgtataagatttatctcgttatttgagtacgagatgttgaacctaccttataaaacaaaaatatatattaattagtaaaaagacctattattaaaacaaaagaaaaaataatatttacattacttattaattgtatgttttatcatttatatcatttagtgtattggatcttgtttgttcatgaaactttcaatgaattttataacgtagtatccacattgtttctcatctggtcgttgtgggcatatcaaagttatccacttgacgtaaccaggtgatcccgaaatttcggcaacataacgactataattggacgttctcaaaaattttaaacatgccaaaaataaggaacaaaacacacaaaataatacaaataaaataaaataacattaacaatacaaaaattatccacccatccgcccacattacatatattcacagaatctacttcattactattaaatatttaagatattcaaactcttctaacatgcatatttcacatatccgatcgtagtacaattaatcatagaacctccttcactacggatgaatatctaagatattcagactccactatattaataaagaattttaaagttttagtaattatgtatttctccaataaaactagctacttttgcgctttacaatcaatacagggaacccgatacctagaaatattttaaaaaattaaatttaaaacttccatttataaacttatcgaattaaactaaaagtagataaaattttaatctttacaactattatcaacttatataaaagtatgtatatgaactaaaaatacacacatatatat

SEQ ID NO: 208262 - DNA, 628 bp, Cannabis indica
gcttatctcctccggccaagaagccaaggggccatgagacaaccccgtccagagagaaggcaccgactgaggcatttattaatctctccgaggaaccaaccgtcgtagacccttatgccccaaaaatgaataaatccaaagattcccgatgagggagctcggacaggccagagcagtcgaagggcggatttgagctggtcagaagcggatctaagtagattagggcccatgccccaccttcggtgctgcatccaaagactaaaagaggcaaagatatcctcacccactacatgactcggtcggtcccttagatgaatgagcagctggctggagctgacaatgacctctctctagagctggtgatgggaggagttctgaaggagtttatgagggtaagtctttcctgacagtttcctcttgtccttcttcacctagttcagattttagtgttatttctctgtgaagaccggtttgaagatggcttacgcttattcccgagctaactcggctacctctatgaaagctgccatttctaacagtatgcgggcggaagttggtctggctaggaaggatgtcgatgaagccaaggttcaacttggggcagtccgaatggaactgggagaagtca

SEQ ID NO: 208263 - DNA, 920 bp, Cannabis indica
ataaaaattattaattattaaaaacatagtttatgaaatgagtattaaagataatgaataataaagaaaatacttattaaatcatattttttggccacacccatgagcactaaccgtaactgctgagcaaaataatagacaaagaaagcacattcattttccttcatgataatactctttaaaccattaaaatctccactcatgttatagctctatcatacccttgaccacataatctagatatgctcaacccatgttttgaaaatagcttatcaattgctatttttagtgagacatctgtggtatttggatcatgttcaatcccaatgaatcgttcaattacataccctttcttgtccacataacgaaacattacgaccatttgctctttcatagctacatcgcgggattcatcaactaacacaaaaaaatataacatctaccatgtcttcaataataacattgattgtttcaacaacacatgcatttacaatatccttttgaatctttggtgaagttaatttaagattttcaagagcattcttcaaagcaacaactctaattttttcattatgattagccaaaaaagttaccttgattagtagaattttgagactcatcatgaccgcaaaatgcaagaccttttcgtagaagaaataaaatactgtcaactaatccagttaatcgaacatagtagctatttcgatcactgttattcttctttgaaaatatatgttgaatttgttgtttttcattcatcaaatcttcacacttcttgtaactttgataatgatcactattgtgatctcctacatgaccaataagtctttttttatccttccaatttgaaaaacttttactaacaaatgtttgaccgccaccttgttttctagtgtctggtttaaaaatatagcaatata

SEQ ID NO: 208264 - DNA, 1636 bp, Cannabis indica
agaaatcccaacaccgcatttttatttcggccaactatacttggaaggcccaagtacatgctatcattacctgcttcttgaatttgcatcagggtgcaaattcgatttctagatgtagtcattgtgttcgaactgaagaaggcggaggatttgtgcagattaactttttggcccgaggcttgttcaaaggtgtgcaggagttggagaacatgacttgcttcttcctctgaggcttggcaatagacataactgtcgtctgcgaagagtagatgagagatagtgggtgcactcctagctaccttgcaacccgtgatgagtctagtagtctcatagtggcgaatcaaagaggacaagccttccgcgcaaacaatgaacaaataaggtgatagcgggcagccttggcgaatacctctagtagggaggattggccccatcctttgaccactattgataacatgataacggactgagtttacacagctcaacactagcccaatccaccgagtactgaagcccattacccgaagaatagactcaagaaagccccactcaacacggtcatatgccttgctcatatcaagtttaatcgccatatagcccttccttccattggtcttccttttcaaataatgcattgcttcaaaggccaccatgacattgtctgaaattagtctaccagaaacaaacgcactttgagtttcagaaatagcttcacttaagactcccttcattctgttcgccactacctttgaggcaattttgtaaagcacattgcaaagggatataggtctcatatcactcacttgtgtgggatttttcttttttggaattaagacaatatgagtctcattaatggaatctgggaacttgcctgaaacgaagaactcccgaacaaattgaacgacatcatctccgacaatgctccaatgcttttggtaaaatgccggagtcatgccatccgggccgggggacttatccggatgcatttggaaaagggcgcttctgacttcatcctcagatataggagttagtaactcctcattttgaacacaagagattgagggccgaattctgtccaaaaccgttcccaaattcgttccagaagattggaataaattgctgaaataatctttgataacaccttgtaatcccgattcccaatcgacccaaacaccattgttatccttgagctggctgatactattgtttcgttttcttgcacttgcaacagagtgaaagtatttgctgtttttatcaccagagttaagccaatattgtttcgacctttgcttccaaaacgtctccctttgagccaaaatctcagatagcttatcctttccttccttgtggagttggatagaagacggatcacgcccccatttagtgtctcggatttgctttttacaaagcttgatccgatggcgaaagttgccagtaatgtcacggccccacttcccaagaacctccccacacttggctattttatcttgaatattcatgagacccgagcccaaccaacacccctcaattagatgcttacaaagaggttcacgaatccaagcattctcaaaccgaaagagcgataagaagaagttggataggtaccttttaaaagaagcaagataggacagtggtc

SEQ ID NO: 208265 - DNA, 874 bp, Cannabis indica
gattattaaggttatttaggactttttagaagtggtttaaattgttttgggtagttgtaggaaaagttatgcaagtttgagttcaaagaactcaaacttaactttgttatgataacttgaattatgttgcgaactgggttaaggtttcttcatgaaatatgttggttataatgtgtttaggtgctctacaaaagtttgtaatttttggatccgtattagatgagttatgagatttccaaactcggacaaggagtttcaggccatccgatttaggttgttttaggatggccttttagtttgatttatgatgagaatttgattgaggtttcttcatgaaatatgttcattatgatgcttttaggttcctgacaaaattttgtaatttttggatcagtattagatgagttataggatttcaaaattcggagagggaggtttcgggccatccgatttaggcagttttaggacggccattgagtttgatttttttgagaattttattgatgtttcttcataaaaaatgttcattgtgatgcttttagataccctgcaaaattttgtaaggtttttcttcgaattttaggagttatggaagttttaaaatgggatagttgagtttcgggcgatccgatttaggcagaatttgggagtccatcttaagacttttcccaggaccccaattgagtgttttatatgtacttagggtatttccatgatttatatcaatagagaaacttttagttgtcaatttaagtccccgaaagtgttagggcaacacttataatttgtttttttagaaatgtgacttagggcattcgattacctgcagctattttcactaaggttgaccagcgcacctaaaatcaaaattgag

SEQ ID NO: 208266 - DNA, 714 bp, Cannabis indica
atataaatacagatttctattgacataaaaatattccacatcgaaagagcgaggtatggagaattcagaagaaagaactccgttaatctcaacaaaaaaagatgtggaacaaatcctacgacagctagaaaatacaaagtatgacatggatacacatatgttggatattagtgcaaataagaagaaattacaaatattgcattcaagaagcatccatcctctaatcaatatttcccccttacgtgagttgcaaaagcttcaaaatgaatcatgcggaagacttctttttgcgttggaaaaagaataatactacatccgattggaactcatcaagcttgaacgagatatcatgttctacaaatggtacaagaagtactttgctaagaaagtatagattagaagtttgtatccatcagtgggtgtgtgtgggtatataattatgtatgttttgtttgcagtgaaaactattgtcactgtatttttttctttttttttaaacatcattgtattttgtttcttaaatgacagttaatatattattaggaaaaaccaacattttgagtcagtattttaaattttggtgtgtgatactatgcattgacaaaatatcatgatattaataaaaccattatatcatcttcaataaaaaaatagtttgaaataaactgaaattttttgattatagcctttatcggccgacttcaatggtaaatt

SEQ ID NO: 208267 - DNA, 739 bp, Cannabis indica
gacatataaaagaaaaacatttattcaacaaataatatgtacgaaaaacaaaggaagaattataagccaatgatacaggagctagctagctagcattattaccatattttgacgggtggtccattattttactcacagaagtaaaaatatcaaacgttgtgtagttgaaaccttcaagttcaatctgtatatttcttaggactttgggaagtaataggttgtgtagtttagatagagatgtgaattcatcaaagcaggcaccattgttttctggtttaagcatttttatccctggaagacaacctattggggaaatgtttacaaaaccaaatttccttcctccaatatcgtataattcctgattaaaaattatgcatcacgattcacttcattaattaaccaatcatgaataaattaaattcaatgagttaaagaagaatatactatattcattacttgaaggacttgagtcaaattgcctaacaccatgccaacactttctttcttataacgagacatgtaatcgttgcttcccacactaaacaagaaaacagctttagagatcaatttctgtgctttcgaagggcctagtgtttgacacaactgtttctttactttcttgaaatagcttacttgagtgtgaaggtctaccacctaatcaaaacagaggatttaaagttaagcttaagaagaatttaatatttggttgatgaagtaattaatacataggactacgtac

SEQ ID NO: 208268 - DNA, 819 bp, Cannabis indica
aaaaagaaacgagcttagacgttgccccgaactacttccaaattcatccgaagaaaaggaggcaaaatggccattttttaaccttttcgggtagaggcagaggtttgccattctgtctaaaatccagaaaaagggcagaggcagcgttggatttttgctcaaagattccaatgttcaactggcttgcttacgaattttgttttgttttccaaaattatattaaaggttgtatgagtttggcttattcttttgccatttttgtatttgtctttttgttttttgttttccattggagatagatagatacaagctcaatttattttgacatcaaaatctgtaatattattataaacatataattaactcattcttttgtgcactattattctataataatgtccaaagtgaatgagatgttttttcctttaaagatttgatgtagtttgaagcaaaaatgatatctagtattttttattttttaatgagtaatttacggtgtaaatattttttttgacggtatcgttaagtttatttttttattgatttatttaaattaatttttaaataaaaaataaaaatttaataacttttattactcttttatacttctcttctaatcgtaacagtatacatttttttttctaaaaaagcaataattttaaaattaaataagattatttggtagctaaaattaaattgttaccgtttaaattgtatattttcaattttatacactcaaatactacaagttctttgtttttcaatgaattaaataccaaacattacgctttttatgatgcaaatataccgtccaaaaaa

SEQ ID NO: 208269 - DNA, 1156 bp, Cannabis indica
taattaacacatttgaaaggtcttttcattacttataaatttttctgtttgttatatattatatggtaaaatgtttgatatcttagataaactatctcaaccatattgatttttaattttaaagttgctctaccacaaaatttaaatgtataaatacatacatactcaagaaagtctatttattttttttcgataaaggaagttttttttttataacaaaaatgaaagtctattaattaattataattaatcctaaaattttgtctagtttaacctagtacctaagtacttagtttaataaaaattaagaatcaaaaactttgtcgtaagtgacaaaaaattgcatattattatttgaaaataaaagggtattatgttgggttcacctaattcagcataatccaaatactaaactactacaaaaatggtgaaattactcttttctcaaaaaaaaaaaatggtatctttacgaatggaatatgttaatggaaaaaaaactgaaataaaaaagtcaaaaaattgaaggaattttttttttttttttttttttctttttcgattggacggcgtttgaaaccgaaggaagcgctctatatatatccaaaacccaaacagaggagcatataaaacaaaaaagaggtcgaaaactgttttggagaacctcaacttgagaaggtaaagaaagaaaaaaaagaacatattttaagagagagagaggggcttagatagattcaagagagagaaagaagagaagggtgtcggagatcttgtcagatcggaaccggagctgcaagcaaagcctctcacattctagctgttggtgttgaatttgcaatgtgggtctttatctctttcgttttctctccaatcagtttgaattttctgcttgttactgctttgtttcgagacctgtgtacttttgtgtgtgtggtttctcaaatggggttttctgtttttccaatgtgttttgtgaatcagcttttctgggtttccttcttcttcttcttcctcttaatatttaatggagctgaccgagttttcttattttgttgtttgctgagatatttgagttatttctgctctcaactctcagctttgagctttgatttttaatttttacttcatatgtaaaataaaaatgaaatattaaccagta

SEQ ID NO: 208270 - DNA, 589 bp, Cannabis indica
aaaaattacttaggtattaatctacaattagaagataaacttaggcattatcgccgcaaattactctttaccaaatgagtatttatcctttttattataatagatcttaataactcacagtattttaaaatttataatttaccaaatacttagttcagttttttttttacattctgagtagcagtaaaaaaaataatttaagatagaagagatcattacactctaaagttacactaccaaattaagtgtactaacataactttttattttattatttacattctaaccattctttttgttttaaaaataattttacaatttgtcaaaaaaaaaaaataataattttacaatttaacgtaaattttatgagtgccaaaaaacctctcttttgtactctattatgtcctttttttttactttttaatttgagaaacataaattttaggtaaatcttataaaatatacaaataatttctcagaatattattaataaagtcaatctctcttataaggattaattaaggcaaaattatatgatgcttaatatataaatgaaatactttttaataggtattacccattaatgagt

SEQ ID NO: 208271 - DNA, 787 bp, Cannabis indica
aacaacaaatgtttattatatacttaactaataattaattataattaggtaaagctaatgaataaaatatgatgtatatatacttggttaaaagctggagggattttggcagtggctagcaatgtttggagctttttgcatgagaaatttgagactccaatggttttagtaagccctaatgtttgacactcttccatcttttcccacacagatttaatatccagaggaataacatcatctctactaaacacaaaatttggttcactaggcttcagtgccactgcccagtgaattagatattggtccaagtaatccatcctcagatttctgttcatttaaatcaatatatatacatatctttattagtataatcaattttcattagtattaatatatacattcaaatcacacacactacactaatcatgtctaattaatttcaatcataaatatttttaagtataatcacatcaaattttaattgtatcatgaaaattataatttaaacatcaatatcgaataatttaagaatatattaatcatgttttctcaatatatatatacactaaattataacattttttaaaaaataccattaaagttaaattaaataacaaaaaaaaaaaccttttcttagatcatagaaataggttgttaggtttttatgatttccaacaaattctatggtaatttataattagagaaacaacaattttgtttgagcaatattgatgtcctaccaaaaaaaatcctaaatatatatctttaaattcttataagaaatcca

SEQ ID NO: 208272 - DNA, 813 bp, Cannabis indica
tcaccaccgcacactgcgaaccaagcccttcatcgagacatcgcaaattgttgagcgacgtcaaaccaccaagagcgcctctcattctcttgctctatgtttgggtgattcccaaacatatagtttgttttttaacaaatgtgtatatttgtgtttgtgttttcttaatttttttacccaaaaattggattttaaatttgtcacgttttctgggtttttttctttgggttatccagtttattgcgattttttgtgatgatagagcaattctgaggttagggatgaagtttagtaatgattagcgatgtttgactaaaaaattaaatgtttacgtatttagtgatgttttgcgatgtatttgtgatatgaccagggctggccctatgcatacgcgggcgaggcccgggcctagggcccatacttttcgagacctaaaataaaaaataaaaagtttcattagatttttatttaagtaaaattaaatatattgtaaacaataaatattcatatcttagttggttggagtgtatgacatatataatgtcatgagttcaaatgtcatgacatccattttcaataattttttatatatatttttgagagagatggcccaaaaatttaattcgctttaggctcatatattctcggccctagataagactaaaagaaggtacatcgctaaatatcgttaatcattgtaaaaacttgagtgtgatttagcaatgtattttgctatttagtctcatattgcaaatatattgcaaaacatcaataaaatacgctaaaatatttattattgtagtcaaacatcgc

SEQ ID NO: 208273 - DNA, 1156 bp, Cannabis indica
tcttcgatcttcttcagtcacaacactaatgccacaacccgtgcacaggtttgctctacactccacatgtctaaagctcttgacggcagcctttatcttggcctcccaaatattattggccgcaataaaaatgttgtgcttggctttatgaaaaacaaagtcattgctcgcattaatagttgggatggcaagtttttgtctcgtgcagggaaggaaattttacttaaaactgtcattcaatccttgcccacatatgctatgagtgtctttcttctaccgattggaacttgtaaagagattgaaaaacgaatggctagtttctggtggaagacaaactccagtaaaggtcgcgatattatttggatgtcgtgggatcatctagcaactccaaaagaagaaggtggaatgggttttaggcacctccatgactttaatcttgccatgcttaccaaacaaggatggcgtttattgtgtaatcctgactctcttgctggtagagtctacaaagcgaagtatttcccaaattctgacttcatttcatctgaacttagaaataatccaagctttatgtggcgtagtatttggggtgctaaagacttggttcggcttggggttgcacgtgttattaacgatggtagaactactagcattctgggttctccttggctgccatcaacaagcaaaatatatgtctcttctaatcatcctggcctaagtaaccatactgtaagttccctacttcaaccaaacaataactgtttggatgctggtgtaattcatgacttgttttctcctcaagaagctaatttaattcttggcattccacttagcaatgctgcaagacctgactgttggtcttggacagcggatcacaaaggggaattcactgtgcaaagtggctataacctgctgcagagtcgaaaaccagtcagttaacggccaaacaattttggtttttggcgtaaattctggcatttgaagatacctccaaaagtcttgaattttttgtggcatgctatagcaggttctctccctacctgtgtaaaccttgtcacgaaacatgtcccaatctcttcacagtgtcctgtttgccgtacgactgtagaaacaacaacacatgctctactgacttgcgactttgctagagcatgttggt

SEQ ID NO: 208274 - DNA, 874 bp, Cannabis indica
aggcaacacactcttatcacttaacattagaataacggtagacatattaggcctatcaaccggtttttgttgcacacacaaaaggccgatgtggatgcaacgcaatgcttcttccatgttgtcgtgtggatctttctacaagcacttgtcgatgagcttaaatgtgttgccttctttcatcaaaatccatgcctaataaatattacaaaattatatttagagaaaggcaagagactcaattgtaacatttaataaagtttttttataatgtatgtacacttaccaatccgataaggttgagaatgctatctttatcgtaaaggtctctacttttctttccacttaaaatttcaagcatcaatgtaccgaagctaaatacgtctaattttgttgagaagaggccattgaaagcatattctggtgccatataaccactacatttgcataacatttaattatttgcataaaaaatgaatttaaatcaaagaaactattttttttcaagatgacttactaagttcctgcaactttgtttgtgtttattccttctatttgatctccaccaaaagctctagccaagccaaagtccgaaatcttgggattcatctcttcatcaagtaatacattactagctctgagatctcgatgtataattcttaatctcaaatcatgatgaagatagagaagccccttagcaattccacatacaatttggaaacgcttaggccaatctaatagtctgttttgcctttcatctgcaaatgttggcttcaacttttattagaacaaaattagcaaattacatatgtaaaacattacatttgtattaaaataggtgaaaattgttaccaaaaatgaaataatcaaggctttt

SEQ ID NO: 208275 - DNA, 1097 bp, Cannabis indica
gtaatggatgattcttctatttaataaagtttaccattttaccttcaaaaaaaaaaatatactttacacatattagttataaaaaattaataaaataaaattaatttaagtcaagtatttaaatatttaagtacatgtagtttttttttaactggtttggtatgatatatcaaatcatattgtattatattaaattaaattatatattatatttttatataatattatgttaaattttaatttatactaaaataatatatatttagggatatgattttatcccgttattgtactttcacggattgtaatccgtgatgtacgacagccgtcaaatgagagagttatttgatctaacagctgagattgatctacgggtagttagggttaaaaaatagaaacgtaccctgacactcatttaatgtatcctaagacctatctaatataccacggaatacattccgtgaaagtacatcacgggacaaaatcatatccctatatatttatatatcattaaaagtcaatactacatacatttttaaaagaaaatattacataaaatacaattcaatataacactataaaaaattttactttatttagtcacaataaaatttgtgactaaaagtttcaatttgtcacaatacttgttgtgactaaaactaatatagtgacaacttgtatttaaatactatgttttaggcacaataactttttgttgtgactaaatataactattttttggtattataatactatacaatagtacaataccaccttataagacttattttatatttagtttatttcattcattgtcgtcgacattttaattagttttatttttgttaaaattaaaagttagagcaataaatacacaccattgtgtagtaaaaaaatattataaatttctaacacttgttttagtattttgttatgtaattaattaagtgatcagattttatataattcaagaaaatagttttaaaaattatcattaattaatcgtaacgccatttataaaatttgttaaacactatcagggttggccttgaggtaattgagttaggcgtgagcctcgggtcctcgaacgctcaggg

SEQ ID NO: 208276 - DNA, 1466 bp, Cannabis indica
aaagttaagatttttcccagcacacgttaatgtgctagctagtaaaagtaaaacttttcccagagtatatttttgctgccaaagttagactttttccagcatgttaattaatatgctgggaaaagttagacttgtgccaacgcacaatacttataatggcaaaagtataacttttaccagtgtatttagtgcaaaatatactgacaaaagttatatttcttgtagtgacattaaccatacagtaaaatattttagtgagtcaagtcatcaaccaaagagtctgccgaccagaataattgtgccctacaccataccatatcaaaacttaaagttaatattgtgggactgcatgcatgcaaaagtaatatatacttttttttaaagcttttttcagattttgtttttcaaatactgttatttctgtattttattagtattggattcaatatattttaagttagtaaatgctatagaaatcactataactaattacaaaacactagatgagtatatatagtgttaaatgtatcaaatagcaatatatatatccaaactacaatttgggattattggacgtacgtatttcacatttattgtgtaccgttagatcatgtaacttttgatctaaaggttgagattaatttgctttatttggtgtacacctaagaatagggatagtgtaaaattggagaagagcaatcggatgaactttaccaataaaataatatatttctttaattatttaaaaacaacattttacatcattaaagacaacatttttaattattatatcctaactacaattgattaatattattgtaggcagaatatattgacttataaataatgggttgacttaaaaagttgttcttcttgactagctatagtttaatgatcatcatatatgtatgtaattcctctcaatatcatccatatacaatagaactattataattatggggctaattagaatttttatttcttgaattttgatatgtactaaattataccgtttaaatttttttaaccattaaaaatatattccccataaattattgagattgttaaatttattaaaaacttttgttcaatttgattcaattttactaatttttttgattgtctatgtattaaattatatatacttccttaactttaatatctaataaatcatttctcaaattttaatatgtaccaaattatgcccctgaacttttattcatattaaacttttcttaccaaaatcagacaaaaattcttaaatctaaccgtgtcaatatatagttcagggagatttttaacggccttaaaagttcacagaacataatttaatatatgtcaaaattcgagaaacaaaaataataattagcctaattataaatttgtaatgatgatcatttgaaccccaatttcgatacagtgattattcgaaaattttcaaaaaaaaaaaaaaaaaataaaaatac

SEQ ID NO: 208277 - DNA, 1389 bp, Cannabis indica
accggcgcaactcatctttctgacgaagtataatgcttcatattttgaggaacatctgctgccaatcagtaggtggattaacattgttaaccttcgcattatccccaggattctacgaaggcacaggcggtgtcgatggattgatttggtcattaccaggctctacaagctcacactgtgatctagttgattgattaaggtccattttctctcaaatagccctaaaatcaacaacccctgtgagtcagacaccaaatccacacttacacacttattaccttaaccctaactcatactatttttcttttaaaataaatatttattaatatcattaataatcatgcttttcttataacatgttatcttctagatgctcatatgctgcttaaaacagagagtagtaaacatttaatcacaaaagtagttaagcatttactctcaatacttactgcactacgagtctagcttgtctttgacaatgattgtacatgttcagtcgctctacaagaagtttaaaaactttagcgctctgataccaaaatgtaatgcgctaacaattgaaacgccacgtacatcgactaaacatatactaatcacgttaaaccagaatctactagagccaagagcaaaaattaaacttttaaaaaatacaaattaaaaaataataatttgtaattaataaactttacaaacatccaaaagtacacattttaattcaggatcccataaaaactttttcaaaatactacaagttattagtacacaccgacctaagcggtaaaagtggagattatacaaatatcccctggtaaaccgaaccctcgtgatctagcttgacttggacatgtacaatgtaccataaaaagccctcgacctcatggttgatcaataactgctttaccctttcctgcacaatatagcacccgtgagctaagatccaccaagacagtatcaacaataatattaatactaattaatatcacttaattaatgatgccactgcatctattgtttatttgacataaacctacattttacgctcacacgtctatttataataaggccgtagattggtttatcttggttctgattaccgagtctaatctgattatgctttaactgcataattctttatattaacatatacaatacattattgcattcatattcacttaaactttagaataataatcctagatcacataactgctaattttagggtaataatcctaatctcattttctcgcatagcatgtataaatataacatacatgagtgccactgtgctatactcttttttctaggttactatcttacattgtagtctaaatatgtggagattctaaacccccgggtgttcttgaataagcgtcggtaatcttagtcaca

SEQ ID NO: 208278 - DNA, 692 bp, Cannabis indica
gatgtccttccttagagcacacccactggcgatattttatagcacccccaaaatcttttaatttttcctttccttagactgaaaccaatcatgtttgactattggtggataaagaactctacttcttcaaatgtcaagaattgttttcctaccaagtcctctcgaataagttcaatttggtccttaaagatttctaacttttcagcagctacaatccacttctgcaaagtaattattgctaacttgttcttcattgaaatcacccattgagtaattcgaattaggattcaaatcctttacttctatcattatatatcatagaaggaatttgattaattaaggacctgtgcacatcatgatagtattagtagatgttttatgaaattttggtactgtaagttcatactattactataaacatcgattaaaaaaatataaagatcaatcatagaaattctttgttctaacaactcatgttgacataaattgaagagaaaaatatgcatataatgagttatatttacttagaatctttgtaaagagaatcaataaaaataaaatgtttaaaatctaaattaagaaataatcaaactattttaatttcaatttggtgtcggcaagtccggaatcactgcattcagttatatagaaatttatgtaaccattgtttcatgatatatgaaattcatcaa

SEQ ID NO: 208279 - DNA, 665 bp, Cannabis indica
tgacgccaagagtgggcttggctggaagagttgtcttcaacctctagtcagatcccaggcagctcgcgtgacccaggttcgtgccaggcaggccgagacgaaatttttgccattaaatgcatgaaatcgacaataaaaaaggggggtttggattaggattggatttctaatcaatatcaatctatggtgttaattttgagtacaaacgtctaaaacttagtagatttgattgtgagtaatctgaaaactaaaaaccaaaaagaaccccattctcatatgtatcttatccaattcaaaaataaatcatgttagaaacattatttattagtcggtaatgagatatacacaatcaatttcagattataatcaacacaatcaaaaattccaaaattaacattatataattatataagctctaaaattttaatcttaaaattctctcaaatcactgaacgattctaagcatataatatatcaaaagaaaacttataacaagaagaataaaagccctaatgtttcaagattaattcataaaaaaattatcataaaataataacaaaattaatatataatttaaaaaaattaacatatatcaatcaattgttaaataaaatatagatcctaactcatatagaattggcgatttgataccacatattagaaaa

SEQ ID NO: 208280 - DNA, 632 bp, Cannabis indica
agtatcagaatgataatagacttctaccgtattactgaggcatcaactatcctttgaacctcattttctgtcatacaacaaaatatttcaaattttgtccatacttaattatgtttgagaaaatagcttgagaccttgtaagcattttgatagatagatttaaagtcaccatgacaataacaaaagaacatcatcagcaaaacaaaacaaagatgattaagcttgagttggtcaaaaataattcatgaaaaagatggccacaaaaaaaaaataattcatgtcggttttagaaatttttttaatatttttatccttaaaatttttctatttatgaaaaaaaaataatgtttaaaatgaaaattttgaaaaaaaaaatacatgtatatatttaactaatatattttttaccagaaatataaatatatatatatttatagctacgtattactatagtactaaaaagaataaaaagacatgtaacatgtacgtgaaaaatatatttacagtggaatccattttaaatttaataaatgtattgcatgtgaagtatatgtttacgtgtgtgttttatagatctattcgttactgattaaaaatttgaaactgatattcataagaaatgattacttaat

SEQ ID NO: 208281 - DNA, 1062 bp, Cannabis indica
aggcattgaacttgatgcaaacttgagcctgtgatgagtatatcatcaacgtaaaccagcaggagtagaaggtgatcatttttgttgctgtaaaataggctagtatcggccttggagttgaggaaacccagctgtagcaaataacttttcaactaatcaaaccaagcccggggggcttgttttaggccataaatagccttatttaatttgcacacatagtcaggatgttcattgtcaatgaagccttgaggttgtgtcatatatacatcttcactaagctcaccattcaagaacgcattgtttatgtccacttgttgaatgtcccaacagtttgtggcagcaagagtgaaaagaattcgtatggtacaaggctttaccacggggctgtatgtttcaaaaaaatctattccatgagtttgttgaaatcctcttgctactaatcttgcctcgagtttgttgaccgagccatcggggttgtatttaattcgaaacagccatttgttggtaactatggtcatgtccgggttggggggaaccaatttccatgtctttttgttcttgagggctgtgaattcatgattcatagctttgttccatttagggtctgcgagagcttgtttagcattagatggctcaataatagttcttatatctgcaagatacacttttggtttaaatatgcctttcttggatcttgtaaccatagggtgagtgtttgtgtttgggacactaggtgggggttgatttgtgtggacagaactcgatcttgttgagtctgtggggctaggaactcggtttaggcttgttgagacaacatcaggttgtaagggatcgggtaaagggatgggagatgactggtttgactggataggtgtgtgtgagatatactcgggctgtgaggggagagttgaagtattttgtagtggtacttggaaatcatttgggtttatgactactgttgtggatgtgggagtggatgtgtgagtaggaaatagttgtttgtatgggaattcagattcattaaattgcacacttcttgccacataaattctaccactaggg

SEQ ID NO: 208282 - DNA, 1672 bp, Cannabis indica
agtcttaaataattacaacgtatgtacgcagtcataaaaaaaatagactaattttttttaaaatgccgaaacagataaagcgtctactaaaacaaccctttaaggtgatccattagaaaaatttcttatattaataaataatttagttcttttttttaaaaaaaaaaaagaaaaattcaaagttcgaaacctcttgctctttcttgcttaataggtaaatattatagtttttgacaactaaattctcccaattatttttttacttacacttaatcttataaacttaaatttaggcgataaaatctgtcaaactattaaatagttaataaatttaaggtgtcatctatttactacaattaactaccaacttgactgcttatgtgtacactcttatacatgtgatatatttatattactacacacctaatatagttatttaaaaattataaaaaaaataaaattctaaattaataaaataaattaaaagttgagataaaaacaattgttatgatggccaccatcgtatcaccaccattatatactacgaccacctgtatcaccatcgccccgccaccaccaccaccatcactattgccaccaccccaccaccaccactcaaccaccaccaccacaccattacaacattaccaccatcattgcaataacaaacaccatcaacaccaaaacacagatcgaaaaccaaatttaatttttttgccaaacccatctaaaaaaaattgataaatgtaaatctagaaaaataaaatttacacgcttcatgttgacgcaatttttcgtcaattgatctaagaagatcataaacgagcaaaatgaacacaagtggatgtcgatcaaaataaattaatttatgtaaagaaatttaacaatgatgaacaataaatttttaaagtggttcaccccctttcggtggtaataggctagtccacttgtaattttattgatctttctctaaagttatattctacaagagttcagtcctcaagcgattttataaagtgaaagagtgtaagagagaaagagagatggtccatttacaattaacttcatagcctttatatagtcttacatcatagggcttaaggtttcttaacttgatacatcttttttcctaactagagttaagtttaaaatattaaataatgataaaattaacattccaaaataaatatattcgaaaatagataactttgttgtagatatttcagaatagctttgatggcacatgtctagcataagagtgcgtttaaatttggacccaagtccacgagagcggtcttactgaactttgaaggtcgacccagtggaaaggcccctgggggttgccctagcagtgaggcccttaagggtcggcctagtgatgagcttagggggtcagcccttttgacccgtcatggtacccgtggaacgttagtcatgagtcccaaggactttggtcatgaatctgtaggactttggtgatgagtcttggggactttggtcatgaatcatgatgacttttgtcaagagtccagaggacttcggtcatgagtcttggggactttggtcatgagtcttgagaactttggtcactaatcctgaggactttagtcaccagccatgaggactttggtcatcagtcgtggagactttggtcaccaatcttgaggacttt

SEQ ID NO: 208283 - DNA, 674 bp, Cannabis indica
tgcttctcttgccacaatatctgaaaaagcttccctattcaatcccttcaattctcccttcaataattttcgtcgactgaccagttggaacatttgtgtgcctttcaaaggttactggcaaaccttaactaaaatcccagggaactgggggtgtgttgcccacattttgaaattcttgaatggttttttaccactaagcacttcagggtatatggttaacacaatttgggtgcgatcaaaggctccctcagtcaagaaaacagcttcggaattggctagtttatccagccatgcttcattgacaagtactttatcaatcttcgaataaatcctctcatcatcttatcttttgttacaccatgtataaaaattcccacttgccttaagatcttctaaatgacatatcttaatgcaatttgcaaactcaattgctgctttgtacttcacttttttaccaactctctcctccttatgtagtatttcattaaaatcccctaataccacccattcctcctttgtaaccaactgttgtaactcattccatagctcaattcttcccccatcttcattgaaagcatatagaaatgttgcatagaacttatacttgccatctacagtagaaacatgtaaatgaatatataagttgactagtggatttaagaatgcttacattg

SEQ ID NO: 208284 - DNA, 792 bp, Cannabis indica
ggcaaaacaattattgtgaaaactattcatgttttgtcgtttatggttaatgcaaaatatgttcactttcttctctctttttctttgcttgcaaatcattcttattctatttatttagcaaaatatttgtgcaaaattattatcattatttttcaaaaatagtgaaacaacaagactactagcaaataccaaatggggctaatggcatagttaacaaaaaagaggggtctaaataacattaggataataaattagattacaagttgcaataaaagaaaataattattttttttattgggttaaaagaaaaattaagaaatgtcctaatcataattcataatcacgtattgagtttttttttaatttaaaaattactatttaattttgggaaacaaggattcctttccttctttttttatggtatagacaaaacgtggggcccacatacttatcatcctcctccttatacgtacgtacgttttcttactacacacgtgactcgttcttcaaattctcgcgagttttcgtgtggcgatatctactttggatgctatgtttcccaaccacagttgccaattgtagaagattagggaggaggctttccttggcttgtaaagcggagaagagaccaaacctaattgggcttagccatcagtattaggaaatagttaagttggaatatggttattattaacttaataatcaatttgtttagtcaaattctacttttttttaatttttttataataataaaaaaaaatatcgttggttttttttgggagactttgtaaa

SEQ ID NO: 208285 - DNA, 1251 bp, Cannabis indica
gattattttttttttatatatatatagtttaattatagttgatttatattacttgtcttgagtttcatttctctttgtttttagttatttttaattttgttgaactaggtatatttttataattttaaaaatttataaatacatttttataattaaaaattttataaatatatttttataattaaaaaatttaaatcataaaattatatattaaaaaaaaaaaagtgttttaaaaattccctttatttattacaactataaagattattattttatatcatttcatatctttttttttttcttcctttaattgctatttattctttcctcaaactatgggcaggtcgattatttaattgaaacaaattgatgtggagtatcatgtggaattaatagtgataataaagtgagcaagacaattcttaattggtgtttaaagttatattaattccaccggggggctgcgactggctggggaatgggggcacactaataaatgcagttgattagcaattttccatttctaaaccaatttattgtaattaatatactactctcaaacctatcaacacataaaattttcagaatttttattcaataccacttggtgccattattaacaacatgtagatactaaaacagagttctgttgacatgcattttaaagtgtccaacactcatatatagtgatgacatgatagcgcccttatgccaattaacaacatgttcatactaaaggagcattgttatatagtatttttttaattatttattaaattaaaatgtaggtgtaaaatccaatagtgaaatatacaaatggcaatacgccattttttatgatatctctaatgaagacgtcacgtagagttaaaatatgatcatttaataataaaaaatatgttttgtgtcaaaaaataatgtaaatttgtcacataaattgtaacaaatttaacacaacatatttgttataatataaaattttatcatcataaatgcataattttattgtttatttttatgctactttttaatattttattagtatattttttttcaagaatattagtatatttagtcctatatcatcagttatgacctatttatattctatttttattgtttgacataataaaattaataataaaaaattattgttttttatattttttaataaaaatatttaattttactaccaagttttacgttatatatagagatgcacacgggacggggaattggcggggagtgctc

SEQ ID NO: 208286 - DNA, 2651 bp, Cannabis indica
aaaatttttatatctccatggtaccaagaagataacgataaatattctacattaaatattaaaaaagagattattttacaaatacacaaaaataataaaaaaattacaaaaatacggttatactgaattttaaatattgttatgattttttgattttatttacagaaaatacagttttttttatgttgtactcttgctaatttgttgttgatttttatttttttatatgtatgttattttttgttattgttttgatgttatttaaatgttatttttattttattttatgtaattttcttgtaggttttttgattttatgaaaaactttaaaaatatataaaaaaaattattaatgttattgaacaaaaatattggattattaaaagtaaaaaaaaaaaaaatagggggaaatggatagaggaaaagtcatgggtagagtcgacagcttgttagatgaaggcaaagaacgcggcaattacagtgctcgtgtcaactgtcaaccacaccatcgatctttatatcctcatcactgcccacttgtctctccctcttttctctgcttctctctctatttctcattactctctcttctgtttctcattaccccgcccattctctattttacacttcacattcaatacatacatacatacgtaacatatataaaaacgccatgactggaagagaaatccttaacaagatgaaggtacgccctttttttttcttttaatgcttttccttctatttcctttcgtgggtactcgttctttttcgttttaggatttggatctctcctcaattttaccatttccttagactgcttctgcttccctttttggatacgaaaacccgtttctctaattatactagtttcaattggattctttcttaaactccaattatgggaatcgtacctgggatgttgcataagatttctagggagttaattttaacagcaccttttgcattgtatatatttacattcatggaaccctgtcgtagtaaacgttaaggcataattattaagttctcaagatcagaataatcatcaataagaattattgaagagtggatgttatcatgttaggatccggattttctttggtacttcgaaggtttaattctcggtttgctgatgattatcattagtggtaatgatatctgcgatatgaaggcacaagatttaggagttaattgcagtcttttggggctctactaattgcaatcttgagctgattgaggtgaaggatgcggctgtggattcgggtggcattgcattgagtgcaggagaatgtttgtgacaaaattttagatacgtaaaatgctttgaaaagttcaattgatcattaataaaataggggcacgtactgaaagaaaagaagagtttaactatttaaagttaggtccccttcttccacctggttgggccgcaaattcacactctcacattagtacgatagcttgttcatatcccaacatttaatgactagcttctctagattcactgtctctttattgtttgtacaaaagtattatctgctgaaaaatcatattgagaataatgcaattcttctacaggaaaaagtgggattaggtccatcggattgtgagtctgggaaagggaagagcaaactgcaaaagcatgtaacacatggctttcacttggtgaaaggaaaagcacagcatcccatggaagattatgttgttgcccggtttaagcatgttgatgacaatgaactaggattatttgcaatatttgatggccatttgagctctgagatccctggttacttgagaacacatctctttgaaaatattctgaaagaggtaatcaacggtacacattcaatcttttcattttgggatgctgtagtctagttctgttactttacttgtgctgttttttgctagcctgatttctggacagaaccagtgaaagcagtaaggagagcataccgcataacagatgataccattctgaacaaggcagttgatttgggcaaaggggggtcaactgcagttacagccatattgataaattgccacaagctggttgtggctaacgttggcgattctcgagcagtcatatgcaagaatgggaaggccaaacaattatccatagaccatgaaccaagtgttgagagagagcacatcgagaatagaggtggtttcgtgtccaactttccaggtaatctaaactaatcaaaagtgtcatgacagttcttgactggttaacgttatgattgttttttacatgtggggtaacgaagttggtttagatgttggttatctctctgtattcatgattgagcatatctttttttcatgtaaccaggggatgttccacgtgttgatggtcagttggctgtggcgagggcgttcggtgacaagagtttgaagaagcatctgagttctgaacctgacgtgacagtggagctcattgatgatgaaacagagtttcttattctggctagcgatgggttatggaaggtaatgacaaaccaagaagcagtagattccatcaaacatataaaggatgctcgctccgcagcaaagcaccttacagaggaggctcttcacaggaagagcactgacgacatttccattgtaattgtccgcttttagtcgttatatatatgtgtgtatatata

SEQ ID NO: 208287 - DNA, 704 bp, Cannabis indica
attattgttgttattatttaccactgtacgagaagtaccaattatctcttcttcctctccattgttatctacatccatttcaagtagaatggccatgactatgaatattggcaaatcgtagttgaggaagagaatgtattacatatatatagagaaagaaatatataatgagaatattagttatcttaataatatatatatttaggttacttgtatacaaaatatcttttatttttgaaagttatattaattatcatcttcttctttttcgtttaaaagttattttgattttttttttaaatttaaaattttatttaaattataaaattctttttgaagcattattattatgcaatttttattttaaaaaaaatgagatattttttccaccttcttctccttccctttcgaatttttttatatcatatatctcccttcacaccatcgttccatttttattttcaaggatgcatttttaatattatttaaacttatatttatcttttccttctgatttttcttttaaatatttttttttatttcaaaaccttttgttgtaagcattttttattattaaataaatttcaatcacacaatataaatcccacaaatcgacgtgatcatttacaatattaacagaattttatataaaattagataataaatattttcttgacaatataattagataataaaatcttttt

SEQ ID NO: 208288 - DNA, 905 bp, Cannabis indica
aaaaaaatattgcattaattctcaatgggatcttacattatacagctatgaagtgcagaacatttcacaaagccaaacattcaatcacctcaactctcttgtagggttgtcacttatctagcttaaacctatgcttccactcttacattgacagccaaagacatttaaaaatttatttggtattattgaaggattttatagcatgtattatcatatgtgtaattatacaaacaaaaacattgttattcacaaaccaaataatccattatctaaactattgttctcaaaggtaattgtaaccaaaaattattctgatacaaagaaaagagattgaaatttacctcaaagtgtccaattacaatttaacaaaagatcatgcaactcataacaaaacaataagaccaagttacaacccagattttggccttctcccacatacctaaattctgcttcattctctatttcttcttcaaagattctaccatttctctctagccaaactgtgcccagaaaataggaaatcagttttcaagtttcggtatggcgatttcagagcaaactggctctttttttgaagagaacttctcccatcttcagggttgcctgttaaataaaaaggaattgcatataatgagcttttgtatctttaacaaatgttttttagttgaaagtgaatggaataagaacatccatttcaaagaagtctgcaaagtgcaattaataatcaatagattagtgtgtgctgaaatgccaataataaagaagctttcttaacaatcatttcaaagttgaaacatagagaaaaaagaaaccaaatcaagaaatgttaccttcactcattcaattgagcctgctttctatgttgaaatctagaaagacacaatcacacaaaatcctcaaaattg

SEQ ID NO: 208289 - DNA, 1557 bp, Cannabis indica
tattatttaagaaaaaatacatatagcctaaaatatgataaaccatttatctttttttcttttggtaataataaattgaggaaattacattatatatccacttcattttatctattttaatttttacttttatttctatatttttaagatatacccgcttttataaaatgatataaataagtacattttaataaaatataatataaatatatttttgattaatggatataaaaaagaaatattcctcaatttatcccataataattagttttaggtaaatggataaaaggcccataagaagatgtagacctatctgatatagaaatcataggcctgtagagctgaacatgacatgcggcactgagtctagtccagatttgaatgtccattatttgataattttggtccaaaatgctggctacagtaacgacactcattacccattttactattattattacacaacacacactatattatcacctaaatatttttcaccaattaaattattgattaataataataattttgaaattatacaaattactcttgcattgccccatgtatctaattttgggcccatagtattattatagttggcccattttgcattctcttacatttttctcgtgctttctcaaaacaacaatatatatgcaatgcagcccccccttcactttgtcaccattcaaaaatttcaaaacaaaacttatttatttattttgttaatttttctcaaataaattgtgttaaatgatttttcttttttctttttctttttttttttttattttcaaaacttgaaggaacaacattgaacatataatatagtttatttaatggaattaatagcacatattctttatctcatttagtcccgttaattgctacactaattacggctaatgttttcttttctcttcctttttttttttgggttttgttttaaaaaatatgcctcttaaaagcatacaaggtatatagtcaagaaaaagtgaaatgtaaattgaacccaaaaatcaggattaatggaaggatagtgttgtgtaatttttctcccaaaaaaaaaaaaaaataactagaaaagtagtagtagcttagatctagggaggttttatttaattttcaataagtcaaattaaaacagaggcattggtatttgagtgagtgttatgtagtgagtgaattgaattgaccaatgcatgggtatagtaggagtcggcaaagcatgcgtaggattgtgtagtgtctttgcaaaagtgagagatcatatatatgtatatcttacccattccctacttcaaatccaataattcatcatcaattaataatatatatagagctacataaaacgtcaacaatctcatctatatgtacatacaatataatatattatgtaatatagaaaatcataaaaaaaaaaaaaatttgttaaatcggctccaagtgatgtctaacaccactccaaccagtacattttatgactcgtatcaattttttgagttttatattaaatttaaaatatgtaaaaacctaatacatactaattatatcaat

SEQ ID NO: 208290 - DNA, 1284 bp, Cannabis indica
tatagagtgtaatttcctcaactgaatattcgtggaccgaccaaagcccattaggtgttttgggcggaaattgggtttttcttttagtgatgtgtactgctaacattttggtattttagaaaataaattacgttttttgatattattaaccagtttctaccaccatatcaatttttaaattaaaacgaaaaagttactatgaaagaaaaaaaaattaaatcataaaaaaactaaaaaaaatcagaaaaattatagttcagtgacatacttttttcatatatataaaaattaattttaaatttaccatattttttcatgtacaattatttcatgtgtttagtacatatattttatatttaactaatgtgaatcaagttcaaaaattaaaaaaaaatgtttttagaataaattcgttcttaaatcaaaataaaatactattagtttctttctaaatattaaagaaagagaaaaatctgatgaataaacagcaatccgtaggaaattgagggacaaaatctgatgaataattggttattcgataacaaaagtgctctttccttttttagcaatttactatcaaaaattaaaaaacaaaaaatgaaaagtgctcattgattttttctgtgttttttagttgagaaggtttcgtaactttttgctttgttgtagagttgtgtttgtaattaattaattttgtatattaaataataaatgtgcctaacccaacaatgtcaatgtgtgcgtgtatgtttgtaatgtaaccactctactctagactctactcccctactacccaacaaacaattttagataaaaccccttcatttttcattgacaatagtaatattattagtaagtatagtaaagaagagatgaacaattagtcaacttttcatttcaaatgaactaattaactagggctgaaagaatactaaaatacaactgagagacaaattaattagactcttctttgggttgtgagtaaatgcataactaaagagaattgctaataagtattattggtgtctagtactatctttggtgtcatacggttattgtttttattaagtatcgagtctcgtataatttagaaaaataacttttaaataatattgctaaccaatcatggagcactacctataaagatgtttattagagttagttagattagttagtttgataattagttgttaggttttactgtttcagttaagcaagttagttaagttggttagcttctcttcctaactgactttgttttcattgcctatataaatggctcat

SEQ ID NO: 208291 - DNA, 607 bp, Cannabis indica
gagagcaatccccgcacccgcccaacccggtttacatccctattcaatccttggtccgctggagttattttcatggtgtttttctgaagctattctgtcaaaataaatttacactcattaatggtcttaagattctccctaggcatcaggaaagggcatttttaacaaataataaatgtttaaatattatctaataataattattgcttttaatactaatataattttttgtggtcatgtggttcgagacaaaggttggcataaaaaacaaaaattgcttcattcccaataagaaaataataaaaataaaagtaaaatagcgtgtttattagtgatataaattagaagagagtgataacatttattattatatttaattaacatacaaaataaatgctcttctctcctcatttcataactgtacaaattaaatcgtgtatatacatatacacatgtaatgtatatcatcatctttatcttccactattttcgcttttaaagcgttttattggatctcaaacttttcaaaacggtttctacactacacaccattattattattattattatttacattacagtgagcagtacatgtatatatatatat

SEQ ID NO: 208292 - DNA, 1120 bp, Cannabis indica
tttacagatcaatgtatggaagtcttgcaaaatgagatgagttttgacaaagttcaatgtaaaagctgaagctaataaaaattgaaaatctttgagtttgctatgacagaggaacagtgattcatctcaaccttagtttatcacttaaaatgtcttgggaatcaactcattgtgtaattttccctgctgtttcgtttttgtacttttagtcacagcaataatctattgagttgatcatagtttgcatctcacagtcctcttacttttcttgtgtatcttaatcttttcaagtaaagtgaggaaaaaacctatgtagcataatctccctcagttatcattaccactgaatatagcacaaaacgtaaattatccatgttacaactataagttttccctgagctataaagtattcttcaactactaaaatctttaacatttgataaagtacaaaaacattcccttaaaatgataataacattatccaattttaaatggtctttttatataaagttgtagaagttgtgttactctcacttttcagtctgtaatatttgtttcaaacatccaacctactattgaatataataaaacttgttaatagagtttaattaatgttaagtaatgggattcgtcaaaaagaataataatgctagctagcaaccgatgctcactttatatatggtgtaaatgtataggtactagattgttttgggtggatgtggatgagaagtagtgtgaaaggacaaagtattttcaaattattggaaaaaagggttacgattaaaaagtcaaaacaaaccgtttcgccgtgtcttgtattggttggtaaacagtgtcaataatctgcaactcaaaactccttttttgcggcagtttcaaaatcctgtgtcatagtcacatagagttgcaactatatatatgtatctttttaaaaacaaaattaaaaaaaaaataataaaaatggaagaagacaaacagagaattaatcatgcaaattcatgcatagatgataacgatatgcatttagaggcacgtcttctcttatgatcgtttgaacaagcagggcagttgaaccgaagtagttgaaatgtagttggcctttaccctaccctgcaagttt

SEQ ID NO: 208293 - DNA, 797 bp, Cannabis indica
ttttaggttgaaggattagaggaattcttcagtcaacccagatctgatgatgcccaggttgatgaagattttgttcttttgtcaccagatcccaaaacttcttgcagaatctctacaagaacccaaaaaccagtatcaccagaacccgaaaccgtgcagccaaggactgaaactcgacggggaattgttgctactcctgcaactaggagtattgtagtttgatttttgggtaggggtttgatttttctccagaaggtgataatggtggtggtttgatttcaaggaaaaaaaaggaagaagaagaactagaagaagaagaagaagaagaaagatgaagaagtaaaaaaaaaagaaaatatatttttttttaattatttttctattttttaaacattctaaactattttttaatatataaattattaatattaggtggaccaataaaaattttccatgtttacacttgtgtacaccgtgacggtccactttggtacttaaaagaccaaaatagacggaaagactacagagcaaaatgatggttgagttcaggaagtatagccataattttttgagtaagggattaaaccgtaacaaacataaaagtatagggagtttggccgcaaattacccttgcaattgcatggaggccctgttctagtagggttggactccaccagtactctgtctttggcttatttggacatgccacgtcagggtgataaaattgttgggatttatgacctaaataaaatctatttcagtatcttatatgtaatcaataaaagattagaattcat

SEQ ID NO: 208294 - DNA, 1094 bp, Cannabis indica
taatattaagtttttaaaaaaaaccatcacggataatagaataaaagaaaataaatatataagagcactatcataagcttctctactctattttttaaaatatctcacaaaaattttatttttttatattttacttcacacttttacattacaccatatatatcaatttttctattttttttatctatatcatttaaatgttatttttaatatattatattatttttttttaaaatgaaatacattaatatattaatatcacacacacatatattaaaaaaaattgataaaaataatataatatttatagctcaatgaatactgattctctacatgtagagaatcactatttattgtagctaaaaaaatgtattatagctcaattttaactcatttaatagaatgctccttttacgtatttatttttatatttaagagaatgaactataataattcaaatttaactcatctattgtgagtgttctaaagtataataggagttattattattattattattttgaaaaatgtactttgttaaaatctgttgagtaaagcaaatgggagaaacctcaaaaaaataaagttggcataatggcatgataatatcattaatagaaatactaatataaagggagtagccaaagtaagagttagtttccttaatgtgtataacattgagacaaatgaattccaccaacatgagtgtatctaagacaaacgcaaagcccaatctcaaagaaaataggcaaagaacaaaaggccaagtgttgtgccgtggccaccatcactccatctaattcctcaacactcaacaacaccacaccaaggccattggatttttttaataaaaatactaaaatatgtttttttattagaaaataaaaatactaaaattatgttaggaatgcaccattacttacacccacataatattagcacgtggaatgtgaggttttataattttacagtgcaatatatcttggcacaggatttaaggtaggactcatatctatgaaaaaaaacaaaaaacaaaaataaatgttttctaaatgtggtggttgtgagaaaaaataaataaaataaaaaattct

SEQ ID NO: 208295 - DNA, 518 bp, Cannabis indica
ttctagagaactatattgtcgagtatagagatcaatataagtactaagttgttatagtcaaaaagtggttaaccacaataaattcagtagctagtaatcatttttttttcattattgttcatatacaatttacttgaaatcaattattcatgtgtttgatcgctttattacgatcttcttatatccattgaccaataatcgcatcatcaaaacaaattaaaaatatatattcttttccttttgtatttttttcctcccctccggttgaattctctcgccttctttctacctctgcacctttggttcttggcacgctaacgctgcgtccagtctctaaaattctaaaaacctataggcttggacaacctcacactcaacttcctcgcctccaaactcctaagtaactattgactcaaaaaatggttaacgaaagtgtcatttgataagcaacagtcgtacatagagaacgaaaaattaaacggttaacacaacaattttatattatgtcacccctgttc

SEQ ID NO: 208296 - DNA, 854 bp, Cannabis indica
atgtgaaaacttgatgaaaatatagatcagtagagggtcgctatgatcctagcaccaaaacttaagagggaaagagaaaaccagaaagtttagcatgttaaactctacaccatgctgtgaggatagtaatgaatcttatgatcaaaattatacaatagttttctaatcttacgttttttttttttttttttttggactcacctgaatgtgtttgaagagaatattgactcttaaaacttcattattttcattccttagaggaacaccaggtggaacatatatccggcggtaattttctaaagcagtactatttttcttcagcttcttggacaatgcacttaaaaagtcagccatgaagacccagccaaatgatggaccatttccaatcgtcacacgattaggctctaccatgatagctttttccttcttgatcaataaagagtacccaacagagctataatcattaaagatgggcccagcaaagagatacgcatcagcagactcaacaatctctccacagaagctggtgctgacggcgccccaataagttccaatgaaatggggatggtgctctggcacctggcccttagcggagggcataacagcaacagggtaaccactagcatcaacaagctctacaaatgcttgttgagccttagccacccttagttttggtccacccacaagaacggccttaacagctttgtgtaggaaagcaacagcagcgtcaactgctgcttctaatcctaattgattgcttactctgcagaaaaaaggtaaatagtcatgtaaaatctaatgttgcttacaacaaaagaataaaattttactaaattacccaaagaaaataagtt

SEQ ID NO: 208297 - DNA, 481 bp, Cannabis indica
ctccttcgaatgggaatggaattgtagtaaagtaaacaatgactgagatccacgacaacatgtggtcaagtagggtaacaacatcatctttctcataattacaatgtattttcttttaaattttacttgtaataaaattattcttattttatttttctttttgtttttatatatctcaaatgaaattagcgtgtaataaaataaatcctttaaattatcactacataatggtttttttgcacaattttttctaaaatatctttaaactaattaaaaatatttaatcatatataaaataatataattttcaggaaaattctaatacacccatttaaaaagatacaccaatacatctctatctgttttagtattcgaaataatttttaaatcaatttttttttatagtcctgtgaattatagttatttaagacattcaacaaaattttaagaattttggaaatgtttaacacgtcaaaaattg

SEQ ID NO: 208298 - DNA, 2085 bp, Cannabis indica
aagttgctagtatcattcaacagaattggagcacacaatgtgcaacaaaaagtattgatctttttcttgataacctgcaagcttgtacaacttccttacaacattggcatgctcacaagtttgggaacatgaagcagcaaatttcaaaagtgcagaaagatattgcagcactcaagaattctgctatcgggacgcaacaaacaatgatagatttaaaaaaaatcagagtcaatctttgatgacttactagcacaagaagatatatattggcaacaaagatcaagggtaaattggatgcaaagaggagatcaaaatacaaagttcgttcatgctcatgccacttcaaggaagcaaaataacaccattaaatcactcacaaattgaacaggtattactcacagttctaaggaggaaattacaacaattaccacttcctattttcaagaactctttactgcttccacaatcgacgcaagctctctcaaccataccattgacaccattccaacaacagttactgctgccatgaacttgcaacttacaaagccatttacaccagatgagatatatcaagctttgaaaacaatgagtctggataaaagtccggtagtgatggaatgtcagccatgttttatcaacaatattgggagatagttgggccttctgttagggatgtgattttgggagttcttaacaatggacaagatatggatttaattaataaatccatcatcactttaattcctaaaatcaataatcctgctggtatgggtgactataggccaataagtctttgcaacgttatctacaaactcatctcaaaagtgttggtactcaggttcaaagatgtttagccttctgttatttccgaaactcaaagtgctttcctttctgaccatctcatcacagataatatcttgattacttttgagttagtccatcatctcaaacatcaaactcagggaaggaaaagttcttcaactctcaagttagatatgagcaaggcatttgatcgtgtcgaatggagctatattgaagcggtgatggctaagatgggatttgatgctcgctggatttctctcatcatgaaatgtctctcctcacaaagtttctcattctctttaaacagtgaaattgttgggaatgttattccaagtagaggtcttcgacaggggaatcctttatctccctatttgtttttgatatgttcggaaggtcaatctcgcttgttgaatcatgtagaatcttcaggtaatcttcatggatttcgtctcacacggcaagccccaccattacacacttgttgttgcggatgatagcctcttgttctgcctttcttccaactcatctgccttagctatccagcgtgttctacatatctataaccgtgcatctggtcagctacttaacattcaaaagtcggttatgtctttctcaccaaacacaccaactgcaactcaacaattttttcaagaaacattgaacatgcctttagcgaatgtcatgaaagatatcttgggctacctgcatattctggaagagataaaacataaatgttcagttccataaaagagcgaatatggaaatcgcttaatgcttggaaggaaaagttgttttcaattggagggaaggaagttcttctgaaggcagtggttcaatctatacccacatatgctatgagctgcttcagattaccgcataagttttgttaccaaattgagtcaatgatggctaatttttggcggggatcaaataaaaatggtaacaaaatcattggaaaagttagattgttgtgcaaatcaaagtttgaaggtggtatggggttccgctctttcgtacattttaatcaggcattattggctaaacaagcatggtgcatctttgaaatgccaaactctcttctcagccgtttgcttcaatacatatacttttccaatacatcttttttggaatcaaacattggtccttccccttctcttacttggcaaggaatctgttggggtcgagaattgttgctcaaaggccttcgatataaagttgggaatggtatgcatattaatgctaggacatcaccatggatacctg

SEQ ID NO: 208299 - DNA, 525 bp, Cannabis indica
aagtaactgcaaagaaaaatagttacaaagtttaaacttcacgtaatacttgtagctaagtctatactacactactttaggacatttcggttgacttaattatcatctgtttcggtaaattttttatctattgtgatatacatgagagttttttaattcaattgtttttcatgtttacgttgtagttatttagaaccatctataaattttctaaaaaattctaataatttacaatgccgaaaataaaatttgaatattttattacactcgggattgttttttatataccgtagtaaataattatttgaacgttattttcgatattataaattattcagagttctctaaaaatttacaaggtacaacgtacactatcataaaagatgagaatggttaaaatctcttatgtatgccaaaactaataaacggatttacagtactacaaattttctcatatatttatgatgagtattttcttttgttgatattttccttaggtgtaattgtgggatttatttactggtg

SEQ ID NO: 208300 - DNA, 715 bp, Cannabis indica
agtagtcaagtcttggtacacagttcaaaaaaccaaactggttctttgctctagtagtttaccctttacactgctcgggcaagtagaccttgtgcgtgtatatgtgctacttgaagtctgtttgggatattcatcttcgccaaggtgcaaggaatgttggacacatgtcactcgtatgtgttgccacgtcatagtgaaaaaaaataggataacaccaaccatgttgaatccgcatgtttgttattcaggaccatagggcactcgtaaacatgattgtaagtgttaactctgaaggtttttttatcatccataatatgagcatacaactcccatggacaagtttcatgtttctatttaaccctaacccgatttgattcatgggccaaatagtaaaattccttgtcattctaaatcgagtactcctttatggatgtccttggcaagtgtatagagccaaactggatgtagaggtcaaacttgaagtcttcccactttatttttggattatactcttttgaactctttcttggaactacttcttctcaatcatcactacacaagctagctaggtcttcttcactttccacacaatcatcaattggatcgttctcattgcacaaagcagtgatagaagcccaccatttgtttggaccaattggaattttgacctctctctcttcttgtatatcttgagcatactcttcttcttctagtt

SEQ ID NO: 208301 - DNA, 748 bp, Cannabis indica
taggagaggctcgagattgaatagagttgatgaaacacatgtcacggagagaagtctaagagttatcgagttgcaagagatagagaaagaatgctaaaaatttctacttgacagacttggctatgcagactatctacatcaaaatgcatagctcttgcctttactattgcagagaaattgagagcacagaccccattagctatgcagaagcaattcaaagcaaagccctagagaaatggttaatgtaaatcaatgaagaaatggactctttaatcaagaacaaaacatggattatggtgaaaagacctcaaggtcaaagggttataggctgcaaattgatattcagagagaaagaaagtgacaaaggaagaggtcagatcagatacaaggcaaggatagttgcaaaggggtttagtgagaaagaaggtatagattacaatgacatcttctcccctattgtgaaacaaacatctatcagaatcatgatggtagtggctgcaaaatttgactatgaggtggatcaaatggatgtacaaaaatagcctttttgcgtggtatgttagataaggaaattcaaatgatacttctagaaggatttgaagtagacaatctacgagacaaggtttgtctactcaaaaagtcactatatggtctaaagtaagcaccaaagacagtgaaatttaaggtttgatgagttcatggttcgaattggtttcagcaaaagcaagtatgatccttgtgtctattt

SEQ ID NO: 208302 - DNA, 594 bp, Cannabis indica
atatataattgaaatagtcaagttgtctggtaatgttctactgatttgtcagaagaagaaatcttagcataatattgccaataagtaaaatcaatcaatcttagaatctagctgtcttgttacatgaattatacattactaaaatatataattttttgggtccgaattatatttggtatttaataacaattgtcttggtataattatggaccaaatatatggtatgctaaatccatggaaatcatgatgctacaaataatttagtgagtttgaccatataatcacaactttagctctaattgttttgaataataaatagatatattgttaatatcacattaaaattcaaactatgaaacataactagaaacttatacgatagtatatgttttcttttctggatgatatattaaaaatcaaaatttgttaattgggtatgaaataataagataggcagaagatttgagttcaaaaaaattccactttcaaataagacaactaatatcaataatacacaacattggcataagaaaacctctaatatttagagatgcaagagtgaaaaacatatttgcctttataattatttttttt

SEQ ID NO: 208303 - DNA, 606 bp, Cannabis indica
cctggtttatggtatacgtcattgtagaaattctatttttggggagcaaaagcttcctatgatacatgttacagtaaaaaaaatataatgcatattgtaagtattcaattcatcaactttaagaagttcaatagagtagacaatgatgggtaggggagcttattagagtgtgtaattaattgtttttggctttttcatttggttgtaattgagttttgtgtgaatatatagattactaattttattttcatttttttcttttttttttaaaaaaaaaaaaaacctgccagagtggtgtaattaactcttatatcatcgtatcatagtctaaagttggttttgccaattattccttgacctaccaatgatataatcaggctattgacttgttacttgttaaagaaaacattattgagtcatccatatcaaaatttaccaataaacaattcacttgttactcgtaaattaactaaatcctatcaaactccactctgtaatttaatttaacgaaacatttttattataatccagtgaaagactgacccttaaatataataaacagatcaatttcagtgcccacctggtattgagattaaccagacagaa

SEQ ID NO: 208304 - DNA, 781 bp, Cannabis indica
tatatatatataaatatatttctgactgggaactttagttatgtttcattgaataaatgtgtgtatgtgttcaggcaattactggagaaacgatactgtcaagatgtgaaaagaatacgtaaaaccttggattcttgtttaagccaaattcaaaatatggttccattactgctggctgcaaaggtacgtagttgaattctactctctaaattaaagtaaacatcagtattaattaattatctgatgaagtcaagtaagtcattgactactgggaattaaactcacaaactatttttttttttttgtactaattaagaaaaatggtcattattatgcaggtatcaggaatcattcatgatctaaggaatgcaaattttctatttgattctgcagacaaagaggctggaaatgctatactagcactgatgcagcaggacgtagctgccgccaccggaaaagaactcgaggcttttaaacttgcagctctacagcttaaaattacatcccctttggcagtgttgatagagaaaaggtctattaagaggctgattgataaagtaggtgatagttcaaaaaacaaggaaaaaaatattgcaactatcttttgaatcttctaaggaaacatgggaatgtgatcttgcaatgccaaaagcaatagtaccacatctgctgaagagcttcttgattatgatgatcagtgtgtttcatcacccgaaccgcctcaaagaatttaaaactgtcccaatctctgggaggttgatgtatgatcctgtgattattg

SEQ ID NO: 208305 - DNA, 798 bp, Cannabis indica
gaatttctgcatctgggataccattagatggagggttaatcgccaaacagcactcgtcactgtttccatttggaaaaaagcccttccttcttttgctgctgacaggtgaaagatctaccacatcagaactattgtggttggatggatgtgttgacaaattcagcccagacccgttaagcagtttcattggatgtgaatttgaggtgttttttatgggggaaggcagcctttcaagctcaaagtcagtgtttggaaggtttctccatgaactgaaatcacttgcttcatgaggtattgtgaaattccaatccctaccagtaagttccacccaccgtttctgctcttcctcactgaaaccagtgagattgggggtcggaacaacctcgattccgtgcacacactgaggatttgatagacccctataatgcttgcgctgcatcctgtgagatcgaacaaaacccttatcaacactaaatggaaaggggcgttccccttggcgagaatgaccattcatgtaacttctcagctgcatcttacctagtgcattctcaggtcgttccttaaagacccacatatacatgttttccatgtcatgctggaccataaacacgtcatggttaagatcagatttatcgaacccagaaattccattgtggtcgcgtatagttttggccttggacttctcattgagcgcaggcttgaagtaagaagtaaagaagaaccaagcaccccatatgctatccaatcgcttggcacatttccggccaatcttggaaatactgatcaaagtttcagtct

SEQ ID NO: 208306 - DNA, 1112 bp, Cannabis indica
ttcaatacattccatcagttacataccaaaaccaaaccaagttaaccaaaagaacacatttggttttgtgtaatagaatggtaatgataatgtaatgtaataagaatggtaagagaaattgattacattgtttggtttgtagttggaatgaatgtaattagaattattgtgtttagtttagtatgataatgtaatggaataaaatttgtattgaacaaaataaccatattacttttatttaataattataaaatattacaaaaaaaaaaagaagataatatagacctttaactttgtttagtatatttttattaaaattatttcttttatttgtaatggaatgtaattataatgggattatattagttttggtatgtaattatcattataatactcaccgtaataattattacagacatattcattaccattacattactattacaatgaaccaaacatcgccttaattaattaggatttaacatgataaataattaaatacataaaaatgttgacttctcatgagcttcatcatcaactttatcttttctgagtttaataaatgaagatctataacaaataaattgattatttacaaaaaaaaattaattccacctttggtatgagatttagatttgatggaaataaaaatgtaaaatttaaattaaatttgaataataaatatttgtgtttcaaggtagatttcactttttaaattaaaatagtagtaatatcaatcccctccaacacataagttttatattccctctaagtctactctctctaactctattctctccaactcgcacttacattacatatacttcattaggtatcatttcgtaaaagaaataaaaacataactataataaaaatacattctaatactttaaaataaaactaaacaataaaaaaaaaaaaaataaacatgtagctcaaacaatatacttaatcaatctcatcacatctatcataacagtgcagcatacatataaattattttgggattgagtaaaaaatcaatacccttcaaatcttggaagatattggatgcaaaaagctgccctattctttctatttgggactgaaattattagtatagcatcgattgg

SEQ ID NO: 208307 - DNA, 696 bp, Cannabis indica
ttcattcgtgagaaaattgccaagtctaccattagactcatacctgttagtagcaatcttcaacttgcagatgcctttacgaaacctcttccttctactactctcaatggtcatttgtccaagatggccttccatgatatctatggtaacaagattatgatgatatgtcccctgtttctatttttcctctgccttatcattactgttatattagctgaggtagttatatcagttacatcagttcaggttgttaagttgagtctagttttggtagttaagttagttaaggttgtcttactatttcggttggacttcttgaccgacctttagctgtgtgtatacatactcttttctttctctgtattttggttaatcaattcaataaacatttttattcatgtttcattatctcttccgcaataataccttaccgacaatccttccctaatttgcttaaattcaaaataaattaatgacaaataattcaataatttatatcaagataaaccagaaatatggaatgattttaacatttaaaataaaagttatgattttcttcaattattgaaataatatgtgacgtacgtattgaaaaaaaaaaaaaaaaaagaaggaatagaaaaagaaaaagaaaagaaagaaagaaatagtcttatgtgttagtcatcgttgtatatcataattaaaggtggacta

SEQ ID NO: 208308 - DNA, 707 bp, Cannabis indica
ccggtcttcgttggaaaattggagagggtcgaacagttcacattggttcagatatgtgggatcctgggcactcttccttcctccctttatgctacacaggtccaaaatatggtgtggtagcaaatctaatcacagatgagcaccaatgggatatctctctgctacaacaatacttttctcctttggatgttgaaaaaattgtcactgccactaagtttttttcctactgctgatacactcatatggcaccactctaacacgggattttattcagtcaaaacaggatactatgtggtagaatcaatggagcatataaacgatacatcatcttcaacctcacaagaattatggtggaaaattttctggactttatagctaccacaaaaggtgaaaatttttgcttagaaattgttccatgatgcctttcctgtagctacaactctgttcaggcaaaaagttgttacagatgccacatgctccatctgtaaacaagcatgggaatccattggacatgccatgtttgattgcaaatacgcgcaagctgtatggcgttgttcagactttgtgtttgatcaaaaccttgcaagatcaatgaaaaaaggagattatttagtgcacctctcatccatctacacaaaaattgacatggaattcattctttgtactatgtggtcaatatggtatgagagaaacaatgtggtacatgg

SEQ ID NO: 208309 - DNA, 681 bp, Cannabis indica
acgcaagagcatgtattgaacactcacatcctctcacacacgtctcttttaggccggtcctgaaatttagtgggccatagaaaaaaaaatatttttggaccctcaattaaaaaaatggtatttttcaaaattaataaaaaaaaatgtaaaattttaaaagaggttaatttttttgagcccttgagttaggtgggccctaagcacaggcctaattcgcctatgcttagctcagggccggcctatgatcttcctcagttagtaattattgatgttattatagttgagtggttggttactttcaattttcaatgtttttctctattatagttgatgttatttttgtcctattatatgtttgtacttagccaacatatatatatcaaataattaaaaaagaccaaattttttatgcttatacaaagaccaaaatgttctcgtacttattaaattagtgaaacaattcatcaattattattattatttaattgtcattttaggtcactttgtcctaactaattgtacatgtgtttggtagtatagtgttgttttttttaataatagaacatgatgtccaatagtggaaaatgactagataccaacattgatcctaagctacataaatatagatatataaaaatatatactaacaaacactacctgcgagacacgtatactaaattt

SEQ ID NO: 208310 - DNA, 843 bp, Cannabis indica
catgccgagtgactcttgagcatcgatgttgagtgacattgagcattcatattgagtgactcttgagcatgcatgtcaaatggcttgcatggaaaccatgccggggaccatgcatcgctactcctctagagtgactctcttggctcattctttttattcttctcaactgtcagttaactaatctcaacacttgccccctagtctgcaagaattcttttatgtattcttgtgggctagttagtctagtattctctaaaggaattgtgagtctcttccttggcacacactttgtgaaagaacttactatatatagggggcctcctttccttcaatttcacttcaaaacttattccttagcctcgtggtgaccgtcaagtctcctttccaagagatcttaggtttgagtcccaatctagccattttttttttattgttttcttgaattttgatttgttttagtctgagtgatattaacatcacacatggccgagtgaattaagagcaatcaagaccgaatgacattaacatcacacatggttaagtgacttgatagcacttaaggtcaagtgcattaacattactcatggctgagtgacttacaagcacttaaggatgagtgacttttgatcactcatggttgagtgatttgttactgattgcaaagtgacttttttcactcatgggtgagcgactttttgaattgctcatgggcaagtgacttgagaactcttgtggccaagtgactttcaaacactcatggacgattgactttttagtataacattacatgtaaaacaaaacccaacatcttccttcttctctctcttagtttagtccacaaag

SEQ ID NO: 208311 - DNA, 684 bp, Cannabis indica
acataaatgacacttgtttttcatgtattgtaggatttgagtagaccaagtttttgttatcgaggagatacaattactcaatggtttgctcatcaatctatgggatcatcacttcaactaaacttacctttttcctctccagaatatgttaacaacttcgtaggctgtggtttatgcattgttgttgagtttgaagcgacaacattaaaacgtgatgatgtgttgaaatgtaaatataatctggaaaccaagaatggtcagaatcttcaattctcttcaactcttcaaagccaaaaagctactcatttagatgatgatgatgatgatgattctaatttagactcgtcctcaaatcatcaagtgttcgtagggtatctataccgcaaagacatttctatgaaaaggtatactttttttgaggaatattatgattttttattaggtgaggaagagagtggcatatttgagtttcagattagcaaaggaacaataaaacaatgtggagtccacttgctacatcgccaaaatattcagattgattatatatccaagtgattactattcctaattcctattcatcaaggtaatttattactatataaaacttctctattttgtttctacctttattaattgttatttttatttaatctatcaaacaccttacactttttttttaaaaaa

SEQ ID NO: 208312 - DNA, 976 bp, Cannabis indica
aataagtattggtccagcccatgtaaaatttgtctggctcgggccttatcgttgactattacaagcctggtcttgactcttgacaaatgccaacaacacaaaaccgcgcgagttcgagatcgcggagcattacagggatttggtcttttccttctctaaggtagatttaacattttcgattcttctcttccatctcctaactgtttgattcttttcgatttcattctatattttaactctggattatcacagctaacaataaatttatttttctagctaagctccactattcagatctgttttcgtctcaatttcccataattcagtattgtatctgctttgatatatttctgtgctaattcttaagaaatattttagatttaggtttttgtgtctatatttgtgtacaagaaaatcttttctctgttgaaaatctgggtttcccttaaaacccatttgggaactgtcctcgatgttaattatccatgaaagttgggaactgtgtcttttgaagatagttgataggttgatgtagatgatctgcttggttgctgagaaaagattagcttgtatttattatgggattttagttctagaattgattttattatgcctttggctttgaaatggaggatcatgctagtcttgtgtttatatttttggagagagcattatgttcaagtaatttgtgactatgtaaatatgatgaaattgtgttatatacaacttaatcttattgggtttttttaagaaattaaaattgtgtttactttcatgtccactcttctgttatgaacttttagatggaagtattctatttaagttagaattttctacttgatgaagcaggcagaatggattatcgtggttatggtggtaggcaagaaacaggttcccgggacaagctgcactatgaaaaagagcaggtatcccgtagtagttattatcaaatttttatacttgtttggaatagatt

SEQ ID NO: 208313 - DNA, 612 bp, Cannabis indica
aaaaaaaaaaactttaaaaatggtaaaataatattatataaataattgaaaaggtattacttactaatcttattaaaaatacttttaaataaaaatgaaattcaagagtattatgaaagagcacatttattttttttttgctgggaaaacctcaaattaaataaagaagatctaaaatcttggtgatcacaaggggattcacctcccaaaaggaaataaaaccacagctaagatgagacaactcccacttagcaagaacatgagccacttcattattacatctactagcccatacaacctgattagtagaaacatcaaggaaactaaacaacttaaaaaaagaaaaggataaacgccaatcaggaaccatctgagagcgacaggccatgactgccaccaagcaatctgaaactaaagaaaacaccctgattcccaatctctccgccaccaatctcttcgcaatccgaaagagcacatttattaggttgcctgctactacaatgatgtgattaataatttttttttaataattattaaattaaaatattttaaatttaatatttttttttgaaattattttaaacttaacattaaattacattaattataacg

SEQ ID NO: 208314 - DNA, 546 bp, Cannabis indica
tcctaaacatgttttaaatatatataattccattccttgtttctcaatttcaggcaagagcttgaaaagtctgttctttattctgaattagacgtggaatactttgttgattcttgtgtagtagggacatcatcctttcatgtttcttatttacaaatccctttttgaaatgaaacattttaacttgggagttaccaattgtattgattcaacccatttgtgtgatttatgggtagtttttttattattattatttaagtatttatatataataatgcataacttaggacttgaactcaagactttcaacacacacctactcttcttttatggtcacttgagctagcctcaagtagctagacaaactagagacttagagagtcatgtgggatgcattaaatatgaaaagcttcacatgaattacatgtgatgtgattattataactgtttcattgcctacactcactcactcaaatcaactcaactcaactcttgatgcatgtatgttttgatatggaaccaacactcttgatgtatgtatgtttt

SEQ ID NO: 208315 - DNA, 1153 bp, Cannabis indica
tattatatcatacacattgcatgtattcttttatatatatatatacataaaaatcaacttaaagaataagaaaaacaaacacaataattgtgcaaatatattcagatctaagcttatactaatgtaatataaatcaaagaaaaataaaaggagaagaataatttagaatgttaacttactcaaacaaaaatggttataaaaaaaaaagcttgaaaagagagaaggagtttgagcaagagggtagataactgactcagaatgcgtgcgatggcaatagctggaggcgatgatctctgctcgcgacgaagggatgctggccacgatgaggaaacttcgacaaaggaggagatggagttttttttttctgataatgaaggagggttggtgttgaaagctcaaaaaaattttataatttttaaaacttgaaaatgtgtaaaaaaaaaaaatgagaaagcataaatgtaaaaatttctttatgttaatataattataaaatttaactaaattttagtatgtaatgtaaaaattcatttacattacttattgtaagtactcctaagaatctagtgtaaaaataaactaatataaatataaaaaaaattaaatgttaccaaataacctattaaaataatttgattttattatccaactaattaaataaatatattacattattaaaaattggtcagttatagtcagtttttacaattttataatcgaccgtttagaaattataactgtataaaaccgaccgtacgatttttagtgattttttagtttggcagttttggataggttttggcggtttattgtagtttttgacagtttttttggtttaaccattttttaatccaaaaatcaaaactgactgccatgttaaaaaaatcgaaatcgaaaccgaatgccaaatttggtgatgacgtggaaccgaaaattcaattacggtatggtcagtttgacagtcagtttcagtttttcgttttttatgaacactcctagtaatttgtaagatttatattacacaaagtagcatgtaaccaataaaaaaaaataatatagtgcgtttggtaatatttttttaattatttttttttatttttttaattagaaaattgaaatattttccaaagacatattctataaaactgttttc

SEQ ID NO: 208316 - DNA, 851 bp, Cannabis indica
tttctcttctccggcactggcggcggcgtgcttcaggggaccacgtgtgaggctgttatttgtacgttagtggcggcgagagatcggaaacttgcccaaattggaggagagaatattgggaagcttgttgtttatgggtcggatcaaactcatagtgcgtttcagaaagcttcgaaaatcgtcggaatcttgccggagaattgtcgcattatagagacgaataaaacgacgtcgttttcaatgtcgtctaagattctaaaacagaagatgtttgctgacgtggaagctgggttagtcccgcttttcgtttgcgctactgtggggaccactgcaaccacagccgtcgatccacttggagctatagctgacgtggcaaaagaatatgatgtttgggtccacgtggatgctgcttacgcgggaagcgcgtgtatttgtcctgagtttagacacttcatcgatggagtcgagcgcgtgaactcgttcagtttcaacgcacacaaatggctttttactactctagactgttgttgtctttgggtgaaagatcctaaagcgttgaccaagtcgttgactacaagtcctgagtttttgaataacaaagctacagagtcaaacaaagtggttgactataaagactggcagatcgctttgagtcgaagatttcgagcccttaagctgtggctcgtacttcgtagctacggcgtagaggggcttcgaaatttaattcgaagccatgtggagatggctaagcagtttgaagctcttttgggctcggacgacaagtttgaggttgtcgtttcgagaaacttttccttagtttgctttagaatttctccctttgctattactaa

SEQ ID NO: 208317 - DNA, 787 bp, Cannabis indica
tatttctttatttatttatctatgtagaaatggaaatcagtataggtaaaaaccaggggaagctatagagagaacacagagaaaatataatggaatccttgactcttttaatgagagtttctcttatttatagagatagttaagtagtacaaagaaagcaagaaaaactaacttttacaattacaactgaaaatgaactaactcaactaaccaatagcagaaaacaatttattggttaacaatctatatttgtaaagttacaatttctttttgggtaattattaattatgaaaaaaaaaaaaatcttggttgccaacttttgaaaagtctttttaaggaagttttgaaatgtctttgtctctaagttgtcttgatgctcaagttttgtaactttataaatatgtgttttgtgtgagaggtgtgtatgaggaaaaaaattgtaagctgtgaaaaagagaagtgtgtgagtttgttatgtggtgagagtgagtaagaagcaaatgatatattgagatttgggtggagagattaagatagaaagtttatgtaattttgaagtgataagtgaaatatatatctctttatgagtctggtagttttaccaaactaaataaattattttacttcgtttttttgttatttcgctacactcgaaatttatcgtttttcccgtgtaatattatttttccctttcaaacaaaaataataataataagagccctaataataataatatatttttttttaaacaaaaaactctcgtgtaaaaaataataataaatattta

SEQ ID NO: 208318 - DNA, 1014 bp, Cannabis indica
aatataacattaactcattttgttaaccaaatataaccaaaaatttacacatggtcacaatttatcaggagtatctatgaaaaataataaaaaaaaatgtgaaacctgatcctgagagaactagtaaactgccaccctaggagaccagtaccagaaggatgaatacatatatttaatatataaatatacttacatatattcttttggctttattttcgaatggaaccataaatctcttgttattactagtttattccagtcacatgattctaagaatagaacgaaaagtatattcctttcaattcatcttgatttcataggaaataatcaaagagatgatcaaccaatttcagacaagaatgctctaactgtgtttatgttagtcaagaggacttgagtccaactccaaccgtatggcaaaatgctaaattaaaatttaatgctaatttcaatccaattgaacaaacactaactcaaagtctcaaatatgagtatatctataataaatattgttgaaaagaggcttcctcaagttaaaataactcaaaattttatcttataaatagtgtttttctaactattcattctttatatattatttttattatttctcacttcttttttaaatctttttcatttaatttttaatttttttctgatttttataataaaatatattaaatattattatatttaaatagtatagagaaaaaaataaagaaaatatataatatataatgtaatgtaaaagtatgaggtgaaaaaaaaaataaagttttaatgaaaaatagagtaaaaaagatgtgtgagtgctctaatatagatttttacatttaatactttatttttaatataattgtcaaaaatgacttaaccaaatattaataaccattttttgttgggtatttttatagtgtactctctcttttactttcctttttaatgttgttgcatgcatttttctcttttatttttcttttttattttgttaactttaaaataattttttgtaat

SEQ ID NO: 208319 - DNA, 896 bp, Cannabis indica
aagagatatgcagcctgtgcttcaacaaactcggtctatcagatcccagacataagtacggccatgactgccgtaagtttcaatctgttagtattttagggccttgtcttttggcgctcggcctcacgtgcttacacatttttcttgtttttcctagattgctgcagagactggtcatctttcaaagactctgattgatcatgggtacatcatgtccgactttgggggcatggatgaggccatgaagagtcttagggacttggaagtgcagaggaaagctatccgggtggaggcctagtagagggaggcccttttggagcggagcagtcaagaggaaataaaggcaaaggccgaggagctgaaggctaaggatgatgcgctaaaggacagggacgcggctgtggccacaacgaggcgagagcactgggatgctaaagagtccgtacaggaattgaccgccaagctaaagtctctataagagctgcaccaagctgatttgcaaacgacagccaacctaattgtttaagtgaaggggcttcgtgaattcaaagagcaaactcagaaggaggccgctaaggcaaaaagagatgccctcctggccttaattacctacgaacactgcaagaaccgttttgacgatagagttttcatggcttggcagaccaatggccagaatcttaagctcgacttctatcccaagcctgaagaggtccttgttcgcttctgggaaaagaagaaaagagttgacgcagtgttagaggagcgcaggggccctcgtcttccaccccgcattgattaagctagtagttcaccaccaccatcatttatcttcttctttttttttttataacatattcagtccttcccctttctttaagacaatttattttattttt

SEQ ID NO: 208320 - DNA, 1046 bp, Cannabis indica
taaattttgtctgatttacctatgggaggaatgttaaaaagagccttgtttatttgatcaaacacctttcatgtgagcttaattgtaaaggtactattaggctaagctcttgtttcggattgtaaaacagattagtgattaataaagaagtcgggaagacttaatttaattgtgataatttttcagtcaaattaaatataatttttgtgtgattaaatgtgatttttagttacaacaaaaaattatttgtaataaaatataatatttaaatacaataaataataatttttgtgactaatacatttagtcatgatccttttaatcacaatatacaatgataatttataattaatcataaattttattatgattaaaaataaaaagttttatagtactctctttatggtctaggttcattgttttgtttgattctcattctctcttaggtgcttaaattgaattatgtgcttgtattggtatagttatctacacctaaaatataaaataatatataaagaatgtaaatgcaatttggcttgaatattaaattaattaaataaacaaaactttagtatataataataataatataagagttgatgataagcgtcgtacgttgtccaatttcttggagaccagaatgattatttcaataatagctccttaatgttagcaattgacaacctcatatattgtaaaattcaattaaattataataatttttttttttgaatttaaaagtatatttcaaaatatttttcttagttttattatcgattatgttggtgttaattatagttataaattgtgaaatttttaatttttttccgaataatttattgtattgataatatataatttataataattttagaaatttatcatgagtaaaactttaaacttgtaaattataagatgatgattgtgatataaataagtcgaataaacaattatttaattaattataatataaattttctacttatgtactcaaaagatacatgaaaattaatctattgtttatccatttaaggataagtatagta

SEQ ID NO: 208321 - DNA, 1015 bp, Cannabis indica
tttttatttggactgtatattttttatttggccaccaagaagtatttttgttattgttacttttttttagttaaaactgaaaaaaatcatttgtataaatagggattcaccccatttcatcaataaactactgaaaaattctcattgaatttctccttctcttttaatcttcttattcttttctttctttctctcttcatcttttttttcttttcttcttatctattttatattattcataataattttataacacattatcaacacgagtctctacctgaggtaaatataaattgttaaagttcttgaattgtttcaaagtcatgatatattaaatatgtatttatatatatactcatttgattgaaataatttcaagaattttattacttttttcttctttgctatgtatattatggaagaggtttcaatggttacatcaaatatgtaaccacgatggttacatttactttttatcgttggattattattaagcaattgtgattaatttagaaattaaataaaaataattaataaattacctgtaacctaattttatgtaaagagcgcttagctttgttttggaaaatagcaaataattagggtttaattatgaaactagaatattatttatgagttattcttttatggagatttatttgaatttagggtatattatttaagctatatatgaaattttatgtttttatatgttttgtgcccagcaacattggaacgcgacatttcgcttatagaatcacattttagtatttagcagtagcggggcaatatagttagacggaatatcgagaatagtcgaggttttagatttgactaaaatacccctaactagcttggagtctttttgacataagtgggggtagaatggtctttttgaccatttagtttttgtctacttgttagattaattcaagcttgaatttgatattggatgtaatttagttagaatattattagtttatttcattttattcaagaaaagaaagaaaaaatc

SEQ ID NO: 208322 - DNA, 1033 bp, Cannabis indica
ttgagtagtataagtatagtactactagaacaaacaagttctagtactaggaggaggaggagtgtgaaatgaaagtaaattataagaatgtgatgcagaaaagagcttcaggattatatcatatatatagtcgatcgaaaagggtaataattaattaattaattaaatggaaaaagtaaaaagaactggggtttggggtgatcatgaacgagatttctagtcgtatagcgcttgatcctaatcgaaagtgccattacagcttagctttccatccagctaatggcaagccattctaatggccctactactagctcccacaaaaactatttttttgtacttattcgtgttacttcatttgccttaatttcttttataaataataaataaattatttaaaatcagttatgtaatttcataattgtgtttgtatacagttaaatagtttcaaagatgttcacatctatttgatttttttttttcttttcattttcatatattctcgaatatttgctcggtgagcacatacttttcttttctcaatcgttttcttattcttttttttttaagaaaaaaataataaaataaaaaatgtgatttacatatgtggaagtgcatttattttttttatatatatatgtccaatagaagaagagtcttgtctctgttgttaaaatgaaaaagctaataataataataagtttggacgtaagaatggaaagtaacaaataagttgaatgattgtgataggttctactttatagtgtggggattgaaatgaatatgatgttgaagagagacatatatgacattgaattcattattgtttgctttattgctcaaacctaactctgtgtggcttagcttaggctaatccacatgcacgtagtactatatactcttttgaattttacagtctttattcattaatttcttttaattatatatgtataggtcaaccagtcatgaaactatatgataactatccaatcgtatatatttcgtgctctacgtttacatttatatatatatctgt

SEQ ID NO: 208323 - DNA, 1474 bp, Cannabis indica
agatttggacatgactgagtcttctagagcagtccttcaaagaaaaaattttcaacaagttattcctatcactcaagaactgtcaactagcactgcaaattaagaggaattatgaacaaacaatcaggtgtacgtttatacatacagatcaagacaaggagatcaagtcatcaacaaataaaagtggagatgaggaagacttggttgatgttcttttgaagtttcatgagactgaagatcatcataagttcacattaactatggacaatattaaagcagtcatttttgtaagctctcaatatatatatatacatagtttgtcaacttttatatagatattattatcaatttttgtgaaaattaattaacattcttaattggtgacaaaattttcagaacatatttggagctggaagtaatgcatcagcaacaactttagactgggatatggcagaattgatgagaaatccaagagtgatgaaaaaagctcaagatgaggttagacaagtctttggcaaaaaaggattagtgaatgaatcattaatcaatgagatgaaatatttaaaatttgttgttaacgaaactctaaggttgcatcctccagcttccttgttagttccaagagaaagtagaaaaaagtgtgagattaatggttatgaaatacctatgaaaactcggatcattgtacatgcatgggaaattggaagagatcctaaatattggattgaatctgagagttttatgcctgagagatttgttgatttcaagggaaataattttgagtatatcccatttggtgccggaaggagaatatgtcccggtatgtcatttggtctcgtcagtgttgagcttcctctagcaatatttttgctataccattttgattggaacctccccaatggaatgaaacatgaacaattggacatgacagagagatttggaattataatctctagaaaaaaggatttgttcttgattccttctaaatatgatccaccttctatggccaaagcaatgatgatataaagtagtttgtcttaggctgatctttttttttatatatatatatatatattttgaactctttatatgtcagaatacacatattctgactgaaataaagtaaatgtatcacttttaaataattatatcaataaatatttactaaataaaagttctacatatgtgttttttttacttaatattattattaatattttgaaaaaggggaaataaatttctaaggcgaaaaatttaacataatatataccaaaaactttgaaaaagttacaaaattagaaaaataacttcaacatgaattttttattttttttttattttttacgttctttaaattaattatttacaaacctttgtcagcaaaataataaagcattttctgttgtttatagttgtattgtagttatcatcaaattgtttttcttagttattttttattttttttttatttaag

SEQ ID NO: 208324 - DNA, 1190 bp, Cannabis indica
aagatagtggctcggttctggtgggtaggttcgaattcagataaggaacggtattgtgctttgaagtcttggggggacttatgtcaaccgaagaactgtgggggtctaggattcaggagattccatgatatgaatactgctttagttgccaaactttgttggatgatcctaaatcaggaaaacaaattgtgggtgaagattcttttgggtaagtattgcaatacattagatgcttggatggtggaaccaaatgatcatgactcgatggtttggaaaagcattctctctactcgaccaatttgtctaaaaggggctgggataatcgtagcaagtggcgattctgacctctggaacaaaccttgggtgccatggaagactaatcaagaagttaaggacagtttcagctacaacagagttcatgcctttcataaggtttctaacctgttcatggaaggcacaaggcaatggaatgatgaacttataagaacatgttttgatcacgatatggcggagactatactcaacattaagccacttggggaaggaaatgacatttttttttggaaagcggctaagtctggaaagttttctgttaaaagcgcctattggttacatcaacatgatagatcttggggaccaatccgatttggatgcaactgtggaaatcgaagattcatacgcgtctcttactactcatatggaaagtgatggcagattgcgttccaacctttggcagactcagatttctcaagaaccataacagagcctgtgttttctgccaggaagaaacggaagatatgatgcatctaattgctaaatgtaacattactcgcggaatttggttcaagagcaaatgggggattcgtatagaccagatgggctggatcagcatcatggactttgtgaaatggtggttggatcttgaggaccatgaattaaaggtgtttgctgtgtgcatcgtggaagtgctgtggttttggcgcaacaagattgtacatgaatacactccctgggatattcctctgctggcaaaggagtgtcactacagatcgcaagagttctcactaagggaacaggagacagattacaatcctccttcatcaatctcaattcttcctcagatgggaaatcacgacataccggtgttccaagttgacgcttcggtgagcgactcagtagcgggcattgct

SEQ ID NO: 208325 - DNA, 1182 bp, Cannabis indica
agagagataactctggcaatcagggagaatcggggtttttgagaagggcattaggttcgggtaacagtgggaagggagagtaatatgtcgttcttcatctgtgagggaaagtgtggaatgtaaagaatccgaaaaatggatccatatcagaacagggctgcacaacggataacaccagtggagaaggaggaagacggcaaagaacaggggaagtgtggcggaaaggggaggagagacaaggcgggaacggttgtagtcaggtatattcaaaaatcgaaggatggatttgaagaaaaaacagttaaaatgcacaagagatagttaaaaaatataacagacacagacccaaaacagggcactaaattgtggtatatactacgattgtaatcattaaatatattagttacattatattgctagatagattaattttatttgttttaacattataaaacatagaaaatcatttggttgggaaacaaagtatggtctatgagtatttcacgattttttgtgaaattttaaataattaatagtaacaaataatttattgtatacttacatgttttttctttagaaaaatatatgtaaaatagactatttgaataccatacaaatttttcctaaaaaaaaaagaataccatacaaatttccaacaacaataactaatgtaattagttaactacttagttgttagttagttgtaacatctaattagtttattagttattagttgtcttcaagttagtttgtgttctatttttacttcttgtaataaattgagttagctgaatcttttttctcttgtgatcttggtcaactgcattatttttttaggtatatgaaatactgaagagtcaatattaatagcatatttttatctcaaagaaaatatattacttacttattagtcaaggttcagttagaaggtgtcaaagcttattcaaatcttacaagtgttgctcataaattatctctatctgaaggagttccatttgatgacaaaaccttatacataagcactttaggtgctctgcagtatctcactcttacaaggcctgatgtgacttgtataataaacaagttatcttagtttcttcatgctcccacttatgttcattggcaagcttgtaagagactacttaggtacttaaaaggcacaatatctgaaggcttgctgct

SEQ ID NO: 208326 - DNA, 580 bp, Cannabis indica
gttggtcccttcttcttcatcttcttagtaacaactccctgttttccttgcccctttgatcttgtcttcgctatggcaccaactcgtgagcggcaagagctagagaaggagatagaaaaactatgagtcacacataatcaaactattattttttgagcaatctaactatctattttaattattctcacaaataaactaaatacttcacaataattctaaataaatttagaaaattatcaaacttcaccaaataccctaaaataatatatagtttcaaaacctacaaaagaatttgagaaaaacacctcaaatctgcccagatctggcactgacaagctccaaactctttctacagttcgtttagatgcgtctttgcgagaagagaacattcccatagattccaataccttaaagaagcccagtacagttggtattttgtcccataatggctctctgaacacggtacacagacaaaaatggtgtccaaactgtgatttcagttttagactatttcaaaccatttttctacgtcgaacccactccttagggtgtcttaaactcgaatatgaccttccacaaa

SEQ ID NO: 208327 - DNA, 939 bp, Cannabis indica
cagaagggcaagggtaacgtttcaaagggagctgcaccaaagggtccgaagctcggtggtggtggtgggaagcgctgaacagttgtaactgcttcatcttctattcattataactctttgtattagataggtgatattttgtagttttaagtcaaaaaagatttgtaaggatttggccaaagagtttttgtttttgtggttttttagttttggaattattggtacctttgttatcttattatcaggatatgcgagatgagtacatttatatttcttggcccttgattcttattccattgaagaagctgcaattaccatcaccttcattccatataaaaagtggcttttatgtttaaagggttttttagtgactagttccattcgtagcgctgatgactatttcaattcgtccgatctttgcttataaagatagaccttttttagttttacttatacaacactggttgaatggtaaatattgcagtaaagaatactatgagcgttttggtaagagagtatctagagtacgaagatcattttaggtggtttggtgtgtcagaacttcgaagttattagttaacgaaaatttgatttgtgtccctaaataattcaattcaattaaattggtaaagtgtggattttagtatttgtgtagattggatttaattgaaaaatttaaaatgtgtacttgtgtggatttaatgttgattgatatgtaaaaataatcataatcaacggctcatatatttaattgtctatatatatattttaaaaaaattatatttacaattaatattttaatgtgaaaaatattaatataaaaatttaatatatataatactaatatattttaaaatttgaaatatgtattttattcttatttatataaaaaaaaaatataagggaacttacaaactattcatttttttttattatttt

SEQ ID NO: 208328 - DNA, 718 bp, Cannabis indica
actcttaattcaattcaacatttcttttaggagtgaaaacattttccaccgaaaacagacacatacccagttcaaaaattggcataaagcttcaaaatcataacaaaccaattacatttaccgaatgaaacatataagaatgaaaccgagaaaaatacacatagcagagtataactaactaccctatatgcccgaccttttcaacaagcaagagagagaaggtgagttgctgagtggtggtcgttattagagagaggaagagctgaagccggagctgtgcgtgcgtgagaacggccgtgaagggaagcaacagggttgggaaaatagtatacaaataataaaaaatcaataataaaataacaagagtacaacataaaaatacacaaaaaactgtattttatgtaaataaaatttaaaaaaccgtattaaaaattctgaacaaatcgtatttttgtaattttttttattagttttgtattttttgaaattatcccaagtagaaattactttataaaattttgaggaattttcatgtacatgggaaaataacattaaatttaatttttatggcaaaaaaaaaaaaattcaaaaacttatgggatttaaaagtgtacaagtatttaaatatgggaaaaccaaactctctctgatactctctattctctaattctctgatactctctattctctgattctctctcttcaatctatctcctct

SEQ ID NO: 208329 - DNA, 650 bp, Cannabis indica
ggcacacattggtcgaaaggtcttgaatagacgttattaaaggggagatagcgaaagtttttaagtttgactcgtctttttaaatcggcagtactttgggctcacaacagatcacaaatggctattttatagcttgttttcttggaccagcatactttgagctcacaatgaatcataagtgactctgatagcatgttaaaatttgacatgaaaaagaatgaatgaggaggctaagatgaatgatgctccatctcaaaaactaattggcaataggaagagttatttccacacattaacaatattggactaactctgatacccttcgatagttttaacaatttcgagaatcacgtgaaaattataaaaatttatacatggatagctttattttttttaattaatttattaaacccatataacagtactataaaaaacttaacttttagtcacaattcaattcaacatcaaatctaatgattaacggagaaattaattaaagacccaacatcacaatttaatataaataccttcaaattcttgtaccttaaagatgagactttgttccataagttctttaaaacaagtagaaaattactcgtgaaggtattgttgttagatacaaacatagacattgagagagagagagagag

SEQ ID NO: 208330 - DNA, 1088 bp, Cannabis indica
catattcaaattaccaatattaatggctaaactacataacagtttaatttcctatgctataaagatatgcttcttgttttttcaaccaatgtggaaaccgctcatgtgattttcatgtttttccaattggtgcatttttctttattaacggcttcatgaatctttgtttggctagctaagagctttttgacctgactgaaaatttttcatttagcattaagaaaataatatgcgcactgacgttatgtaacatgtgactcaattaatttgttttgtttgaagggtcatgggttggtttaaacaaacagcttatttaggcacaatgtaacatgtatacacataaatcaactaattacaatggaattaattagtaattgaccagtcattgtaactgaaaatatatattatcaaatttgtaaaatatagtataaagattacaaattcgcaaaaaaataattatatacaacaaattattttcatatatatatagagactaggtaataaaattcattcaaaaaacttatgttgtatctatcattatatatcatttagctgtgcaaaggtatgtaggcgtatatttactttttttaaaaaaagccatatatctatgacaagtatttaagtttgtaaaacaggcagcaacacaataatttttgttagtaggaaaagtattgagagttaattgtaactgaaatctgcaaaagtgacaaaattggaaaacaaaaatggatcgactatgcaatgaaaaaaagctagatgtatacgatcacttggtatagggatggtggcagtatgcatatatttatagatataatatttgttgaacaattatttaatatgttatatttaattgatgataaaaaaaatataataataataataaaagaaaaggaaaaaggaacctagcaatgtccgagttgcaaactcaactccaatggtagacttggactcaagacaaaactcatttctggtaaacctagagagtatgttagatttgccaacacctgaatctccaatcaacacaatcttaaacaggtagtcggtattcgtgatccaccttgtacgccatatctcctctaaaccccaca

SEQ ID NO: 208331 - DNA, 1099 bp, Cannabis indica
atttatccacaaattataaacaactgtaaccactacaatagagataacatcagaaagcaaattactatccttgaaccaatccaaactagccaatgctgaaactaaagtggccaacaagtacacccaagttaatttgaaacaccttgaacaactctcagagagaagctgcactcaaaaaataaatgaggatttttgaagaacctgctcacaaataacttacataaggcataaatgagagcccaaatggatgttgcaagtcaacaatttgtctttagttagcaaatatctattcatctgcttgccacaaaatgaatctatatttaggtacattgagcctacatcaaataactttggtgtaagtcaccatgcattacaagccttgaacatgccattacaacatgcattggaaatatcacttggcaaaaataactttctaacattgaccaactttttaagaataagatgaaaaatcctaatcttttaaataaatattatgtaaccatttagcctaaagaagtattgggaaaacatgtttaataggatcgattttacttttttacctataaatattaatttcttataacatcaatatcatgaatagagtatataatattttgttaaactcgtaaatttttttttgttttacgtggacatcaatgtttgacacgtgacaaaaaagataacatctcggagttgagtagtcctgagtcataacagtcaacttgggaggggcccctagccccacacccaagttgactctaataactccgaaatggtagtttgtattcccataagtcattttcaactcactaaattttagtattatataccatgaagacatggagcaaaaaatttcaagtcccgaaagctgaaaatatacgaattagcacctcaaaaatcagcctgggcacctagggtttcacccagcagctaggttgacaaccctaactagggtttcaatttttgggaccatcttagtgcaaatgagtcaaactttgtattgggacatgaactagacataccacgaatatatttaaggcatcagaatcagattcagatttagaaaacttttatttttgagcacccaaataacactggg

SEQ ID NO: 208332 - DNA, 850 bp, Cannabis indica
taaaaaataataaagaaaaattaagtagggaaaatataaatgtaaaaaatttcttatcaaagtaaaaaatataaagtttcgaaaaaagttaatatttagtataaattttttataattatacacatacatatgtagaaaaacatgcatgcgtgtagtgtgtaattcatgtctatattagtctttgcacaaaattagacatcaatataaaaatatatataaataaatatttgagatatatatttatatagttaatatactattaaagtatttttttaataactcggaaaagtgtatattactaaaagagttaattgtggcataaccttcagaactcaaattttgactgtaaaatctcaaaaactactgtattgttagcaaaacatatctgtccccttgaccccgttataatttatctgtgtggctcatccaaccaatgctaggtagactgatacatgctatgtcattaacaattaaatgacgtggcatgttaggaaataaaattaaaaaataattgagtttaaattttttttttaaaaaaaaaaaaaaccaaaaactaatggccaattaaattaaagaaataaatgaaaataaaataaaatgaagaataaaaagaaaataaaataggagatgaacaaaacaacaaaattaaaagcataaactcaaaacctccaaacccagatcgacaagttctcagtggcgacgatctgggtttgcaaaggagaaaaaattctcaaacctattttcggtgaaaagtaaaggaaaccctgcggtcgaagtcgaacagaagaaaaagaaaggttgaaccattaggtacttgtatttattctccattgtggaaggtgaagatcac

SEQ ID NO: 208333 - DNA, 805 bp, Cannabis indica
actataacctattcctaacaacttattgcagataaggaacttgacattattgaaatggcactctatggtgatgtggtccgccctggaaaggaatgccggtgcaaaactgtagccgaaatgctaggacaatacaagtcaaaagactgtctggctccctgcaagttgccatatgatgaagaagcttcatagcagcagaggttaaataaactccaattaaggatccttcctatgaacagttggagcttactgtcacatttacttaaatgattattttggaatacatcttatgattctttttaaaacaaaccaccttatgcaatactttgtttggaaatgtaaatccaaatgaagagagatgtgattttttaggaggggagggcaacttggatcttacgaactaaaaccagggctcccaactgtttttgcatgattctcttgtctctgtactttgttctgtctcttgtgctagttgttactgaataataaccagcttagggtctttgttttgctgtgatcattaaaagctatataaattgtttgatttgatatggacttagcaacatttatggattctggtttgtttcttgtttggaaccctggataagtgccctgtattgtattataattttcttacatacataatgtatactgtcaaaattatgctattactttgtcgtatatttgaaccatatgtcgctacatataatgaaggggatatatagtcattgtctttgatcattgatacaaacgtagttgtgcttcacgcggtatatgtaaaagagtaaatacaaattttagttctata

SEQ ID NO: 208334 - DNA, 1714 bp, Cannabis indica
ttttgcaaaggaatttgtaaatttgtctatggaagaagatgagacagtagccgaattcaatgcaaatttgtgtcatattttgaatgattcttatgcattggggaagacttactctaatgctaaaattgttcgaaaagttctggggttttttcccagaaagttcaagtctaatgtcacttcaatagaagaaatgagagatgttgaagagcttgacttggatgaggtgattgggtcactgcagaattatgaaatgacttttacaaggtggaataaaggaaagaagtagaaatgacttttgattgtaactctgtttttgtaataaagagactactaatacagtctccaatccttgtaccaattttccaatcaataaagaatctactttcaataacaacaatgtctcctttactgctcttactgtcactagcaaccaagatattaatctctggcactcaaagttgggtcaccctggccctaatactcttgctaaagtcatgtctaaactaaattacaaaggcaccttaaaccaacttaaattctgtgatgcctgcaagataggcaaaaatcacaaattaccttacccaatgtccacaagtcgtgcctctgtcccactagaattggttcacaccgatctctggggtccttcccatattccttccaaggagggttatagatattacatatattttttagatgactttagtaggttcacttggatttttccactaacattaaaatcacaggcctactctacctttctctcattcaaaactttagtggaaaaacaattttttcttccaattaaaaaggtgcagtcagattggggaggagagtatagaagttttgcatcatttctcacagctaatggtgttcaatttcaacactcatgccctcacgatcatgaacaaaatggtagagccgaacgcaagcatcggcacatcaatgaaacaggcatgacacttcttgcacaggctggtttggacctatcctactggtggtttgcttttcaacatgcaacctttgttattaaccgatttcccactcccatactcgacaatatatccccatatcaatgtttgttttacaaacaacctgactatacctttctaaaggtgtttggttgcagctgctttccatatctcagaccatttcagcaacataaaatggcgctgaaatctgagaaatgcacatttgtgggatactcatttcagcataaaggatatatgtgtgagagctcccctggaaaagtctatatcactcgcaatgtagtgttcaatgaacaagagttccctgccttacttgctgcagcaacacctcaggtaaactcaaatcaatccccaatttttgctacaacaacttttactactgcacctaatcctggtgtttcttgttttcctgagcaacacacagctgcaacaatgccaactgagccactacaaggtaccaccagtgtctctccacacattacaccccctgccccacccacagaactctcaaggcctgtaacaaccactataccaccacctactctacacaatactgaaccaaactcctcacttccctcccaaaacacagcacctacaaatactcatcaaatgcagactcgggccaaatctggaattcacaaacccaaagcctacttagccaccaaataccctttacccgaatctctattgcccaaagaaccaacctccttgaaacaggctctagctga

SEQ ID NO: 208335 - DNA, 1225 bp, Cannabis indica
cacgaccttacttgaacaggatctgttctataggctcgtaccctctgtatccttgacttctaaggagacaggaaaccaaacctggtggatgaatcgtggccgtccgatcagagcgtgattaacggctagatgatcttcggattcatcacggctgtagaggatcgttctcagctggttcttctagctggggatggtcggtcggttgtctgacaggtttcccttttcttttttttttttacttttatttgatttaagaggttcttcttatcataggaacaattcatttgatttctcttataatccaataacttgttataacttaaagacagatcctatcaccccaattgaacatgtttaagattagtaatataataaatacagtttcagtttcaataacaacaactcctcctctaatcatgataccattacaacttagaaactcaaaacattagtgactagtaactaaaaagtagagaaaccagttatatgacacacaaaatataataattagcaatcatataagaaaactcagaaaaattcaccaaaatatgtaatcacatattcattcagaacaaactatatattataactatacatataatgtcagaatagtaattatgatttaaggtataataaattagttcctatttgagattaagataattctcaagctgcaaaaatgttaccaaaaaagtccttgtaccaaagaaataaagagcaaagcagagcaatgaattatataatattaaaccaatattaaattatcattaaataaagacaaaagacaaaaattcattttctattgcagttaggttgatattgtatccaggaaacctaacctgctggatgaaccatgaccgtccgatcagagcgggattaacggctagatcttcttcagaagatcatctagtttctttatctggggtggtcgatcggttgtctgacaggtttcttcttttttttttttttttttgaatggatttagtttagacagttctaatcctagttaaatggtttaattttgtttcattagcaacattttacaatattaatggtttatagtgttaggacattttattctttgtttgttggtacatcgaaatttaggtgatgtttgatttgatgtaatgtaatagtaatgaaataaaaatagtaataaaaattgattacaatatttagtttgttgttaaaataaataataaattgacaaaattatcgaaatttt

SEQ ID NO: 208336 - DNA, 636 bp, Cannabis indica
agaccaaatgtagttgcattttctcctgatttgagtggaggcatggaaaaaatttgtatttctatccccctgaagcatccaagtttccctcgatctttgtcgccaaattgattcctgtcgaaaccattgttcagcaatctccttttctatcaattcttcttcttgggaaatcgacacagtcacttctttactctggagatcaatcaattttgcttcaagaaccttcaacttctcagtacaatccccaaaatttctcttgctccaggaaagaattttctgttgcaccttttggagtcttctcacaatgtccccagggtctccaccttcacgagaaagatgccaagccagtttaatctcttcaaagcaactttcttctctcaaccacgcctcatagaaccggaagggtctttttcccctctgtttaaggagattagagtcaaagataatagggccatgatccgaagctataattgggaggttacgaactcctccattagggaatagattcacccagcttgaatcaaccaccaccctatctagcctttccctaattaaacctccattccccctcttgtttttccaagtatatttccctccaaaagcccccaggtcaattccgccagtatcacacaaaaa

SEQ ID NO: 208337 - DNA, 2004 bp, Cannabis indica
tcaatttcatgttagtcatgtcaacctgaacaagacctgtttattaaacgggttagatgagtcaactcaaactcgctaactcttggtgcgggtttcgagtcttattatcgtgtttgacatgtttagttcggccctacccaaaccccagcccccgactcgaactactcttgtgcaggtttcgcgtcttgttatcgtgttgtttatatgttaatagggttaatttgggctatggactttatttattctaggtctttttcttctaatattacgtcagtttataaccgacgaaaataagcttgcatcagttataaattgacgcaaagtactgtcaattaccaatcgatggacaaatttagagaccgctgttaacgttaattttgaactttgatcgacgtcaaaagtccagattatagtagtgtctattgtcaactcatattcgtgttttgctttcaccaatgcattttgtgtatttcatatggtccgaatctagtttattggtcctcaagtaagaatgagagtatcaaagttgtactactgaattgttatggcttcattctctctttgttgatttgtgctatgctatgtttgcttctcttgtactaatttatgatattgataacattggcactactcacttgagctctaatcatgttctgcattctcagactaagcataatgttgaattgaactatcactttgtcaaagttactagcaacaccctggctattcattagacactctcattgaacaactcattgatgatcttactaaacctttggcttctcaaaccagtggcagatggagaaatagggggagtgggcaaattacaattaattagatataattgttttacctatttaataaatacaaaaattcataattttttattgggagggctacaatatttttctacttttgtaagtagctctgtcaatgttctatcgtttaatctctttgcaatcaaaactcatcgttcttccaagaccaatgaacatgccggtccgggaaagggggtttaagattaattaagtgttcattagtgctttgtaattagttcccttcattacaaaaaaaatattacatatatacttttattgacaattttttagtcacaacataatttttttgtgactaaatgtaactttagtcacaataaaaggttacttgtgactaaaatatagtatttaaataaaaaaattatcactaatttagttttagtcacaataaatattgtgacggtaaatatattaattataacaaattagaatttttgtgacatacttttaattacagattttttaataattatataagaataataatttataattacttacaaatttgttgtcactaaaaagaaatttattgtacctaacaatttttttattttatataatatagcataaacaatctaataatgtggtgggctgccgattataactatatcaacattttttttttcttttaaagtatagtttctatgagaacaaattgttgttattattcaatacatactacatgttacaagttgtgaaaataacaagagatctcaccttgaaattatcatcttcaatatgaattgtttcactataaaaacaactaattaattggctttgtttcataaacacccatatcatcaaactaattattaaagagaaaatcatcaccatgagcaaaacaagtagtgatgaagtggtaattttggattgttgggcaagcccattttgtgtaagagtgaaaatagctttgaatgagaaaggtattgaatatgaagcaagagaagagaatttgtttggaggaagagtgaattgttgcttaattcaaacccaatttaccaaaaagtccctgtcctattgcacaatggcaaacctttgtctgagtcaaccattattgttgactatattgatcacacttggaattctacttctccattgctcccatcttcaccatatgatgtagctcagctaggttttgggctgcttcattgacaaaaaggttaaatta

SEQ ID NO: 208338 - DNA, 603 bp, Cannabis indica
tgttatctcgaaacatgataatagccttcttccaatcttttcaccttgtttgcttgcatatactcgatggaacttcctctgcttcagtcgtctaatcggaaagttcattttttggtctgaagcttccatttgctttaggcagaaagtcccaggatcccagccccttgagcttccaattaggaaatttgacatgaaccttattaccttccatcttgccttgctctgtttccttgcaatctttcttacgatgatcatgtttgggagcattcttcaatgagttttttactatatttgcccaggtttgtttgttagttacatttctcactgccttttcattcctctgttgccttggacacgcctgttgagtgtcaacctttcttcccatgactccattgaggcaccgcattaagtcattccaccctttggcttctttttcctctgggatgattactgcctttatcttgttatttctcagcgtcgatattttgaggaactccccttttctgtttgagaagcattccaaaaaatagctagctaagctgttcctaaacgttcttttaaggccatacttcatcgttccattcttcctctgcaattcttgca

SEQ ID NO: 208339 - DNA, 1238 bp, Cannabis indica
gcaactgagcaaccagagagaaaccctgcatttttaagacagttgagatgataaagaagaagctttaaaattcttgacaagctcagacactaatccaaaacaagacattttctttaatcttacttacccaataaaaatgtagtcctgtgcctttctctttttgtctttggcctcaatgtgttcattcctttcgctcggtttccattcgcaaagtgttttatgaaggtggcttccactctttccattagcttactaacctgtgtgtgcaacagatatggactacaaggctaagtttaagagagattaagtatgttttgtaaggtaagttatataacaaagaacaagaactaacttcatcagagctgcccagataagactcatccaccatctctaaataagcctttgctgcactccttgtacttatctgcattttaacatagttttagtacacaacttatgtacaacaagagtttttatgataaattataagtgaagtttgactagtgaccttgtcatatttcttcatgatctttgagaaagccaattgattcatgaaactgtcacattcatcacagaaacatagtttgtcaaaacatttcaaaacaaaagacttaactttatactaattctcttttctttttttctactgatcctttctccatcctttcggtcagctatttggtccttatacctcatccttccttgattgggtcatcgacatggacctcgagagttcccatcccattaaggatggcatcgccacagaaagctagcccaccaaacagccaagcataattcctcccatgaagggttgtggtaggatttgaactcttgacccaagcaaggaaggatgccagcaaagacatccttgccactacaccacacaacacgctatactaaatttcattctgcataattaagagaaaaccaatatatacctaccagtagcttttcaacagtttaagcttttgatagaactctataaaggcctgtttcatcaactcttctgatttttttagctcttctttgctgaatgagaagtcagaggttgaagtcatgaggattcctctcaaagtagagattggagtttcaggtgcaacattgatctttacattatgcaaaacatctaatgaagctggtctaaatccctttacacctttcttatgctcctttttctcattactctcttttgatccactgcttccttttgactcattgcttattctaccttcttcttc

SEQ ID NO: 208340 - DNA, 531 bp, Cannabis indica
cctccttctatggaccacaacccttcatcagatccagccaatgaaacagctcctgcaagtccactaatggctacactctgaccataattgattcttgtgatgacctggaattaaaaatcttaaatttaagcaaagctcaaacatgctactttttcatacccaaatatacatttaaacaaatcaaaattcaaacaatccaaatacaccctcttatagtatttcttgttttaagcatcatacacatacttcaaccaaactgaagctacattcttgagcatatttccaaatctaatatttgtttatactacaatcgatagcttaagatggatccataagtttatagctgatatagcttttaatcatcacaatccctatttactttattcattgactcttgtagtaagaaagatctaaatttagtcccgggttatagggatatgtccagttacagagggaatgcaatgtatagatctcaccatatgaagcttaatcatacatgatttcctatttgaaaaactcaaatccagatcc

SEQ ID NO: 208341 - DNA, 1109 bp, Cannabis indica
aaaataaaaattttaaaaaaattctcactactgtttctttgacttcaattactatcatggggccggttatagaaaaagcaaaatcctagttgtatataactatccacgaccaaggcacagacgaatattcatgacactactatgtcccatcaatgtttatttctagattttagtcaataaaaattagatgcttttgcaattatagttctctgccagaaaatgccatataagtaccttctaggcaaactaattatttccacttccagtccatgtgctttgcctccatgaatgaccatacatcatctaaatctaattcatgctatttatcgtcactcactgttgatgatgaggataacacatatttcaatcaaaatacttctgtcatactcgagatttaacattcaatggtataaggtttgtttattactagtatatgtacaaatttgaaaaatgatgcagatattattacactgttaataaatcatgaataatttaaactatttcctaatataaagaaaaatctcaactgaagtaaaaagaaaaggaatactcaaactcaaagtcagtccttttagaaggatcaaaggattagagtatcaaaaggattgagatttggtggttatacactactacaatgtgggcctttagaggctgttttttcaactaaatttataaaaaaaaggaagctaaaaggtgtgaaaataccgtcttgttcgaaattgacatttagaggcggtttttgataaaaaccgtaagtataaaaattaataatacttatcctgtcggttgggagttgaaaattttccagcttactttattacacctatggcatcggttattagggaaacaatcgacgccataggtgcacacctgtcagtaaactgtgcccttatggtgtcgattattttttaataactagcgccatagacgatatatatacacgatatcaaacttcatcttgcccacttcgtcttcttccttccaagataaatagccaccatagcagaaccataacccatgccaaaaccctcaccaacctcccttaaaaaatcattaatctccctcatttcttcacaattttactcaatttttgttttaaaattttctat

SEQ ID NO: 208342 - DNA, 903 bp, Cannabis indica
ttaatttttttttttgttcattttagattatttgaaaatgaaattttgagtacaagctcaaaaaaattgaaccactaaaaaattaattaaaatttggtatacccttttttaaaattttgacatgtatggattattagctcatagtactagtagtccatatgggaaatcaagagcaagtgtattttggcactgtaaaggtgagaaaatggtaaaaatcaaagtcttttcatctttcaaaattttcatttcatgtaaaaattttacagagcaaaatgaatgaacaaatttaaatttcaaaatttgggtatacactaaaagactaaaacatttttcagcatatgataaaaatcttttaaaataaaagaaacaaataatgtaggttataattttagttttacaacaataattgaaaactaacatttttttagaataataatacaactaattttatagaaaaaaaacacatattattaattttcatatcataaaagaggagaaagtactcattaagaatattttaaaatagtaataaaattattaaattttcatatcataaaagagaagaaggtactcattattaatacaaatgtgaacatgaggttaagaagatctcagaggcgaaaaggataaattaaatattttcttaattattattgccctaatggaatttgaatgtttgggccttcaaagttggtagaatttgtatgtatagctagatactatatataatgaaatgatgaagaaaattctaagaaatcaagtgttgctcacattgcgtttatgtaattaccatctgatttatgtgggtttgtaatttgtaaatatttatttgggaagtaatacggttaagaatagggagacaaatataagtactagtaggttatgcatttgtttttttttttt

SEQ ID NO: 208343 - DNA, 1158 bp, Cannabis indica
attataataaggacaatattcatgttcatgcatgctctctatatattcatttggtactattttttactttgtgtactataatgcatgtcccgactcggatatcatccgagaggggattttcaaacaactggttgagaatttcaatcagttgaattttcaaaacagactattttgtaaagaattatcaaatcacaatcatattaacaaataaattctaagtctatttctacttattttttttaaattagggtttcatgcatgtgatacaataatgtaatataggtctccatcatcatcagcacatgtttatatttaactaataataatcaaataatataataattatttttttcctaacttcctttaaagatatatataaagttattataataagatttgtggtatgaaagtgtttagaccttccccagtaaaaagtttctttccaaatgaaagctgatatgatagcagttataattagggctaagggagtaaatagtgatgtgaaaactggaccctttttctctatagcccaaacttgaatccaataagttatgcctgtcacaactattccctgcaaaatattcaaaaataaaaaaaaaaaattaaaattagtatgcctttcaaaatttattattacaaattttgccctaattagtaattgtcttgtttttgtttttgcatgacttaaaaataagtataattactttatttagtagtctagtgtgaatttttttaattcatataaaataaatcttatcttttaaacactgcactgatgatgaaaatgaagtgtttgattataatcatcttatcatatcataaagatgattgaatgaaaaaataaaagtcaccaataattgttatatattatatataattatttaaaggcaagcattaataaaccaaatttaaagtatcctatgatcatatatagggacttgattagaattaaaggcaccactacaaagactataataatattgattgtataatataaagcaatgaatatatgtttaaaataatgatagatctaatttattaaataacactccaattatataattatatatgatgttacgaatcacttaaagcaattaacaaaagtaggctttattatcacttaataatttcaacttgcaagtaacatgattttattaa

SEQ ID NO: 208344 - DNA, 1033 bp, Cannabis indica
aaaaaaaaaaaacaagacagatattgatggtacaaaaaaaaaatggcaaaagatataatttaaaatgagaacacaatgattaatagcttctcataaattccaagtgttaaacaaatagacctcccttgcctaagccataaggcatactaatagaaaatttaaacatacagctaattggtcattttgagatctgccttgatgaattcaaattggctaaaagtacacataaccaacaccaaaaatataaaacacaaaacctaaaattggcaaaataggctagattcaacatttgtccagtggcaaatgatcttatggacaaaggtaatggttaatgattgtgtggctctgttaggactgaatttaatcactacaaaaaagcataaatttggagtccaatgaaatgtaatgctaactatgaaagaagtttagttgaccaagggaagaagaaagatcattgatgaagattatgtcattgtgtatacaaggaagtagggtttttttttttttttttttgtgaaaaagagacagaaatcacttctcttagactgacccccactcaagttaacgtagcttctcgtgaaggaaaactatgataacagagatattttaatataaaagattaaatatctacatcgggattgaaaactccccccaaaggataaatcttactagatggtatattttcccagtccctgaataaatctaaaaatgacaaaacctcaaaatattttgacttaaaaaattcaagttgctacccaaaatttaattttctctcatacttccaatactgaactcccatacaagtagctcttcaataaaaaagtagaggtattaaggtggtaggcaacgataaacattaaggaatcagtacaagccaaaacgaaaatatcaaaatagaatataacccataaccttggcaaagatgatgcgagattttttatggaaaggcaaagaccttttgggtggcgatcacttgttgctagggagaggaggtgtgcatatctaaaaatgagggaggtcttgacattgggag

SEQ ID NO: 208345 - DNA, 563 bp, Cannabis indica
gtggtacaattataaacggtgaatatataattagtacatgtatatttatatttcattattaaaatcagtttatggggtatacataaattagaagttgggcctctgacttatataaggtaggtacagtcttctaccctcatttgctatgggaaaaggaagaatctttaccctattttcagaccttttttttttcattattattattattttctttgcatacacgatgaaggtgaaacagcagcagcaatttatgtaagcctaatcattttgaagaattaaataatggtgaagaggtttctgtacaatagtaactttttagcttttcttttctctgctacaattaaataaatgctctaaactgcaaaagcttcatcctttctctctctctccctctcacacacacacatccttacaaaagctcttccatggagtttggggcacactgctactgctactctgtttaacgctctcctctattattggtcccctctcaacatcattaccggaataccactgttctacttctactatataccttgcccaagtaaaacctctctctctct

SEQ ID NO: 208346 - DNA, 1424 bp, Cannabis indica
ttagccgaaaaacctcggtcaacaataagcaatcattatttattaaatttagttttttttttaaaaaaacttcattaattctagaatagacaaaaattttagaatcatatgtattcagaccataaggttttatggattttttttgtttgtaagtgcatatgtttagtgttatggacatttattatgtatatattataaaaaatatattatattatatatagggatgataaaagaaaatgggaccttttaatatatagggggccttgtacagtggcacaagctaactaacgcttgggtcggccttgatagtggtgcgtgttaatattattattaatgtaattaagtattaaatctcatataaatttaatgtaatcatttttaagaaatatcgataactaattaggcaccaataataatgctcttatgaaatattggttttttttttaatgagagcaacttcatgagtacaagcaatataaaatatttctttttttttttttaattgaagtggccaaattattatattttttaattcttaaaaataataaaaataaatatgcctaacatgagcaacatttgtgtatgttctttgttgaaaatagttgaacaagagcaacgtgttcccctttatgtttaccaaaacaaaaacattaatattatttttattattagattacaaacttatttattacatcaaagtaaataatttgaagtacacaataaattttaatttagtatataataattaatgagtattatatatacaagttattgtttgcttttcacagtaacaagagccaggaaacatgaggatctattattattatatattattattatttaaaatttgtaataattttttttttcatattaaatttgcattaattaatttacaattacaaaaaactttataagatatgggtggctactaaccccatatattactatatataataacaataatatatagttaattatttatatatatatacaccatagtaacattaatgatatttatggccttttggtcttagaatacgtgcatgtgtttttttttatcctaaataaaaaaactacgtaatacttagtctcttcaataataaaatatatgtatacattaatatacataaccctatagctagttgtatatataaatatatatttataaaaattattaatcttaattaataaaataggagcatattaaagaaattaagaatgaggatcgattttgttgatttttttcaatcttagctaccttaatattaatttttaatttaaagttttacataattaattaataaccactttttaaaaaagaaataatgattaattatatggtcggaaaaaaggtgtatatttttttatatatatttgtatattgttttgatttaaattatgtatatatgtgtgatgtcaactcg

SEQ ID NO: 208347 - DNA, 2508 bp, Cannabis indica
aagaacatgaaagccctaaggccagatatgagaacggtttgcatgcatgaggacatggccttgctagaaaccaagtcatgttgagtcttaagttgaacaaagtttctaaggaaaccacgtatgaggctaaggttgtaaatgcctacagagccaaactcctatggaagtcataagaggatagaaaactggctaccgacttggaacgaaggctgatgctggccaaggttctcaagccttgaaagggttagccagggtcccatgactcagccaagaacaggctagtgccaccaaacgaagacatgaaaaggcaagctttatagggtaaaaccctaaagctggccaactcccatgattaatccttagggccggctaggtctcaagcaagatcgcctggaccgaccaaggtaagttttgaatctcaatgtgtgtttttctttcaaaacatgaatatgagcctcatattctttataactcgaagagtcaagaatcatagcaaaggccaaaatcgaatcctttctgtaaaaaagccactcattacacattctaaaattgtcacgaggatcaatacaccaaagagattacaaactaacctgtgaatattaaagtttcgaaaagcttaaaaagcttgaaacttgttaatggcgattacgaagaagagatatccgagaagagaggatgatatgtatataaagagagaagatcaaatatccaaaagtaggccatgcaaaaagccgatacttggccaaacaaggctacacaacagagactactacatacaagacgagagctaataagtccctatccgacctgacgtctgcacatggacttgggggggaaaatattatcccaatttttttcctcatgacatggcatgcttatgtggacagaaccagtggcacgtggtagtacaactcactaaaaggaaggccaagtcaacacctgagcaaacgaagaccccgacactcaaacaaggatcaagagatagactagctccctctcaggagctggccaaccttgggacaacaccctggccaaccaacttggccatcataggagcctggtcgaccaaggagtacactacaggctttgctggacagctctacacgtggacaacagatatgggctgcgaattttgccctaaaagcccaatagaatggctgaataatatctagattcaagggccctttagtcttttgtaattataacaaactatgtaaatatctagtatttaaacttgtagtcgagggtttaggcctcctatataaaggccttaaccctagcttagaatgctaagtcacttagcctccaaatagctctaagtcttaaggccatattctctcttctctctgtctcgttcacgcccaatagggctctctttctctcttctcacttcatctctcacagtcctctaagactgttcatctctctcattagagatctacctactgattcctgttttgtatccttatagagagctatagcagatcccacctatagtgatctcaatagtattaactaggtatcaatacatcaaaaggggagtatgccattacctgttgttacatgggggctgacctctataataaatctctgtgtttattgctttttatttttatttgtgtaacacatgacaagcatcaaatctatacgaccccactattggttgatcactttttgaggtcaacagttttgaaagtaaattcaaaattatagcttaaccacaagtaaagtaaatttctatatatgtttttcaatgaataattccttacatagttagtttaaagaattgaaggaaaaaaatttaaatatgttacgattataaatttagttttgagacatgttttgtttctttactattaatattaattaatataaattatgaaaatctacatcaaaaatacaaaaattaaacaatattacaccaatacccctacagggctcctactacttttttttttactttttatagaattttatttatacaaatacttcttacacactttactagcatgcatgatgtcatttgacaagttttacacttaatttattttttctccctttttattatcattttctttttatttttattttctttatttttcattttcgtattctgtttgaaaattctcccattatcagaaacctcttttcatccaaaaaaaatgatattatatattgtcttcaatttccttcctccatcaactgccaatgttttttctctttttttcttttttgatctgttttataaatggccattactcagtcttcatctttccccatcactattgctgtaaaaaaccttcaaaaataggtgttaaatctctaaccacaaatctaaaggaaaacgacccattattgaagatgatgattcacacttttctctacctacgaataaacgtgatcgtcgccctgtgaagagaaattgaagagtaatgttgcttaatatattttctcctaactaaaaaaggaagaatcaagctgatgagagtccaaagatttttttactag

SEQ ID NO: 208348 - DNA, 1270 bp, Cannabis indica
cttcttcttcttctttcccctaaaagctacaggtcttctcttcttctctgccttaaaaactaattacaggtcttcttctttttttccctaaaatcaatcttatgcatattgttcaatgtgattatttataactcttatcgatttatgaattggtctttcaaattttttgatttactttaattaggtttaaatttgaaatgggattagtctggatctgaactctaaagagaagacaagttgatcaacaaggttagttcaaaatgtggtttgacctagatttctcattctctgtatttgatttacttttttatttgttctctttattttctgaaattgctggatgtgaattttcggttgattgtttgccattgagttaaaatctgtatcgaattccagaagtggattgcctatttgaaaaatcaacatatatttcccaatttataattaaacaaaaataatagtcttactatcaaccttattactcatcgtctgaagagtccaaatccagcaggagagtccaaatggaaatggcactaaaccaagtgtggtgtggtgtggtcttatttaataatagaatgacaaacccaataatctgctttggatatggctatggttatggctagtgactcacaaagcatatatacatacatgtattttactttttacttttctgcatttgtataataaaatatttgaaatctagtattaagctgaaatccaaaagcataagacatgtgcacttcaattgtttttttttatatatggaattttgagtgcaattgaaattagtcagaagttcaatagtagaatgactagtgaaataagaggttaatatagaacagtataatgtatgtattttatgggatatagtacattagatttggtagcttgaatgaacgagtggacattgtggtacccaataatcctatatccctctttcaccatctcactgctcttctcttatttaaatataattgccaagttttccatgttcatcaggggttttgcaaattaaaaaaaaaaatataaggaatcacttcaaaagcatttagtgttgtgtatcaagtatttagtgttgtgtcactgtgatactgtattagaagttgattgtgtgtttattgattttaatattatgaaagtgaatgttttgtagtattaggaaatctctttataattttctgaaatcacaacattacttgaagttgagttggtaaatgaagtgattatctctagaattttagtagatatgagatgataatggtatacgtat

SEQ ID NO: 208349 - DNA, 972 bp, Cannabis indica
tgttaagcgggtcgtgtcgtgtttgacccattcttatttcgtgtcaaatcgtgtcgacccgttttcgacccgcatctaattttcccaaccctaacccgtaaaattcgtgtcgtgttcgtgtttgtgtgccgtgtcgaaacccattttgccaacccctaactaatagttgcatttactcgcatatttagcaagtgcatgagcaacctcgcattaactgttctagggcaataattaaaactaatatcatttagcctctaagaaaattattcgacggtgtaaattaacagttttatctttaaaatcacactttgacatgtagccctcgattccaaaagttattttatcaatttgcccccatcttctaattggtccatgtctgtataggtgtgtatggctctgataccatgttgagaatcatgggattccatctcaaaactaattggcaatgagtggagtagctcatattcttatatatagctcacttctctactatttattccatgtgagacaatgtccacaatattgataatacaaaaattagtattaatctttaatctccttgactcataatatagtaatattatatccgtcaatttttaaaaaattttaaattattaataatattaaaaataaaaataaaatttaaaataatcatgtatgcatgtaactaaatatataaattttatttgggtattaaaagaattaaaaaaataatggaatacatattataattacaatattatacacaattatgcatgagaaaaaatggagttataatttctccaaaatttaaagataaaacatccataccaatatagaaaaaaaaaatggttccctgccacacaattttcctacataattatatatacactgttatcattattaatatttttgaataacaaagttaattatgatcacatttaatcagtaaaaggctgtaaggttttggtgggtatatatatatatataaat

SEQ ID NO: 208350 - DNA, 1098 bp, Cannabis indica
taaatcatatatcgagtagaatattatagaaaagattaaaaaaacaattaataaatctatagaaattatcattatatttcacttgtagtcacatcattgcatctcactttactatcattctcaataggtttgttatacataaaacaaattaattaaaaatgagttaagtactcactttataataacattataatgaaaaaaaaaatatttgaaattgaacaatctttaaaaaataaaataaaataaagatctaacaaaaaaataattaataaatttatagaaaattcttcctaaaattttaaaactactgttagtagtcactacattcaataccgaagtagtcgctaaaaatttcttatacttttagtgttttctaacaataaatttgttatattataaaatattttgatctttttcattttttagttattaattaataaattgtaaatgtcaaatgtatggtataatgttagatattttgtttttttttttatatatataaatataataaaataaaaagagcatatttttttgctgtataattttcataatatattaataaattatcacttttagttttgataattgaaccctacaattatcattacttaaagcagaggaatagaactatttttttttttttgttacaatacatacttatttattattattattatttaatattgttgtagatttttttttaaaaggttgggtttaaatttctatatcgatgcatacggttttttttttttaaaaaaaaaaggtttagttaaatttctatgttaacattttttttatctaaatttctatgttaaaaaaaaaggttagaattgttttgatgattatattttttttattattatttaatatggagtatattttataacattttaaatattccaaaaaaaattaatagttaagcaattactatagataaatatttaagttttgtaattcttataataattatttaaaacataaattagattacaaatttaatattattttttttttttttagagttaataaaagatttcatttaaacaacactaccgattacaaggaataggcaagtcacgctcaattgcgtgacgagca

SEQ ID NO: 208351 - DNA, 910 bp, Cannabis indica
tgttgactcctgttgtcgcttaagtggcaagatcaacatcatccatatgagtatctctattgtgaacactagttttgtttagggtgagtaccatagttgcagtatacaacctttgattgtatcaatgctttcttcagctctcaatgaaagcaccaaaatatttaccgagtcttttagaaattaatttaacatatgtgaaagctaaagaaactgatccatgataacaaaactaacaacaagaatttttacggggtttgagcgttaacgagtcttagttcacgagtcaatattattacttgaaagctagcaaagccttaaggcttacaagaatgtctgaactctaaaccttgcctgggcaattgaggaatgattttataaccctttgcatgaaggattcttcgtatatttatagtgtttagggttcttgcttattaccctttgcccacttatggagtgattacaagtaacatattgacatgggcttatttggtaaaacccgactcatggggcacacgatgtaaattaatgtggatgccacatcatgttgacatgtgccaaaaactgtgtcctatcttcgtggagaataaagacacattaatggcatgtttactaaactgtagtcaaaatcagaataacagaatgagtgaaatgaaaggaaataaagtattaaacaaacgaaattaatatattgttatgttacttactaaatttacttgaaagggaatcaaaatcattttattttctttacaaaattagaaaaggtagtcagaatggtttagatggactaaattatccttcaaagaaaatatttatttattttttctttattttaaaattaaatcataaaaatataaaactaaattcatataattagggggtatagatgtgttttaatttatttatataaaaa

SEQ ID NO: 208352 - DNA, 596 bp, Cannabis indica
taatattaaaactatcttaatattgaaattacaaaaggagtatttagttaacttaattttagggagtggaacatagaaattctgtaaattaattatagtgttgttttattataaatttagtagaatgaggatataatgttatattttttttttatctaagtaataattatttatcaataatattattatagtaaaaaaacaatcacataataaatttgttttattttgtcaaaaaaaaattatattttatgtatatttataaatatattatttagagaaaactctttaataatatatatgataaaagagaaagatattaactttctcaaaatagttgaagggctactttgtaaattagttgtgccacttttattatagttatagattattctgttttaatttgaaatattatatgtgacaatggtattttgaagagttggactatatctgaattgatatttatgaaatccaaagcccatttcggtagaccctaggtccattttagttgcctatatatataatactgcatatctctcagcttttagcccaacttccatttctacattttatgatacaattaaattaaaaaaaaaaaa

SEQ ID NO: 208353 - DNA, 662 bp, Cannabis indica
gagaatatacaaatagatttcttggttgtggaaaaagatgctcgaatcctttaaatgtccaaaatttataatagtatgatgtgagaatgtttcaaatagatttttttgctgtctaaaaagatgctcgaatccaaaatttattatgtgaggtgagggtatgtggaacttgaggcttcattgatccatacataatatataatatttaggatgagaataatcttcatgtgcatgagcactttaatacttcataagttcttatctataatatattttatacatttaatcttgtgttaattaagtgacacactgacacttgtaagagactattaatgctattaatgttatccttttagcactctttttttcttgaaagagtatataattacatacttgagaaatattaaaacgtatacgatcagtgcttaacactctcctatatattaaaatcgctattagtctaattaaatatcgagtccatatagtttaatgtaataatttttaaaaagtatcgctagtcaatcgcaagacaacatgtctagaagtgcaagacaccactggtgcccaataacaatactctatatattttcattaggtttactcgttttgatgaaggcaatctttctttcaaataaaagataataaaataatatatattataatat

SEQ ID NO: 208354 - DNA, 976 bp, Cannabis indica
tctcaaatcgttttactttacagtaagttggctattttgctggttgattaatgaagattttttcttttataataaaaaaaaaaataattataaacctaaaaagtaagcttgaaaatgttccattagcaaaagaaaagaagaaaaggaggaggaacccattttcaaaatttcgaaaaacacatattgcaactcaactagttcctttccctaagacataatttaattttgaagaaacaataagtgttaggttttacaacttgagtaaatggcagtcttccatggctgaatacaaacgaaaaacaataataagagattgagttcccattcgagtcttcacagttcctcaactcaactcaactcaactcaactcaactctttaagcatggttagacccttaaaaaacgtagtaatatcttccatctctctttgcaatcaataaattcctttgttttgcttttgacgcaggactacctaaaatccgtggttccttcacaactcgtctcggaacgaggctccaatttaatcgtaatcaatccaggtattgctatttgctactgacccaccaaagttcacagtagaaaacgcatacacatgtcccctaatcgagaaatttcagcttagtttggtttctattgtgcccaggttcggggaatgtcagaattggccttgcttcacaggatgttccttttaatattcctcattgcattgctcgttatactaaccaagtacccaagagaactgtccaagatcaggttcttatatagtttttgctgtttgcctttcattgtggttgatcattgcttattgggttttgaatgtaacttgagaattgtacttttggtctgaatcagatgcttaattctcaaatcactactgcccagcacatggagagggaaagggcttatgatgttgtaagtcattgagtcaatgagcattcttagcttagcctttacctgtttttattggagtgtttaca

SEQ ID NO: 208355 - DNA, 849 bp, Cannabis indica
gttaggtgaatcgattgaatggttaactttgtcaaaatagccattaatgatttgtgagaagtaattaaaagtgggaatgtagatagccaaaataaaaactttgaatattattatataacattaaaatgaacataaatgtaatacggtccacttttctttacccattttcaatttggtaaagaagaaatcaaccctttttctttggcttttgtataattattctactctcaccaaattagcattatagagtttgaaaaaaaaatcaaagtctattaaaattctacaaactcaatcataatatttccaactaataataaattttaaaaacgtttagaaaaaaaaaataacaataacaataataaatttaacaaatcttcctctacaataaagcacaaaacaataggattatcaaaaacaaaaaagcacaaaacaataaaactaaaaaaattaaaaagaacaaccaagggcaatattgtcagaacatagaatagtttttttttttttgttttaaagaaaaaaacaaatctctcttttgattgaaattaaaatagtaaaatatagcaaatattacccactttctatttctctattctctctctctctctaatcaaacctcttctctcagaaaaaaaaaaaaaaaaccagagctttgtgaagctacagaggaagcctagcctagaacccaaaaacacaatagccattatgttatgcttaagatcaaactcatttaggttcattctgtttatctccatttttgtttgcttcgtcactacttttggagcttctcatgtgtccgactcatttcgtgtttcgtctggttggttttctttttttgttgttttttttttt

SEQ ID NO: 208356 - DNA, 2323 bp, Cannabis indica
gatttatatttcaacacataatgtagaaggtcaattagtattagttagttaactttcagtgatatagataatgtttatatataatatatcaagctacagctagctaagtagcaatcaacctatttggttcaatcataaataggtcttactgacccgttacctaatatctaatcatatctataagagaaatatggttaagatagtgcatgtaacattattattctaatttaattaaaggtttttttttttttattgtagtcttagtaaaatttacaaagcgaccaacatagtaataagagtaatttaaattgcaattcaaatctatttagcaatccacataaaaattataagaacaatacaaattgtaaaaatttaaaactattacatgaataatataattcctttttaactaattaatataaatattggttaaccactcataaaacgttacacagacttatattaatttcttcgtgtaactgttacgattcttccactagtttcggagctacgaaacttctgggaagcgaagtcctttcacgggaaaggttcagtcgatggttaccggcgccggtggtcctcattctgcctcgtttcttgtgcgattttttgcctcgtttcttctgcgattttttctgggcgattcacaggttcgggttactttttttctggccattttaatttattttctgcggttttctgggtggtgcagcctattctttgtgttgtgttctttctggaatttttctgggcattttgtgttgggttcgattgtgttttgtggggctcggttgtgttgtgttgggttcggttcttgctggaattactctgggcagtttgtattgggttcggctgtgttgtgtggggtgtactccatggatttggaactggtgaacagactttctgaggttttggtccttgatgagggtgatgggcctgtgatttccttgaataaggctggtattgaggaaggaaaaaagaagatggatttgtgtttggtagggaaagtaatcggccctaggcctgccaatagagaaggaattgaaaaggctatgagtggggtatggaaaatccaccaccgatttcaagtggaagaattgagttcaaagaatgtctttcgtttttctttgggtgtagggaggatcggcaaagggtgtttggtggtgggccatggacaattgataagcaattgatttgttttgtgaatggggttgggtgaaatttcaaagatgaactttgattttacttcattttggatatcgattaataatgtcccattagcttgtatgactgaactttttgcaagagaatggggggagaggattggaaagttagaagacatcaagattgttaatggtacaatgaaagtgagggtgcgcattaacattacggagcctctgaagcgtggattgcgtgtggcgatcgatgatcaaggtaatgaggtttcacttctatttcaatacgaacatttacctgacttttgttttgattgtggaatcatcgggcataaggcattggattgtcctttgcgagactttggtggggttaatcctaattttgatagtgggaggtatggttcgtggatgtgtgctccgagttctccgccacgtgatcggactaggtaccaaaaaaagcgagagacttccccctctaacaggccgattatgactatgggagaagcctcaaagattgtttcggcggttgagagaagccgagttcgttactctggccctacaacagaggagttagctcctacctcagttttagaggctcgggaacgtgaggaagaactggcgtccaaggccaatatgaaaccaaaggctcccgtggttgctgggggtcaatcggaggtgactgagactgtggtggggagactgaatggtgatcctatggtgtccgaggacgtgctcttgccttcttctgcaccttcggtttgtgtgccgggtgtgggaatggtgatggccgataatgctagtgagacggagcagttgggaaaggtgttttcttcggttatggatggtggttcatctagtggaaaggtggatggtgtgggagatgtgagtgaccaccgagtgctgaaggccactaaagacaacaagggaaagggtgtgattgttcattcggatcaagatgagctctcgtttcgccaagcactccaacaaacttttgagccgataattcaagcacaaaaatcgaagacttggaagcgtcttaattctataaagggccgtggccctcatggggtagctaaggcggccacttatcctattagtcctaagttatctcatgtcattgtggcaaatgccaaatgtaaggtgagtcc

SEQ ID NO: 208357 - DNA, 1023 bp, Cannabis indica
tgcaacatattaatatatttcatgaatttaaacaccaaaaattgaaggaaaaaattgaaaaaaaaagtaccttcgacattttggggcggtcggcgtgggtgatgtaggttgagggggcgattggccgtgggtcatatagggcggtcggctacgtgcacgctgggggcagtcggccgtgggtggtctgcttcacggctatgggtgtctgcgtgtgtgggtgcagcgaggagaggcgagatagagagagaaagagagaaagagaggggaaagagagaggggagtcaaatttcaaatgggggtggtaatgtgggaattaaataaatgttgtcccatcttatcaatatagggtattttaggtttaagggaaaaattttcccctaatgtaaggataaaaaatcaaatttcccaactaattctcctaatatcaattttcaaattcatgaaatggatatctctaacaaatagatctggagctcccaatcaattaatataaggtataatccaaaaaatacattaatactatagttaggagtttatccgttgcattttctttgtttgacaaatgtctaatggtgagtttatttatattaaataatgaatagaataatgaattcacatacagatagagtcatgtacgtggaaatattgctgtggtttttatgttttataaaagttgcatcatagttgcataacccttttgctagcgctctaatactttacatatcaattattataaattgacaacgatacaataattttatcatatttgcttgtattttacatcatcaaaataataaaatctcttttaaaaaaaacgtgtatagcatgattagttttataaatatattaaagtagttgatataaagtttgtttacagaggtctaacaattatttctccaaatattactattaaggtataattaattatcatttgtacttatatttaagttgtaaattagttgaataataattgtgctactacaattttatatattatagaaatatggctcaaaattggcaata

SEQ ID NO: 208358 - DNA, 1671 bp, Cannabis indica
attcacttcacaaatctgatttccaaatagaatacactacattagcctgatgttcaccaaaacaagaggagatcatcctaaaagaattattttccttgctttcttatctcgagaattgataaaatccattattctaactttcctttaaggataattagaatcatcgagaagtatagtgaacgagaaatagaactcccgtctacaaaaaatgacatattgcatagaaaaaaaatattaaaggatcgcactaagagttcagtgtcccgctctgataccaaatgaaaaattatgtttttgcaaatgccaatatctttactaaatttttgtaaaaaaaaacttataacagtctacagcaacagattgcaaacctgtcactgcagaacacaaatttgcaaaattaaacttgaactagaaataaataaatgtagaatttaaaaaacttgacacaagaaaattatatgtggtatcaatgttctttcaaacactcctagtccacagggtcactcccagagaatgaaatctattagtaaagtctcaaataattacaaatacaattgacttaaacaagtttagactccttctaaatcttttgtaattcacttcacgaatccaatttcgaaacatcactaaatagcaaactcccttcgtctttgatctaagtgcttacttcctcccgaagtaaggtttaactagtcttcttctgaatacctttctcttgttcaatcaagttcttcaaccgatcctaagagaagtataggaacaataacataaacactaaaacctagcttaacaactaggttctcacaaaaagaactctctcctcacaaataaaaaatatgcaaaaataaaaactagaagaggtgaattatttggctgctctctaggttccatttatagaatatggcaaccctagagacaaccacaaaaactattttctagatgtacaaaattttctttaaaaaatcccgattcgcagtatcaaaatcggtctctacagcagcagattcggatcagagagaaaactttctaaattagaccatgatcacgaatttggacttcaaatctaccaaatacaatttgtttaatcttatcttatcaaggaaaaatcaaaaacataaataagaaaaggaaaattcaagattcctaaatataggtatttttccaaatagagaatttcttctcttgcaagaaaagtttctcaaataaatacaaccagctgaaaatagaactttccataacataaatggagcaattaggacacgaatttatcacaataaaatcaatttaattgctcaatataaataaaaattaattagtaaatattttgtcaactaatttattaaaaaaaagactttacaactttaattttcataattcttaaaaaagtaattcaaaactaataagaagaaaaattcatgcattttgaacaaataagagaataaaaaatatcaaattttaaaattaattaaagatgttaagattaattattttttatttaaaattacaatttgatggaacaaggttgaatctagttttttccttttttttttgtcaaaaaaaatgtattttcttaatatatacatatatatttatattatttgtcatcctctatacattctttggagaaattataactcatagagattgtttggtatactttagggtgcgttt

SEQ ID NO: 208359 - DNA, 1295 bp, Cannabis indica
aattaactgtcttggttatcagcaagattcaactgtatttcaaaaatatttataaaaaaaaaaagaaaatcaaaattcaagatgatatattcaatttcaacccagttgtaacatattttaaagttattattacacattactgttctaaaaaatatgctaaatttattacatattaaaagtttgatcaaatttgacataaattataacattgtcataaatttaactcacaataaatactactttttatttattatgattattataattcacttttactaaattttatattctttatttaacatattatcattattaaaataataatttttatatatattcaatgaaatataaaataatcatcaatataattaattattcttttctttattttatattttgtgcacacaattatgccaaatgtacaaactcattttgtgccaacacaaattttatatcatcatatacgcgatgttcctataatataaaaattgtatgcgttatctttcagtcatgccttatgcatacacatatactattattatatatatacataatttttatatagtatttattattggccgagccacaaggggcaattaattgattttattatttcttattcaaacatgtccctaccatgctttttaccctgttcctcacatgcacgagtggactcaactaatcgtgtaagcaaactacagctcggagtgggactgggagcatagccacaaaaatttgcttcattgggacttgaatacttaataattagcgaaccacccgatcataaattacattcaatgagagaactgagcagtttttaagagaaatgttaaagggcaccagtggtgcctagtatcctcttatgtgtcaatatcgctattggtccaactaagtatcgggtcccatatagtttaatataatagtttttaaagaatatcgctaagcaattgcaacgcgacatgtcacaaaagtgctaggcaccactagttcctaatagcaatgctcaatttttaataatccaactaaacattactttgaaaatttaaataggatcaacactaacagtggctgcttggtacagtaaaattgcatatttttcacaccaaaaaaaagctgcaactaaattctggaggatgacctagaactgatttcagacagtactacccacacctaataaattatatttattatgttgtaacataacatggcagaacgacaactataatagagtaagtatacagtaacaccgtccattaagtatattaaatagatgaattgccatttaatttagtttt

SEQ ID NO: 208360 - DNA, 1883 bp, Cannabis indica
ttgacttattaaattgtcgcaccaaagcaccgccatttaagattgtaagacatacttggctcactgtttcaattccaaaatctctaaaaaaaaatgaagcatgatattcatctggtcccagagctttagtagctccaatggccataatagcctgatgaatatcctcctgcgtaaacggttgcattgaacggtcattatcagccaccaaaatacgtaaattaacaacttctataccacgctaacaatgaagcagaatatgaagctttgttggcaggattgagaatagtcgaagcattaaaagtcaagaatcttatatgctatagtgactcgcaattgattgtgattcaagttctaggtgaataccaggcaaaaggattaaagatggcgaaatatttagagaaagtttggaagaacttggaaaagtttgattattttaagattgaacaaattccaagagaacataactcaaatgccgatacactagcaaaaatggcctcacaaaatgaactcaataagttaaatctggtaccggtcaaagttttgaagttgagatgatagttgcctcgccaaaatggatgacacccatagtcagatatctacttaacgaggaacttcctacaaacaaaactgaggcacgcaaactcttgtattcaatacctcgctatactatcgtcgaaataaaattatataggagaggttattctatgcctctcttacgatgtgtgttacccacagaagctagtgaaataatcagagagattcaggagggcttttgtggagatcatgcaggttggcaaagtttatcaaagaaaattatctgtcacgagtactattggccaacaattaacaaagacacacatgaatttgttaagagacatgataaatgccagaggttttcacatatagctcgcataccgtcaacagaattaagaatgatgacctcacaatacccatttgtaatatggggaattgatctgattggggcattacccacagggcgaggatgtgcaaagtatgcagtagtagcagttaacttcttcacgaaactgaacctctagtttccataactagcaaaaatgttcttgtttgttatcaagaatatcatttgcaagtttggaatacccatcaaaatagtttctgacaacgaaactcagtttgatggaaaactattcactaaattctgagaaaggattaagattataaaaagcttctcattgacatcaagaccctaggcaaacagacaagtataagctattaataagaccctaaaagatactataaagaagaagttggacgctgctaaatgaagatgggtagatgaacttccacaattgctttgggctcacagaacaacagagaaaacaacgacatggcacactccattctcgttaacattcggctcagaggcaatgctaccagtaaaagttaacattgtgacctacagacgtgaattctacaatcaagaagaaaactaagaacttcttaatctgtccttggcttacttgaagaaagacgtaccgactcgcaaatagctaatgcagcttatcaacatcaaattactagatactttaacaagagagtgaagaaaatggtctttaacattgaagatttagtgctaaggcgtgtatttgtaaatacgcgagatctagctaccagagtatttaacccaaactgggaaggtccttatgttattgagacagtagtgggaaccgaggtttataaattagctcggcttaacggctcgctaataaagaacgactagaatagtgaacatttgcgaccttatttccagtaaactcaaaatgtaaatgctgtatttatctctgtaatagttaaattcttattataaatatagttaagatttgttcaagtaattacaaagt

SEQ ID NO: 208361 - DNA, 1152 bp, Cannabis indica
gcactatttggaaggcgtggatggaaagaaaagagattaccatatcaaataaatggcatcatttagttttttaactttttaacatttagaccgatataaagtctctcaaaaactacacctctttattgcttttagatttccaaagtccacaacatctctaatagtaacattttagggcttgtttgtaaggtagtattgtattgagttgaattgtattatatacaaccacttgaggctagctcatgaactggccataggtgggtgtgtgttggatgtcttgggttcgagtcctatgtaaaacatgattgtaatatataaacgcttaaataaaaaaaaattggattatatactatatttttatataatcctaagttaaattttaatttatgctaaaatattatatatttaggcgcccgtaaaagttaatatcacatatacttttacaatacagtgtaccaaacgaatctttagagaatgtttgatgatgtggaaagtggcaaatataaaaatattatattattagagataaaagaatgttattcttaaaatttgtattgataccacataataatattgatgctatgtttttttttttaaaaaaaaattaaaggtacaatatataatagattaatcaagaattttttttatatccacataataatgtttgagattataattattgtatttttgaaaggtgttacactattggagtatttttaaagtaatggcgataaaaatgatgtgtaagaaagataaaataaaatatgaaatttttacatgaaaaatacaaaatttaacttttattacacttttaccttcacacgggcaagataacttttatacctcttattatatttttatttaccaaaataccacatgcacacataattctcttaatgatgatgtcattgttcttccattgtactcaaccaatctatcttttcaatttctttttcttctttttctttcattttcagctacacatttaaacttccctatatgatttaaagaagaaatatctccaaaaaaaaattgaaaatctcacgatcttcaactgctattgaagaattagcccacgtttttttttctcttttgtttaaaatttttatatatagcttgttcttcatcttctccaactccctctatgaaaaa

SEQ ID NO: 208362 - DNA, 945 bp, Cannabis indica
ttttattttttttatttaattttaattataatttttatttttttaattataattttacgacgttctaaatattaattaatttcatctaaacattgttaaaaaaataaaataataataataaaaaactttgttaacatttcacagtcaatatggattagtccatacctaatcccaaccaaaacacatttaaaagagatgaaaagaaaaaacataaacgtattttcaatagtttttgtattttaattgtgactattaccataaaatattcttaatcttaaatatacatatctattacaaacacaatagttgggaagtactcaaaaacataaaattttcagtaaaattttaatatttatacagtgaaataattttctatttatatttctgcaaagaatatttctcaagtttattatttttaatttatttttaattataattttctaattttaatttttttaattataattttacgacgttctaataaaaataacaagaaaataacattgttaccgagaaactgatcctggtgacatgaacatcaatgtttgacacgtggaaagaaagaaaacatcctggagttgagcagtcccgaatcatggcagtcgatctaggagggtgtaataaccaaaaatatttttttattattttctactatgtatatgtttattttattattattgttaattaactcgatgtggaaatatatagttgattgcttagaatatgttatttggtcattgaatagtattttcttaagttatgaaaattttgtcattttgataaactagagttttatagactactatgggcttttaggcagtccattaggtgttggatttatagaattaggatttaacattattattattagcacacgttagtattaagtaaatattaaagatagtaatatatcatcttaaattgtaagagagtagtaatagtagt

SEQ ID NO: 208363 - DNA, 773 bp, Cannabis indica
aataggtgtttgcatctaaaatagagccataccccaagtgaaaagcgacccatctgaggccactgcggccgtatgttcccgaccacaagcaatgtccaaccagcgggaattagccccggccgggcaaccaaaaagctccggcggaagctgcctagggatccttaattgacactccttccccttcctaccagtttgtcctgaatgattgtaaccccaaacgtaaattgcactcttccttggaagacttacaggtcgaactgttccgaaaatgtcatcaacatccatttacacacctatcaaccttagaccaaataataatcattatatacactgaaatagatatttccaaacacattatataatggcaagaaacaacaaacttacaaataattcgttagcttggaggatgatcgccaagaaaacaattaatttagcaccccaaacagagaaaagacggttaatcccaattagtaacggtcgaaacgaattagggattttgacttcaaaaaataaaagaaagtcaaggcgagaagaagagagaaaatagaaatattttgtcgttattgtccgtacagtttggcaattgggcctgtaagaacatgggccttcaatcagatccatttaccaaaagtcaactttctgttttgttatggataatagaagcgtttgaaccgtcttttatgttcagacacacaagaatggcgcgagtattggtctattattaacccataataattttcttttttttttggtttttttctttttcccaaaag

SEQ ID NO: 208364 - DNA, 849 bp, Cannabis indica
gaatttggtaagttttcaaatattgttcaccttgacctttatgggtctggtttcagtggccaagtccctctccaattgtctttagatattgttcgagacaacagttggtgtccagactcaggggctactctattgactatgcagttgatcaacaaatccatatgggtaatgattcaggcctaagcattcaaaacattagtaaacctttcatcctctctccctttcaatctcaacaacttgtcttaaataataagttgcatgctcctcagattaggatttcaaggctctgcttttttggtatggaatgttttagtataatgtaatattgtatatattcacaggtgggaataataattggagaaggtgcaatctcaggaacaggaacgttgacttttcaggtaggatttatgtgaaatcattatatgggtttattgcttataaatatgtgaaatcttttgactaaaagattatgaatgaaaattaggaattttcctattgaagattagttatgtctcgaagaataatactacatcattttatgattcacatattacaaatgaagtttcacattggtaaaacatgggaacataatgtccttgtgtaggaaacataatgaaaaagctttgatgcttaaatgtaactgatgaataaactaacatctatacactttttgaaagaaaagtcttcttatgagaatacttaagtaggtttaacacaaccatttccaatatgctacctgtgaactgaaatccatagtgataattcttctatctgtttttgagaatacaggatcatatggggcatcatttgggcaattttattaatctcaatttcagacttttctccatt

SEQ ID NO: 208365 - DNA, 1974 bp, Cannabis indica
aaaaaaaaaaaaaagaacatgaaagaactttgtatggttggagctacaaaaattttctgatagactgaactgaactcgtactagtaattacatggctaactaaatatagttgaaaagaacagacagaccaaccctgcaacattcccaaccgtaaaaatgactagactgaagcccctgcatatgcaactaccgaaccattctttatgtatcggtgtttacacggttgagattcttccgaatttcgagtcttgaaataatgatttgcaacaggtcaaaatctgtggtggatgtttcttcgatgctgaatattcctacatacattcaagttagaaaatagaacactttccaaccatcatctaacctaatgtgatcaaataacagaatataacagataatagtgcaacaaaagaactcgtagtttatgttaagaggcttcaatctatggttaaaagttattctcaagtcttcaaatccaatgcaatgaatcatatttcataattgtaatttggttcctcttgttttaactatagtattttcttttgtcatttttgaatgaactgatgagagctatgtaatcaaaattattgcattccagatatctgctagcatgtgtatgaatgcctaaaattatacttataagggctgctctaaaagaccagaatgcagatttagaatgcacaaggccagggcgaacagaacatgttgactaataggaaatcaaatcctatatagtcaccctcgtaccgagatactactggatctgaactaactataaggttgggggagttaaatgtgtgaaatcaataagaatatggttcgcaaataaatgtgcaaataaagtaacatgtaaaatttgatttcttactgcaaagaaaaatgccgttcatggcatgcttgtgtcaaccggataacttccaagcacccgcatgaatgtagcaaactcctgctaggggtatgaatagctcatgttagcataaggtaaaaaaaatacttgtatagatttgtagaggtataaagaaaacacacatgtaaatgcctaagcgcattctgtgcattttggtcagccatagatgcttcaaaatccacgtagaaaagatagtcaaagtatctgaaaaagaagacaaatacaaaatcagagcaaaataattgtgctttggtaaatataacacaaaaaggggtcaattaataacatggaaatataagcaagcatgttacttcacgaaatttactttggaccattgttgttatcatcagctgctcgaaaggcttcttttcgcaagggacgactctcaatcttgttaaggaaaaaaatacagccgttagaattgccatcatccaaggccaacacatagcatctagaagagagattttgtcatatataccttagtaaggttaatttgacgtagagcaaaaacagctagtgccttgaaaagaactccagggccttcttcgagtgaaaaaactatacttgtctggcattgagtaaatccatttaatataacataaaaatttctgctaatgtagaatatagtaaagagttgaactgagtaaaaagtaatataaaaactaattgccaatatttatcttaaaaagaccaaaccttgaatggtcggtctgtgcctggaatgataggctctcttgccagcataagaaaacgagtaacattatctgaatcatcctgtaaaatggagtttatgaatgatttgtaaaatacatgaaccatgtcaacccaagcacatcaaaacacaataacttttagaaacctgaatatcttcggcaagtatattcaaaccatagataaccccagccgctgagctagcaactgctccagtatcttttaaattcgtggtaaaacgcaacatgtctaaaaagtctataattacaggtcagtaccacaatatagtttgaactaaagaaacagattcaaatcaacaaaacccgtaaaataaagccaggtaactaagaccatgaatg

SEQ ID NO: 208366 - DNA, 847 bp, Cannabis indica
caaaagtttcttttcattattgaggtgttaaaatgaaacatttctatcttgtaggtggcctttgataagataggttcaatgacaaccaatactatttctaagcagagaaaaatacaagaaccagctgtgatggcagagctcgaccaaagattgagacggcttaattcgttaaaattggaggacaaatagcatcatccgctgtgtcaacacggatcgaaattgtagaatgccaccatgcatgcatcttctaggtggtttgttgccctcgaaagatttacggagaaggagcttgaatctgtgcctttcctgtttgtttctgcatgggaaacaagtagaaccaagtagaaagtgagtgcctgttgttttcaggattttgtaggtgataaatgtatatgttcttaatattacccgtataacctggttaaacatacatgaagaaaatcagggcattgttgttgcattaatgcaactaatatgccctttaattccttttttttccccttaaatgttatatagtgtaaaattgtaatgggactaaaagttatattcctatgaaatacgtttttttattgtaaggttgttggagaacatctgtcctatcttttttttttcctttcaaaattcttctgtctcgactttaatggttctagaagtcacttcgttggcctcacgttatttatttattttttctttccttttttggtggggggttacacggttgacgtcactgaaaataaaatggcaaatgaataaccgtgtggggtgggatggactctaatttgattgaaaacctttttattacaatttcccataggctataagttgaccttcgtcactatagctccct

SEQ ID NO: 208367 - DNA, 749 bp, Cannabis indica
gaatcgaccaaatattatttttttgcttaaatgtttatgatttaaattgggtcaacaacaacttggacaaaaaaaagaattctatcaaatatattgttctaatttctttaaagaaattcaaatataggataatgtataaatacgaaatttttaattgtccattttttttttgcacgcctgaagaataaaaagaacatttattaattgatagaagagaagttgactaattattatttattaatttagttacatctttagaggcaaaaagaagttgactctctttataacagtacaactgttcaagtgatatagctagttgactctagctcatatatcctcctctttttttttttttttaaaaaaaataattgacatgaaaaatatttcagatttaatttaagtttttttttttttttttaaattgttattttgttgagtaatggctggagaacttaatagtaaactctctaattttttattttaacaaaaaggaataaggttttgtctactttaaatggaacaaatcatagacatataggggcatatgccaaaaaaaaattattgtatatttaacttttttttttgtaatttttttataaacttaagtgtctatacatatagtatataagtatatgtattaatatttttgcccttcattaatataattgtttgtatgtcacctaaattagttgtcaattgggtattgttactttttttttggattgatttaccaaaacgtcctctttttg

SEQ ID NO: 208368 - DNA, 618 bp, Cannabis indica
ggactgaagaagccaagctcaaacctttcttctttagaaaccagagattttccatcgtcgttgagagattggttttgagtaatcgttttaagttgagctattgaatctttacagaagaaaagaagaagaatgatatggagaaaagcaaggttggccattgcttgtaaggtgtaactgtgctgtgtttcagatacaaattgaagttggaagagaaacaaacaggttttcgcatggctgcctatgttgacttcgttcaagtcgttgtttcatgattagtatttggtaaggtgagagggttgaaaaaattaatgacaataatatttaaaaaattgaaagtcaaagatttacagcatgttttcacattcttcttgttttaaaattattctttttagctaacgatcacaccacttacttgggcttaccgaacacaatgagaagaaagaagactgctattctgaattttttagaagataagttgagaaagtgaattcaaaattatgagggggccctttctctctcaagtgggaaaagaggttcttcttaaaatggttcttcaatctctatcaaattatattatgagtgtgttttagctttccattaaaacttgtaaagaattgg

SEQ ID NO: 208369 - DNA, 502 bp, Cannabis indica
ttataatatttagagaagatcattgattgttgctttgttaactcaaaacaaaatacaatagagaaagttgatcaaggtaacagatgaaaatcatgatatttgaaatcgatgtaacattttagtaatttcttgacttttacattatagtttcatgtacaaactaaaattgagggggggcacttttttttggtgaagggagcaaaaagtaaatttaatagtaaaaataaatacgattttattattatgtttataattatcatctttaattacaaatatatgttgtaattaaccaaaatacaaatatattttttttttcgtatttttttttagggggtcaggcctctatgtgagtccgcacatgtgtacatagaattcgctactaaaatttggaatgatctacaaaaaagatatcatcaaataaatgtcccaaggatttttgaagcaaagagatcaatgaaaatgtttaaccaatatctttcgatgttactgcttattttactcg

SEQ ID NO: 208370 - DNA, 550 bp, Cannabis indica
ttttactcgatctgatcacctgtagctacgtaacaagaggtcaaagaaccaataatgttcatcgttcctaatgccaccatttctttgttgccgtcaatctgatagctcttcatggcagcaaatgttctaccaattgctattgcttcctgttatattagggaaacaaaatggccttattagttcattcatctattatgccttaaaattattgagtacatatatatatgtgtgtaaattatgtgtgtatatatcatttttgaaaacgaattgcgaattcagcatagaattgtgtcaggcgtatatagtacttacggtgagcgctatgattccagccacaacgcctatcctaaaggctttgcccacgtgttctccggagaggaataggtcattggcagaggctggatttattcccttttcaatatggttcacctgaatatatcacaaatcaaacgcagatcaaaccattagactaattgtatatatttataaatgcatccgtaacatttgcatacatattagtcatttgtacagttaaattatgaaatatata

SEQ ID NO: 208371 - DNA, 695 bp, Cannabis indica
tggccaggtgttgatagcctgactaggctctctttgagacttatctttctgacgagatgcaatcttgcatggtatgttgattttccctttctctggccatcatattggtagtccggccagatgcttcttggaaggtaatatgcatttctttaataacaaccttatgtgggaactacttatcaaaaaaaaaaaaaaaaaaaacccttatgtgggaactgcccgacctactcttgcccgaaagctccacgttatgccaagagtcagttgaataaaaccacatgtaattatcacgtcaagtgggtaaaaattagaataacaataaccaatatgaatacaaattctagcacgaatatatgtagaaaatgtaactagttttattacaacacatctatatgagattattattaagttttattttgacaaaaaattagctcaaatcactagtatattttttaaaaatacatggtttaatttgtcatttaataaaataacatgcttaatgaaatgcaaaacacaaaatcaaaaatatttttaagaaataataataataattaaaaaaagcaaagacggtaaagtaaaggtattagagcaatgaagatatggagatgagaagggaaattcgaaaatgccgcctccaagaccaaacacctcagctctctcttccggaccgctgcaaaaaccaaagcgaaagtaaa

SEQ ID NO: 208372 - DNA, 631 bp, Cannabis indica
cttgaggattctctgtgtgaacaggctatataatagtgtgcaaaccacgagcaccttcattctacaactagtaattcaacataataattatgggaattaattaagggaatctaagactctagagaagatcttcatattaaaatatgataggttatgctatattgtataaacaataattagtggatgacaactttgttttattaatgttaggtattttatatgatgactttcttacactaatttttgtaaaatttgccaatgtgaaaaaatttgcaaaatttcaatatgaagtattaaaatttataaaataatttcacttaatttattctatatgcaaccatgatagtcacgcagtgtaaatctatagtcgttttgcgatcataataatcgtttatatagtcactcagtatgacttaaacctgagaagcatgaatgcctgaaccagcaaaacttgtaaaagaaaatgtaagatcttgattatctctaaaaccttacaaataaaaaagaaaaatctcataaaaactaaatccaaagataagattggatctgtcactagccttggtgtgcggtaatcactagctttgatttatttacatatattcagcaacaaaaggtaagaatgaatttgaaa

SEQ ID NO: 208373 - DNA, 1498 bp, Cannabis indica
tcaacttgcattggaaagataatcttaagataaatctaagtgtatcatagtcatagcccaattttgaagttatcaagtctaaaattggctcaaaatgcaaactggtacattttactcgggaattgagtaatgtggttaagtgagggttgttgaaggacaatgccacagcccatgtggcattgtatgcgagcattgacactccaaaacacatgtttttcagtatttattgccaatatcatgcatttccagtatagaggagatatcccatcactccatttcaaattggtgcatcctcaaccgaaaataataactttcctaatatttgtggaatttttgcttagaaacaaggaggtttttatatatatttattttcttgtaatatttattcattaaaaggagtggtatacggaatttgttagagagacatctcgacatgtggggatcactaacaaactctacaacctatataaggagaagtaagaggctaaaagggggatcttcttttggactctcttggatcctttttctgaaacctctcttagagactcacttgatggcagccaagaacaccaaacttattccttcatattttccattgaagtccaccatactcagttgacaccagacctcaaaacaccattgatacacacatttctttacactttattgatttattcttcccaagaaccttacaaccactaatttagatcagatttatgaatatcaagtctcccatgagtcttatattcataaatgtcgtttaggatttctactaaaaatcttttgttatatttttatccacacactcttgagaacataactctggtgtgtcagacctaattaatcaaaataaaaagtagacatagccccatcatcgtcacgacatgggggaggtgaactactataaatccctagtgtcaatttaatttattacagttttattagtcaaattaattcactgtgattctctttattttttttacgatcttcttagatcagttgacgaaaaaccgcatcaacataaactaataatttaacaaactagaacatgcttttctagaatataaacactttaagtttgagtatacttacagcagtgtcacaacagaataatggacttattctgttcaatactgtaactcttgaatcctttatgttgcagagtatcaccaagtactgaatgtgaatcttatttttctttgaatatgtatatatatatagtgtttcactagttctctgggtatcacacatgactaggggcaatttttcaattactaagaataagattgtagctagaaattttgaggaagagagtagaagatttttgaattcctataggaagtaggctatttgaaaattgcataaaaagagaagaaagaaaagccaattgtgtgttgttatgttatatgaatttttttaatctctccctttatataggcaatcaaatagatttatgttaaaaatatttatttaattaaataatataatgaattatttg

SEQ ID NO: 208374 - DNA, 1552 bp, Cannabis indica
aaaaaaaaaaaaaaaaggattcaaatgaatctaatgatatataatttaataaaaaaaatagttgtggcattaatgtatttaaaaatatagttgttataataaattatgtttatgtaagacttataaaaaagttttaaattattacatttaagactttcatgtacttccatactgaatttagtcttataaaaatgtaatatcttgtaataaatgaatttaattgtcaaactaaagctagacgcgttaaccgtttctggggtcgttctcaaacttttatcctagtcattgccgacacatatagttggttataggtgttgagaatcaacggctgagatgagttcaacactcccatcctcaccgctaaaacgattcattagatttttagagttaaggataaagaaggagcccactgccacagtgccacgtacaaggataattgaaaacattcattcaaccaatagaaacgtggcacgtttagaaacgtttctgacaccacgttagattggactggatcacagtctttccccatcatgaccctacgttctccacacgaactcaactcaaactcagcaatccgggccaattatagcccatgggccttaatgggcctaagttttaattgtttactagctatcgagctccaaacctgaaggaaatttacttgaaactattatttttggcaaatattttacacaattacgatttttcttttacattattaaggtgttcatcaaaaataataccaaaataataaaaaaataacaatcaaaacaatataacaagataatatatagataacaaaaaattaacaacaaaataataaaaataccataaaaaacatcaaaagaagtattttatgtaaataaaattttaaaaaaccgtaaaaatatttaaaattccatacaaccgtatttttagaagtttttcttattttgtattatttttttttaaattacttcttaaatttgataggatattatactatctatgcaaaaatatgattttttaaaaaaaaaatatttttataaaagttgaaacataaccatgtatctttagagtaaccaacagattatctaagtatcttaatgtaactagagaagtaaccagttattttatactatttttttatacatttttttattaaaaattattcataaaatatacattcttttttatattatattatatttttacaaatttatatcttaccttataaaaattcccaataaaattaggccacagttgtggtccttttgtcggtaacaactgcaccttccttccccaaaatataggaaattggatttagtcttgtacaataaattacattgtatactcactttattttatttattttaatttttacttttatttttatattttttaaaatatacttatttttatatataatgttctcattaagctctttaggttgatgtatattatatactagacttaaatagagagtgaaagtatattagccaacttacttattaaagtttgtatattttaataaaataaatataagaataatttttattaatagataaaaaaa

SEQ ID NO: 208375 - DNA, 1295 bp, Cannabis indica
tctctctctctctctctctctctctctctctctctctctctctctctctctctctctctctctctctcaagcaagaactaagaaaacaaaatttcctctcatttttagaccaaaaatcaaggagttcagctagggttttcatagattaattgatggttagctcaaggtaagcttctctccctttttttctttggattttcatgtagaaaaaatctagtgtttatgcatgtttttgggattgtgttgttgtttggtttaatagtgtatatagttgttttctgaagttgtttttaagttatttgtgttgatttatgctggttttagtaattgttgtggagaaagactaaagtttaagcatttaagctcaaacttaagtttttaatagtgaaattaagtttagaggggttataactgcttttattggttgagttatgcttattttgtattgattaggtgttttggatagtttggtggaatttgggagagatatttcacctagtttttaaagtttgtgttttctgtagtttgccattttttagaagcggtgaactggttttttttttggcagaaattcataaaatggtagactattttggggtttcggtaaattggatttttcaaattttagatcctagtttttcatgttttattgatatttagggtattgtcatgctatctatcgatagggaaatttttagttttgagtttaagtccttaaaatatgatttagcgtgtcgcttatcagttttatatttattgtgacttagggacctataaatcgttgagcagtagtttccactcaggttgaccgacaatccttaattcagaattaaggtaagactagtataataattacatatgtacttacatatttagcgtgtatatttataaatacctaatatataacatatcagtaatgacagtattagtgtacatagagttacactgaataccgacgggtatatgtttggcatagtagaattaatgttatcacatcggtatgactagagtaccgagttgttgggttttgtgctctaaataaaacccatttcaatataatcagatttattaattaataaagatcagaaatcacattctatgttgcatgattcacgtgatttatttcatgattatatttaatgtataaagtctattaagtccagaacatatgtatttgtttatgattatagtgttatcagcacagtgaaatataatcatgattaatatgttcaaaagtttgattccctgatttgtcagttcactgtaatatgtttataattcccaaagctatttcc

SEQ ID NO: 208376 - DNA, 1451 bp, Cannabis indica
cattaaatgttatttctgatctatattaatagtaaatctgattatattgaaattgagtttattttagggattaacacccaacatactaggaatacatttaatcacacaatcttctttacttttccactgtgttgacgatacaataaacaagaatatcagtgtgaaaagggtttggatgaatttattaatcaaataagtaaatagttgatcacgtgaaccaaataacgcattaaacaagtaacgaaattaaatatattccttttttgatatgaatagaaaagattacattgaaatatagttttatttagggcataaagcccaacagggacatcgttgataaattagctatgattctttggaattttttgggagctcgtaatgacttactttggattaagaagaatgcttctgtggagagagtagttttggctgtcattacttaccttgaaatctagaattttgctcagattaagaatggagatgcttcaacatcttctggacagtctttgactggtgctgagccatggcataaaccatatgttggtgagttaaaggttacttgcaatgctgctctttctatgatggatcactagaaatcatgaaggtgagtttgttgcttctgcagctattaaaagaaagggtgatcttgatcctcttgtgactgaagcaatatctttaaaagaggcattgagttgggttaaaagtacctggggagatgcaacctcttttgaagagtttgttcttgctgctgtggtgatggaatcggattgcctcgtgctggtgcaatcggttaacatcaataagaagattctctcaccacttggtcttataattttagattgtatcagtctcatacagtctgtttctatgtttcacatttctgttaagtttgctaaacggtctgggaaccaagctactaattcattagctcgttcttctagttcatttcctgactgtctttctagtacgggagatgtccctgctggtttggatgctattttaatagctgatttgctttttaatgaaagctgcaatctttgtttcaaaaaaataacataatttacattgattaatttaatgctcttgtattaatgtgacacatcagcatctttatcacaaaactaaaataatctcacaacagtatctcacacatgaaacacaaacctcgagatctctttgtgccagaaaggatgctcaaaagcacgctgcaacaacttgtatcctgctcctattttacaatttgcctcatctatttttcgccaataccagctaccattcaaaggagctttgtgctcccaccactccacatttttaatgtaaacactatagacccattttatccaatgattgtctttcttattggcaatggagcacacatgtttgaaaagtactgcttcattccagtctgtagtgttcacgaatcctagacctccaacagcatttttcctaca

SEQ ID NO: 208377 - DNA, 1201 bp, Cannabis indica
cctctgatttggttacttcaggccgcactcatccaatgcaaaccaggtcccaaagtggcatctttaaaccgaagtcatatttagccactaaacacccacttccacaagccttactgccctctgaaccaagaaacatcaaagaagctctcaacaatcctaaatggtttgcttcaatgaattctgaaatgggatctcttaaagctgctggtacatggacacttgtaccctatgaacctggtatgcgtgttatagacaacaagtgggttcaccggataaaactcaatgctgatggttctttagatcgttataaatcccgacttgtggccaagggattcttacaaacaccaggaattgattatgccgagacattctcacctgttgtaaaacccgtgacagtgcgaaccgtgttatcccttgctgtttctcatcaatggccagttaaacagctcgatgtcagcaatgcgttcctcaatggcactctcaatgaaaccgtttatatgtgtcaaccaccaggattcatagattcagcacacccaactcatgtttgcctgttacataaagcaatttacggcctgaaacaggccccccgagcttggaatacaaagctcaaagattgtttagtgcagtggggattcacaccatcaaaggccgataactcattgtttgtatatcgttcaggtccctctctaatcatcctccttgtctatgttgacgatatattagttacaggtcccaatgttacactaattgacaagcttacaactgatctcaacacacaatttttacttaaagacctcggtgatgtgcattactttctaggcgttgagattttcagggactcctctggcatgtatctctctcagacgaaatatattactgatttgctcaagaaactcaacatggaaggtgctaaaagctctcccaatccttccagtgcagccaccaaattatccctcaccgatggcgaaccattttcagatgttactctgtataggagtactattggagctctacattacctttctctaaccagacctgatgtggcatacatcatcaacaagctcagccaatttatcaaagctcctacttcttgtcattgggaggcttgtaaaaggttactgcgatatctcaaaggtacaatttctgagggattagtacttcggccaacaacagatttgacacttcaaagctattccgatgc

SEQ ID NO: 208378 - DNA, 568 bp, Cannabis indica
cattcaactctgtcaaacgccttactcatatcgagtttaatagctgcatatccttgtttccctctctttaaatgcttcagagaatgtaataactcaaaagcaatcagaacattatcagtgataagccgagattcaagaaaagcactttgagattctgatatgactaaggataggaaaggcttcaaacgaagcacaattgatttcgaaaccagcttgtataacacattgcaaagactgataggtctcaactgcgacatggtagaaggctttttaactttcggaatcagtgtaataagagtttgattaaagctagcaggactcgcaccctcattaagcacttttaacactgctgcagtaaccaagttcccaactatgtgccaatagttagtataaaacatcacagacataccgtccaaaccaggactgctatcatccaccattgatgtgagagcattgtaaacttcagtagcagaaaaaggtttgcttaaatcagcattcatctcagctgttatagagcaaggaatagtggaaataactctgtgaactgcttctcgatcaacaccatcag

SEQ ID NO: 208379 - DNA, 934 bp, Cannabis indica
atatatatatatatatcacaaaatgtaagataaccattaattgttttatatttatcagtgatggaaatggaaactgtataattttataactctccatgagacccattaaatttatataattgtagttgacaattgtttatatttatcacaacacaagtaattatgagattaagctcggtatattatatatataattggtatgccaaaaaaaaaaatgtattagattaatataaattattattgatgttaaatctcagcatcaagattcaagaagatctgtttatatatcattatattgactcgtgtttcagatttaaaacatataattttcaatgtatatcatatcaaaagatcgatcgacttaatttgatcatatatattcttccaaatcaaatcaaatctagcaaagcgagagttgggatcagatcaatgcatcacatatatatatatatatatatgttaataataataaaggtgatacatatagttaattattattattattattattatatgtataaatatgcttacagttgggtagggccactttgaatgttgttgccaccaattcttcaggaccgtagttgtgtccccaggcaactttcctgctcttcttttcttagtatctcttctcttacatcttcaattcttgacttaaaaccctatacatacatacacacacacattatatatgtatatctaatatgagctagtatatactatatataatcatatatatgtatattataatgaatattgaataagatatatgcatatatctatatatacctgcttgagttcaatcttaattcatggcgaactctctccattaaagacctctcagactcagtggaagtaaaggaccaaatcccactcatcatatcattattattctatatgatccccactgaccaccacgaagattgatctaagt

SEQ ID NO: 208380 - DNA, 677 bp, Cannabis indica
ttttttttttttttttgaattggcttatgttgttgtgtttatgtataatgacaaaagatactttcaatggttgaaatttagaagttattattttttttcaaagtgaatttggatcaaactctttcgggcgtaggactttctttttccttctagaaaagatgataaaagtcaccactaacataggtgaagggatatatttcttaccataaacctctcttaatcttttctgtgaaaacaacaaaaacaaaaacaaaaaacacctctcttattgttgttaaaaaattaacttttgttatttaaatttattttgtattcaattttcacatgtatatatctggtaaatattttaataattatattaaatatttatttttagtcttagattattattaaataattaaaattaatttaaatgataactaaaaatatttataaattagctataatttaatttaatttaattttttattaataaaaataataaaaaaacatttataaatattagggttttttttttaattttaactaaaaagtaacaatttacaaaaatacttccagttggctaaataaataaatatacagctcaaataaaaataattacacaaataccacttacacacacctttaacccaggatccatgctatctaggcaattatcgcgcaaccatgcagcaacc

SEQ ID NO: 208381 - DNA, 745 bp, Cannabis indica
ttgtaaagtaacatccaactccatccccaaactaacatttgagctattgagtagaaaattaggttcactattcgccttcgtcaccaacgccgacccaaaagtctgaaacaccaacctcgcataccaaagctacctccaacttgccatcacaaggacgacgctcgctcaaacccagattcgacattgttgacgccaacctcccttgtcctcatcaccatgtcatttaaaaaaaaaaaaaaactttaatattttaaaattaatatatgattttaaaaaagattaattaattttgtattattattaaataattataatataataatcaaattaaatattaaattgagagtagttttggtataagaaaatcttaaatacactaattaaggatatcaaatgaagactttttacaaataaaggggaccaattaattattattcaaaacatagggtacttaaatttgtattttaacaaaacacaatgtactaaatgagtatgttaagaaaaagtaaaattataaaaaaaataattaatttgaaataaacaaagaaaaaaaaaaatttctagcaattagtgagtaactattttattttgagtgaaagacatactttttattttttatttttatatctttcaattatgtccttataatataaattctcatttaatttatagtacaagagggtagttttatttattaggaggattttataatattttatacataagtataatttttttttttttt

SEQ ID NO: 208382 - DNA, 701 bp, Cannabis indica
ttttttaacactctttctctttcaaaaaattaggagcgctcctcctatatttttctctcttacgtgattaataaatgtagttgtttttaaatattttgtagtttattcaaaatttatttattaattatttgcatattacaatcatgtgttctataattgttttatttttatgtactttttttattttacaaatatcttttagtataataaaaatgtaaaaaaatatatatagaggaattttctaatatagggcctaggggtgtcaaaaaaagactgcatgggtgttttgtaacgaatcttgttttgacacgtcattaagtgaaatttgttttttgttacctgcaaaatactagattattatttttttcttgtatttttttagtttttttttttaacatggaatgaagttaatcattccaaatttctttttttgtttttggggttgagtaattttttgttcctgatttatttttcttttattttttagaataagataaattttcattgagaaaacaaaaagaagctacagcccaaaaaaaaaaaaggagcatcgtcaaattctaggttaggaaattcttgggatgattaatttttcgttttagtttatttatttattttttaagattgagagtaaaagaaaaataaaactatagccaagaaatgagcactgataaccctccacaaaataaaaaacaaccaaa

SEQ ID NO: 208383 - DNA, 2486 bp, Cannabis indica
tgcatagtgatttgtggacatctcccattttgagttctttaggtcacaaatactatgtgctctttttggatgactattcgaaatttttgtggactttccctatttcaaaaaaatctgaagtctattcaacctttctcaaacttagagcttacataaaaactcaatttgaacgagaaattaaaaatatccaatgtgataatggtagagaatatgataacggtccttttatgagtctttgtgaagctaatggaatttcttttcgtttttcttgtcctcacacttcatcccaaaatggaaaagccgaacgaaaaattcgtaccattaataatatcattcgaactttattagttcatgcttcgctccctcccactttttggcaccatgctttggaaatggcaacatatcttctcaacatcttaccaagtaaaactctaaattatcaatcgccactacaaattctctaccaaaaagacccttcatactcacatttacgagtctttggttgcttatgttatcctctatttccttctactatgataaataagctccaacctcgttccacaccttgtgtctttttgggttatccatcaaatcatcgtggttacaaatgctatgacttatcctccaataaagttataatttgtcgccatgtgttatttgaggaaaatgaatttcccttctccaagctgcatccttcttcttcctccacctatgattttcttgacaatggattatcaccttacatgatacaccatttacaaaatcagtccactcctcccattcaagtgcaaaaccacccttctctggccccaaccttgtcacctcgccagccatgctcacctaatcatgcaactcccccttctccacaaccgacccaaccagcctcctcaccactacaatcaatccagtccacatctaccaaccccgaatcatcatcctcaactttgggtcaaccagatctcaacccaacatttagaccatacacaacatcttcctcttcctcccattttccaacctacctcgagttcagcaaacaaacctgttacgaggagccaacatggtatttatagaccaaatacaaaatatcaccatggattaaatgctaatgtcacaaagtctcctctcccccgtaaccccgtgtctgcactccgagacccgaactggaaaatggctatggatgatgaacatattgctcttattaagaataaaacgtgggttttagtgcctcgtccccttgatgctaatgttattcgatctatgtggattttcaaacataaagaaaactctgacggttcttttgagcggcataaaggccgacttgtatgtgatggtgcaggacaacaggttggcgtggattgtggagaaacttttagcccggtagttaaaccggcgactattcgaacggtgctcagtcttgctctctctaaggcttggcccattcatcagttggatgttaaaaatgccttcttacatggtgaactaaaagaaacagtgtacatgcatcagcccttgggtttcaaggatccagatcatcctaatcatgtgtgtcttctgcgaaaatcgttaatgggctcaagcaagcgcctagagcttggtacaaacgattctccaactatgtttcttctattgggttctcttagagcaagtctgacaactctcttttcatatacaagaaaggtatggagatggcttatattctactttatgtggatgatatcatcctcactacttcttctgttgctcttcgcaaatctatcatgctacttcttagcaccgaatttgctatgaaagacttgggtccactgagttcttttttgggaatcgcagacactcaacatgctagcggtctatttttgtcccagaaaaagtatgcttaagaaattattgaacgcgctggcatgtcatcttgtaaaccttgtccaactccggttgatactaaatcgaaacttagtgctaaaacaagcactccatatgaggatccctctcaataccgcagcccaaccggagctctccaatatctcacgttcacaagacctgacatatctatgccgtacaacagatctgtttatttatgcatatctaatggatactcatatgcatactctaaagcgcatcctgcgctacgttcaggggactcttcactttggattgcatctttatccctcatcaaccacttctttgatttcgtatacggatgtagattggggtggttgccccgataccagaaaatctacttctagttattgtgtgtttcttggagacaacctactctcttggtcttctaaacgacaacccacactctctcgctccagtgctgaggctgaataccgaggcgttgccaatgtggtttctgagtcatgttggttacgcaatcttcttttggagttacattgtcctatcaatcaagctacattagtctactgtgatagtgttagcacaatatatcttgctggaaattcagttcaacatcaacgcactaaacacat

SEQ ID NO: 208384 - DNA, 1353 bp, Cannabis indica
gtaaaaatatacataaaaaaactccttaattgtaaaaataaaaatctcttattttttaatcgatgtcgtcatgttcaataaaaataaaaaaataaataacattttttcccctgaacttttaacactacctaattttacctcttaaaatatactgcttattaaaaattatccctgaaatataatatttacataattatactcattctgttagattttatttttttaccattaaaagttagttattttaccccctgaactttaatcaatataaaattttgcccatttttattaaaaaaaataattttaaaaattacaatattctattttttctataaaaatatttaatatattttattaaatctaaaaaaattaaaaaaaaaatcttaaaaatctcataaaaatattaattacttaaaaaaaattaaattattcctaaaaaaatattttcaaactttattttatttataacacgtttcttaaataatcaaactaaaattattgagaatctaataaattatttaaataaactaatattttttgaaaaagaaatcaaacttatttatatttataaactcatatcttataaaataaagaaaaataatttaaaattcaataaaaatatcaaattattttaaatgaaaaaactatataaactaaaaaaaaaaatattttcacttaagcaaatttacagtttttgataaaataaaatatactcaagtttgttccataaaattcagtttttacaaaatttagatttttaatatatatttttttgatattgttatacccgaaattcggctaccatctcagtgggggacacgtgtcaggataaaaggaatatggatcgatgcaatcattttttatggaataactcattaattatgtaagtgtcatagtatatttgtaacccgctgacaataaggtcttatgcgaggaatcaatatacaaaatgttgcttagtatattagcgagaaaccgtatgtcgctgaatgcgagtagcgaggcatcaagtacattacatgtaggaagacgaaagcgacacaactacaaaagcctttagtgtataacgtacaaactaagtgtaaggctcaagacctagtaagcgaggtgtctatctcgctatgggagggcttcctgtagcttcactcagttaactttagtaaggtttacaatcttgacgagtcagaagctaacattcaaacaagctttgaaaaactctttgtacataagggtcgcgatcatcataagacgtgtatcatcgacctctaaaggaaaaatggcgcgctagctattatgatccctggaaccaagcctctgtctagacatccttagataaaacaattaaagacgtgt

SEQ ID NO: 208385 - DNA, 1004 bp, Cannabis indica
aaacgtctcaaaaaatcctttaaggattcattaggttgttactttatgttggttaaggataatgcctctggtctccctatttctcgcgactaagaatcgtttcctaaagtcctgcaacaattgttcccaggaagtaatggaattttaataaatttgtcaaactaactgctcgctgcccctgtgagggacgtaggaaataatatgtaatgcatattattccccacattgctggctcgcattatgatattgaaattgtttaagtgagccaccaagtcagttgtcccatcataaggtgtgacatgtgggttcttaaatcctcatgaaaattgagaacttaatatggcaggatgaaaaggttcagggtcatcgtcagagtcgtaactagggaactttccatattcccatcctgatattgtctgaacttctcttccaactaaatgacccttaactgagtagagtcatcaacgagttgattgacttgtttacatgcaggtggagcattttctattcaatctctctctaagatctggtgcatttatgtttatctgcttgcgtaggttaggaaacctttgatttatctgctctcacagattgggatgatcgtgtacgttttgtcgtcaatcttgcctattatcataattacttattaagagactaggggaaaaacgttctgattggtaactttgcaagttgctgacactttcttgttcattttactattcacgatggggagttctctcgcctcgtggtggattttcccctgtgcgagatctaggggattgactttgtccatggctttaaatagacctacgttgggccatgtttgattatgatccttgatgttcttcacaggcttggctttcgcctttcaaacacattagccgaatcgccccctgtttaagtaagtatacatattgtccctttctacccttcttggtccacgaggtggacatagagggctagcagatcgattagctagctgctcatttatctctttttttagc

SEQ ID NO: 208386 - DNA, 696 bp, Cannabis indica
ctttattaattgtgatatgcgttccacgtccgaagcctgagtccaggtctggagtccgggtgcgggttcagggtctaggtgtggttctggagtctgggtgcgggttcagggtctaggtgcggttctgaggtccggatgcgggtctgggtttaagttcgggtctcgggtccgaatctcgggttcggatttgggtcccgggtacgggtacgggtacgggtcccgggtctaggttccaggtttgggtcttgggtttgggacgttcaggttcgagttcgggtctcgagtttgggttcgggttgcagattattatatattaaccttgaatcctttgtaaatattataatagctataatatggaccatttgttatgaataatagtacaacatatagttgttttaaaaaatttagttgtaataattaatacaatagattgttttatgcaaacataatattatttattatttaatacaatacaactcttatacgacgtaccaattaaacgagcccctagtgatcataaatacactgttacacagatgttaatactttttcaacttcttctcaatctgttttttttttacaatttttattttataattgctttactatatatttcaaggaggacgtgtattatgatcgcaatgtacagtacattataatgatgaatggtccctcgacaaattacagaatatattc

SEQ ID NO: 208387 - DNA, 1532 bp, Cannabis indica
gtaatagacagcggtgcaacacatcacatttgttgcaacttgtttttacaactttacatcacaatgtcatagccttttttgtttctcttcctaatggcaccaaaatacatgttcaaaaatcaggcactattctcatatctgctactttaactttgcataatgttctttatgtgcctagttttcagctcaatctctttagtgtctctagctttcttagcaacactactaactatatatccttcactcatgattactgttttctttaggattcacagaagaggaagattgggacaactaaaagacttggacatttgtattttttgttgtcattcttcaatactagaataaactcaccatgtaatcaatcatgtaattctactttttcttggcattgtagatttggacatctgtccatatcaactaccaatttcatcaataaaaattttcaattgagtagttctcacaatgatgttccttgctccatttgtcatttagcaaaacaaaagcgattgccttttaattctcaaaataatattgctaattcatgcttcgatttgattcatcttgacatatggggacctttccacatacatagcattgaaggttttcgatgttttctaacaattgtaaatgaccatagtcgttttacttgggtttacatgctccaatccaagtttgatgtacaaactattattcctcaattctataacctcattcacagtcaattctctggcaatattaaagcagttcggtgtgacaatgcaaaagaattgaacataacatcctttaccttcaaaaaggcatacaaatctgcaactcatgtgttgaaagacctcaacaaaattcagtagttgagagaaagcatcaacacattttaaatgtggcaagagctttggcatttcaatcctctattgccttagtttattggccatatttaattcaaactgcagtatatctcattaatcgaacaccaactccattacttcagcacaaaactcctttagaaaaattgcatcttaaatcacctaatctttgccaagcaagaggcacaaattctctccaagagcccatgcttgcatttttattagctatcctcaaggaatgaaagcttacacactccttgatcttgccacaaatgacatctttcactctcgagatgtcatattttatgaaacaatatttcccctcaaaggctccattccaaactctcaatttaatatcctttttcccattgaatctatcattaatgatcaatcttccactgctgccacaaatataccagaaaataattctgctgtcaacaataaaccagcaaaatgctctgcagatcaccctactgttgcagatagcaagtctacaaccactccagatccacctgcaacacctattcttggcctcccaatcaccacagcaaccacctctcctcctgaacatcccacatctacaccagcagttcatgacagcatccctactgtcaccaaaacaggtcgacacatttccaaaccgattcatctcaaagattacatatgcaa

SEQ ID NO: 208388 - DNA, 923 bp, Cannabis indica
attttaatttaataaatattatacatgtcatagaagtactaagtactttggcgtctcatagtaatgctcttaattttatttgtctataggcattttatagatttttttggtaggttgatgagttgggtacgctagttgctgtataagttttattgtctaaattttactacgattcttgatttgacaaagtatgtcttaaactaaacaaggaactatcttggtttgatgaggtccttgcgctaattttattagtgaccagggaggataaaatacctatttgttttagaaaaaattgtgaaactcatttaaaatttttctttaaacttttcttttctgttccatatttttttttctataaaacatctttaacatctcatttttcgttttttttttcttattaattattctcttcagaataagacagaagttcttgaaagatttaagcactagataataatgattgagaatcaaaccaaaaggaaagtgaaacgacttagaataaataatggtctgaaatattgttctaaagagttttatgtgttctgtaataaagaatgaataactaggcacaagatcatgaggaagactcctcagcaaaatagactcgtggagaggttcaacaaaaccattctagaaagagtcatgtgcatcctattgagtgctaaattgtccaaagtgttttggacaaaagttgtgcccagtgcagtttatttgataaatatatatccgtcaacaaaactagatttcaagacgtcagatgaggtgtggtcaggaaagccaacaagttgtgaacacttgaaggtattcagatgtgtctattatgcacacattaggcaagacaaaattgaggcgagggccttaaacataaagtgtagtttcttgggggtatccgaaaggagtcaaaggatatagatagtggagtt

SEQ ID NO: 208389 - DNA, 520 bp, Cannabis indica
aaaaaaacaaaaacaaattggttactaaatgttaacttgatggattattatatgcattgcaatctattaagaataataaagaagatgaatgatttatatatatatatatatggagtatatatatgtttttattgaatattagcgtaatggagtttaaatactaagctactgttgggattagatattgacatcatgcacttagttaatgctgttattatatggattatgtattaacatcagccgagctttgcaaggtgctgccgcgagaactcattttgtttaataaaataataaaacacatattttttaattaaatttaacacataagatgtcataaataattaaaagtaatttcaaattcaaatttaaattttaagaaaaatcttattttaattgaacataattaaaataattttatttaaagataattattataataaaataataaaaagaaaatttatagtacatgtacaacaacatatatacgtgttaatttcaattttcgttaaccaataaatga

SEQ ID NO: 208390 - DNA, 811 bp, Cannabis indica
agctgagaaagaacaaaatagctataaaataaaatagcacattgaaatagatattttataagaattcttgcaataaacatgtgaagttaatgaggagaacaaccaaatcagtataccaatataccttcaaaaggctcattttatatagcaatacacagaaaaagccaaatcattacagcataggaagaaagaaaagtgccaattaaattggctactgtgaaatgacatgaaaacattgtcaacacacgaaaaaaaagtctgtctcaagctcaacaaaaagttcagaccatacattggtgtacctcagaaccattatcaaacaactgaccaaccccatgtccatacaaagctaaaatagataacaataagaaagctaaaaaaacaccaacctgaggtgaccaaatcctccagtgaaccaagagcaaacccaagcaaaggaaaagatgtggctgagccttcaaaagaaactggttatcatgacaaagccccaatgaggcaattcatcgaacaagtgagttgcaataataaaagagtgatcattaacaaattattaacacatatggaatcattaacaaattaacaccaatgatgatgataataataatcccatcaaatcaaaatccaaagctgatgcagaaactcttaaaagaaaaattcccaagacttaatattggtgaaacggaaggaacaatattagttaattaatatacacaagaaaactaagaattaattaacaatttcaacttgagaaatgaaaagcaccaaccaaccttgaaagagtatctgtggggctgtaaattggggaaaccta

SEQ ID NO: 208391 - DNA, 1513 bp, Cannabis indica
agcaggcagtatttgcaaggcgcttgctcactagcaaagttggttcgattacaaatgttgtatttatggtatgttggctggttgattcgatgtttttttctctctttggggtatgatttatctattgaaatttactatccttatgtcttttaatggctctagtaatatgttttcatagggaatgggagaaccgtttcaaaatattgacaatgttatcaaagctttagacattatggtgcatgatcaggggctgcatttcagtccccgcaagatcacagtttcaactagtggactagtcccacagctgagacggttcctcaaagagtcgaactgtggtttagctgttagtttgaatgccacaactgatgaggtatagttttatctgaatgggcaagtcattcatgcttacctgcgtcagtttcaactatgcacaaacttaaaagttctaccatgcttaaccttattattgttgcaggttagaaactggatcatgccaatcaacaggaagtataagttagacttacttcttcagacccttagggaggaacttcgcttcaaacataaatataaagttctatttgaatatgtaatgcttgctggtgttaatgacaggttggattagcttttaaatttctacatgtttggaattggattactagcatgaatgcatcgaagtgacatttactaatccttttcattgtttgtttttctgattcttgcagcatggaagatgcaaggaggctagttgatcttgttcaaggtattccatgcaaaatcaatctcatctctttcaattcccattgtggatcccaattcagaccaactagggatgagaaaatggttgagttccgaaattttttggctaaagccggatgtactgtgttgttgcgacctagtagaggtgatgatcagatggctgcctgtggtcaacttggcaatcctggtcctgttcgggctcctgtcctccgtgtgcctgagaagtttcgaactgccttagaagtttcagcatgatttttaagacaaccatgggaaaaccatcatttatttcatagtctactggcctaattcttagtagcttctaagtttagtaccctatatagtaccctatatagcctgtgcggttttgttaaaccaaccacttaggctaggtgctaagcaatttagtagaatctggtcctttaaacatgaatctcacggatgccattgaatagttgtaatgaatctcacggatgtgattgaatagtacgagtactctttaaaacaacattggtcgacgtaaaatctccttccgctttccccatgccttatggggtctgctcttggaaaattcatcacgttctgttttttcttgagctcttctctcgaataaaacggtgcgttgcacctttaatcatcacatcacctgttaattttcagttgataaatcaatttagttatcatttacgaaaatacccttcagagataaaaaaaaaaaaaaacaaaaaaaaaaaaaagaaaaacccgtaaacccaac

SEQ ID NO: 208392 - DNA, 523 bp, Cannabis indica
ttttttttttttttttattgtgaaggccaccaaataaaaaagaaacatgttagtctttttttttcttctattttctaatgcttatttctatcattcctttatataattttagtttatttgaaaaaaaaaattctagttgatcatttagttcaagagcgataaaaaaaatatttaaattgaagagtgatattagaacatctcccggagttaatcataggagttgtcttctacatatgtaatgtgatctaattttaaagattaattttacgtaaaatattgctcaatatagaccataaccacatgttattatattttttttgttgtaaaaaaatttattttttactaaaaaaggtcattaatttaatatgatgtgttaatgggcaaaagttgccaactattagagtatttttttaagttaatgtgacaaattttatgtggatgagagagaaaaaaataaaaataataataatataaaatgttgcttccattaatgctcttatgtagcagagctaatcacgtatct

SEQ ID NO: 208393 - DNA, 630 bp, Cannabis indica
cctataaaaatgcgtatagatttttggaggtgatttgcaagtgaccttttactaaaaggaacttgttgctcaatgggttgtctccataagtgtatcgtgtgcttaattaaccttattagattgtgctttagacccaaataatcaattctttgttggatctctttgatgccaataaactcaagtccacaggccctaaccttctttcttagtccaccgactttgaaaacaaaaatccagaagatttccttctgttcggtcaccttcatcgtgcgacatctctctccctgtgatcaacggccaaggaaatgaccatggtggatcattgttgccttcgtctgatggcatctttgtctgatgacaagagtttggctttggtttcttgaaaagaccctctgtttgctcttgcgaacaaggtctatcgcatgattagttcccttctctaagaaatgagagcctccaaagtcactattgttggagtacctttgctgatcgccagaatttccggttgaatatttggagtcactttacctcccttgcttggattcagcagttgtgagccaacatttgtagattgagggacgagattataagctactcgaccttccatattcttaaactcatcttccatat

SEQ ID NO: 208394 - DNA, 2240 bp, Cannabis indica
ctctctctctctctctctctctctctctctctctctctctctctctctctctctctctctctctctctctctctctctctctccatttccccaggcgaccaaattgtcaccaccaccaaaacgacaacaaaaatacagcaggcaacccacgacgacccacaacgaccacgaccatgaaccaccgacatcaggctaccaccgagagaatccaaagtcaaaccgtcgccaccaccaagctacagtaaaaaagtaaggtttttttaaataaaaaattagatttctcatagatttggatgcaaatttgtgtatgttcttcagattagttgaatttttgtagattctggataatgtgtatttttcagtatgtttttcactggtgtctatgtgttttaacaatgttatcgataagatatcgataggttaccgatataatgtcgaccataattgaacatagttggggcataaaaatttttatttttatattgtatatcgataggttatcgacatcttagctatggtttatcgacattttgattagaatatatttgtaagaatttattgggtatatcgatattttgtcgatgaaatgtcaatatgttgtcgatagtaggcttttcacatttttaaagaatatatcgatagtttgtcgacatgttttcgacaccctatgtgcatttattatctaatatattttgtcgatatgttgtcgacaatttgatattattgtattctgaaatttttaagtgtgaatatatcgacagaatgttgacataatgtcgacatgatgtcgacaatttctctgagggaatttataatattttttgttatatattttttcagatggcttcacggctcatagttccagcagccgagcattttactggccgcgtgacatatagaggcaccagtacttttgcaaaaatcaaatctcggtttgagtcgtacaatttgaataacacggcgtaagaaagtggtttcggcaacttttggaatgtcgtacccctggcattctccttgatggtattttaccaagtcatgttgtgttaatttgttttaccagaatctcggttgaatatctgtatataattagaaatacattgtatattttgtttaatttacaaaattaaaaatacaattatatatttcgtataattgaaaatacatggtatatccacatgttgtctatatattatcgacattaattactcgatatattttgacaaatcatgatttctcacaagtagagtgtcttgtcgacatataagtaggcggcgtaggctctgaattcccaaattttctcaccttagttacaaataatggcataaaatctgtgtttgacattgttgccctcatctctaagaacgttctcagttggcgttctttcttaataacctctagcagaaccatttgtcccttcatgtacaaggaacaaatctccaattttaaatcatacgccaaatgatcaatctccaactcttcatataaaatttggcgcatttgttgtatggttgtgtcagttctaactgtcaacgtcaaactgccgtcagctttataaacccaattaaaaccctcaacacaccaaacaccatcatacaatacaacaagaaatacagtcgatcctgcaatttcaaataaaaaaagaaaagttagggaaaaataccaaaaaattatgaaaaaactaaaaaagggcaaaattttaacatattcgacatactatcgacgtattgtcgacaaacataagtcaactaaatgtcgacataatatcgacaaactgtcgatacattgccaaataaataaattatttaaaatactttatcatcgacatgatatcgacaaagtgtcgatatcatgtcgataattgtcatccctgaccttccttcacatattatcgacattgcatcgatattctatcgacaaactgtcgataacctctagagaacccagattttgacagattaccagatctaccatttcagaccaaaaaatactaattctaacaattaccacagatataacgaaagcaaattacatattattactaatgtttaccaaaatgcttaaaacacaatttacccattataatggtgaatgattcttgagggatttgggtggggtgttgtccatttttccaccaccgacagagagaatgatggaggagcttagagagggagagagaagcatgcgagagggaagagagaggggggtggttattttcagtttttgtcaatatatatatatat

SEQ ID NO: 208395 - DNA, 1403 bp, Cannabis indica
cctcaggatccagcgtattcgtgtaccaagaacctggggaaagacggaggaaaagttgaaggtgccctccggctgacctaagatagaaaatcaatgaaaagcatggtgacttgaaaaaccaccttgaaaagaagaaacacgcattgccagtctctagaggcacattgaacgagggaatcttggctgaattggcgatattgcgcaaagacattactagggtctctcgaagacaaaaaggggatgattttgaggaccgggaaccatgcgcccgacacatactggatgcgaaactcaacaagaattttaagatgcagaaaattgtaacttacacaggatcggaccccagtgaccatttgtcccggtttaactgggtgatgactgtcatgagggtcagcaatgacgcgaagtgtttacgctttccactaatgctaagcggttttgcttagaaatggttcaagaagttggagccaggataagtggactgctagagcaagttacaagtaagtttttgaagacagtttgtcgcagcaagaaagattaaccttgaagtcaacgtcctgactaacataaaaaagttacctatgcaaatcctaaagaacttcataaacagattcaaagaggaggcttcaaagaccaagaaggtagatgacggacaatagctgaccctcctccaggctgggatccgcacggggacccctttccggaatgaactacaacaagagggagcagctaatctccaagactttcaaaaaaaggtccaaaagtacatcaacttggaagaagcccaaatagtggcttacggaggatactacccaaccggagtatcgagatatgcacgtggagcgcagcttctaggagccctatcttctgccactcctcaaatgagcggaatagaattcttcgctaccccaggatataatcaaagccttaccctagctcccgcatcatcaaactttgggccacccatgggcaatccctcggggatgagtgtccaaaccccatcccaatctacacctgccgccagcctggcaggacctccacagagctcccggagtaagaggtcctcaataggcagtacccggactgaggacaaacgacaacggaggggttatacccctgaatacactcaatacacgaagctcacggatacacaagagcatgtatactttgccactcagcaaaatacgcattaccggaagcctcccccttgtacagcgatcactcccgaagggatcccaacaaaaggtgtgagtatcacaatgacagtggccacaacactaatgagtgcaaggacctgaaagatgaaatcgagaacctaagccgattaggtcacttgtacgaatggattaagaacaaattaccccatttaaactccggtcccagactagaggccccttacctca

SEQ ID NO: 208396 - DNA, 1279 bp, Cannabis indica
tcaactttccatcatacttgttcccaggaccacttctcacagtaacttgtcttccccaaccaaaatcattcccataaacattgaaccgtggtgaactaccagtacttagttcacaccctaactctttctttatttttattttcactggggcttccacccaattcttcaagtacttttgggccttttccgaggtatgcgaagccacaaacttattcatctccaacgccgcccaccccaatccattcttacccagaagcttccccgctgtggtctccacagccccaaacatcacggcattaccacaatacatttctgataatggcggttccattcttggcctgagacccactacgataatgtagcacacttcgtcttcgggttttagataatttcggtttcgggttatggatacccaaaggtgagccatcaccgcttgaagagaagatatattattattgggttttgtggataacaaatcgactatctcagcgttggctttagctttgagtttggctatggtttcttttgaaaagcgaagcattctttgctttaatgagattggtgttgagctacgagtgttgtttatattttgatctggatcaaaaggtattctaagtggaagaagatctgggttgataccttcaaagaattggtcacgaccgaaaactgggtgtggagggtctaaaacgacgccgttttggcgacagatttgagaccacgtgttgaagaaaagccaaaacatagtcccatccgcaacgcaatgattcgctgagagaccaatgaaaacgccgtcaactaactccgttacttgagctcctagcaacggtttcgaaactccttcatagttacaaaccaagtttaagggaaagaaagagtaaacgacgtcgtctgggatgtaagtctgtgaagaaagatttggtaagttgaacgtcgtcgttttgggtcatgactaggcgacccgctagaggatagaaaatatcaagtgctttgaagaaagcggtttccaagcgttggatccattgagtgaagggctgagatggttttgggaagagaagtcccttttggatgtaatgaagtggaatgagtgtaaggtcgggctgtgttaactcaaatcttcgggcttccattactttgagttgggcttacagatttgataaatagtatgagagtagtgagaaaatgagttctgaatcttctcatacagttctatatttatatatggactcttaatttttaccccatgccgtagtttttttactaataaaattaaagtcaaata

SEQ ID NO: 208397 - DNA, 669 bp, Cannabis indica
aatttgtttcccaccaaaacttttccataagtcctttgaattgcttgcaagtatctttaggcaataagaagacattcactgcatagttcaaaagtgcttgctctatagttttcagaagaacctccttaccaactcgtgagagtagcttaccttcccaaccaaggatacgtttcgtcattctatctgttaggtaccccaaaatagttgtctttttcctccccatagtattaggtaaccccatatacgtagtgctttcatcagcttcataaataccgattacatcacaaagtgtatctctcatcgcttattgatgctgttgaaaatagagcttttgtcaaaatttatattttgtcccaaggctctttcatctttgttcaacagctcaagcacattaccaacttcagtctcattagccttgcaaaaaacataactatcatccataaatagaacatgcaaaactatcggtgctccccgagccacccgacacccatttattcaaccttgcatctcatactttttcaaaaatcctgagaacccttccacacataaaatgaataaataaggcaaaataggatcaccttgacgtattccccgtgttgaaactattagacccatttctcgaccaccattaacaaatgtgtaagaaactacgatcaagcattgcatgac

SEQ ID NO: 208398 - DNA, 950 bp, Cannabis indica
ttatttaatttttttttaggaaaagaaatattaagatgaacaagagaataaatttctctatatgtgtatatgtattatataaacaaaaaataataatgagagaatgtaaaagaagtttaccatagacatgaatgagcatgccatggtcagtcatcatacataggcttaatatacatgaattttgacaatttacgtagtgttgtcagatcaatgggaaaaccaaaagttgaaaagggcatctgaaaaagaaaaaaaaaaaaaagaagggaggacttttcttttctctcttcctcgaacacggacatttatttatttgtaaaattattttactggttttttaattcaaagtcataaataattgatcgccaatcataaagcaatcgattacaaaatgattttctgacctctcacatcacaccctcttttctgattatttctgacaaagaaaagtgctgtaccattctgcctctctttgcatttattactcgcattccgaggatgggcctcagtctatataacaatgcaacaatacagcgttacggacttttctcctttcctttctttttctcatacatctgtcaacttcatatttgttccttgtgtcactgttatacttttcattcttctcctttctttattttttttattattatttatttatttatttttctttgatattttcattagatggtttactgcttacaccatacaaatcgtccacaccatatcactctacataaaaatgcatctcaaaatctattagtatgattgcacttcacaattttgaatttaataatgggaaattagaatttatatgcttaaatataaaaaaaaattattattatactaaaaatttacactataaaaaactatacttttttttctaaaccccaaaataacccctcacaattctctctctctctgcatcatctctctctctatctctctct

SEQ ID NO: 208399 - DNA, 1273 bp, Cannabis indica
tattatttctctcgatcataatcatgtctcaatgataataatcgtttcctattatttctcttgatcataatcgagtcacaacgatgatatcgtttcctattatttctctcgatcataatcgagtctcaactaatacatatcgagatctcaatcataatcaagactatcacaactataattgttaaccataaatagtgcataatacttttcttacctcagtctagagattaagcatgcagaccgacttaagtggaaaagaagctgggcaatcctggtcctatcacgacaaccaaaatagtcagccgaagacaaaaatagaaagtcaaacactaatcctccaaaaatgactcgtttaccccccttaagtaatcctaaacttaaatcacatctaggggtaatttggtaattctaattaatccaccaaatggacaacctaaatttctaaactagtccagaacatttctaaaatagtccattgctttattttcgtgacatctctaaccactctgccgagcttccacggtcgccgggcccgaaaattttttatttccaaaatggtatccataacacccacatattctaaaataatctctgtaattaataaattacgcttatttaatcaataaataaattcatcctaattacaccaagtaagatcataatcttactccattaccaaaataattacatattgaataaaatatgcctatttaaatactatattaatatctgggatattacattcacgttgacttgctgttggataatattgacgcctttgtttacacgatcggcttgaacctactcattcggactatgtggtttgagctaggactgttcatcgaaccgctcaaactgcttgcattacataaaaatgtagtttgaaattctttatggtgaagttgcagtttgaattttttctaaaccgtgcggtgtgttgtggtttgcaattttgaattgctaatatgtgattcaaaccgcatcgcatattataaaaatacaaactttatatttatttaggtccaatatgtgaaggcccaactcaaagccaactaattattgtattgttgaaacttgatttttttttttcatatttactttcaagccttcaggtatttttgataggtgttgctcaagctttgtagtatttatgatagtttaattatttggtgatagtccaaactgcaaaaatcgcaccgcaccgtaccattttttgtggtgcagttttttagttttgctgtgttggtgcaatttagaaaattgaaaaaactgc

SEQ ID NO: 208400 - DNA, 2019 bp, Cannabis indica
catcattacatgtatatacttgctaaaagtattacttgcacttgctgacttgacctaaaatttaaaaaataaataagttaaaaaaggtagtactgactgtagtctgtagctgaagtgaacaaaaaaacaaaacaaaacacagaatatataattcaaataaaatgccatttttggctgaaagcagcaaatgcatatatgtgaaaacatgttgttggtctgagaaattttgtgaaagagctgttgactgtcttccagacataaaataacagaaatctcatcatggcctatagataattagagtttaaaatgtctccatccatctttgggctttttggttttaattttattcttttgtcttgatcatttccttcgtatctatatatacagagagagagatatagattcagacttcagagagagagagagagtgagaaatctgccatgataatagaattattatacccagctggttttgcatttaatacaaaagactttaagtctttaaccattgaaaatgatagtttcataataacacatggacggcccctcaagtagtacttgttataatttagggttataatttagggtaaagtaaatgaggttttatctcaaaaccaattgacggctaagtctaatacactgcaaagtctagaaattggcatatattggccgaaaggtcccaaatagaggttaaagaagagacagcagaagtatccttctttttggatcggtggtatttatgctcacaacggattacaagtaactttattaccatgttagaatttaagataaagtaaattgagttacatttcaaaattaattaagaattaaatgagtaacctattcattttatatatgataatttatttccatatattaaaattatggaatatctaataatataagtatatatacactttcctaagataagattaggtaaaaataacatataataaatcagttcctatatatataaatatatattagattagattagataggggttggaggtgaggtgatgagggtaggcaaattacactgttgtgtagcatgttcgaaaagtgttagctagctagggctgcaaagattccgtttaatgatatatatatatatatatattatatgatattgtatatttctttcaatttgtctttcttaatcatttttggacttttacatatatctactcaaccttgatatgatgccctccaacccggccccgtttaagcgttttatttccaatttctcacaattatggctcaatattcatcaacgtggacccttgtcggcatacatctatgtagagtattgatatgagatagtgttttagaattagtaattttttaaaatatttattaaaataaaatatgtgagatttgataataatattataatttacaaagctgctaaatgagtacccctttaacattttttttactatatatagttttggagtcctatagttttttacttatttattttgtaagaaagaaaaacttcatatcaaatttttataaatatttgtgtgatgtcattctggatcttttgtttcttccttatacacacagtaccgcttttttttgttgcactcctagttattgttttttttagtggtcattatttatcatatttacaatatttataagcagaggtaaataatgtcacatcagaaattatttatttattttttttactttttcctgacaaggaaatactttgatcattagttacaattattaaccaaccattaaaagtgctacttttctgcgcacgtaggtaccatatagtaatttttttttttttgtaatatttaaaatataatttaattttatttaataagtattttaagaatataaattgaaagaaaaaagttaaaaaattttagtataattaaaaatataaattttatattaaattcaaattattaaaatggagtatttttaaaaatgtttaaagtataaataaaatttcccttaataaaataaatagataaacatacttgatttactttggcattat

SEQ ID NO: 208401 - DNA, 601 bp, Cannabis indica
attaatcttaccgttttctttaaatatttgataatgagaatgccattttgttttagcacgtcatacgccatttcattcaccacattataagtagaccaaaaaaaatatcttcatgtaatctggaagttggtcgatcgtatttatatcccaccttataattgcaacacataaaagcataacaaaatatgattaaccttagtgcatcttataaatgtaagcattaccatttactatacatcattcaaaatctaatttatactgttcaataaataaataaataaaatgaaaaattgttgttttgtaatagggatatgattgtttgataaaataacatccaatatatactatataataccagtattagtagtgtttactactttttaaaggtgacatctttttatttgattagcgatttacttaaaaattatcatattcaattatataagacccgatcaaaattgcattaactatatgacaacgagaaaggtgttatgcactattggtacttttttagtattttttatagaaaattgttaaaatacaccactagggcctagtaccctcatcggtgtcattaaaaaaatgacttaagaagataact

SEQ ID NO: 208402 - DNA, 1453 bp, Cannabis indica
tatttataacagattcaattataaatatttattcaaattattaaaaattattattttattagtttttttaattctaatatttatattaaataaaacttttattggtgttattaatataccgtacaaacctaaaaactatataggtataagtttttaagaaacctataatgggttaataagattaaacctttttccatcatcattactctcagtgttcttgctcatgagttgagataaaacaaagaacaacaatatacagtttattgtgttagcccactctaatccttgtgtgtggtagaaggtttaaaagataacaatgtggcttcttcatcacaattttaaggattcaacttatgaaaagattcgaggataccctgatatgcttcaagaggtaaatatttctttttgtctatttattttagatttaatataaatacatattgtgatcttaagaatgtggtacgatgataatcagaaattattactccgctgcatacctaatttagtaccacaaaactaacagttcgatcaggtcagttccccatattgcaaatggctatggactttgcatctgaattaactcattgggtggagctctaggaatctttgagaacctttgggacttgtctcacttcttgacataagcctttgaatctttaatcatggtcaagtaaccttgtcaaaatattttcttggataaactttgccctcgagtgtgattactgtagaacccttcatgaacttcagtaaagagtcgcgcaacttattctttcataacacatctcaacagaggtaaggaaaacccctgtctatacattactctacctagaattaaatattgtgcagccttcctcattatcttacggacttcatttttatcaattatagcgtatcgaccttcaacatcgattaacctctaactgacatagtagactagatgttgagtgttgttatactccctgatcaacatgacacttacagtgaatttggtcactgcaaggtatattcccaattcttctctatttagaggttttgataagatggaggttgttcgagctgccttttaagttcctgaaaacatccttcagattcctcgatccacttaaactttttacttcctcataggatactaaaaaagggaacacacttggccattgattttaacacaaatctgctcagagtggctatccaaactgtgaggccttgaacttccttgatctttatcggcgacttcatattcagaagggcttgaatcttctcttggttagcttcaattacccaggaattaacagtaaatcccgagaacatacctaaactgactgcaaaagaatacttgaagtgattgaggttcatgttatatttgttgaggattttgtactttaatgccttctctcaggggtgttgttgatcgtagttataattgtacttcctttttttcaaatttctatggttg

SEQ ID NO: 208403 - DNA, 780 bp, Cannabis indica
atagaaggattgtggagatagagaaagagtggaaagaggatagagacggggaagaattgataaagacttgaagaaaaatgatgaattgatgaattgcggtacaaagtgtattgttgtaaaatttgaaacttaagaataataaaaatttctaaaagaaattatgaaaaggttaaaatgctggtgataatattcttgtaacaaaaatgccaataatttatgtaaaaattctaataaataatagaattattagtgaggataagggtgtctagaattcaattatgatcagcaccaaaacacactggtggtggtggtggtgtctattcttttccactcagaaaatatgtgtggctgtggcaaacagggcttctccaataattcgtttctcacctcatacacttttattagacaatagtgttcttaaaaaatctaaaatgtttatattttagtgcttctaccacattttcatttcaattctctattagatcaatttgctagtgatcatcataaggtgaaagtccactagtatatataataataaagaaaaagatgatgtcattggtctctaagaaagctgggaaagaaagtaaaaaaaaaggaccacattgccactagtagtactcactagatactatttcataattacagggttgttttaataatattaatttacattaaaatataaattaattataaaatcttactattttaacaattagataaatattatttttgtgtaactgaagatattgacataaactattactttatataccgtttttt

SEQ ID NO: 208404 - DNA, 587 bp, Cannabis indica
aaagcgcggtaatgtttcctagttattatataaattggattaaattaaaaaatggtgggggaaagtaaggcttgaaacagattcattgataagcgattgctagctcgatgatatgtcttctttttttggttaagtagtggaagaatgtaagctattgcttctttcaatttttttaaattgtcatttattaaacgttccgtaaataaaattgcttcgtatgactgcagtttgtattcagatcgtaattttaatttaaaaaatactcttaactgaaattttatttattttaatagttaaagcaatttgattaaaaaaattagcatttccttttagaagaataaattaaaaattaaaaaaaatctcaaacaaagactagtcataaataataggatgatattttggtggaaatttttatgctaacatattatattatttagaataaatacatatgtatgctattctatatgtataagttcttccgttgtggtcctccttaaaaatttgacatatgcatgacataacataactatgtctattggtaagcatcgcagaaagcaaaaggtcaaaaaataaataaaaagagaaat

SEQ ID NO: 208405 - DNA, 771 bp, Cannabis indica
ctcatcctcaagatcaagaaccctggacgtgtcaaaaaagacatcacaaaggctttgaaaagagcacccagttccaactttaacatatggcttggtgcattgggttttgattccaatgcacccagtatctgattcttattccatctcgaccattcatctagttttcatagttactaagagctatgaagtcagaagattcaaattcacaacttcatattttcacttttctggcaaagtgacttactcaaaaattgggtaatttcgagtctcctattttgcaaatagcaacatctcccagaactggtgactagcttaaccagaacacaaaaactggctaagtcatgtctaaatatcacttaggcatctaaaaaatacatccctgacacattttcctactcacccagcgtataggttgacgtcacatgtcaacttgggcattggatgttaacttgggcactaggatgttaacctaggcattgggctcaaaatagatttcagtaaaacgaccataactcacccaatatctattcgattggcacgattcaacttgagttttgaagctatttcaatatttatcaagtaatgtttcacacaacaaattcaattctaaaattatcgactccaaatttcaccctcaagagagttacaaatttaagctacaacttatccaaagtgggtcccacgaacaagacttaagcttcgaaaattgacggttaactattggagttaatttctgttaacgcatatatttgttaaccagatatgagccta

SEQ ID NO: 208406 - DNA, 554 bp, Cannabis indica
ggtgtgagagataccatcaagactttaggtttgtgaatgtgtgcctttgacattgtggtcatgggatgggatgagtgttaccagtggtgatggcaagtggagcaacaggctgaattggttccataggtactggatgaacagactgtggaagatcaattgttgcatatggcacaagaggtgatgtgtgatggtcaagagagttatgaggagaaattggtgttgtagaatactcaatttgtggcaaagactagagagaaataagaggaccaatgtgagaagtgacaagaggagtaactgaccttagtaatggctcaaatggagaaaaattagaattgataggaaagggccctaaagatgagggaggagagaccatatgaagtacatgaataataggaggctgaccatgaggagtgaatgtggaagatgcggaagaagaatgtttgtctttggaagcagcttcaaaaaagagaaaaacaaactcattaaacaacacattcctggagatatagagcctaccatctctagctaagaatttgtatcctttatgaactata

SEQ ID NO: 208407 - DNA, 618 bp, Cannabis indica
tatatatatatatataatactatctaattaacaagaaggaagaaataaacaaattatatgaagggaaggacaaaattggaatttggcgaaagtggtggtggtggtggtgaaaatgaaaagtgaagagagtagagagagagagagaacctgaagaagaggatgagagcggtgagaaggaaggcagtgagggcatatactaaggcaacagttcaagcaaaaaacgttcttctcgttcttcctgcgattctcgtggaccccacaaccaccaaagaatgtctcagccatcagaccctctagccatgcaggtttcatattcgtatccatacctgctcctgaaccatatacttctcttaccatctctctctctttctctctctaccaaatttctttctttctttcttttcttctttccaattatatatatatttatatatgtaaatacaaagaaagagtagtgagtgatatgagaaatatgtagagaactaatgaaagctaattattaatagacccagctgaagctgagagaggaacttttctctctctaaaagatagctaggtggagctgacaccagtactctctgagtgggggtgtggcaatgaatatttacgagtttattt

SEQ ID NO: 208408 - DNA, 1241 bp, Cannabis indica
tatatatatatatatatagcaaatgaactcaaaccatagcattatgttagtagatatgttcttttttaaaatttgtagagaaatgactattttacattatttattatttatttttgccacataaaaaaattaattttttaaaattagaagcaaattacttaaagattatggtatatctatattacttttgttaaaatcctttttatttaaagttatatcaattttttaattttttatgggttgttgtgagttatttgtatataaattttgttgtacagtatatttctattttgttatatggtatgttattattcttaaatgatatttactttttattttgttatgtataactagtaaataacctgcgcattgcagcggatgttgaagaaattttaaattgtattataaaataaattataacttttatttaatgataactaagtaataaattatatcaaattttaatcttaaaaattataaaaatatattaggcttgactcctattttaaggatgaattattataagaatacataaatttatagaaaatttattatatgattttaaaacttttgtcattactgtatttctctcacttctaggcaatattacatttaaaatagttaactatcattcctaacatgtttgttgtgtatacaaaataaatcaaacaataagttaactactcacttttatacataaatgaattaattttttttataaaagaaatataccaaataaaatctattaattaataatgaaaaaatagaaagaattataactaatcaaatttaaattctaatggtatattttagatattaaggcagtggcggacccaaaatttaaagtgaggagcgtaattttttttttttttttgtaaaagcagggagggcaaaaataaatttaaaaagaaaaagtaaagtggagttagtgggatttaaatatttaccctttaacttatttgtaatctaccttaaccattgcaccatgcttactattatgtctaataatatcatcttttaatacaaatatatgttgtaactgactataatacatatatattttttccaatttttttcagggggggcgacagccccctctcgctacacaacctcatctgtgttcgtcagattagtattattgttattgttgttgttgttgttgttgttatcttcggatccgactgtctggttctcgagtatcgaagacagacatttgggtttagatgagagaatagaattcc

SEQ ID NO: 208409 - DNA, 1573 bp, Cannabis indica
gtaaacattttgtgcagggctcacagttgctacattttgctacttgcagttcttcccacccccgtatcacgaggaaggtaaagtgccaggccattttgtttaccagtttgattttcaacagtagttcctaaaattgctttcaccagagttgttatttgtttttatttcaaaagcaatttgatttttagaatgatcaaaatcaatattttgaggctggtaaatttcactctcttccaaaatgatggaagtatctatcacttctttccttgtatagtttttcttgaaattctatttgtgcacgtccagcatttgcacatgctcaaagtgttctcaatttcagttatgtcaaatcttttctatgccatcacttttagaagtttcttcatgtcaaagtgccttgtaggtgttagaaagtgacagattgcattatgtattagtctaaattttaactgtttctagatcggtggagaagatatggcatcatcatattgttttccctaccctttctttcgcacccgtttctccaaatttataacctcattgaattactcaaacctaagcttctttatgtaaccggaaattttctgtctatggttcaggcctgtctggtaggtatttgtggggggtaatcccaaaattttctaaactttcttcttttcaaatattatttcgaaaacaaagttgttagctgtgtagtgattcaatttcataacttcagttactcattcattgagagttacaactatacatgagttggaggttaaactgtatgattttgtgtaggttgggggccatatgcatatttccgggtgttggaggagtcacgttcaagtgctcaagcagcgaatatggtagatatgcgcaatggacgggcagcacaggctgatgttggtaaccaagaagaggaaggaagcagccatggtttcatgggtctacatttagcagatgatcaatctgctttgaccttggaagaattggaaactgggaggagatagctatgtggatttgttgcttttagttccaacactttatttatctgtttaatcatttaagataattttggacccctggcgaaatatgtataatgaacattagaggacaaccgcttgagtttggactgctacaagcttaccacgtctttaatgaatttaaggaagagtttaatacaattttgttggattgattagtatatagtattctttattagtagtttgtatatgtagttttatgttcgatagactctttctcgcaaagacattgagtattgagtgtgacggaggcgttgagttggatcaaataacaacggtggactcaagtaacaattgtaacaaattgtttgggtgttgttctattgttatgatttttttgtttggtacaagattgtaaagctttatttacttagttttgaaatatttctattgtctttgtgaaacgatctattttatatcttaatcatcataatttttttgtttatggatcacaatttaacaatagtaatagtttgagtgtaaaaatcctaatccttaattatgcagaaggtgctgtttaaacatttgtaatttcatttcaaaaa

SEQ ID NO: 208410 - DNA, 582 bp, Cannabis indica
aattaatactgtaacggatggacacactagatttgcagtttcattgggccaatctcagctttggattttaaagcacaacactggcttttgcctttgataacactcttcactcttcttctgttttttctgggtatttattattattatcaaaagaaccgtagacttttttattttattttatttgtttttatattttgagttttgagtgtctgcttacgccaacttgtgtggtgtttcaggcactctattctaccagggttttgctgcacgggtgtgcttctgctgatacaacatttaatgtgagtagctcgagatccaatatttgctctctttggggttgtttggtaacgaggttaatgttgtccccaaacattataataagttactcttatcattaattggaataaggatatgaaatgtaatgtagtgattagtgagtgtgtaaaaagggttttgatttttttgaaactgttacaatctactaactatttttgccaaatggcgaccatgcaaggtagacaagtgggaagaggacgaagaagaagaagaaaatgagaaatggttttggtggtgagaagaaag

SEQ ID NO: 208411 - DNA, 710 bp, Cannabis indica
ttttttttttcaaatttacggtttgcgtttctaaagtggtttctctggtggtttctatgtgggttgctatacgatttttgttgcgatttaggtcgcagcgccagttgcaatatgagtaattttatgtagaatccaataaaaataaaaaaaaaaaaaaaaaaaaactgttttgaagtgtaaaatagaaaagccgcttaaatttataattattatttttaaagttaatctaaattatgtttatataggtatttattttataaaaaataattttatttatgaattttgctatcaatttatttatactaataattaaatataataaaattaattccttaagtattagtaacgccatttttttttgaactcatagttctgttctacctaatcatcttttaaattaatttttttatcaagaaaataatttctattaatgaaaccgagccaattacatccacgaagggattccctttcaaaataaatttgacaacttttttttacatttttaagaacaattttatttatgctagataacttcttttcatatacaagattaattgtacttttgaaacttttttaatgctaatatttacacgactcggatttgtacaatttttatatttatacactaattttagttaagctaaatctataaattgtacttattaacacattcttataaacaaaatatatataatttttatgacacattc

SEQ ID NO: 208412 - DNA, 863 bp, Cannabis indica
aggttaattaggatttttgttctcccaattttaatatatatgtacatgccacttgaacttttaaagttgttaaaaattctccttgaatcattgagattattaaatttaagaatttttgtccaattttagttaaaaaaaagtctaacatggatgaaagttcaggggacatgatttgatagatattaaagtttggtggcatgatttagtacatggataatcactgaattagtgaaattgaatgaaattagataaaagttcttaaatctaacaatttcaatagttcagtaaaaaaatttaattcaacgactaaaaaaattaagagcataatttagtacatgtcaaaattcaaaagaaaaaaaatcttaaattaaactattattatatatgacccttgaactatattggacttattgaattgtgctctaaaaaatttgaataaatgaacacaatttggtagttgtcatgattagactttaaaataacataaaaaattcaagacacattaaaatagtaattatatataattcgagaacaaagtcctatttattaattattcatatatataaaaatagtgtttcgtcaatgcatgtttctaaaaagaatctattattgcactctttatttattttggtactcggaagaagtttttagtctaatttgtttcatagttttgtacgctatagttatttaagacattccacaaaattttaagaaattcggaataatttacaatagatgtgttcaaacaatttatttcacatacatataaaataaaagagtcacacatgcaaaatgctgtttgaaccttattttaacgtattaaatttcttcaaatatttcaaaattttacaaaagattttaaa

SEQ ID NO: 208413 - DNA, 908 bp, Cannabis indica
caaagttttaccaacgcatatttacaggtggctaaaatataactttaaccagcgcatttacacgctgggaaaagtcatttttaccagaacttttcattctatgctggcaaaaattctaataccaacgttgatttgccaaaccttttgttaatacatcagaagtaaattttattttaccaatgcaataccaaacttttgccagcacaaaaatgtgctggcaaaagtgacatttcttgtagtattttgacggccactaagggacttcggtcccatgactgttgaaccgtctacaacgtcaaaaacaggatggtcaatcggaccctatggtctcgtgaaaaactaatgttgagagaactaccaaggccttgcgtcctgatggtccttttatagtccgaccacgggtggtcctcacttccatttgaaagcatagaatgggagctcaagtccttatttttttctatgtgcctggatagacgggttgctatgacccggatgccacgagctcgattcaaatggagctcgacttcgattagacttcatgtcatgatcgtcctccttctctcgtacatcaccacacggctacggtggcttttaagccgctgactgtgtggtttgaccacccatagccgatgttgaaactgacagcaccaccaccttcaaccaccattgtggtggccgactaacccgaccctatattgattgaaaaatctattttaataaaatttattttttaattaattagattaattatcattatgtgaaaaattaattttgagatattttgatatttccctagtgcacaatttattttaaattagttaaaataatgtatgtttaaaaaaaatgactattattttataatattatatatattatctttaaaattataaatatatagattttttttt

SEQ ID NO: 208414 - DNA, 775 bp, Cannabis indica
gatcttattgaaatatatcctctctcacttcttgagaactctggtccatttcttaggatacgtgttcttcttgatatcactaggcctctgcgtaggggcatgacaatccgatatcggtccattcatgaacccaaatggataagttttaagtacgagagtcttcccaaattctgctacttttgtggccttatggatcacacttacaatcgatgttcccattatcttcttcgttgtgaaaacttcccctctcctcccattttagaatactgtgacactcttcgagcttcggcacaatcgcacataaaaaagaatcccttcgaaatatccaacgctactccttttgaggaactttttcctcgtccttcttcgcctgaccacagcctccagcacgctgtgaaccagtttctgcgtgtacactccccaccccgtactaccaccatcaccactaccactactgctatccctatttccccccttcccagaatttaccctccaccattccacccccaatcatgactacctccactgtcacccacactgccaaaggaaaagatattgctttgcacacttccaggtcccctcgcactaggcctattgggctggtcattaatgaaccttccccccagtcttctcctacttcctctgttggcaccaggaagcatttcactcgacagtccactcaggtgggggattctattaggagcatgctcaagcgcgctcgtgcagcccccagtgaagatgctgttgtcccctctctctctctgatgatgaacca

SEQ ID NO: 208415 - DNA, 684 bp, Cannabis indica
gaatttgtaatatgtatatatttagtgtatattaaatttttaaaaaactaaaaaaaatataggcacactttatattaaaatactcattatacttttttttttgtttttttttctcttctaatttcaccattcatactcttcattctcattatcgatggtcgtctgatactacgtttcttttttatatatatatataatttttattgttttgtgcaataaaaaaatagcattaggccactatcggaccatattctacatttatagatgttaaactccattcattaagcttgtcaggaaggcatcaatccaccatcatcaggcctaacaaaaaaattaattttttgcccaaaactcaaatttgacatttttcgaccctaaatctaacatcaactcacatataacagacattaatcatacaatttattcctaaacctataaataaaatcatatatttcaaccctaaatcacacaaatacaataaaataaaatggaaaacttacattcatggggcagtggtcgtggttcaaagattttgggtcctgggttggtagttgtctgtgggttgatggttttcgattggaggcgcggtggttggcagttgtggccgttgctagggtattcgtgtgagtgagaagaagagagtgagagagacataaagaacagaggaagcgagagaggaggggt

SEQ ID NO: 208416 - DNA, 885 bp, Cannabis indica
tggaagtatttttggagtctcaaattgccacgaaaaattagtctctttgcttggaaagttctccaaaacattcttcccactgctgctgctctttttaagaagaaaatcattgatgcagctgcttgttctctttgcacatcgagttgggagtccataggacatgcgcttttcgggtgtcaacatgctaaggcagtctagaaagagtctaagtttgtaatcgactttcacaaagctcaatcaatgtataagggagactatctgctatatcttgcaggggtgtatactcaagaggactttgaactcttcatatgtctgttatggggtatttggactaacagaaacaatgtgtttcatggtgggacatcacgacttaacacctccataataacctataccacagggttctacaatgatttcagctgagccaaaacatcccccaaaccagtaactgctgcagacccgataattcttcaccaatcaacaactaattctgcccatccacatcaaattccatggtctcctcctacactgaatggcttcaaacttaatgttgacgcagctacaaatttggaacagaaaaattaaggcattggagctattattcgagaccatgatggcatggttgtggctgctttttctaaaggtggttcaaggcagttttcgtatcggatgagatggaagcaaaatcacttttctatgctctcaattgggcatctcaattacaacaatctataacgcatattgagacagatgcattgagagtttcactgctttgaattctactacaagtgacttatctagttttcagaccttattttcgatgtcgttgtctttatccttttccctagtgttttagtatccatgttaaagaactgctaatcaagc

SEQ ID NO: 208417 - DNA, 657 bp, Cannabis indica
tttttttttttttaatttatgaacacgtgcataatattaaaaattaaggaaatcaccgctggtcattacaataaacatctgtagcaattgtctcaactggaataacacaagtcttacccagatatatgataacccatttataagccacaaaattaaattatacataataaaattaaagttacatccagaaaagtgatttttaatcctactagcctcatcacagcctcagccaccactttgtctaatctcccaaaaagaaagattgagtaccgaatatttataaaactatcatttttttctagtttcgtcaatacaaatttagttttgaatttattaaataaatatttgaaagaaaatattgactcataattaaattagagaaataattaacattaagaacttatgctcttaaaaatatatattaaattatgctgcttacaaacataaaattttaattacttatgccactatttacctttaataaaaatatcatacaccacaaataataatttttttttaccaagttataattaatgttgactcactagatatgctcgctaaatatatacttctatatttacttcatcattaatatataaaataagttagctaaatttcaaattgtcaacaaatgttataaatggaaaaataaaaata

SEQ ID NO: 208418 - DNA, 886 bp, Cannabis indica
aggcaacaattattatatatttcaaaaaaaatatcaaaatgaaatccagaactcaaatcctaattggtctgtctaatatgatgtggcagagtcacatgctttgaattatcttatcctctcatatccaaaacctgctttctgccaaatatctttcaaatgtcacgctacatataaacctgaattttcgttagttttcagatacaataacccacctctattaatattattattaagtacagtccaacagtatcagaagttgttttgagtacccttaattagtgagaatggctcttcaagctgcttctttggttccctctgctttctctgtccccaaagaggttagttaaccattacattacattacaatacattgattgatgtgagcaaaaataagattattattattatttattaatttgggagatgcgtttgctttgcaggcaaaaactagtgcttctttcaaggactcaaacctgtttggagtttctctagaccacttcaaagctgaattcagttcttgtgctcttaggtgcaaggtcagtggaaaaaaacgcattagattctttctcattttattttcttgggtaaattctattgtataattgagtataaaataacttaattggacttgagcgatgttaagtgttttgctgttttgggtttgttagtaacaaagaggtttttattttctgatcaataatgtacagagaacagggccagtgaaagctcagacaacccccaccacaaccccatcagtgacaaagtcatcctcagaaggaaagaaaactctaagaaaggggagtgtcatagtcacaggggcctcctctggattgggtctagcaacagccaaggctctggctgagagtggaaaagtggcatgtgatca

SEQ ID NO: 208419 - DNA, 552 bp, Cannabis indica
aattaatttttattataaaatatccataagcaaaatacaaacattccaagcttatacttagtctatcacaaacataaagccaactctaactaacataactatacacatgatctctttatttttcctaggataaaatttcccaaccatttaaacaattttataacaagaaaaatcgtatgaagcactgcaataacaagcataactccaccccaaattgaaaagaagaagtcaagcaaaccctcaacaatgcccgtttctttgcttggagcagcaacccatatggcaactacatatgtaagtgtcacagccgttatagtcaaccacaaaatcactgtaagaatccacatccaaaatcttcgaccaaaaggcaagcctgtgacgagtagcaaaattatactcaatgatccaacaaatcccaccgtgttacaaaataagtaaatacggtacataatttttttatcattataacaagctattattgactctcctgctagatgatcgaatatagcaggagagtcagctattatcatgtcgtgttgtgtgacctgagat

SEQ ID NO: 208420 - DNA, 800 bp, Cannabis indica
tctcaagttctcgagttagaaggacgatgttaatgtggtcaagggattgaagtttcgagataccttcttctataatgtcttgtgatttttgcaggcaatctttggggagaaatttccctaaaattatggtgctcctcctttatagattcagcatcctcgataattcaatcaacaaactcattcgtattaggttgaaccccaaagttagtatttgcaccaaggaccaaaaagacattaatataacatacatagccaatacaataaaagaacataattcaacactcgctcaatatttgccaagagaatgggaaactcttctcaacccccgactcaaataaaccatcacctctaaagaagcaatatgctttcttccaatctcaattgtcagccttagttaaacaagttacaaatggttttttcctagtgcgacaaacaaatagcattctacccttctcttttttatgctctttatcgtagtaacatttcataaaaattatggggtctactataataccaaaatttttagtaaaatgttcaaggctcaggagcaacctccaactgttgggtataagtttcccatgagatattccataaaaattgagtatctcagtcaccaaaggagtgaaagaaaaccgaaatccacaatcaaaatttgctttgtaaagagaaacccaatctcccatatcctagttggctctctcataagactttggcagtctcatttctacatttgaaggtatgtcataagcaattctccatttttttgaaatcaacattcgtcaaaatacattcagggttca

SEQ ID NO: 208421 - DNA, 1248 bp, Cannabis indica
acgaaagtacgaccccaccaccgccccccccccccccccccggcccccccttccctccggccactggtattaactatccaatctaatttattagtatttttatttagtttaaataaataattaaattttatgttgttgtactcaaaatatgtatgcatatataaaaatttagattaaaattttacctttttctttttgaataaatactgaatctaaaaaattagatggatccaattcgagctaaaaagtactaagtctaaaatattagataaattcgaatcaatgcaatagatatacatgtaatatattcatgtataggcagccatgcaggttggactgggttgacttggatccgtagaattttcttaagatttaggcccactggtagggtatttacatattgttatgaaattgggcatttagtttaaaggcccagtgccaaaagtggtaggtgtgaggcattgttgaaggtattgttgatatttgacgtgcctgaacacgcgtgatcctctaatacataaggaaatagcagtgtcagagtagtggtcgtttcaatccctaggatgatcatacctgttagctaagccttcaccttggacaagacaaaggagacattttagaaatttggtgggatcttgtcagagggaagccacgtaggatatttgcccgaaaggcaatatcagatggcacggggcctaagaggtctcgttcatgtgttacatgcacctagatagttgtttcgttctgtgatattcagtcaaggcaggttagtcagattctagctatacgctcttcttctcaaggccaaaaaatggaagtataacttgtagtcggctcctcaaccttcccaacttggaaatgtgtggctgagtaaactattaaatcgggaatagaccaagtctaggcttggtagatatctaatttttcttacccgtgttaggtgttaatttttgttatttttttgggtcatgtttttaattagttttgtttcatttagttctgttgtatgatttagtttgttaatgctttcaagtttagtgaataaggaagaacttgaatgagttgagaaaaaatagttgcaaatcaaagtaataagtgtgttttcattgttggcgtgctaaaagtggagtcctttgaagctttgtcaagttttggtaaatctcaagcctctaaaattaaagaattgaagaagtttgagtaacaccatagcacagaaattcaatgtcaatgcgcttctttgaaaaaata

SEQ ID NO: 208422 - DNA, 548 bp, Cannabis indica
gacaaagcaaaaccaattaattgaagaagaaaaacccatgaaggaacacaagaaccccaattgaaaaatcttaacagtggagctaaaacctgaagaaaaggctgcaaaattgaccaaggaaacttcttcctgtaagaaacaacggcagtctgcaattcgccattactgacatcaacagcaccccgtttgaatctcataaaatcagcaattgaactactctgcgagaactggtcagcagagccatcctccagtggcgatggtgatgaagcagaggaggaagcaacagccttcaccttcaaaggagctaatttaagaatgttggaatatctgagggtagggtaggggttggggttggacccagttcttctggtgggtatggaagaagaagaagaagatgaatcggagaaagcagtggagtggagtaatgatagtgaggcggagaccattattgaattgcacccaaactccaaccaaatgggaaattcaacgccagaccttctcttccttgcttctggttatttcagttatcccttccacactttttattt

SEQ ID NO: 208423 - DNA, 879 bp, Cannabis indica
aatctgcaatgtttaaagggtagatttaaaaggcttaattttataaatgcctttttcataacattttgtaaaaagggtactcaataaaagaagactttctttctttgttttcatttattaacaatgattaaaatgtgattaacatgttaataatattcatatcatctattgcttttgcttgccttaagtgggaaccaatcaaatacactttttgattattattattataataagaagtcttccaatagtgatctaattagtgatcaagaccaaaatttaattaatgaaatactatgaagaagattacaaccaatctttccatatcttggcagcctcaattttgtatataatatttagtattattattgtgtttgtggaagtaacacagattgattttccatgatccaaatgggcactcaaaatatctcttttggcctaccttgcaatacataagaatatgccttaataaatatgaagatagtggaaggttttagtatgaaatgaatacaatcatagccatccacttgaaattttttaactctcacaataggcattagaaagttttgtagcaccattatctcttattttaggtcaaattgtccctagcaatggcaatatataatggattttttaaaatacatatattatacatttgtatggaaatagctaatgaggataccaagtatgcataccccccactcccatgatcaccaaaaaactaggctcccgagatcagaaaactataacaattgctatgtaagtacccaaaagtttcgaaaacttgcagttttttcttgcaagcaaactagatcatttgagctatctctctcaggtcaaattgaaagtaaaagataatttaaaccaaggaattgacttaat

SEQ ID NO: 208424 - DNA, 992 bp, Cannabis indica
atttttattcattccaaccaaacgccaactaattgatgaattctctaatttacagttcacacttcacaatatactttgggtcattttcaacttgaggatttttttgttcctactaacgaagttgttcgaaggacatcattcatggctgatgatgacaaaatttcgaaactacctgatgcattgatcactcacatcttgtcgtttctccccactgaagaagtcgttcgaacatgcattctttcaaagcgttggaaattcatttggtattcagtccccacactcttattctacaacactaacgacgatgatcttgaaaagttgtacaattatgtcaataaatatttgaaacatcgcaagacaggtatgaaatttatagctgattcaggcataactagttttgtgcttcgtatgactggagaatgtgaaagaagtaagactcgcctcatagataaatggttagctttcgcagttgagaaaaagatcaagaaaatagaactgtcaatcaatttagatcttattcccattgattggaatagtgcctactactgcatacctaaaatattattagaaaatgcaaaatatttgaccattttggatttaagcgggataatgttggattctttttattcatttagctttccatctttaaaaaccttgtcactagaaagtgtttggcattcagataattcagattcagaaggggtagttaaatttttgttgggttgcccttctcttgagaaattgcggttatttgatcatcaatttctaaatgatggtaagtttcgattacaaagtttaagccttaagttcttagaacttacatgtttagacaatcctaagttaaatgttcaagttgaagccataaatcttgagtctttgatactatatggtgttgctttgaacaaaataaatatctcttgcaaaaaacttagaaatctctccatagaagattgtgcggaagataagcaatcatcattacaagttcttatctc

SEQ ID NO: 208425 - DNA, 1379 bp, Cannabis indica
gtgtaattctttttatttgggctgtatatttatttatttggccagctaaaaatatttttataatattgttatcttttttggttaaaactgaaaacgatcctaaatatattggaaaaaaaatgatataaaattattccattacatcacataattttctaattataaaatataaaaaatacattttgattaaaaaagaaaaaagcaaacttttcttaattagctagttgatcatcaatatgagccatgttatatccaaataattaattagcttaaacttttaaaaataataataataataatcaagtatggaaagcaagatagctatggctccctcatgttgttgacaatatacattatatattaacaattaattaatgcttaatttcactcattatgatagctaattttttatgagtttatcttgaacaactctgactacataatcctttatttaacattaataaaaaaatgcaattttccatctttaaatggagaagataacagaaactactcattgtaaattttatattataaatttttccatatatatccccacaacaacacaccaccttgtgataacagaaagataaatacaaaactatatatataatattataagatgaattattaatattaatcaacacactttgatcccactaataattacaatgacgactcatatgcatgtatataataaatatcaaattatcaatatatgtaatcgactttcaaattctcctactaaatataataaatatatgatgatttgcttcattaattaactaatatatatttttttactaacgttagtatagttttgctgcttaaaaaaatcgacgagtctttaacgattacaatgttagatatttatgttgcaaatatttagatttatattaaatcaactttgatcaatattgttagaacacttacatatatatacatggtaaaaagatttttgtacgtagctaaaatactgggaagataaatatttaaaaaggtttattaacagagaaactgttcaagttccaataagtacaatgaaaaaacttaaaaaactattactatttatctgttctattataccaatttaattattttgactgcatgtatctctaaatatataagaatattacatttatagataatatcaataacgttaattatgtcgtcatttgctaaaataaaataacactatgccttcatgagtattgtttaggacgtcaatatagataatgatatgaaaaattacaattaatatacatgagattacacattaatgttaaataaatattagctgtagctaaaataattaagattttaaaaattaaaattacaaaatctagaaatatacaaaaatacagaatggatataataataaa

SEQ ID NO: 208426 - DNA, 795 bp, Cannabis indica
tcaatgtgcatgacatcaagattatggcgcaacaataactttgaccagtatggtagctcaaacaatatacttttcttggaccaattcaattcatcaacaccacgcttacgctttctatcaggattattaggtgctttaccagtggttatcatagggaccttttctaattgtaacaaaatatcatcaccagaaaattgtcgaggtgcctgcctatattatgtttgtccatcatagtctgtactccttcgccatgtgtgtgttctatttaagtagcaacgatgacccatataacattgtttacctcgaattcttttaaatcgtgtatcttcaagacatattggacatgccaatttacccatagtgctccatcctgacaagtaagcatatgcaggaaagtcactaattgtccacattaccatagcacgaagagtgaaatttgatttggagtactcatcaaatgcttcgactccattattccataacatttttagctcatcaacaagtggctttaagaagacatcaaagtctttactaggagactttggacctggaattaacaaggtcagcaaataattactcttatgcattgaaagccaaggtggcatgttataaggcaacaaaatgactggccacatactatgtgttgtggacatatgactaaatgggttaaaaccatctgaggctaaccccattcgtacattccttgaatctgcagcaaactcaggatatagttcatcaaaatgtttccaagcctttccatcagctgggtgacgtaacaccccaaactcttcaaga

SEQ ID NO: 208427 - DNA, 839 bp, Cannabis indica
ttaacaaatagcaactttaatatattattgccttcaaattaataagtagctagtataccatcttatcattatatggctaattctaacatctaaatggtaatgagtttcattttttacccactcatgattcacgttgatgatgagaaacctccaaaacccaatcatataattacccaactcatgtaagtgtgcaacgaaattcgattgtagctcccaaaatccatgcaatgatgacattattagatagattggaagatgtaaacttgagtttccaaaacaaacatcttttgccacagttctacctaacaagtataattattttccatttcttttttaactaattctttcatccatgcttttatttgttgtatatcatcatccattcttttttctttaaaatcactttattattcatttgttctgttctttttcattactcttagagacaatggtgtaattataatgctcaggccaacttgatgaatacattataatatccacctgttcaataagtcactaaattcaaggtattatttttggacttaatttttttaaaaaaaaaaaaaaaaaaaaaaaaaaaaaacttacaatatatttcaatgcaccattatgatcattcaatattaatatacaatatgtgtatatatataatgttgatattaagccaaacacaatttactcctattgcccaattggtgaaggagctgattttgagaaaaaaaaacctgccattccatgagtgagccatatattgagtagcttcaaatcactatttggatcaaggttaagcctttcttctatggagtaccataactaataactacctactaaaaactaca

SEQ ID NO: 208428 - DNA, 513 bp, Cannabis indica
taataaagctctagctaagacttatctttaacagttttgtttttatgggatatagatatctaatttcaaatatttatagttagttcttatatatgcacactaacacatcaaaaacccaaaacatgcatgtagtaatatcacgtacgttaaacatacgcatgttacaataatatgaatcgttatttgtttgtctgaatttgtttgaatattattatgcccccaacaacacgattcttcttattaattaattagtaattatttatagaaatgaatagcaataactcactaaaataggtagataaaggatggaagtggaataagttactaattaacatcggtggctgcttgaagtaaaagacgaacaagtcctcaaggattggagaaagcagggctatgatcagtatcagaaagaaaaatttgggaaggtggccatcggcggatcatagcatcttgttgctcttgctttatgactcggtcctgcaatgtcttaatgtacactcgtctcacgctatc

SEQ ID NO: 208429 - DNA, 936 bp, Cannabis indica
tattattgtaataataataatgaaaattaaagtgactacaattatttggagagtataaagtacacacaaaatcaaaacaaaatactaatagatatgctcgtagctaatcctgtcttaaatgtcataaaattattattattattattataattaagtattattattggtgtaattttatataattaagatatgttattttagagacacgattttgtcttgtgatgtattttcacggaatgtatttcgtgatgtacggtggccgttagataggggagttatttgatctgagggctgagattgatttaggggtaattagggttatatgtaaaagtacattatgggacaaaattgtctccctattattttaatatggaaactaataaaaaagagagcaatgttaaaaggacacacatagtgtctggtacctttataaggtgtaatattattattggtacaatttaatatcaaatctcatttattttactttgataaaagttatagagaatcgttaattaattataaagcgtcaactcataataatactaggtatattggtgtctcgtagcaatgctctaaaaaaaatacaaatactttgtaatttaatgctatagtcaaatatagagaattgttaaaagacatcactgtgtctagcaccattctcagtggcatactgatattagtataattaattattgagtctcatataatttaataaaataacattaaaaaatattgcaaaccaatcgtgaatgctatctataaaaaatgatgggcacccctagtacctaataacaatactcttaaatatactaataaaataatataaatattataaataaaaaagtaatatgatacaaattttatattaaatcaaagttaaatttattacaaaatttgttatatattaaatttacatcactttctacactattagag

SEQ ID NO: 208430 - DNA, 565 bp, Cannabis indica
ttatttatttatttatattttccttgaattcaacctataccagtctcattcccttttcctataaatctgaccattacagctctcttttttcctctctatgatcagattttaactttttcagattttgtatatacaatttgtttgattttgacactatcatcatcatgagatttccctttctttatcatacatttatttacttattacaaacccttttgccttttctttctttctttcgttctttctttcttttctctatctatcttcaattattctaccaagccacacacacacctcttatatatatttattgaaaaattaccaaacaaaaaagaattacatgtaatattcccaacatcaagctagtgttaattttattttagtacttttagttaaaataaaataacataaaattaatagtgatcattaaaatgctttattaattatagttattattctcataatattactaagttataataatatgcactttttttttagaggttttaacttttaaaaactcttattgagtaaaataattaagtggtataaatttagttaaaat

SEQ ID NO: 208431 - DNA, 1172 bp, Cannabis indica
ggagagatgagtcttcaccatttgcaattctttggatgaatggtcgaatgccttataagtgattcagggacacgtttcttgaacattgaaacatcatctttcgttcctttatccatgtacttactcagatactcagtttcacagttgcttctcaagatttctctcaagatattttcctgaactatatcaggctccgttgtcagcctttctatctccttcaaggcctcctcacctttgtactcaagtttcttcccatccataattttgataacaaagcacagaagagaagagaagagagtttgggacttagataatattattattatgtgtgcttattatatgtagaacagattttggaaacaagggaggggtcttatatataatgagtttggctaggaagctatagctatatgttgacacatgatgatcatgcatgattttactattattttatttttctctttttatatataataataatcaaaataaaataattagagaaaaaggtagaagaagaggaagaatggtttgtactttaccatatgtataaataaataaataatgcatccgaagaggaagcaagtatttgtggttatgccataaaaataaaaaaaaaaaaaacctgatgcggggcccgatcatcatcgcttttattttatccaatatattagatcatcagtaacccacctgatgtatgattaatcatgacatggattttaatatttgtatatatgtgagaggcaaaatatagtgtaaacaaattgtaatttgcagctaaatcctctaagcttttaatttttatacatttaattttctaaattcttgtttcaatggctatgtaaatttgactgttatcatatttaaataattaaattaattggatcaataaaaatttaccacaagtaagtatacaaaggaacagccctaagaaatatgaggcttaagataaaattaaattttgggaccctataatttttagtgtaatgataaaagttttaaaaattttaaaaagtttcaagattcaatcttttataactacacattacatattttttaagaaaataaaaaaaatagaggttaagaattgatctttttgatttcttagtttaaagtaagactgtttaccacttcacaacaaatttttgttacattttcttcttatttaatatttt

SEQ ID NO: 208432 - DNA, 814 bp, Cannabis indica
aaaaaactctcctgaatgccaaaatagatagagaaggactgaaatagtcttttaaaaggtgcactatagttttttttaaaaggctgcttggccctcctagtaattaagtcctggcaccgcccgtggaggcaaccatcatcacaagaccaaacacagttccaaaactcatcagtagaatcatttccaacaatccaaacacatgtatatttattattggggaattttcaatattatacctaaaatggattttatttataaaaataccttcaacaaaattatttgcacaaataccgatatgccacctcagctcaaataccgaaatttaaaaaattaccgaaaatagaaaaacttaaaaaaattcgcttccagaaatttcaatgttttgcaagttttagaaaaaaaaaagtaactttttagttgcttttaatgtaaataatatatcaattagttactttatattaacaaaaattatttgaagataatttttttctcatacacattcaattgcttattttgaatctttgatcagttaactttaaaattaatatatataataattttaataatgtaactaattctattatatttaagatactatttggtaactttataaattttcatattaacatatcaaaattttttattaaataaatttgttatcagtatactatatcgtaacttttaaatacagcacaacaaaaaaaaattatagcaatttatgatgttacttgatatgtttaattttattaactctaagattttattactttttgttacaaaatataataaagaaacaaaatagttacttttaata

SEQ ID NO: 208433 - DNA, 1257 bp, Cannabis indica
acccataaaatttgtaattttctttctttgtatagtaactttcaatctaaatccactaagttggaaatgggtgagagtgtgaggcccaacttcaaagagcctcattaaagcaccaaaattgtactaagaagtctaggggtgttcatccaattcaattcgcactattttgtttatagtgcatccgatccgcactaagtgtggattttatttttttagatccaatctaatccgcacgatagctgaaattcaatctgcaaaagtgcggattggatcggttattttatattgattactttttaatattaaattatttaatatttatgaaaaaatatattttttcacttaactagtagtaaaaaaaattagttattttatgtctcaaataacaaattaaaataaaataacaaattcaaagaaagaaaaaaaaattgtatgtataaagaaatatttaattttattttaaattgcatgtagaaatatacatatggaacaattcttaataggtattatttaatattattttagaaaatacaaggtcaaataagtaatttttgcaaaacacagaatctaaaatgatatctacccttttattaggaaaaaaaaaagtttttgacaactaaaccctccaaaatcaaaccactaacacgcaaacacccaagcctaaaagctgaaactaaaaccctaaaaaccactaaattaacaaatttaagttttcatccggttatctgtcaccataaactgcttatgtgtcaattcttatacacgtgatatatttatattagtatacttaatattattattttaagattattttgaaatttattttaaaattaagtaaaatatttaaatatttattacctttctcaagactcaagctccgattcacttatttattggtcacgacctctttgtgggagaactagtaactctattatttcatgagagcctttctatgcagtatgcttttgctccgacttccactatttgctctattgacatcagacttctaaagccgaaactcgttggtattttttttttataatttttaaataataatattaagtatattaatatagatatatcacgtggaaaaaatagtatacagataaataattcaaattcttaaacttgttaataattttctagtttaaaaagttttactactaaaatttaaaaaaccttaaatataaacaaaactcgaaaaagaaatatatttattatagacaaaacgacatagtttgggcacgacttcatttg

SEQ ID NO: 208434 - DNA, 692 bp, Cannabis indica
gttttttttttttttttttttggtttgaaatggaatccaacaaacaaacccagcaactacaaacgaatatctaaacaatgagccagaaggttatatctatgcttgaaacaaaactcaactgaaacaagatgtgcacatttgaggctttctttggctactcgaaataccttagtataacataggcttagaccaaagtgtttagaatcatgagattctatctcaaaaccaattagcaatgagtagaatagctcatgttcttatatataactcaatactttgccatttattccacaatacaaagtaatccttaccttaactaagcaacaagatgtgcaatatttgtaatccaaattatatttctatagaaatcctttctttccctccaaaaagaaattataacctttctccaaaaaaaaaatatgaaaataaagtaataatatatacgtaccttcagtggaatctggcaaatattttgctattcgatatttctgcgacaggaaaaaaaaacattacaatttataaagttaggataataaaaaaagtaaagagcatacaaatagtaaagtttgttgaatttatgtgaatacctgcaaatgactttttacatgaaatatcgtcaatccctctgtctccattaacttaagtattgccttgggagttgcctctgttaagttaaaaaagaaaaaaaaaac

SEQ ID NO: 208435 - DNA, 1229 bp, Cannabis indica
aaaaatgagatgaggcacttgcacggtggggttactttgcacatgcaattgtagccatcaatcatatattagctgcttaaatcttatagctgaaatttcaacgcataatcagaaatgaactatttcagatgatgggcgataaattttgggtagtagagaagtgatgtcgttttgtgctgtggttataggaatggaattcaaaacaggaggaattcttttgaagatggtgtatggggaacgacatgcccaataccaccaggcaaaaatttcacctacattctccaagtgaaagatcagattgggagtttttacatttcccttctcttgcattccacaaagctgctggtggatttggaggtattagaatccttagcaggcccagaattcctgttccttttccagacccagctggtgattacactcttcttattggagattggtacaagtccaaccacacggtaacccacatttccttatctatctaatctatgtgtatgtgatcaactttcttttaagtacattgatagtttgaaattaaataccacccatgttatttattagaaattagttttagtggtcagtaggctagctgggaggaaaatcactggcctgtgacgtggttgtagtcagtggcgtgccaaacataaaactagggtgctatattttaattttgtaaatatttttatatttatactttttttgtatttttcttttatattatgtttttttttataaatttatttttattatgtcttaatgtttaagtttactatcccctctaattattttctctcctgctgaacaaaattcgtgagttcgccccttgttgtagtcacaataaacgtgtttttagaatagacagtaatagtttgtctttgtctttttgtcctaaccaatctctatatattgtcggtagaacattaattttcccattttattcccagttatttggtattaatgttagtactgtttagacgttatagtttacagatactctttaaaaattattataatattgacacttttacctttcttcatagttaataagttgaccaatacttttcggctcagatttttcttttttcgaaaaaagaaatgtttcaatgataacagtttgatttgatcagattaagagtaactattaaaccgacattttgttggtttttcttcaatgatacattatactcgtaattactaatgccacttattataagttgttataaatactt

SEQ ID NO: 208436 - DNA, 821 bp, Cannabis indica
agtctagtgacatgggtacaaaatcaatctcttttctgcaaattctgcttcatgatttcttttaattttctgaacttttaagaactatgtttagttatatctatctatgcaactgagctgactatgcccttgatattttaggctacacctaaacttagtgaagacaaagttaaacaatgcatcgatgcaagactcgggggagactaccctccgaaggcagtcgccaaggtatttgcctacttagcttttgaaaactaatacattgatgacaaagaaacatagcttttgtttccatgcataagaatcaaatatctaatagttgatgatgatgttaatacagatggctgctgttgctgcattgtgtgttcaatatgaagcggatttccgcccgaacatgagcattgttgttaaagccctacaaccacttttaaacgcccgaaccggacctgccggtgaagcaccatcggccacgtcttaataacctgcctgcatgcgagtattataaatataaccgggaaaaaaaagtatttcttaaaggtcttggagtattgctggattatgttgcacatgattccattatttacaaatatttgatttgttcataatcccaaggggtatttttcagtcagtgtcaatttgttattatagtgtcattcttttttctaccttttcttttttgtttattcccaaactttttattatataagtgttggtaaattagtcctcaattttttttttgacaaattactcccctaaacttttaatttcttaagagtagttttgttgatacaataaattaaagaagcaaaataataataata

SEQ ID NO: 208437 - DNA, 1150 bp, Cannabis indica
ttgttccattttcttaaagatagcaacactcttttctacgttgggctgcagaaagcaaaggccaattcctttgttactttgccaacctttaaagatagcaacgctcttttaacaaccttgtgttggtacccaaatgaaaccgtaaattgcgagtatacatcgactttactgacctcaataaagcatttccaaaggattattttctacttctaaggattgaccagctggtagattccatagctggacacgagatccttagctttatttatgcctattcaagttacaatcagataaagatgtatccacctgactaggaacacacaaacttctacacaaatgtaggcttatacaactacaaagcaatgccctttggactgagaaatataggagatacataccaacatcttgtcaaccgagttttcaaagacttcatcagccacaatatggaggactacgtggatgacatgttaatcaagtctaagctaggctggggcacattgtaataccctaagatttagaaaccggattagcaccctaactagtttgaatatgtaataatgtgaaattatattattatataatttaatatgtgaaattatactgataaattgtattttaagaccccgttggtgtaccagggacatttttcgtaattttgacccgagaagggtaaaatcatagttttaatgatatatcgtgcttatggactatattattatattcttctatctatttgcatgtgttttctgacaagctggagcggtatactcacaacaggtattttaggtcggatagggttcggggcccaaaatacatttttggggttttattttggcatttatttgataagtgaaatgatctgaaatatatgtgtgtatatgtgtgggatcagacaattttgcccttgatgtgtgtgtatgtggaaatattggccttggagggcaatttggtcatttgaccactattgcattattcaacaaaagcaagttattttagaaaattgaaaggaatattctggttttttttttttctaaccttggtcgaacccctctctctccctttcctatcttttttttttttcaatttttgattgattttggaaaaactaaggcttgatttggagtgtggtggtgcttgaagcttgaggtag

SEQ ID NO: 208438 - DNA, 752 bp, Cannabis indica
aaaatgcaataccaaaccccacttaggcaataatatatattagttgcaatggtcaaaatcaaaaggcaaacccttaaattataagcatatggtggaaatttcttggcaatttaaccaagactacgagtctatggcatagtgacttctcaccatataaaaagttgaagaccaagaaaccaaataaggtgtcgattaagataagatggtaaaggggataaaatgagcactttaaaccttttcactttgccaaaaaaagaaaagaaaagatatatatatatataaatataaattaaaacaaagggaagaagtaaactggtgaaggttgaatgaacacaaactttagtttatatatatagctattctcacaacttttagttatcttatataaatggtattaagttttttcacattgtcaacatagaaattacattttagttttccttgtgatttataaaatagggtgtaataaagtgtatggtagtacattttaaatcttgaagaaattacattcactatgaaattttgaaagttgtttatttaaatatgacaattttaaatttgatcaacttatatgatttttttttatttttatttatttttatagtatttgatatgctatatatatgtaaattaggtttttaaatctcatatttaatgtttttatttgtttaggtagttttatttgtcactgatgcatgaaaaatcgccggagtttgctaccgacacagaaaaatcacttgagtagctgtcgt

SEQ ID NO: 208439 - DNA, 763 bp, Cannabis indica
ttgtacgatgattattttcatgtcaatcaggtagcaaattatcaaggttgttaaccctattcccaatattgtatctatctggaggaacatgtgtggcgttgatcatcgtaggagggtcaacgtcaaagatgttcttccagacagtgtgcggtgcaacgtgcactgccaagtccttaaccccggtggagtggtacttggtgttcacgtgcaccgccgtgcttctgtctcagctacccaatttgaactcgatagctggcgtgtctctaatcgggtctgtcacggcagtcggctactgcactctgatatgggtggtgtctgtgtcgaagggtacgcttcctggtgtgtcatacaatcccatagaagccaaaactgatctccgccaattttttgatgtgctcaacgcacttggaataattgcctttgctttcagaggccataatctcatactcgaaatccaggtaaatatatatttaatttatttgtatatcattttttaaataaagaaaaaaaaaggttataattggatggctatttttttagaattttgagttttactacagtaaagttcaaccttaattctgcaattctttttaatattttttttaaaaaaaaaataattcagaaagtgtcatacatacatacatatagcactttaattacttaacacctatactctgtaattagtcattagcggtttctcttataaatttaaaaaatttagaatcttactgaatttttctaaaaaaatattatcttttaatag

SEQ ID NO: 208440 - DNA, 594 bp, Cannabis indica
acacatatatatatatatttgtggggtcggccattagaggctgagtatggtggtggtggctagtggtcgtcgaccataagtggcggaggagagagtgtggctggtgtcctggccattggtagagaaaggagacaaagccaagctccgttgtgcatagttgggtcatgagactcgattgctcctttcatggagcttcgatgaccaagggccaccatggtctgccttcctcagtcgtcgacatcaaccttgggcccacaagggtcggtcgacctcctccagccagccatgggaccgatgggtccctttaatggcctaactcacgaacacggaccctcattcgggtcctagtcccttttcacataattgtacgtgcatgtcaatatgcactcgtaaaaaatatgtgttttaccccttttgacctcatcgcttgaagcctcagctcttcgggttcgtggctcatcattcgaggtccaaaactcgtcatctcgatgaggtcaggatttacttctcaaacccaagcttacccatcaatggagaatctgtagacttttgatgttacattttttttaataaatttacaaataaatttaaaat

SEQ ID NO: 208441 - DNA, 1040 bp, Cannabis indica
taattgtaaaatactacactaaaaaaagtatagattatttattttttttatttaaaaaaagtaagtaataatataaaagtgattatttcttacacatccaatttagcatcatatatttgttaataaaagaaaatatcacaacatcattattttgtgttaaatgttaccacaatgtttaaatatgttataaatttacactctaatggaaattcttaattattgtctagtattattactgctattcaagatgagatttcacaaatttttaaccaatgctaactcttgtaataatgtgtggaaatggcactgtgcattatagtgttttctttttttgctaactctgtttcaatatattgttgtgatatataataacagatgacacacgtgatatatgttagagggaccacaaataaaaacaaccaatttcttcagaaagctgagtcaagtatcatacattatgaaaactgagcaaattgaacactttcttctttatgtcaaatcaattcacatcttaactgacattgataagccaatattaataattgttgccagtatagagaaacattattttgttaaatagaagaaagataaaaagagaagcattattattttattcagttgaattactttatataatttgttctatttcatagaaaaaaaaaatacatacaattttgtcgtggactgtattcttcattaagcatgcactattattaaaatggtaagggacatattaaagtatagaatattataaaaaaaaataagtatattaatttaatattaaattttatatattttaatttaataaatgatagtaaaaatcgttagttacttatacattatacaaattattactattagtgataattttttagtcgcaagataattattttgtgactaaatatgacttttagccacaacaaaatattacttgtaactaaaaataatatttagttgtaacttgtgattaataaattataatttttgtaactaatatatacctttagtcacgaattttttagtcacaatataaaaataat

SEQ ID NO: 208442 - DNA, 2729 bp, Cannabis indica
aggagttgactatctgagatttttgctcctgttgtgaagctcaatactattagatcatgttgagtattgttgccattgaaaatcttcatctttaacaattagacgtgaagatcgtatttcttcatggagacttggatgaggagatatacatgcatcaaccagaaggtttttcaaagaatgggaagaagaatatggtatgtaaacttaagaaaagtttatatggcttaaaacaagccccaaggcaatggtacaaaaagtttgacagttttatgcacaaagaaggcttccgtaagtgcaatgctgaccactgctgctatttcaaaagatataggtccagctatatcgttttgctactttatgttaatgatatgttagtagcaagtgcagatatggatgatatcaaaaggttgaagcaataattgtcaaaagagtttgacatgaaggacttaggtccagcaaagaagattcatggaatgcaaattataagagataagaatagaggaattttgcagttatctcagtcagagtacatcaaacgtgttttgcagagatttaacatgccaagccagtttgtacacccctggcaagtcattttcgcctatctaagggtcagtccccgagacggaggatggtcaatatttcatggctaagattccttatgccttagctattgggagtttgatgtacgtgatggtttgtacaagaccagatattggacatgcagtgggagttgttagcaagtttatgtcgaatccaagaaaacctcactggtaagcattgaagtgaattttgaggtatctacgaggcaccacagaaaaatgtttgtactttggaaaaggtgaattaaaagtacaaggctttgtagatgcagacttcaaagcgaagtcgatcaccggaaaagcaccacaagctatatattcattgttggaaatacagttgttagttggatgtctcaattgtaaaaaattgtagctttatccactacagaggctgagtatgtcgcagtcactaaagccagcaaagagatgatatggcttcaaggtttgttaattgagctaggattcaagcaagagaataatgttttgcatagtgatagttagagtgtgatccacttggcaaagaattcagcatttcattccagaaccaagcatattgaattttgttatcatttcattagatctctattggaagatgaagtattaatactggagaagatctaaggatgtaagaatccagtaaatatgttgacaaaaaatgtgacgattgagaaactgaagttatgctcaactttagttggcctgcaagaataacaaaactagagagctttgctacataatgtggagtgtgaagacagtttaaaaccagtctttaagtgggagattgttaaagaaataacattatcctttcttagttaaaataaaaagaatggatcacatccattgttatttttaggaagcctaagttatcaaattagtaatggaagatgcataactataggctaatttctaccagtcattttatttgtccaaaacctatataaacccacataggtttcatttgtatatgcccaaaacaaaaagaataatagctttagttaaaagtttagagagagaaaagttttttgagagaatttttgttagaaaaattcttgagtataattagtgtgtgggttgtgaggtgttgtaaaatactgtgtattttggtttctcgatttcagtaaaagatttgcagcagatttagagacatatcaaaatttgttatcaaatttgtgtttatgtgtgtgttatttccattgttattttattttcagtaatctgattcataagaaaatttgcgtaattttcttaacacttttttctttccgtaatttgtgtaatttccacaaattaatgtcatcaacgaatacaataaaaaaaaagaataattatataagacactattttttgtaaaattattacatttttacgtttaaataatttttttttttatatttttacaattttctattgaaataacacgaaaacaacaaaaaaaaaactacataaaagtaacatgaaaataacatttaaataatatcaaaacaataacaaaagataacatacaaataacaaaaaaatcaacaaatgaacaagagtacaagataaaatgaccatattttctgaaaataaaattaaaaaaatcgtaaaaaatatttaaaatttcgtgaaatcttatttttgtgatttttttattgtttttgtgtatatgtgaaatagtccctaaaataaatgcgacaatataccagtggtttattcaacaaatacaatggaataaatttatacaatgattcatttgttagttttactaaaattatactttatcaagtattatactattcttcaataaattataaaaacaaaccatgcaaggtaaagataaattcacatcactcattctaaacagaaaacaggatgcttatgacgaataaagcattgctacaacatatgaacaccctacaagatagaatatcgtcgttggaccaattagactactttagcatcggttctgaaatatgccatttacttaatttacttgcaccaaccaactgtatgtgttatgtcttaaggtgttggacatggacaccctgaatgcactttaagggtttctcctatgaatatatacttaatttgcaagttcgttcaaataagttaaatctccccaagcgtgcaacctctaactttgcaatgagg

SEQ ID NO: 208443 - DNA, 681 bp, Cannabis indica
gaagaacaaaaagaagagtgaaaatggagttgtgattgtgaagagggaagtgttagctatgaaggttattattttttttaaaaaaaaaactgaaaaagaaatagaaaataaaaggaaaaagaagagaaaaaagagagaaatgatgtatagagtgattgatgtaatgcatcaatcaatcaatcacgtgtcaaaaaaggttgaattgtgtgtgcatgtggtaaaatagtaataaaatataaaagatgtgtaaaaaagttggtttagccgtgtataggtattaatgtaataaatttatcattttagatttttagtgtaaaaatttctaaaaattataatcgattgaaatttaaaaaaaaaaataataactaaatatattattaattatgttattgctaaaaaaatggtctctaaaactattactaaatgtatttttataactaaatttgtattcttataatacgagtaaattttgttttcttactaaaaaaacaatatattgtgttatcactaaggtaatatcttttgtgctgttaaaaagttataacttcatttaagaagatatatattggtctttactctttatacttttgaaaaataatattaataaaaaatataaaatctcaaaagtaggaatagtcacatttctggtcaattatatacatgtcatatgaatacttttac

SEQ ID NO: 208444 - DNA, 792 bp, Cannabis indica
tcacaacaaaatagactatgatcattgtgaacttcaagaaaaatcataaaccctgcagcatataaagaaacagaagacaaatacaaaacaacaaaaaaaaaaaaaaaccataggagaagcaatcaacataccgtacaccacacaaaacgactcaaaacagcctaaaaagcaatctgacaaatatcgctaacgattcaactttaaaactaattaattttatacttcctagggttttcattaagttcattgatgccttaccacatcgagatgaagctactcgaccacatccaaccacgaaaatcattaatcaaaacaaaaagatccaacttaacaaaaacaaacataaatacaatcaaaacctaacactatcaaagcttatcaagtaataactcaattattgaatagcatagtttgttcgcaacaaaatacaaacaaatagagtgagagacgaacctagcgatggaggaacttagtagtagaagaagacgaagatgaataagatcagagaatgaaaaaaggaagaagggttcggccggagttcgtaggagtaagatggtgaagttagtttgtgtgtgtatatatatatgtatgtataggaaggaacagcagtaggaaaaggaaagctcaaatgccctaatttttgacgggaggcaggcaaaagagcttgggtgctgcacctgacaactataaggaaagtgattattataagtatacaactgctttttatgggcttttttattgggcctttatccaccgaccttggtgtgtttctcttagtgagccaataccaaa

SEQ ID NO: 208445 - DNA, 1053 bp, Cannabis indica
tcattaccttcaactaaacaccaccttagcttttatcttattcttattttagctttagagtgttggttcctgccatgcaaagctcactcatatactgtatcagatctcaaataatatgtacagaatcatcaaatacactctcaatatataatacacatggaggcttttatttttagtttttgagaattgtatttattttttcggtatgaaaaagatgtaattctcatatcagttcaatcacattatatggaaattaatggattaaaaaaataagtatttagttctaattaaatacatttctcaaataaataaaataataaaatcaagtgtgtgttctcactagggatggagattgagtgagtaatgagcggggaatgcactcctaactccgtccccgctccccatttatgtgcctatccccgcccccaccccacttaatccctaatgagtttggggacccattgagtacccataaattaaaaaatgataataataaaataatataaagtaattcaaaataaagttaaagaatttttgaatttgaaataaatattctatttaatttataatttatattataaaaattgtaaagacaaataaatcagaaacataatcaattatatatattcatactaagtttgtaagtagtaataaatttaaaaagatattaaaatttaaaatatttattataatagtaataagaaagataaataattaactttgtagtcaataattttaatataattataggaataaatatttaaaaattatatgaaaattatattgggatcaaatatagggtgggtagtattacccttgactctaacccaaacttgcttcgtctaggtaaaattgtcctccacctcgctccataacccaccaaagcgggtattccccgccccattcggagtggatatccacgggtacccattcccgcgggtcaaatttttatctctagtcctcactcatgttgaactctctccatgtcacacacacactagtacgaccatattttgtcaaaaattcactatgtaaaaaattccaacactttat

SEQ ID NO: 208446 - DNA, 748 bp, Cannabis indica
ccccacagtaaattttcctcaattaatctccattaaatctcattaattatgtttaacatgtaaaaatgtaatcattaggatatttgttgaaggaaatatgtattaacaaattttcatttggtctgacaaaaagagagagatttggtcaatctcaaatttcaaactactttcaaatatgtatttaacaaatagaaactgaccagaaacgaaaggctaaacacagatagttcatccttgaattgtcacctctctcccatatgatgatcacaatttcaaaataagaaaccatcaccatcatcatcattatagaaatcatctaattccaagtcttcgtagtaactaatccttgtaaaatcatcatagtccagttccttacttgaatatccttgagagaatcatgaggtagtttaacaagtttgatttgttcagcacaccttttccccaaattacccttcaaatcgatattcagacattggcgtaggtcaagtgattcgagattacgacaaccatcaagaatggcttgtaaccccatgttagtcatcacgcttcccataagttgcaagtggcgtaatcccggcaagtttttaccaatttcaatctcaaatgcattgaaaacattctcctcatcaggatccatgcccgggtatttatgagcatggtggttcagtttcaatgttttaaaatgagggcaacagtgtcccaatggttcgataaaagtttctgaaaacgagcatagtgtcagatcaag

SEQ ID NO: 208447 - DNA, 585 bp, Cannabis indica
gagagagagagatgttttcaatgatggggtaatttaggaatatatgatttgttgacttatcttaccaatattaggtattttaagtttaggaaaaaaatttccccctatgtataaaaaatcaaatttctctttttcattaataaaaaactcaaaagtaatggattttaaaatgtagaaattacagaaattataagaaatatttaaggatttactttttgtatggtagaattaaataattctaatggggtatggattttttattttgtttaaaatgtgaatgtatttcatgtcaaacgtattagctgctcacggtttggctaagtttactttaagggtggatgaagcttgcttttgatcagattgtattcctccacctatgaactgttgttgtacttatcaaactaatttataataacaagttttttcctaaaaaaaaatcactatgccgaactagcttatatatctcataaacaaaatgaatgaaaggggtttcacctttggaaagagatctctttcttaatccagtacaacaagcaggtaataatacaagaaattggcaaataaaaaattaggggccagttccaa

SEQ ID NO: 208448 - DNA, 987 bp, Cannabis indica
aaaaataaaaaaaataaaaattagtataaattgtttttatttatttatttttttatataagaaaatggagcaaagcccatacatatgacggagccagaaattcaattcagtgagggcttaaatattttctttttcgaaggcttgaataaaaattgaaagaaataaaaaagtatgttaaatagagtgttacaaatgtacttaggaaaaaaaaaagtgttgattgttttttttggctaattagtaattttttctcctgaattttaacaggtagtaaattgtgcccctgaacttttttggccgttaaaaattctctttgaactattgagattgttaaatttaaagatttttgtctaatttcattcaattttactgtttcagtgattatttatgtactaaactatgctccccatactttgatatctaccaaatgatgcccctcaaactttgatatactttgatatgtactaaatcatgtcccttgaactttcatccatgttagaattttttactaaatagttcaggggaatttttaacggcaaaaaaagtttagggggcactatttagtatatgttaaagttcagggaaaaaaattactaattaactttgttttttttttttttgaaatttggtattaaattttattagtattacctttaaaattaaataggaacaaataaagtgaagacttaatacacctttataataaacaaaaatttagatacatagatgtaagataattttttttttatatattatataattgagtgagggcttagcccatggtttaagtcactccgtccatatcaccctctcaatagtctttcttcccttcctctgcttttttttcttggacagatagcatcagaagacacgtcgattcctcttccattttcttggactgagagcagtacaggtatacttcctcttcaagctaaacccattcatctctcagactctcactctttaactctctctatctctctctct

SEQ ID NO: 208449 - DNA, 770 bp, Cannabis indica
tgaagaggaggaagaggaggttgccctgctagaccagaaacggaagagtaggatcgtcgactccaacccttcaaaaaaccaaatcatttaggaccccttcacaaagcgttgactctgggatccctcctaaggttgttgtcttcctagccattctactattcctctgaatcctaccaacccagacgatgaacgcgtccagctctggattgccaagcacaattacgctatcgatgagcaatctaaagaggatgttaaggcagaagttttgaaaaaatggctttatgagactcaagatggccctcttcaaggggaatactctggccaggtttggaatttaaatcttgacccaatgaccgactggttttctagcttattgaggtcttcattggttcctcttgcctcaaaaatggtgagttacttcgttgcagacttggcacaactccccacaaggacatgggcttggctctaacctcggtaagtctgtaccttgtaatttatttctcttttttccactattctttgctaactgatgtgttaaaatttagaacagattactgctgaagccggtcgcctatccaagactttaattgatcaaggatatgttgttgctaaacacgatggcatagggggagtgctcaagaaacttaaggaagcgggggagcagaaggagaccctccataacaacgttttggtggagaaggcactcaaggagcgggagcagaaggctgcagaggaggctcgaacgacactgaaggctagctaagatgagt

SEQ ID NO: 208450 - DNA, 590 bp, Cannabis indica
tgattgtccatatactaaattttactctcaaactttaatatctactaaattatagtctctaaactttaacctgtactattaaatagtaccttttaaatttttatctacgttacactttctttaataaaattcgataaaagttcatgaacaacaaaacttagcatttttttatttgaatatatatgatagattttcataggagaacatgccaaattggatattgatacatcaaactcaattatagatatacaacacatgttggaacatgcatatcttaggtgtcttatatatgagtttattactttatttctattttctccatcagtgtcaatattgtcaactataatacatatgtgtttttttttcttcatgaaaattcaatattgtcaaccttaaattttagtctatggtaaattggtaagtaagtaagttccttgttcaaattttttttttgtcaaaattgatggtaaaataaaataaaagaagtttttttcatgaaaaaaatttactagggcaaattgatgatattctctctccaataatcttttttcacttttattagtttggaaataaaaaaaaaaaaatattag

SEQ ID NO: 208451 - DNA, 694 bp, Cannabis indica
aatagggtttttgtgtaagttcaaaaaggtgtagttttgattagagtcaaaaaggaaggaaaatgtctaaatcaaccttggagagttgatttattatttttgttaagtgtagggtcaaaggtaacatttcctatactatagtaaataaaaatatataatcaaatgcttcttacaaaaaaagttatataactgcattgttttataggatcaagttaagaaactatttcctcaaaaaaaattgaagacacactcaacaaaccaatcttcattattaataagattatttgatttgtaagctagctagacacatgtattattacatccaacatatgaatgtttacaaataagaaagacaacttattactcaaaagcataaaatacaaccacacatagaataacacaacaagattaaaatacatcaaagtggagttgagaattaggaaccactagggttgtcacatccttatttggttcccaaagatcatcactaaccaatttggtttccttgcaatcacaatttttccgatgagcaacccaattaagaatccgcacccatatcctactgccacaactttccaaccgaattgaaatagagaattgcttgactcatcttcttcagatgatggaggtggtggttccaatgccttggagtgatttccacattttggcagtggaataccacataatcccaagt

SEQ ID NO: 208452 - DNA, 1103 bp, Cannabis indica
taaaaagttacttttgaaaactcagaaaaataaaaaaaaaaaaaacaaaatttggaattatttttatttcagacatattattttagaattaagagtatttttttaatgatgtggcaaagtattattgtaattaaaatttattaaagtatttttgtaaatagtttatattattttaaaaatcccaattaaaatttgtttttgagaaataagtataactaactatggcaactattgggcgataatggtcaagaaatttggaaacaaggacccacccaaagtcctgcccaaagggccgaagctagtccaaaggcccaaaggacagttcagaagcccaaaagttagtaaatccaaaagcagtcccagtgtaacatctccaaaaacccaattcaagttaggggatgaagctagtgtcaaaaaattgaaagaagacgaagattaatggggtttttacaaaaataatatattttgggtaaaagtttataattttattgttacacagtaaaaataatatttatattggtctctccttttaaacaataaaaaataaaataaagagcgtgttcaattatttactcaagagaaatatatatatatctattttatatagagtgtgcatatataacagaattcttggtttatgagaaattcatgagtaactttttatttatattaaaaataaaatatttatgagaaatttatgggtcactacatttatatataataaaataaataaaatagatctcattaaatctaaaaaaaaatactatttatcatcatcaccagtacacatatctattctatatagaatgtgcctatataacaaaatttgaaaaattattgggtgattttttttttaaaaaaaagttttcattcaaaaataatatttttttttggcaaaccctatatatcgcaaatagtacatcattgttctaggcgtttggctttttatttcagtacataattgattctttgggagttttgactcacaaatttggcagaagagccggtaatataaaggtattaattatatctaaatcaaaattaattaaccaaaacccttgtgtatatttgttcatattattacaagcttttatttcctagat

SEQ ID NO: 208453 - DNA, 1108 bp, Cannabis indica
gtgtgggcttaagctcatactgaaaaaaaaatatttcttttacttcttaacttaaaaaaaaatcttttgaattattttaattgcccacgataaatgcgcaacaaaatgagagatcaatagttgaataataatttgacagtatatctcgaaaaggatgtattcaatactattgagaacgagcttatcattcatcgttttcaaaacataaaaactcgtcgatgacaactctaaagatatgagctcaaaaattgatatattttctaaaattttaaaatattgagtatgttatatattttgaatatagttttagattgcttttttatttatttatttatttttttttcctattagaagatttttagggcttgatatttaatatctttttagttgagaattgaaatattgaattgttttttttttaatatatatttacttgtttttttgaaatatttttatatatgaaaaaaatttacgtccatcctccaattaaattctagtccgccacttaatatatttatatgaaaataattccaaagaatttaataacatatctctcagacatatcacatttatttttatcttgtagggtatatacattagataccaatcttcaatccacacacaaaaacaaaaaaaaaaatagtcgatcaagctattttgataagtacttttatatttattataattattaattaaatcacataaataatattcaaccaatatttttatttatatatagcaactaatgttgtatattatgatcaagcccaaaagttatagcacttctctctctttttcttttgggtcaaataataataataaaaatatggaaagaaaaaagattgaagatgagcttgattgcaaatctaatgcaaataagatttgggcatcacttagggatctctatcatatttacccaaaagcctttcctcctggtacttacaaaagtattgatgttcttcatggtgatggtgttcaccctggttctattagagtccgtacatataaagaaggtatgtagtaattttcttttatggttattattttttttttctattttttcaatctataccaaatgggtttcgtatatattttattatttgtgtgt

SEQ ID NO: 208454 - DNA, 579 bp, Cannabis indica
tatccaaaatatgatatttgtaaggttttatcttttggattatttattattattattattattattttgtaaaaaaatttcttcaaacaatggaaataattacaattttccctttattgcattttgttcatttttgcatacagtgtaagaatcctatttataagtttcactttgttgacttattttatgctcataatctcgatatcaaagactcttctgtttttcgcatataagtatttgtcatttatttatttattattttcacaaattataatttagattgtttctttccaatactttttgatattatttatttttatcattaaatgatgtactaatagaaatttatttattatttttttaagtgtttgtttttattttttttttatttggggtcctatgattatagcgatttagcaaataagtttaattttcaataaaaaaatatgttgcagagacgttttattctaaatattgagatttgttagttttatcaatataattatttagaaagctgattcatctttcattattttattatgttttgtagaatttttgtgctagttgctaatcttataa

SEQ ID NO: 208455 - DNA, 1709 bp, Cannabis indica
gacacttcatgtcatgatttattttttcatggtttacttgactctaggtgatgagaaaagtgatgtctctcctgtgaattctgttccttcaattatagattggacaccgccagtggaccgatacttgattgaccttttgttagagcaggtgcaaaaagggaataagattgatgattcattcaacgagcaagcatggggttatgtgctcaattcatttaatgaaagatttggacttcaatgtgataaatgtgttcttgaagatcggtatgtttggttgagaaaactgtatgatgatatctgcaagcttcttagttgtagtgggtttggatgggatgaagctaaccaaatggtaactgctgacaatgatgtttgggaggcctatagtaaggtgcatgccttacacttctcttattagttcctagattgcctctacattcaataatcttccaaagcttagctctgtgaatttagaaaatgctttctttgatctgaggaaactttcttttgactgtgcatgtgtattgttaaatgtgattagaatcctgttcactttgtattctttctgaaattatgtctgtatgatgctttgcaggaaaacccagataccatcttatatagaagcacaggcttaagcatttacagtgatttgagtaagatttatcaaagcagagtattagataaaagacttgatgttatggatacagaaaatatctctgatgatcagggtgcagaatctgcaactgcaactggccctagtaccctagaaactatggttggtggagcaagaaatctcccattgtcaactaaagaggttattatgtacgaggaacaaaagaaacggcaaacttggagactgttgaatacggccacaggaaatgccaggaaagttcagaaaacttgtgaaaataaactggagtctctttctgagatggcagaccttgttgcagagttggtgaccaagacagaaaacaagaactgtcactccatagaaattgcactagatgcacttcaatctatacctgatttggacgatgaactccttctagatgcctgtgatttgttagaagatgagagaaaagctaaaatgtttttggcacttgatgttgccctacgaaagaaatggctacttagaaagcttcgtccatagttgctactctccctggtttgtcgaaacagtcgctgaatttagtgcattttttcacttcatttttgtttttgttgtaaccttttcatggcagagctagggagagaaaaattcagtcaacctgtgccgctttttatcagaaaaatgtttggtttgtgcatccatctcctatctaatgatgatatgatatttgcatgtaggatgataagatttggtaagttttaaatcaatcacattgacctaagtttgttccttttaaaacaatgtgaaactgatgttacaataaaaaatcttttttgaactatacaaaaacttgtttaagaaaactttcatgttattcaacgggttgtttggaatgggttaatgaatggttatggatgtacattttcttcatagggatggggtcctgtggggatctacccctaatggggcggcgattccctgcctaaatgggaaacgagacgaggacagggattactttttatccctgaatgttaaacgggatggagacaggaatcatactctctgtcccgacggaaactcgtttaatattttattttatatt

SEQ ID NO: 208456 - DNA, 1062 bp, Cannabis indica
aatttcttacaatagtaacaaatttttacaaaaaaatacagaatagaaaatatgggaaattattactatatatttatttttttaaatttttttttacaaaataattatggtttggattgctccagtaatttgttatccggatttctgtgtaaaatgtacgtaaaaaaaaaaaaactccttaaaaacatttggtgaacaatttatgcccctgtcatatgcacgcaaaatattatgctttcggtgcatgtgactgtacacactgcacatataattattattaatacaaaagataacttaaggttacattacatgtttccattaaaagataaaaaaaggttaaagttacaagtattatattgtaaaaggaaaaagcacacaaaacaagttaaaacacactctaaccacaactcttcttcttctctttcagcttccaatttcatctctctcccaagtttcatgtatttgatttgaggtgtctctctctttcaggtatttacaccctttcaattacttttcaccattttacctgaaatttatcaaaataacaatgtgaattattaaaatttataaaataatttcacttaatttactctatgcgattataacagttgtttatggtcgcacaatataatttataatcgtttctccgatcatactaaattattttgctaataaaattttttataagattattttggagttgtgcattgagttttacgcaatatatagagtaatgctaagtttttagggttgtgtggtgatattaattgaaatgtataatatgcataaatttttcctttgtttttggatcagccatttaaaattaagattgatatatactaataatacacaatcatatccaaaaacgaaagatctcttcaaacatgtcatttttacatccaaaaagttctttcatttcgttaaatatattgtcttggtactactttccttttcatttttacattacatccaagaaaaaatcattggcaccatgaatttatatttatgcattaagtaaatttattgattaattattgattattaattggtttgattttgctg

SEQ ID NO: 208457 - DNA, 587 bp, Cannabis indica
aaaaaaaaaaaaaagaagtgaagaacatataaaatccacagctacatgtttcaagggaaggagaatgatcatgaataaattgaaatcttatgacagagaattataatgctcttcttgattcaattggaacgagcgaagttgcagaagaggaaaagatgttcaacagattcacgctctttattacacatcgagcaaagatcattattggtgatctcgagagtcaaaaacaaattgactctcgtgaaagcgcatttgaaagaatactccactattatatttatgaactaattttctaataccaaacctttgataatgtcaaataaatgaaatgcacaatatgttaagttttcttttgtgggcaatggaacaataacatattttttgatgggtatctcttagtatttgggtgtcacatattttaatatatacaaaagaaaaattagaattatttttacattttctcactttgttgctgtctcccaccttagttgtacttctgttaatttttttcaatcttattggtgataggtaatatagtcatgaaagacttaaccaagaaaaaggaatcccaatataatgaaacttag

SEQ ID NO: 208458 - DNA, 624 bp, Cannabis indica
attggtctaaaatcactcatatttttggcatttttagtcttagaaactaaagtaacaataatagaattaataacagataaatctccatgaccatgcaagaattttaaaacaactttaataattaaatcccctatatcactctaataattttggtaaaataaactatttataccatcttcatttggactttaattagttggcatagagaaaactgtttctctcacttccttggcagtaaaagggaacaacagagaatgattcatagttttagtaactcaagacgacacagtagaaaaaatatctccaatgtctttcgcagaaggataagaagacataaaatagtatgtaatagctttttatgatattctcagtatccacaggataaatacaccataccccatctgtatttaagagacctgaatcatatgacattcaaaaatgcaacaaaatattagaatctatcattaataacagtaattatagaaatttaggaacatttacaaaatacgaaaccatatataagaaatatcatactactaaagtaattatcataatttggaagaggcatggagaaggcactatggataacactaacggtcataactcaaatcttaactacctcga

SEQ ID NO: 208459 - DNA, 872 bp, Cannabis indica
ctctcaatggaaatagctttaggaattattaagtctagggttttctagcaaagtgctttacttgatagaaaacttaatccaaatgagcatattagactcatttatatagtgtttaagtgatcacacttagaattcaaatagatcaatctcatataataagcattaatataattgtaacaactatatttcataatatttgaatcctatcatcaattttgtttaacatttctttattacacaaaaatataaatcaaactaaaagaagttaacaaaagtaatcaactttgtaactcctctaactcctctccatcttacaaagtataggttaaaattttaaattaaataaatcatatcacgcaatttatttaccaaacacttaatatatattattcatataataatatattttaccatattttaaacacttaatatatattatataatataacagaaaaaatataattaaatttaaagagtgaaagacaagagtaatgttatatatgatatgagtcatagtcatatagtcatctccatgcaagttgaaattaatatttattgtttgtacctaacaccctaaatagggggcaatcatttattactataatattattatgattatgaaaacgaatctggctatttgatgaccttttaattagtaatagtgttgctataaggctcacgataaggttatatttggtcggaatgtacaaaaaatatgatgaaaagaaaagataggaaagatagagaatataaagaatgaagagaaaagtaggtctcatctatatatattgtttggtattaaaaatgaaattggaaggatatagaatataaattaattactaaaattacaacattatcctcttaatataatt

SEQ ID NO: 208460 - DNA, 598 bp, Cannabis indica
attaggtaattaccagctgaggccaaaagcaatgcaatacagagaaaacccatgagaatgatagctttagaagaaaccatctctattttttgttgttgatatgatataatatgatattataatgtacttctatttgttcttatatatatttttatggtaacgtggattaggctgtaataatgatatatatagtactacaaaaatagaatcataaacctatccacttaattaatttgatgagatctctttttttgggaagaaatctctcgattaaattggaccttttattttgaaaacgaattggatttcttcctatatattggtggttacattttttgttggtcttgttttaatggataaaatttttatttttagacttaaactaattatatacttaaaataaattatttttcaattaaaatatttaataaaactttttttaaaattaatatttacaattttttttactttatttaaaataatataaatcaaatcaaattatagtatcaaattacaagtaatttattaattatttttaataaatttttaaattaatcacaaacgtctaataatgatataacggttaaaagacattacg

SEQ ID NO: 208461 - DNA, 1309 bp, Cannabis indica
cccacacaccatctcatcccttgttgtaaaaggtctcggccccataaaatgctgctccaaatcgaagatccataatgaccaagtttagcaaccaaaaagctttcctttgggaagtatagagcttttaggattttggaaagtaagcaatccggataagtgaggattttccaaccttgtttagccaagagagctttgttgaaatcttccatgtctcgaaaacccattcccccttgtacttttagtttgcaaagtttcttccaattaccctaatgtatcttatgattatccttcgttagaccccaccaaaaccgggcaattagactttcaatctcatggagaattcctttcgtaattcgaaaacaactcatgacatagcaaggtaaggcttggattaccgctttgataaggatttcttttccggcttgagaaaataaccccaccttccaaccttggagtttcgcttctattttatctcttgttttcccaaagacttgtcgtttgttttttcccacaaaggtaggcatacccaaatacttggtatggttcttaactaatttaacccccaagttggaggctatattagttgctagtgaatcattaactttgctccccacacacatctccgttttttcaaaattaatgcattggctggacatcttctcataagtagcaagaacttctttcaaagcattactatcctctatgtttgcatccaagaatactaagctatcatccgcaaataaaaggtaggaaagtcgttgagccaaattaccgaatcttagcccatgaattttgcccgccctttcggcttcaaaaatcaaacaagagagaccttcagagcataaaagaaagagaaagagagagagggggtcaccttgtctcaacccacgttcgggaagaattaatcctttaatggagccattgatgaggattgagaaggatacagaacggacacagttcattatcttagtaatccattgagagtcaaatcccaaatgtgtcatcatagcttctaaaaagttccattctatcataagctttcgacatatctaacttgaccgccatttttttccattacgaaaccgccctttcttatttttattattttaaaaaatttaacaaaacgtgaagcaactttttttaaatgatgtttacccttaattctgagtttatatgaaataatctcttattgctttaacctctgtctcgttttttgacggtcttcttctcatgccctcacaacgccggtgccgaccctaattgtttcccctcactcatccaaacaacctccaacgctctctctctctct

SEQ ID NO: 208462 - DNA, 671 bp, Cannabis indica
atatatatatatatgttatgtagtaactaattcatttttatagaaatataacttggaataacatgcaatgcaatatatattgatcccttttttacaatatatattcactaaatgaaacatgcatgcatgataattatttttataacaaaacattttatacttttttaattattattagttatttaattagaagtatatatatagatgtatatagttatttcgagttaggctttaggtgaaatgccaaacaatatcagagtcacaatcatgatccgctatatttatatatatacatatagtttttaattaagagatccatatatatgcatggactaaataatatatgagttataacatataattataattatttttttaggtttatttgacttgaattaagagataataaatcaaagggggtcaaatgaaaaagaaaaggaatgtctttgacaccactctaaagtggttctaacaactgatcgatcctattaaaataacccttcaaccaattatctcccagtttcgctaaactgtatcttatttctctacctaatcaaccaaagtcattattatgttattatatcactctatatatataaacaccacacaaacctctatttcaacacacacccactcaattggagctacctagctatagctaaatttcaaag

SEQ ID NO: 208463 - DNA, 1075 bp, Cannabis indica
aagataacaactaaaaaacttataaccttgtcttgaagtaccaaatacaaaaaacaacaaaaaaaaaaaactagttttctattaacataggaacataaatccaacaaaaataaaattattataaacatctaatcactcatatgtaatcatttgcctttgccctttccttttgcaatatcctttactttaacctttgccttatctcgtgccttatcatttgtattatcctttaatttttgccccatttttaacacttcatcacttgttatataaccaccaatttatttccttctagcatgaataaacaaactgacaacaagatcatctcgatatcttgccaccatatctgccatcttagatgaaatgtcagcaatttttttatgaataaataagtcagcaaacttaatgacaaacaccccacagtcactgcatgaaacaaaacaataaattaatagggaatatgaagtccatggaccggtttctatacaaaacaataccataactgacacatattaaaaatagagcaaacaataaaactggtttttataaaaaaaaaaaaataattaagatcaaaacaggacaaactacttattgacatgacttggaagtccttcaataaacttgtaattcaatgattctctttttctaactgaatctggaccttcaacaaaattaagatcatctctagaagaataaacatcaagatactccaaataaaacgacagcatagtagaataagctttgacatgatccaataaacgtttcttattgacagcacaaaacatggtgttatatatgttcaatatcctctccttgatatcaaaatgaaccaatatctaatatttttgcttttgaatattcacatatataagaacatggttagtaaatacccatggagtattgcaaaacatatactcaccaataatgtatgtaggattgacattatcaaaatcaatcttagaaggatcaaaacctgatttaattaagaaacgattgtatgaattctaaatgacttgatcaaacaacaattagtagtggtaattcttttgttcaaagtatcatcttgctttatctt

SEQ ID NO: 208464 - DNA, 640 bp, Cannabis indica
tggaaatgaaaaagagatgtaattccagttccgaaatatgtatataaatgtcacaaaatctttatgtgaaaatgttgtaatttcagcattgcttattcattaatagtcttctttttccgtcccttgaaatagtggagaggtgaggaggagtgaccaagaatagagcagtgtatttaatcaagaagtaggattttatagtgtgtttttcaggcagacagccaggctgatctcgtttttattttctctgtgcagtttataatcattaactcagttaaagtttgattccggaatcgtgagtatcaaagcttgcctattcgctgttgtttggcttactgagatataagtcagtggtagcttctaagggctaataagtatattagcttgctgttctgatccttatgcaggcagttgagccttctcacgtaccagttgcatctaggaatggttcttgctggttctttgcaattgtctcatggattgggactctgcaagaaccagcagagcaataaaaaattaggtacactttcctccaatcaatttagttccaccaaactcctccctttactatccaaaaggtttaactgaattgttatttactagaatggaataagaactaccatgttacattcatttggtatct

SEQ ID NO: 208465 - DNA, 1089 bp, Cannabis indica
cccccaaaaaacccaccacccactaactcccaccctaaaacccaccaccaccacctcaacctatattccatatccaaatcatacaaaaaaaaataaaaatctcatcaaagaataaaccatatacaaaactaaataaaaaaaacacattaaagaatataaatcatcaacaaaaaccacatcaaaaatctcaaatctaggttgtgagttgcgagtttgaagagagaggcttgagggtggttcagatctgattgttgtcgacaaagaaagcaagagggactgagatgacgagaccaattgtggtttcggatcctttcgacagtgaacggagagacagtcgtgcaagaggaagaaggctagaggcgttttggggttcttagggcttttagggtttttgggctaaagagttgtgcagctgggtttttttggggtgcaacgtgaagaaggagaagaagaagtagtagtagtagaaagaggaaagaataatttttttttctaatttttaatttttaaattattaatattaagtggtccaataatattttgtcacgtgtacacttgtgtatacattgacaggtctatttgacacttaacaaccaaaaactaacagaaggagtgttgatcaaaacgattgtggaggttaagaagtttagccacaattttttcagtctaagggttaaaccgtgccaaacttcaaaattcagggagtttgcccgcaaattaattgtaataacaataggtatcgagcccaccatcatcctcaatcagacctgtatcgggcctaagttaaaatcactaaaatttaaggtagtatccgaccttaattacatcaataattttttttacaagtccatttttctccttttttcttctctagaaccatcggataaccaccaccaccatctcaacccatttcttcaacaaacccaacaacctccaccaaaaccaccactgcccaccactagccccaccgaaatcaccaccaccatcacaccacaaccaccaccaccatcacaccacaaccaccacactattattaccaccttcattatcttcaacatactaccatttaagagtgttcatcaaaccgct

SEQ ID NO: 208466 - DNA, 1044 bp, Cannabis indica
tctgagaaaggaaggaaaaactcgcagctatggccctatgatctgagttgaaatagtcaaggtgatcaacagtgggtaggtgaaagtgagacgaccatttattatttatgaagcaccaatcaaggcgttctttaagtgcatgaggagtagtacggttctttgtccaggtgaaaggatcaccattgtaaggcacttcttgcaaaaaacatttatctaaagatgttctaaaggcttccatgtgtgactctcgcctcaaacttcctccagatttatcattgttagataaaatttcattgaagtctccgattgcaagccatgggaggagaggagcaacatcaccaaagcgttgaaaaagagtccaggaggcagatttactagcaagatcaggagccccataaaaccccgtaaagtgaaagcttggactgccattgaacttcatgtagcagtcaaaaaaagtcggccccatattcagcaaagtaacatctatttcatcagaccaaagaagcataatgccaccacttaaaccaatccgagcaacttccataccgttagagaactttaacaaatgacgcaatcttgtaatagagttatcagcgagttttgtttccataagaaacaaaacatggggcgattgttgttgaacaagcaatcgtagatggcgtaatgcactcgggttccccaaaccccgtgcattccaacttatgagtttcataatgagttgcggggttgcaaagcaacctccgcatcaaagtcgattgaggggttcgaatccagtataatagaaacttgatcctcttgaacatcttccattgacgggttggaagaagttgaaccatcaaggccacggcagcgcttgagtatttttcgcaaggagagatttgaacttggtcgtttgggtgtgatgttgggctctgaattttccttatcaacagcagcgtagccatgtgtttgttggaaaaaaactagaggtgtgggagagtatggccggtgcaaaggtggataaaggggttgttggaatgtgggaagtaagtggtgttgtaggtg

SEQ ID NO: 208467 - DNA, 3102 bp, Cannabis indica
ggactaagatcttgatttagacctggaacctaggacctaagacccgaggcttggacccgacccacagtcggtgtctaaatctgggaattggacttggactcggacccagacccagaccagaattggaacccgtaccagaactcaaactagactcgacatgtggttggtgtctggatttgggaccaagactcggacctacaccaaaacacgaacctagacccagaccaggactcgaacctagacccacacccgaaccttaaatcttaccctatgacccaaaatgtgaattggaactagaagcagacccttaaaccctaaaccctaaaccttaaaccttaaaccctaaatcctaaactttgtacacttacccctaaaccctaagccctaaaccctaaacaataaatccctaaacactaaacccaaaaccttaaacccaaaaccctaaccttgacatgggcctagaccgatacccataccgagatcggaacctaggacccagaccctaacctgaatatagacccgaacctaaacccaaactcatgacccgaacccagatccaaacacagacccgaacctggttcaagacctagaccttgactgggacctggatcgggaccccgacccagacctgaatagggacctggactcaaactgcaacccagacccaaactcaaacctgaacccgtactgggacctacactcagacccaaactcgggatctaaacccaaacctgctcttggacctacaccgagacctagaatccagaccttgatgggggacctgggccccaaaccaaaacctagatctagacctggaccaaggattcagacctagataggagacttggtcccgaaactgggccttggaacaacgactaagaaccaaaactcgaccctagactcgagacacaggacccgaccctggacccgaaacccaggacctgactacagggacacaaccccaaacacgaacccaaacccaaacttaggacccaacgctagacctagggctaaattggaacaagacatccaagactgagatccgaatctgaacctaaggcttcgacctaacccgtagtcagtgtttgaatccatgaaccatacccggatccatacccagacctagaccaagacccaaactgggatccagacccgatcccggacccaaaatttgaatcgaaccaagcctgggactagaacccagacctgggacagtaacaggacccaaacctaaacacaaacttagaccagaacacatactaggacttggacctagaccgggacctgtgacttaggacgtaaacaaggactgagaccttgacccaaaccagggcctgaacctagacctagacccaaacccaaaaactggggccggacccaagacctaagaactagactcagaccagggacccgaaccttagactgactctaggactgggacccaaactgggaccataacctaaactgggacctggactcaaatagggactcgagactcgaacctgaaccggaacacaaacatggacccggaccaggacctaggacttgaacataaattggggacccagacctggaaatcgggcccacaaactaggactagatttgtggcctcaaaacttagatcgagatccatgacctgaccccaaactgagacccacactcgggaacaaaaatcaaaacttgaacttgagccggactgggatcttggaataggaccgcaacctggactcggacctaaacccggcacctaaacccagaccaagcccttgattgagactgggatttaaacctagacatggttacgaacttagacctagaacagaataccgacccagacccggactgggatcgaaacaagagacctggactagaccccaaatgtagacccagacccgaacttgggacccaaactcaaacctggacccatcccaggatccaacaaacccgtacccaaactcaaattaagacccggaccccgaccaaaaaccggaaccaagaccgtgactcgaaaccaaacccagtgccagaattagagctgaaactgtgactaggacctgaacctgacaccaaaaccgaacccaaatcataacccaaacccagacgagacctagaccgagaccttgcctaggactgggacctgagacctgaaacccaaacttgtaccgcgacctggacgtgacctggtcctatacactcactgggacctagactaggttcttgaccatgatagggactagaacccgaacctagaccaggactgtgaccgagacctggacccaaaccccaccgaaacctggactcaaactaagactcgagacccaaaccaaaacctagacccagaccaggacttaggaaccggacatagatgggagacctagaccagggacccaaacccgaactgggacctgacctggacccaggaatctgaagtcagacccagacctggacccaaaacctaccccgaaagaaaactaggacaggaacctagacacagtctaggaaaaaacctgaaccaagacttgaacccaaaatcggacctgaactcgggacccgaactcagacccagacctagaataagacccaaacatagacctagacctgagcctgaactcgaacacagaccgagatcaggacccaggacttacacctagaattgaacccagacacagatcgagttcaaaacttgggacttgaacctggacctagaccaacaccaacaccaaggacccgaacccacactcggagcctgatctagacctagaccgaaatccaaactcaaacccaaactcagactagggattgaaccccgacctgaactcgaatccaaactcaaacttcgaatcacaactagaactagagtcagactaggacacagaccaagactaggacctaaaccagaacccgaactcagaaaaaaccgagatcgagacccgaacctgaaccaagactaggactcaaacctgaacctagactaggacaaaaacccaaactagaactgggactatgacatataattgggatagggacctaggaaccggaacaaggaccgggacctagaactcgaccctcggctcagacatgaacctacgacccagctcgtga

SEQ ID NO: 208468 - DNA, 1114 bp, Cannabis indica
cgatttttgacccccatcattcctttctcactcacgattcctctctctgtgtgcctctcacctaaagtagatctctttacatttgtccctcgacaaggatctcaagcccgaagactcctctagttgagttctagctgccaatttgtcaagaaagaaggctacgccaccacagtcgctatgaagcttgtcatcaaactcaatgaatgtttggtttgttttggttgttcttcaattttttgctcacaatattgatttttgaattgttttgctttgtggagttttataattttttcccttttttgaagacattttttttaatttacgcttttggggtttgtgaaaatagtagctcaatttctttacaaagtacgtgtttaacttaatattgactaatggatatgtatgaattaaatttttttaatctgactaaggttttcacttaaatcttgtgaacttttgtgacctttgatttaggtgatcccgtttgatattttatgggttttctctttgttggtcaaggttctgttctacttattttgtttaataatttttcatactaaccgattatgatgtattcaatatttttctttaatttgaagtttgagatatgattattgaaaaaccttgatatatacgtacatacatattttaatttttctttctttcttttagtttataccttgtttattttgaatagaaaatgggtacttaactcagtactcccaaaactgataagctctctgaaaatagtgggaatgatcaactaagatacgggttatcgtcaatgcaagggtggtgcgcatccatagaagatattgtgattaattaataaaatcttttgttttttaaaattaaaactaactgaaattgatctatttttctgttatttaaagtttcaaataatctttacttctattaacaagcctgctttcattttgtgtattagcaagtctcattttgtgtcttttaatcttgtaaaaaattattcttaagttattgtaattttatttcttttatttagcatgccgcttattctgatatggatgcatccacttccttctttggtgtttatgattatcatggaggtaagaattgggaggataagttgcaatta

SEQ ID NO: 208469 - DNA, 700 bp, Cannabis indica
tacctggtcaggaggagaggcctccaattcgtattggatctcattacggagtagcctttgaaggtttccatcgaaggcggatttgcgcatttcagaaatgtatgttcttggggattgaggagagagttggggatttaagaggagaagttgcagtaaaggcatagttttggaagaggaagaagaagaagttgatgatatagaatgaagaattttcctcaaaggtcggatcaggcgagccattgatgagatagtgaggagaattgggaatggcagggtttggggtttacagcaatcttagggtttaagggctcaaattaagagcacgttaaattgaaatggaggctcctttcttgtttcaatttttttttcttttttctatgtctttcttgagtatttgataatattctctttaaattattacaataaattattaaattataggagacccttagcattcttctattattgttacggggcaaaaatcactattagataacttcatatcattaattaataattttttttggtaatctttattaaagtaaaataaatagggacctatatcaaaaaaaaaataaatagggaccaacattaaattacactaataataatattatacttcaaaaagatgtgtgctaagcactatgtgtcctttagcatttatctagaaaattgtattgtacatgcttaaaaaaaatat

SEQ ID NO: 208470 - DNA, 598 bp, Cannabis indica
ttcatccattgctttcttcattacatttgggtggtttattagctcagctagggcccattctaaggtgatggaagacgtgtttgtcccagctacaaatacatcctgtagaattataattaaaaagaattaattaattaatgacttaataattatatagtttattttaatttattaatggcgcggttttctttttcctcatatgggatcaagattagatcatgtggggggtttttatggttcacctgaattaaaaactttaatttaagtaaattcaaaaagtgtaatatattgaaagcgaaaagcaaaaagcaatatattatatattcgtggcgattaacatcaccatcataaagaataatattacataaaacaaagaaatatatagattatcaaaaagaaaggtgacggctgctaattaaaaaaagaaagttttcgttttaaatatttgagagtaaaagtcaaattgaggctctgccaaaagaccttaattaatttacgtatttgtaataagtaagtacgtgtgtggtagatccatatatgtcaatacaaaaaaagaaaaacaacatgtattattgctagctagtcatcttatattata

SEQ ID NO: 208471 - DNA, 1849 bp, Cannabis indica
tcacagttctgggtgactcattgcagagaccctcacccctaagcgtatttgcatatgtagtaggtttgaacattttgatctccatgaagatgcccagataggtagaatatgttccatcttagatacctgttcagcaaagagaactggcaacagaatcagaacattaaattatgcaaaggagcttcaagatattgaaacaaactcaaaacttcacagaacaaggtgatacatttgctgccacataacaaaaagtatgaatacagttgcattctaaataaatattttgtaaaatgaaaataaatatgacaagttcatttctcctacttaaaatagcatgccctcttaaggtcagatctcagtctaaagagtttcactaaaatcagtgggaagattgcacattttcagaaggccaatatctgtctgaaatgcaccttttccagacaatttatattcttaaccttatgttatgacaaggtatggtagaacataaagtttaggcttaaggtataaattatgaaaggtctactgcatcaccttggccagtattcatgaaatgctgcaaaagaattgaaatcctttgagggtttattgaagacagagcaagacactggacagccttgtagtttgctgtagacagaaaatgaaatattacttaccagaacaaacatttacagtacaagtaccaaaactacgaaaccattttatttacatttggataaatatgattctttttattgtcagttgaaacttgaaaaggatttctgatttactattattctactgtttcctgaagtggatgtcacctcacccccacactgagatcagaaagaaagaagaccaaaatgatctaacccctgtaccagctcactgttttctgcaacataacctagttcttgcatggaaaggaagtcatctattgagtggtacagacgagagctccacaataagatttaatattttagctcttacagaacatagaatagacacttctgtttcagtgcactcgataatgtgaaagtaataatgcagtaacagaaatcataccaccagaacttaccatacatatggaacacggtaagagacaaaaatgagaaccagatagctagtgggtgtcccatggtaatgcgggccagaaacatacccaatgccatacctgacattgtcgctagtgtttcttgacttccctccttacaatatagcaaaacaatctaatggtcagcacaaactactaaacaatatttcagggtcctcatcaagcagccagaatattttgttattaccttagctgagatatcagcagcattattctgaagagcaaaatgttgtgtcaaagcagctctagttgctccacttgcaacaccagctaagtaaacaaaggaaagaactaagttgcaactctgatcaaggagcattatttaaaagtgcaattattattactgttgaggtttagctacaaattaagaacaattactttgagtacaatgcctttgatgtcttaatgttttggcgtatggttagaatgatgcctcaactcaaccagcaacatcaaaaagcatgacttttgccaaaaaagatataaatatataaatatatatatatataatatatatttatatgaaagtcaacaagaaactaagcaagagtgccagatttctttcttattctagatcaaaggaacttactgaatgatctcgataggctccctaagcaaactacaaaacaaaagcagaaggaaatagtaggagaagtcaggtccatcaacattcctgccaccaaaaaaaagcaatgctcgtcagttcttgccataacagaaaaaccagtactaaagcgagatggtaattcgaacacc

SEQ ID NO: 208472 - DNA, 733 bp, Cannabis indica
ataataatcaaatccatgtctctatctttagttttccagatatgtaaaaactactaccatagtataacacagtagaaatctgactatatacatctgggtctgtatatatatattattaaatatcatggattaagaaaaaacaaccttcttgttggaagctaacacaaggcaagtggtccttctcgtaagagagtctctacttgaaatagataaacgacttgtggaagagaagttcaaaggttggagaaaatgaagatatgaaaccgccattgatgtttcatatcatattattaaccatttttgtttttgtttctgttgaaaaaaacagcaaaattatttatatatatatatatcaaattgccatttttgtgtatgagcatttttatggaattaaaaccctaaatgaaaattgaatagagaggaagaaaggcatacctcaatggtttcttcagtttcaggctttaaagacaaagagatgagcggcgcgagagggtgagtgagtgttgttaggtttagggttttcaaatttttggggattggttgatgattggcccattaatttgtacaacccaattccaaccctattaaagtggattggtatttttctaaactaatgaattagcatgtttaataagttatcattttgattattttatgtgtatatatatatatattttttttaattttaaaaatttaattagtttatagtataatataatgtaattcaattaat

SEQ ID NO: 208473 - DNA, 1414 bp, Cannabis indica
tatatatatagtggtgtggtgggtggtggttcacaatgatttcttctcagttcaccacataaggtgtaaagttgtaaatagcagcaactagcaagaaacaattactaggtgggccaattcaaactagtgtattaaattagaggtggcccattatgaaggcataagaggttttttgaccccctttcctttcattgctcaaataattctatttcacatgtttttgctttctttgtcctctcctcactattttattttctctttacacacagattgcctgataataataatgtaataagatctcaatagtacaatgtgtgtatacggatagttactatacccacttgagtttctttaacaaggtgtacagcattattatacattcaatttatgtcatcattctctaataattttcatatattttttgtgaaataaaaatcagctctatcattttatgtcaaattaataatattgtattcttcattcaagaaaacaccttatgaggagaaagttacaaaggaaaaccgcaaatattgaagttttttaccattaaatattgtgctatatttacaacgcaatatattaagaaaattgtattttatactcattttaatttgttttaatttttatctttaagatgtactcactttcatatatgatttttctattatactttttagattaatgtaaattatgtactgaatttaataaaaagtgaaagtatattgggcaacccactcacaaaagtaaataaattttaataaaatatcatatgagagtatttttgattaatggatgcaaaaaaaaaaaaagatattcctcaacttatctctaatatataagaccatttctaatatatggagtaaaaaatatgttaaatttgacacaaaatatcaataaatgttatatttgacacactttttgtaattatgctctaatgcataacaatagattaaaatgtaaattgacataaaaattaatgataatcaataaattaaatatatattttttaaaaaataatgataatattataattaaaaaagtatattaaagtaagtaattaatgttaaatgataataatataagtaaaaatgtgcattaaatacgtgtcaaatttgatataatactatatcttattttaaatttggtcaatttttttaacgtgatgatcaaaatcactcatgattaataatacaacaattcacaatcaggtggaacctccttgaactaggatagctcatcgtctaatcgaagagtatgttttgccaaaccatgagttatcgaattcttatcgtaagcaacatgagacaaaactgctatcagaaatttagacaataaaagctataacatcctcaaacaacacccaaactacattaaaaaataactactttctttgttgtatagctattagtcagag

SEQ ID NO: 208474 - DNA, 1091 bp, Cannabis indica
ggaacacccaatttttgcaaaccgatagatgactcgttattgattgtatcatggataggaccccctcccacggccaaatgaggattgaggaaggtgatattgtgaattcttaaaagtgggaaatagttgaagaccactagatctcccattttcaaatgcaagattaacttgcattttaacagcaatatcaaacatgttctggtgatattccaacctactctcaagtagggcctgcactttttcaacggtgaaggcatcacttcttgatgtaatatcagatacaactctgagtcaacttctaaggccattaaggagctaaagaactagatcttgatcattgacaaaggaaccagcagcaacacttagggcatcagaaatggattgagccttgtcaacatactcagagatggagagatttcttttttgaacattggagagctaacccttgagttgaagccgcaaagctgttgtttgactggaaaatttttgttctaaagcacaccaaacaatagctgaggtgttgtaattcgcgactaaggcaagaatactttttgtcattgatgatcgaggccatgaaagtaggagttgatcctttctccgccattaagcatactctggattttggacccctatgataagattctgaggtggagggactccagtaaacaaaatgtcatcaagatcttggccaattatgtttggaaccacttaaaatttccaagacaaaaaatttaatcgatttagttttaagtgtaagagatgaggtgagcaagttggaaaatggattccatttccatgttaaatttgcagagcagtagaagaagaggcattcgccattgttgtaggtgcaggatcaaatgttgaggacgacatagacgtgaatcaaaagcaattgatatcatgtaaagacacaagagaataaaaatgcttattgaaattagctttgcaaaagctaatcaaacaattagaccattttttttatttatagaaacagagagtttgttacagccaatacaaaaaccaagaaccaactaacaacttttagcaaacacaattcacaggatctgttatatgccatatctttcctgaag

SEQ ID NO: 208475 - DNA, 877 bp, Cannabis indica
agggagagatcagtcatcacatgaaaattcatatcatcattaattattacgcggttccccttattattatgtatgtttgcttttttattactccttctttcgtatgtacatatatgaatgtttaagtttgacagtgaattaattttttatttattattaaaaattattatctatactagttttttatttttctttaaaatgctcaaattaattgatgtgtgacaataaaattagtgtaatatactataaaatacagatatatatatatatattaatatgcatgtttagtagtatatatataattagttattagtacaatatgcctctctcgaaattggccacgtgccgtgcccttattatatacaaagttttcttgggtggactaatagcaaattaacacgtaaagtgattgatctactgattgaattaatattctctcgttaatttctttgtagctctttatatatgctgtcattattaattattaattgtggtttgtaatctagtagtaaataattaaagtgtataattcctaaaattgccatatttggtcagattttgtgatttatcatcttattgttttatataaatagtagttatcatcatcttattgttaatatatattaaatatttggtgcagagtgaagaagaataatcctaataacacatataattaatgaataattagtatggggaactggtttgctgccccgtcacaatcaaaaactttagtattttgtgtggtaaaacaattaacaagtagtagtagtactactagtagtattcaaatgagcacaacgtggagctgacagttacattttatttttgtacttttttttaacttattatttggactctttaaaaaaaataaaaaaat

SEQ ID NO: 208476 - DNA, 999 bp, Cannabis indica
aaataagacttatcaatgacaatgtattatacaaagttaccccagtgacaacatgtaagacaataggctttgatccctagccttcttgaagtttcatcttacccgactttttttattttttactgttcttgcctgaaattaatattttttcttacaattaattatttattatttactatataacgtaaagtattactaaaattaataattttattaagtaccttttgtttgtttgtgttccagtaagcaatgcaatcactccacacctcctgagttactccatcaggaggtaacatgtctattctctcctgtccaagctccttagtatttttgatccattttttcttacaattggaccattagtcacgtaaaccctttgacatctcgtactcaccatagtctatgaacgcaggattatctcgtaggaacacaaactttgtcagcaaaaaagttaatgcctcattaaccacaaaagattcagcaatagagtcttccagacgggcacgattcctgacatattgcttgtacatagaattgaccgctcgatgggatacatccccctgtactgtattggtccacctagtatggcttctttagggagatgcaaaactacgtgaaccattatattaaagaaaactggtgggaaaatagtttctaacttgcacaaaatagttagaacatttgtttacatttttctaaattagaaacattaagtgttcttgaacataattgtttgaaatacacatacaactcaatgattgtgtcccgaattttttttttcaagtacttacggatacctactgacaataaacgttgtaacaacacatgacaattatgggatttgagcccaaaaatcttgtcggtatccaagtttacatttttatctaattgctgcaaaaccgttcggaaattgtacaaactttataaattctacaaattcagtgagttcttgaacactaagtgtgttactagctagaggttttttccacttcccatttc

SEQ ID NO: 208477 - DNA, 1057 bp, Cannabis indica
agtatgtgtcaaactcatctcataaattgagttacaaagcttggaactttagccagacctctcctatgaggagaaatcagtagagatacttgatagaagagagaaagtcttgagaagcaagaaactaacagtagtgaaagtgttatggagaaactacaaggtcgaagaagcgacctgggagttagaatctgccatgaggcagaaatatcctgagttgttcaggtaaattttgaggtaaaatttctataaggaggggataattttaatatcctaaaatttagaaatagattagcaaccctaactaacttaattaagaataaatgtgaaataatgttattatataatcaattatgtagtattatatgagaatatttgaatttaagaccccatttatgagataggggtatttttgtaattttgacccgataagggtgaaatggtaattgttattatatattttactaatggactacattattatatagtatgttttcttggttattttacaagtaagtttcgacaagatattgaggaagtcacaatcgattattttagcacgaaccgggttcggggtccataatttatgaattgtgtgattatggaaataatataaaatatatatataatatatatatgattatatgagaatatgtgtgattgtaaatgactaaattgcacttgatgattaaatatgttcatttttggccctagggccaaagtggtcatttaaccaaaatatgtaaattcagttaatttgctatttttgaaaattagaatcaaaaatccattttcttgcttcttgaagttcccacctgacctccttctctttctcccttaaaatatttgcaaactttgatctttgaggaaggattgaagctagtttttgaggttctagtgtttaaggcttggtaaaagcatttgaggtagtgaaattgttcgttatcactgttaatttttgatttcatctcttaaattgtaaagtttgcatgatgttcttgaatgggttttaggttgacaaattcatggatgaaattaggttatgtttaggtatgttgag

SEQ ID NO: 208478 - DNA, 624 bp, Cannabis indica
tagaatgaaaagaagaaaaaaaaattactgcttataatttttgctgaaaactttattataattttttttttttttaaaaaaaacaccaatatgtattagttactcaagtctcatatagctataggtagattattttttttctaacataaacttcatcaatattatatataaggcatatagtcaagaaaataaatgaaaaaaaatactaaataactagataaacccaaccactaaacatgtggtgactcaaatgagaaggctagttgtgcaagtgaatgaacattagtactatgaacccacttacaataaaataatgtaataaaaaaaaacaaatttcacacacgaaaaatatcacgaagtacaatactaaattaagaaaaacatgttctttaccacccatactttgcacaagacgaagataattcgaaaatatatcttcacatgacaatagcccatttaaagataaagttggaaattatggagtaaagcagtcgcttcaacaacaataggttcaaaataggcaaccaatggagtagccgttgagaacaaaacaaatccgacattatcagacaacacaaccccaagtttcaccgctcccacttctgtttgaacattagcatccac

SEQ ID NO: 208479 - DNA, 1061 bp, Cannabis indica
ttttgggttccatgcatgggttttgactttgctgtataagataggtaaaaaatttaggtttaaaactttgcaattttctttgtaataatctgtaacacttcgcggttcatgacgttggcctttcgatcgcacattgtctgtctttcaccttgtttattcaaagtttcgtgaaatttttccctaaacttaaaaatttcaaacttctgggttttgactaatttttgaatattttgtttctttaatctgttgagtactcctggtcggtatatttacctatttattgttcgatatcctgaccaaacactcatcttgcgtgttgtcttttgtaaatgaaccctggtgagtttcggggaagcgaacactgaattgatcaggatctacttcaacttctgtacgagggtcaccctcgtctcactacaacaattacattaataccagcggacacaataccggcgggccacgtccgcccctaataatgggattaatatcggcggatgtggggacccgctggtattaataagtgttcttttttttaaaaaaattaatctaaaactcattagcggcgggcatttattaatactggcggatagcccgccgctaataggagagggatattaagtgtgggaaaaatcctgacaatcccattcaaaagtcattagcggcgaaccaataccagcgggagtcccattttttcctttctccaatatttttcatctcttcctcttcctcttccgtcgccttcctctctctttggcgtgcaaacccagcagcgaacccagtcgccttcctctctctttggcgtgcaaacctagcagcgaacacaccaccaatcaccaccgtcgcctttctctcttattctcaagtaatttttttcctacttctcattagttcctttgatgtattttctatgagacagatatttgtatttgcagtgtttctaatgttgctattgcataattagttttaaatttataaataaaatcaatttaactggtaaaagaatatctgtggagtatgaacttgggcatgccccttatattttttcgtatttttgcaacctt

SEQ ID NO: 208480 - DNA, 1542 bp, Cannabis indica
aattggaaagcatatttaatgttgattctctttgccttatatatgaagttggtattaagaaaaaaaagaagaagataagaacagaagtatatttggaatatattattctgtttttaaagaggaaaaacctcataattatgtgaaaaagagaaagagagtgttcatgagaatgggtatcctaacaaaattaatttcatttaatttacacctaaattctctcagtacaattcactataaatacaatccaaatctttcttcacatttcaatttatcatattacattttattttagttttattatagtattacatctctctctctctctgtagtgtcgtgactattactagtactgttttatatttattatacgatcttaatttagtttatgtaatttttctatacatatatatgtggcaatatcactgcatataatatattataatgaaagttggaggaaaaaacaatattatggttctgcagctgctgtgtagtattattttcctttacacaggtaactttgtctctctagtataacatatatagtaaaattctcattggtaaaaacactataaaaatgtataacttaatataaagaagaatttgcaatttttgtttttgttcttagcaatttgtaattttgtttaatcctagtgattgtactataattcacatctctaaactctattaccaatgtgtgagattataatgctcgtattttatttgtttattttggagagagcgattatttagtttcattttagattcaaaactgtatttttgtttaagaaaaaaaactattaattttaatgaaaaaggttagttattaaaaatattatatatggttaaaatttaatgcacacttcattatgtacaatttaagtttgtctctagcattactcatttttttaattaccacatagaaggaagggcctctttgttttatatattgggaaaactagtttttgtagtttttggtggtatttcccgtttttttttttttaaataagacagtccctttaataaataaataaataatgacagtaatatagaatgtagtttcctgttttgttttgtatatataaatatcaatgtctattcttatctatacatatatattgttaaatttttactaaaatcattgctatgcataaatattttacaattgatttctttggcaaagatacaaattcctattttggttacttaaaaatattgaaactagtaatataaatataaatctacataattccacaaattgtggatacaaaataaaattgattattcattcatcttgaaattttttgaaaattaatagggacaaaacaagtaacctgctaattccgtacatgtgtcttgaatgaaattataatcaaatcatatattatagactagtttttagtactgcatacatttcgattattaaccttaggagttaggacatagcaaaaaaacaaaaaaaattgtttaatatattttaattatttagtaactctatacaagttactttccataatcataaaataaaaataaccacaagttaat

SEQ ID NO: 208481 - DNA, 914 bp, Cannabis indica
caagaagtacaattcatgttacacagtcataaactgcgtattcatcaacaaacaacagactcattagccaatgtccaagctaatatagcgaatatgtctggtaaccataattcaagaggcggctatattggacgaggcactagaggacataatcgaggaggtcgtggttactcaggcaacagaggaggccgtggtaatcgccctatgtgtcagctgtgtggaagagttggacatacggctcaaaaatgttatcatcggttcgatatcaccttcactggaccatctccttctggccctgcaactagtgacaccagcaatgaaaatccccaagccaatttggccgagacccccaccaatagtgacatctctggagcatggttcctagataccggggcaactcaccacatgattacagattcacagaacttgcaaaacacaatcgattacaaaggcaaagcaaaagtcatagtgggtaatggttcttctatgcctatcttacaaattggatctaattctatatctaccaccaatcctaatcatttccttattcttaaagatgtgttacatgtgcctaatgtcaccaaaaacttgttgagtatttcccaatatactaaagataacaatgttattttagaatttaatgatgtttgttgtcttatcaaggacaagacaacgaggcaagttcttttaaaatgttctctcaatgaaggcctctacaaacttcaagttcagcccttaaacaagtcttcccacacagtccttgacattcaagactatatcaaatcttgtccatctgctttgaactccacaaccagtagcaatcctgtaccagatcaagctactgctcttaccacttggcattgtcggcttggtcatccttccaagcccatcttagccaaagttctttcacatat

SEQ ID NO: 208482 - DNA, 1526 bp, Cannabis indica
tatatatatatgtacacacgcacgcatacatatatatacaatgggggtcttccatatgtggtcgtgggggctggtctggagtcgaggtaggcaggagaggggaggagatcgtcggccggtgactggaaagccaccagggccggtgccagctcgagcaagctccagacgaacctaacgggtcaagacgacccggtttgaagctcgacggagcctcacggttcgggatcagttgtcctcctcctcctccatcgttgacgttgaccaatggccctgtagggttggtcgaccaccgtgaagtagtcataggaccaatcgggtcccttcgtggttgtccgtgcaacccgaacccaattaggctgtccttctctctttcacgtgttctagtcgtgcatggctatgcatgacatgcatgcttacgtgaaaaataaaatacaagctcactcatcaatgacaacaaaaacttataccataatttgacaaaatttaataatttgacaaaattacataatttgacaaaatttacaaataaaatttaataataaatgacaacaaaaacttataccataattatggtgtaccatttttctaataaaaaactataaaaattcctaactcaatttttacattataattaacgactcacattcatgcataaatttgaacacatccattcacaatatatcaacatatatatatacatatatacctaaaataatatttaatctatataattacgaagatagctcttgaaatcaactgttgattcttatgatccatatcaaagttaaaaaagcataaacggattcgagaaaaataatatatatgtctaatatgaaccattatttcaaggatcttaacataatatatatagattaaatatttagactatataatagatagaaagacaatacttcttgtagcctatcatagaatccttgctacttttagtataattacgatcatccaatccaaacactttgtgaagaattcacactgcaatctaccaagccaacatcaacactcaagattagagtggactattagattatttatgatgaacaatttatgtattacattataactgagatatggttgatcacaatctcataccacacttcatagcgtgtgggtgtgtgagactaggagagagagagagagggagtgaataattcaattcctaatttctctgcttgttatgctctcttctattttaggttgttggtttattctaatattatatatatatatataatgttatacataaatccttttaagtaatcccttaaaataaaaagaaaatatttaatatcttttgaattaaataaattatccaataatatatttaatttaataattaaaagataattaattaatttaatttattttattttaactaataaaataattaaaaaaagttaacatgggcctttatatgtcatcctacacgtgtggacctacacatgtgggccatatatattttaaggtccaaaattgaatttaatttcaattttgtcataaataaaatt

SEQ ID NO: 208483 - DNA, 841 bp, Cannabis indica
tgatcctcttcatcatttagtgctgcttcataatcatctgggacaacaggcctaattgggaactgaggaggaaccaaattccttttatatacctttttaaagtctccgagagtagtactcccaatcgagtcctcgaaagttgtgtccttttcaactcgatctctccttttagctgccaaggcatcaagcttggccttcttagcatctcgttcctccaccttcacagatctcttctgaacaagaggttcatttggaaccccatcctcgtagaggtcaattactctacttgttttggacgatgtcgttggtgctgctgatgccatagaagcagaaggtggaacttgttagagtggaatggctgtgataattgtgttcaaatgtttagtctttggaggtgtcgtctcttcaggtttggcttgagaccaagatggccttgactgaggagtttttttggtggcattaggtgtaccctcaaatgctttgcttttatcggcaatgttcacccggaattgcttcagggcctgcttagcatttgccactgtgaaattagaaaagaaaagttagaaatacatagtgagtgggaaatcacaaatatatgacaaatattataagatttggaatcaatcgtcaagattagaacccgagtcttcaaagtattccttaccaaagctaaggatgccttcatgtcctaaaaagcttccgtactcaaagaacccaggattgtgcataagggtaaatggatctaccctagttttttgagaaggcggaaggaaatgagttggactcttcactatctcatctacccgcaacatacattgtttggtaggataatgagaggatc

SEQ ID NO: 208484 - DNA, 712 bp, Cannabis indica
tctacttcaacaaactgaaaattggtaagaataattttacttttacttcttgatctctctatgctcaaatttcactttggaatctatttatttatttttcgtaaatacttagaaatgtttaacagcatgtataatttatttatatatttgttcgacacatgtttggcaattatttcttagtatattgtgctttttacgaggctttccttttgttaaattaaatttgcataaatctatatgtatgtttaatgtgttatatagttaattaataagagctcagccatcaacataatgcaaaaaatcaatatagtcttatctgttatgtatatatatatatatatatatatatattaaatagctaactttttgattattactttggttctattttggtcattttgagagctaaaattaagaaaatattgtatctaccatagctgtacatttgttttataacattatttattattatgatatagtggtgtacatatatatgcaattatatttgtctatatataatggaatcaaactaaactaaaggcatttggttagaggtgatgaaatgaaataaaatagaaaggaaacaattttcattctattcttttgtttggttgcattttaaagtattgagatattaacaccctttctaccattttgttagaataactatttcattttaaaaatacaatcattctaatgtaacaaagaaaaa

SEQ ID NO: 208485 - DNA, 1146 bp, Cannabis indica
taaccttgctttgtagagttttttcaatataatccaatataattgaaagtttccattactaaacattggaaaggtaggtttgcagttgatatctcaaattatgaaattgatactcttatgattacttttagatgtgaaggtaacttaaagaaggtattatttaaagaatattagcatttccatataaccagcacctaattatatgtcttccaagtgtttttgaaaatgctccaatagagactgactattattcctttttgagttcaaatctacctcatgtctttctttagtaaatttgaggcccttgctcaagtgattcgcgatctgcttggaaattttattgaagtacaagaaaactctttgaatgaagatttaagtccttttctaagggtgcgtgtggggattgatgtttctcaaccacttctctagggtcaaatgatctaacttccttggcttgatgatgaattttggattgattatcgttatgagcggttagcaaatttttgacaagtgcattctctttttagagaaatatgatgaagtaggtattgagccatccttcccttatggtccttggatggagggtgttccattgccgaaatctaattttgatcactactggcaagacttctcaaaggcagggccttggccattcattactaggcttgtttgaaattatatctctccaattctttcacacccgagacagacacttgttcttcctccttcagttactccacgtgagaagggtaaagccatattagtagttaatggtttatcttcatcaattgtttctccacaaattgccttcaactcttataatttattaccttctaatagttttaatggttctatcaaggacaaaggggttactccttctgatggtgaatctctcactatggttgctactaatgcttcaaatttaatgagcactaaacatattaactcgaatgcttctcctactactataaacacccatgcttcagtatcaactaccgattctggtgttgcttctttaagatcattacatcctcctagtttttctcatgttcaattagtagtattgtcagtctctttaatgacacaaccaagtaccatctcttcctctacgacttcattatccactacatctccaatcacaacaac

SEQ ID NO: 208486 - DNA, 726 bp, Cannabis indica
actatttgcgtctataattattgggttagttacccaaacaacacaattttttatgtgtcgctttaaaatcgaagtaaaaagtcctttttgtaaccgtgcaaaaatccaaagataaaccttggtcacaagaaaattcgataatcccaaaacaagaagggaaactgtttcagagcacaacaccaatgcaaaaagaccagaaacaccatcaaacatggttaaagcttgttgaaggtggctcaaaaaccctcgcagacattgaacaatgatttagaatcaccctaatacagagagcattctcaaattttcttttcattattcacaatatcaatttatatatatataatatgaaaaatattaagggacaccttaaattctcaaccactacaaatattatttttactggtgtaaattaatattatgtgtcatatattttaatttaataaataatataaaaaattgttaaccacaacacaccatattaatatggggtcaggcaccctaacaaatttcgcattcatttttactcaaactgttttttattctataaacgacacgtttattttgcttgaataagaaaactgagtgattaattctctctgcatataaaataaatagacgaagaccgcaacaatgtggaacactttacatcatatatggtcaagatgctttgaagacaaaatactaatcattgctcaaaggttacttactcgtatatatcaagtggca

SEQ ID NO: 208487 - DNA, 989 bp, Cannabis indica
tattctaatgaaggccaacattgtattcaacattcaagccatcctcacttactactatttgttaacccatcatatgcagatggtatgaatgttagttgctttgcatgtcataaatcatcgtatgatgatattggagtttattattatgggtgcattaggtgtaagtatttccttcataaacaatgcattgaccaattacctcaacaaatccaattcttccaccatcctaataatcacactcatctctcccttcatatgaaatgggagtatggtaaatgcaatatttgtggatactcaaataacccagccttatattttgaatgtcctcaatgctataataattttatgttgtgtttagaatgtggttttagaagacaaagaactattaattatgaatatcatccacacattctttgccttttagacaaaatacatactacacatgaccgatgcaatgtctatgacaattgtttgaagcaatcactcaaatctaattccaaggaattcaataaaactgattcctccatatttggatgtttggattgtgatttcaaactccatttattatgtggtccattgccttcaatcataaagcacgagagtcatatgcattgtttaaatcttgttgattcatgcatcgaggatacctttggcgactactattgtgaaatttgtgaagaagagagagatccacgacttcgagtttattactgtggccactgcaaatatgtcactcacgtacattgcgtaatctctgaggtatgtcatcatgatcatattattaattcaaatatttaatataatattttattagtaatttgtaggaatatttgctataatacatttattatcttttcgttttaactagagatgattgctaatattttattgctaaagagaaatatgtttatatattttctctattttctttttgacttcagatgtcatttaaatatagattgcgtattatgttttttaaagagttatta

SEQ ID NO: 208488 - DNA, 808 bp, Cannabis indica
ttgagctgagcttttcaccttctgctttttctgctattttcttcattatactcttttcctctgctttcaaacttggtatcagagctctctctgcaccggtggtgcctacttcgtctcagctccatggcagacaaaccccagttcgttcaggtgaacaaagcatctccagcgtcatgggctcagtcctccgttccttcagcaggtgctgtacagattctcaggttgtcactactttaaatcaaccgtttgccttgaagcttgatagaaacaactatacgttgtggaaaacaatggtgtctgccattgtccgtggtcacagattggatgggtacctgaaaggtaccaaagttaaacccgtggagttccttcctgcagatccatcgacaggagaagaaggtgttactatcaatccagagtttgagatctggatcgtgaatgaccagttgttgcttgggtggctttacggatcgatgacgaaaagcattgctacagaggtgatgggctgtgaatcagcctcgagcctatggcaggccttggagacgttgtttagtgcccattctcgcgtgaagatggatgactaccgaactaagatccaaacagcaataaaaggagccatgtccatggctgattatcttcgacaaaagcatcaatgggctgatgtgcttgctttggctggtgatccttacccagaaaagcaattagtgtccaatattctctcaggtttcgacattgagtacctacctatcgtgcttcaagtggaagcaaggaactccacaacttggcaggagttacaagatattttgctaag

SEQ ID NO: 208489 - DNA, 1208 bp, Cannabis indica
  modified_base (1172)..(1172): a, c, t, g, unknown or other
atgccattttaaaccagaatgttgttggtaacaatcaatcccctttggacaatcttcaaaacaacagcagtacgcctatttcctttacaccagcaacattgaattctgcttctttggttcataatgaaattacaatggccatcacttcaacgaattccgaggctgatgcaaaaaagaaggcaccagaaagcatgaatcagccccctgctggagcaaactctgatgttactccagcaaaaaatcattatactgctgcatttggattttagggtggttctcaacgtgttggtctgcctactggtacacaatctgccactaattttgaagcaccatcatcaaaagtttcaagtattactaaggttggtaccgttgtaccatcatccactactttgccaacatcaccaaatgagagtgatttgactgaagttttcatgccaaacattggacaacctctgggatatgttgctacctatccacctgaagcaaacacaactaatctcttcaacattgcctccaacttcactggacagccatctcatactcctattatgtctgatgccaccactaccatgaccacaactgctctatatggtaaagaaaaccagtcacctaattgagtttcaaagaagctctctgaacatatgtcaatgcgtaaggctttaaagcgttgtaaagagcacaaactcactttctcaaattcagatttgtctactgatgctgagatgaatcagaatgtttctgatgctgatgcaaatccttctggctcctttgacaactttgcggaggctgcattacagccccgcaaattgccatgaaaattctaagctggaatgcgtgtggtttggggaatcctagcgcattcagacaacttcgtttgcttgtaactgagcaaactcctcatgttttatttattatggaaactaaattagattgtaatgtagttactcgttatcgtcaagctttacgtttttctaatggtctagaagttcctaggtcgggtaagtgggggttacttttgtatggaaagcaatgttgatgtaactcttcttaatataatctaaatatttttgactgctacataaagtctgataatggccaatcttggcacttctctgccttctatggcgcgcttgaaaactcacaaacgaattcatcctggacactgctgaagngatgcaaggatgttgcacccttgatgccttggctcg

SEQ ID NO: 208490 - DNA, 950 bp, Cannabis indica
ctcttcacccagagtaaacttcaaatccacctgcatttaagagttgcttttagttttacttattacagaaaaatgctcaaccctaaataaatcacttgctttagaagtctatagcatactgtatcaaagtaataatctggcttcttgtagtcctttaaaaatatttcttttggagcatccatttcagatttgtcaacttgctttggttctgtagcaactgaacagaacaatctccggctcaagcgcttagtcctctgaaagaaggtcaacgatttcacatgacaaacaacatgtacagatgaaaggaaaaggctatctaattgccagataggttatatagtggaaaactataagggaaatgaaatgcacaacatattccattaaatttcaaagcaacatacagatagtggagcaaatggaaaacaatgattccttctgcacgtaagctgcaaatgcaatcaacaatgaaattttgagaaatcttctgttcaaattaacaacttcaaacactttaataaagtgaaccattaaacacaacaaaccggaggaaaacttaacatgtaataatattatggaacataataacaaattagacattagattttattatggagaaagaaaatcaacacacctccgaactaaggaaacgcttatgtttacagacagtttttgctgaattctcaataaacccaacacgactggtagacctaggctgcaaagcggacaaggaaataaataaacaaatgcagcttcgccaaaagataaaagtacctcattgactgactgtcgactattgaataggaaataaaatggaaacaataatatctcttcgtttaatcttttcaaagcccagaaaagcacacacaaaacaccaagcacgaatgtggaataagatctaaaaccaaaaggttcttctaaccattagcatacacatatataaacataagaaa

SEQ ID NO: 208491 - DNA, 1620 bp, Cannabis indica
caagtattttgtagacttatgtgtattttaacgggattccaaacttataaaaaattatgtttattttaaaagttatattatttatgaaaattttaattattcacatttttcattaaacccttgattagtaaaggcgtgcacaacgcttaataaaaatacgataacacgcctaatctagtagagtgttacaaaacaactcttggcaagtatgtatgggtagttgctaccaaagaagataacctttggatccaatggatgcataatgtatacataaaagatgcagactggctggattataatcccactaatcaatgcggttggtactagaagtaaataattaaagtaaaacagtagtgaagcaggtaatgacttctcaacagaatctgatgatgaaatgctccattaactaggagcatcaagctctagtgcctttacaagagaaaatttgctactttggtgatatcaagcaggtttattattcctaggcacatttattttgtggctaccatttctacatcatttttaaaataaaaaaagacttacaagattcaacgtttgtactgaatcagtgtgtttgttgtgtggctcggcaactgagagtagccaacacttattttttgagtgatagtagttgtttcattgagattaagcattggttggactgacaatacttagtgttgatgcaaatttttgtggattagaatattatcttttttgtaataaataaattgcagaattaattagatagtaattaattatctaataaataaataagaagatagttttaacgtagttttgaagttaaatcttcctagttcacaagtccatcttattaaggataaatatatttgaatatagaataccatgatataatttagcaatagtatctcttttctctcaagatggttgtccctttttctccctgggttcagtctctatttatagatgcatagggtgacatttattctcttgggatctaatcattagtaatttttcatgaaacatggacattccccacatttcatctttgtgcacatggaataatattaaattactgctcaactgttcttggtctttgtccatagatggttatggtgactgtgttggatgattctcgtcgtgtacatgttatctttctaaccatctttgtacaaaatactaagtgttgagttacaatgcatctcacagtcttcctttcctgttgggaaaggtattagagaggtggttactttaacacgtcaaaagtgagatgaataaatgatgaaggtgtttccatttcgtaaacatactcatgagtatgtggattaatgagctgtaagctcttactcacgagtatgtggatcaatgagttgctctactcacgagtatgtggattaatgagctacaagcttattgtttactcattatgaacatctttcattgtgtattatgtttatctcgagatggacctgtttgtctcgttggtctcattagtcaatagttataattcatgtctcactattgcctatatggcggtgagctcgaatatctctattaactgtattttttgaggtgagtcttttagtgtgtatttaataatgcacagtttgagctagttcatttttcagccttgatacacgt

SEQ ID NO: 208492 - DNA, 1494 bp, Cannabis indica
tattcagttattaattctgtaatctttataaacaaaacaataaaaatttcatgcctactcctattactatttccattctattttattttgtaaccaaactttagtggctaaatataagaaaaaatttgaaactcacctttccttcactgctaattaatgcacactggggtagataatatatataacatatgtgtgtgtatatatagacacacacatctttacctttcgtttttttttttttatttttttttgagtacacacatctacttcgacggccaactaatacccgctaccagcaaaagcatataccaataatgatattatgttataagtgatcaccatgtcaatgtttctgacatttggaaaagaattgacttgaaaaattggttgagactttgagatacttattactatacatgtctgtgaacaatgcataataagggacaaacagttggaattaacgtaacacgttaataaagattttgcatttaattccaagtacaatcaatattaggtctaacttagctgtttatactaataaattctgtatagaaatggtggtcggccgcatagtcttttttaagtcattgtagaaaggttttggggtcttgattgttgattaagaccctttaaatacttttgatatttatgtataaatgccaattcgactttatattagcttatcgtgtcactgatagtgtaattaagcaatggtgtcacttgaaaattctgccaaatgtgagtgacataaattaaagaaagattcttttgatgtttgtattgatatgcataatgattattataactctgataatttatggtctttccctagtgacatatgaatatgagattttaatttactattttttataatttaattgtgctgcaaagcatttgtttggatttacgtattcgacagtgggaaagaaaattcataaccaatgttgagttgaactaccatgagatgtccactttggccatgtaagaatcgattcttactaacccttgtgattgaaacattatcattttaagtgtcttttaacagagtttttaatgttagtgagtagtggtctcattgaataaccatatttatttccatctcacctgtttttggaaaagataatataaagctagcaaaatcttaaagaacattttcaacaaaattgtttactattttgtttcttttctttttttttttatttaaaaaaactatgtatctctctcacgtgtgaaaggggttatagatttagaagaaagttaagatcatctttctagaccactcaaccttactggttaccacttaccagtcttaaatgcaactccgtactgattcagcgctttagtttgaatgtatactattttttttttcttatttccaactcataaatggaggcagttgagcgttaaatataagtaactataactcactgctatctttttatttacatctcatttggtttttgctggctctgatcacttcacaccaatcttctc

SEQ ID NO: 208493 - DNA, 881 bp, Cannabis indica
aggatgtcgtgtagtttgtatctggtctttgagtacatggagcatgatctagctggacttgttgcaagcccagatatcaaattcacagagccccaggttagcccaagattggattctaacatcaagttctactaactgttggtatatataatatgctattagttactcatgtgtatagtgatatctcattatttgatatgttattaggtcaaatgctacatgcatcaactactatctgggcttgagcactgtcacaaccgtggtgttcttcatcgtgacataaaaggatcaaatcttcttattgacaatgaaggagtacttaggattgctgattttggattggcatctttcttcgatccaaaccacaagcatcccatgactagtcgagtagtgactctatggtatcgacctccagaacttcttcttggggctactgattatggcgtgggtgtggacctgtggagtgcaggctgcattttggctgaattattggctgggaagcccataatgcctggtcgtacagaggtacttgacttttctgcttagatttgtaaggtttttcccttttcatttgcagtatggtatgtcaactagaggagaaataatcactctttgttcctccattgtgtagtcaaatatggttatgcaagagcgttatatagtcagtaggtggatgtagaagaatgagtgcatgtggcatgtgaagagtgagactttagaatctttcaaattattaggaaaaaattaattacgacctttttttttgactttgggggaggggggattcaaacttgggacctcctcttggtgaggagaagtgtggaacccctaggctatgcttatgaccacacgaccttttttttatgtcttgggcattttga

SEQ ID NO: 208494 - DNA, 1105 bp, Cannabis indica
gagagagagagagaataccgctacgttgatagccattttccagcgaattcgaagccgagaaccgttaaccttgatcttcgaaccagaaacttcatcaccaacatcggagggcgcagtctccgcctttcgggttgacacagagtctgcagaatccgatgtcgaatgaagatcggtccaacgagtgaagccagatctccaacaaaaacgtgcattgtggaatgttggtggagaagaagcaacattgatggtggaatcggagaacgacggagagaaagatgagactgactgagatgagaaataggggctagggattataaattttacttttaaaacatttagtcataaagtaacggttgtgactaaaaaatattgcaaaaaatagtagttgtgaccaaaagatggttagtagtgacaacacattaattcagtaactaaatgacaattggtcacagatttttagtcgtaaaaaattaattgttgtaattaaatatatttttagtcacaacattaaattgtcactttttacaaattataaaattttaaaattgtcacaaataattaattgtgactaaaatattatttgtcataagttgtgactaaaagatacatttagtcacaaattatttttgttgtgactaaaaattgtgactaaaagtcatgttttttgtagagctcattaaaataaacaactgaaaaattagtttatttttctcttttcatcatcatcttcttcttttctttttatatattttatattattttataatatattatactacttactaaatattattacaagtacctcacaaaatgtagaaaagtttttcgtcttaatgcttacaaacaacacttaaaatgaaaatccttttatttagcgaaaaatcatgtagacccatgatttcatttgacgttaaatatcgctacaaatgtttttctgtttacctatttttatactagctaggctacaaaaagctggcttcctcttgagtgagtgtgaaattaagcttggtttgtgtttcgatataaaaaacacaattataagatgaattgtagctgtaaatcctaatcttccttgctttatattcttagaatataaggtgaagtg

SEQ ID NO: 208495 - DNA, 1234 bp, Cannabis indica
tatatatatatatatatatatatatatatatatattgagaaggtaaaaaataccaatacaatctgttaataatgatgattgagagtacacataaaaatataaggttcattttcacaagaaagagggatatagtcaatgaaaaacttcgaacgttacatatataatataacatggtaaatatttatttatataaaatgaaaaggaagtgatgacatacgtaccaatagttgaacacttggtttctccatcaatggagtcaactgctgtcataacaaagataaaacgaagaagaaatgtgaagaacaagagagagtagaatagcattcggtaggaaagccttctggagcccactttcactttgatgaactctcttacccctttgcctggaaacactgtcacatgtctcaaacttggtgagatatgaagctgcatttttattttatcctattcctcttctttacaacacaatcacaacaccccaaaagaagaaaagactagtactacttttgtctctctctctctctctcacgtacgtttcttctcttttgttaattttgtgagagggtgttatttcatttagcaatggacaatggcaaaaatcaatcccaatagaaggactgagttcaactactgcaagaacctatgaatagaaatgctgtaaaaaaagaaatggttttgatgttgtttaaagtagctatctcttacctaaccttgcttagcatttgggctagactatcaaggtgtttgttctatatattattattttaaatttgtatatatatttttgaaggagtttattaatttagaggtgaagaaagttgttaaagagatagagacatgggactgagaagaaaggctgtgtttgtttgttggcttggtttttgaagaaggggaggttggaagagaagtaaattaatataaatttaattttttgtcaatatatttatatttataatttaaaatttgttataaaaataaggggttgtttggtactaccattgtttgcttggctttgcctccacatgaagtttttataaatttattttttgttagaaaacaatcttaaagactttggactttgacggaacagagtttctaaatggaaaacgacactacctctcttctcttcatttccatctctctatacgatgtgctgttagggaatagggacttttgatcgttggagtaaaaagtcaagaaacctcatattccatttctaccaaaaaatcaaaaa

SEQ ID NO: 208496 - DNA, 576 bp, Cannabis indica
atttcggacagtaggaacaacacaatccaacacctcattccaacttgtggcctcggcagtaaagagattttgatagtagtccaccataacagtatcaagtccagtatcccaatgtctcaagatgcccttagaatctttcaagctagaaatattattattctagtttctagctgaggctttagagtgaaagaacttactgttctggtttcccgcttgcagccatagctgtttagatctttgtctctaaaaaacctctctttgattaagaatagtaaagagctcctttttagcttcaaaaaacaactttttaccatcctcatctcttcttttcttaaactgcttcaattccctattgcatttctttatgcgtgtagagaagttaccaaaagtttcttttccccattgtcggagcgcacaaccacaaaggctaattttttgaactatatcaatcccccccattgaagaccaatgatccctaactatgccttcacaatcttggtgagaagtccaaatattttcaaacttgaaaggcctctcttgaacaacaatttctctgaacataacatccaagaggag

SEQ ID NO: 208497 - DNA, 3986 bp, Cannabis indica
aagtgtttctaattagcaatatttttttaagaaaattaattgtttcaaataagttatcttattattttattcgcacgtaattttttttttttttaaatataactgttttattaagtgctcctacccactacaccgatttttttctactgcaacactcatcttttactcctactcatactcatttcttcttcctctcttaatgcagagagatgcaagtttctatgaaatttttaccctcaccaaggtactaactccatctttttttttttgaagaaaagcgtggaatatattagcataaaatcagttagacctgtcggtcattacagaaaagattttcgggcaaggaggttggagccaacgttccaaacctctgatgggaaaaagcccacttggccacattatgggccgcaaaattacaaagtctactaacatgttcaaaactacaaccgataaaagagggagagattctgttacaaaaagagacatagttcgcaagctcccaacgggaatctttcccattgagggcattgatcactaccctcgaatcactctcaacaataatgaaatggaaacctagagtcctagccgcctctaaggctaaacagcacgccgccgcttccccacagagagcatcggcaaactccagtttagaagtcgtaacccagatcaccttgccaacgtgatcccttgcaaccacagctgcgcacatgctatccaaccctactttgatatcgcagttcaacttcaaccaatcctgaggaggaggacgccaaacatccgatgagcacaacttggggcaagggagtaagtaagcttggtgatctgcaaaagaaaaacgaatagtgtcaatgcatttaaaaatatcaacaaaactgttgttgtgtaccttttcattccgagtttgccagatcttatcaattattattgaagcataaaggaaagcctcctcaggttaatgcctttgctttttaggtcccataagaatttgacccaatcccacattctaataccagtatcatagatagggtagataccccaaggggttgacctccataagtgagaggcaaattcacaagacaggaaaagatgctccatggtttcgactgctattactccgcacaacgggcagctgttatcctcaataggaaattttcttgctattaccgcacggatagggagagccttagagagggtacacaaccaaagaaccttgagcctctcaaggattttactattccacaaggatggggcgacctcacaagaaatcactcgatctgtagcttgggccctataagctgatttgctagaaaagtaaccattagattctaagatccagaaccaattgtcctctccgatgcctgaaggattacctcctttcaaaatagccaaaatagtctcattatcaaacaagctgttaagtttttggatattccatcccccattgggcagcaggagatcagcgacttttaaatcctcattcagcaagggacctcttggccggggtaagaagcctttcttatgtgctatccaagggtcatgccaaacgttagtatccttaccatccattagtcgcttacaggcacccttgcgaataattgctcctgatttagtcacattcttccaaaaccacgagtccgaggctttcgggttgcaatccaaaaagggtctgcctttaagatatttggcttccaagatccgacaacataaggattggttacctgtcagagggttctacccctatttagccaggaaagcctggttcatttcttttgatttctggaaacccaaccaccctagggacttagggaggcacaatttgtcccatgcttttaggtacagcccatgattactcttctcagagccccaccagaagtcacgaaccaagccatcaatcttcgttgcaagacggttggagagcttagtagtttgcatagcatacataggaagagtaagacctaccgacttgataagcgtcgctcttcccgcttttgaaagagtcttagctttccaaccatgtaatttcgaagtcaggttatccagaatgaagttaaaatcagcatccttttgtctcgatctgaaaagagggaggcctaaatacttgacatttccttccggagatcctatacccagcatagccttgatcccttatttcatgctgttgggggtattcttactaaagaaaatggatgtcttcattttattcaccttctgaccagaccaggagcaaaacttctcaagacaatcccaatatcctttggcctcctctaaattggctttaccaaccagaatgaggtcatctgcgaagaagatatgggatataatagggcccccctactcagcctgatacgactaatagatctcttagcttgagcatcttccagtagcctagacaagatgtccgccgcccaaatgaagaggtattgagaaagggggtccccttgacgaagaccacgcgagggaataatctttccaaaggggcctctgttaaggcaaatgttgagggtggtggtagaaatacactgggaaacccaattccgaaattccgatggcaccccaaagcaatcaatgacatgatcaataaatctccaactcatcttatcataagctttcataaggtcaatctttatagcaaacaggccttctcttccttttttcctattaaacgagtggataatttcttgggcaatcacattattatcctgaatattcctccccggcacaaaggcggcttgagtagggcagatgagtctaggtaacactggcttgattctgttagcaataatcttggaaattaccttatataccacactgcatagagatattggtcgatactggctcggtctcttagggttctgaaccttaggaataaggacaatattggtagcattgacacatttgtgcatacgtcctgagtggaagaaatccaagaccgcttcgtagaagtcattctcaacagatccccaatagtgtttgaagaacaaaaccgacattccatctggtcccggcgctttgttattactcatggaaaacacggtggccttaatttcctcgcaggagggccgtctaatgagctcggcctggtcttccaaagaaagtctatcatggattaagtcgttgcaattcatctcaatgttagtctcgagccccgtgaaaattccttggaaaaattccatgaattcattgcctatatcctgtctcttattgatccacatattatttttgttgagaatgcactcaatggcatttcttctccctctgatagaggcagaaagaaagaagaacttagaacacttatcaccttctttcagccaagagaccctggccctttgtttccagtacaggtccttccgaacacgggcctcgttaagagagctacgcaaatttcattcagtctcccaatctctagagcccaccgggagcatttgaataagatccagtctcctttccagatcacgaatcagagtgtcaatttttccaaattgtgatctgttccaatgtaagagagcgactcgtgtagccccaattttcttgaagatccgggccggcccccagtggtaactaacagacttccaagcagaatccaccactaatctactcctttcatccctagtccaggcttcctcaaacttaaaattccttcgaattttatcctccaaacccccagaaagtagacacagaggacagtgatccgaatttgaggtctgggaagagcagagagccgcctttgggaaaagattaatccacgctccattagctagccctttgtccagggctgatttgacgtggttggatccagagcggtgattatcccaggtcagattgtctccctggatggccaggctgatcagacccctggaattcaccaagctggagattaccggaatgaattggtctctgcctttagatccaactcgttcagattcactcaggacaaagttcgtgtcacccaagatgagccacggtccgccaaatctgtcccctatctt

SEQ ID NO: 208498 - DNA, 1498 bp, Cannabis indica
ttgttcccatactctcccgatcactagctcaataagtaccttctcctcttcaagttgatcgactatgagttctagattgcctagaagtcacactagcctcttcacgctctgttcttttctcccgagagagatttgttgtattttctccatcagcgtacgtacgagtcctcgctctgtgggtttgggaagaatgctggttattcctagcaggtgatgtccattctcctggctgagttcgaagatcctcctcattttcatgagggatttctcgttcaccagtttccagttgtctcctttcgggttgttcatcctgattctcaaggagtgtctcattttccctaggttgttcttcccggtccttttcctgtctcttggttcatgagccacgaggtctgcctcgtggtctccttactccaggttaaggttgattttaagcgttcatcccctgtgccgccttcgtcgaggctgcctctcgttctaactcagcgtttcgacgctgcgcctcttccaggcagcatcttaggcggtgggtctccgtcttgtaagttctttctcccacatccacggttgagcccttcatccatcgtcttgggattctgaccattctcgcgctaagttctcctcgagcgtgttttccgagtactaggaccaacgtcgggttgagttttctggggacgtgtggttcgagtactgggaccatcctcaggttgggctctcctagaacgggttgtccttctggacggtggattagttgatctcctagagcccataggttcttttctagaatgatggttagtttcctcatgcggagtgggaatattctctggatttgcagccatgaaggagaaggcttttctttaaaagaatggaaggctttttctaagctttttttacagaggctttcgatgaaagcgccaaactgttaacgcagatttttgttaaccaaatttgagcctcacaattatgattcaatacagaaataacaaaaactatagaaaaaatgaaaatatgaacaccaggttttttacgtggttttgcagttaaaattatgcatagtccacgagtcaatcttattcagatttttgagtgttgttttttcagggaatgttgcgtaagagtttttttgtctcccttttttgagattgtttgccactatttataattgcatagtgacagttaattacaaagctgacccaaatgtaattacagtcattatcccttaaatcgtgggatctgactacacattacaaaatgtaaacgcggtgcatgatttggaaaatcattcagctgtggatttctcacttttactggatcaaaaatatcatgtattaaacacgtctttgattattgattctggagatgcctcgacagaaacttgattgtaatgatcctaatggcgagctggaaccactcttcttttcaggatggacaagatgtgtttcacgtcgatcgtagatataaggaattctactgaattgccagggttgtgagtctcgct

SEQ ID NO: 208499 - DNA, 1015 bp, Cannabis indica
tttattattaaaaataaaaaaagtttataactaataataaatcagcagtcctgtatgttatgactaaaaggtctgtaactaaagatattagtcacaaaagttataattcattgtgattaaatgtgtttttagtcaccatacttgttgtgaagacatatttaattacaaaaaatttatgttgtgattaaaaaattatcactaaaggtagttttttttagtgataaaatgtaaagttttttattttataactttgggatgatattatatctcaattaactcatgatattattgtttgtatataactggttcatatcttttgtctcggctagttttgtcttttcttttatttttagattggattaatctttttttttttttactaacatatccctatatatatataattaaggattattataaataatatagaataatatgaaatagaattgaagaaaataagaagaagatagagagagaaaaaaaaattgaatgagaatttttcagtactttattttaatagagtgatcccctatttatacaaatatgtaagctatagattaggaaactaagaagatgaataaaaattataatcaatggtaattaatagaaaaagattcgataatttggacatctatataaataatattttataactcccctttgtatgtccataataattacctcattaaaatttttatcataaaacctaatgtgacaaaaacttggtcaaggaaaaaagagtgcagtgtgaaataagtctccctcatttaagccttcttggaggtcttctaatcaataaattcggatcttgtgaaccatcttctcaaatattgatgttggtaataactttgtgaattatgcatgattgacacttaattgaatatgttggacacaaatatgcattctcttgaaatgtattagaagaatttagtgaagtgtgttttaattctatctccttcaatgtatgctccttttagttgacacatacatataatattatcttcatagagaattg

SEQ ID NO: 208500 - DNA, 1623 bp, Cannabis indica
tacaagcttacataataaaaagtttgcttctaaaaatcaaatggctatccttgcctgacatgccaagcagaggccatcattgaagaacgatggcgaccatgccaaaaggacatgggcactagctcttttacactagctcttactaatgagttggtgaactactactgaagagtagcattctgtaaactggtcactggtagtacttgcagaggtgctcctcattccaatatctttgtaggagaaccagctccatgttctcgttgtatcttcccaacttgtaggatctcttgctttttatctctgtaacttggttggggccttcccacttgggtctgaacactcctactgttggatctttcgtattcaagaacactctttcaagcaccaggtctcctatgaagaatttcttgtccttgacttgcttgttgaagtgccttgtaactttttgttggtaggcctgcaactttaggttggcttgatctctcctttcttctacttcatcaagggatcctgtcagtaggatattgtttgtatcctagtcataggttgtcctcttgtgagacggtggcaccagctctacaggcaacatcgcttcatagccataagctaaatcgaataaagtttgcccggtggtggtcttctcggtagtcctgtgcgaccaaaggacctttgggagcaattctgaccaatttccttttgcctcttcaagttactttttcaaagtgtccttaagggtcttgttaacagcttcaacctgcccatttgcttgaggatgggccacagtagagaagcttttgatgatgccatgtatgttgcaaaattcagtgaacatgtcattgtcaaactgctttccattgtctaacacaatcttctgtgaaagtctgaaccaacatatgatgttcttgacaataaagtcgaggactttcttagagtttattgttgccaagggttcaatttttgccaacttggtaaagtagtctacaacaaatatggcgtaatttacccctctttttcctttcatgagttgaccaatcatgtctatccccgacattgcgaagggccaaggaggttgcatcattgtgagctcattaggtggagctatggggatcttcgagaatctctagaacttgtcacatttttttaacatagtccatcgaattctcgatcattgttggccaaaagtacccctgtcaaagtatcttttttgataggctttgtccttgacatgattgccgcagaagccttcatgcacttctaccatcaaccactcagcttcagtcttggtgacacaccttaagagcggcattgagaagctttgtttgtacattgctctatctaggattagatacctagcagcctttcttcttatcttttttgcctcattcttattttctggcaagactccagtttggagataagatgtaacaggtgtcatccatgtttgttaaattctttaaggatggtaatgctcctttcctttgagaactgtattggcaccaggcttgccttgtcggcaatggtgctgcttgccagacggacaagtgcatctactgtggcattctattctctggggatctgccttattgtatagcctttaagatgacttagcaagtcttggatctt

SEQ ID NO: 208501 - DNA, 1058 bp, Cannabis indica
cgcagcctagccccgagacttggactcagtcctagaccgaactcgaacctcgatccgagtctcgactcgactcccgaattaggagctggacctggacccaaacagcgacccaaaacccagacacaaacacaggcataggccctacatgtactcagatcccaaccccagactcaatgtatatgtttattgcaagttatttatttaattaagtttattatttatttcaaatcacttagcttatagacctcgattaacgagattagtatgttgtaatcatgatatgtggcgttcttttgagaaggacgttacacgatcagaggccaaaaatatcacaatgagtttacttagtgatcttagtgagattattgaggtaagttggtgttagaaataccaggatattttgggatatttgaggttgaccaaatgtcctagggttagagatttcattgcggctaagaaatattataataatcttttcttaaataaattaattattttatttattctttttttctttcttttcttttagtttctttgtttttatgctgaaaaatatgtatgtatatattgataagcttaaacataaaagtcaaaagcaaaaacataaaccctctccttcttcttcttttctctcgagcaagtcaaaaaccaaagcaacaaacttttttttgatttgttctctgtccaagcagctcctcaacaccttaaggcagcaactaagagtaagcatcttgtagtggaagctaaggtaaggacttagttcttttttttcatgaaaagtttctacaagttaaattttggttttgtggttgctgggatataagtaagcttatggatttatatggctttatttctagggtgttttgggctacttttgatgctcatttgataggtttgcagttgtggggaggtgaaagtgaagtttgagtttttaagctcaaagcttgagctctcatggaaacttttgattaaaggcattattttgatttctgtcacgtaaagattattataatgatgtattatgattattctgtaaagtttggaatcatttggttagg

SEQ ID NO: 208502 - DNA, 571 bp, Cannabis indica
atgaccaaaatatccctagggtttaatttgaattttagtgcttgagggggggcaaattggtaatttggtgggattgggttttgtctttggtggccttatgtttaggctgaaatttaatttatttattatatagttagttaattaagtaggaaaacaaaaagaaaaacaaaaacaatttcttaactctctctctcctctctttcggctcaaaggaaaccaggagaaaaccctaaggagctcagcctattttcttcatttctttgttaattcttcaactctagataccatccaaagtttgaggtaagctttcttgttgttcttgagggttttagggttttaaagttaagtttaaagtaagttttgatgaattatgttctgcgtatgtgtgtgtttgtgagggcttgctgttagatgtttgtttagggttgtatgagctttaattttgagattttggggctgttaagctaagggttggttaggttgagttcaataatccaatgtcacttaacaattgtagatttgtgttattagtataattctgaatttttaatgcttagatatgttatattta

SEQ ID NO: 208503 - DNA, 766 bp, Cannabis indica
cattatcacataaatgtatgtaactatatgagttgttagccaattagctgagaaaattgtcatttataaatatatattattggtatgtatacttttcttttgtgaaagtaaatgtgaatgagactaaatctagaatcacgtggttgtgatatttttacttagttgcgctagctagaaatataaaaaatttcttgcattgcttagtgatttttccatagaaagcaatagtttttttagactcctactataatgataaatagtatttttaaaaattattaaaaaaatatgtatattttttataagtattttttttatttgggtccttaaaataagtgagccttaagcctagcccgctatgcctaaggccggctgtgcatagaacttaggggtgtgcagaaagtcatccgatccaattacaactgaccaatccaatcccaaccgatccaatagaatcggatatccaattataattggatcggatcggatacaaattttaaaaatccaatttggatgagacatccgatccaatgaataactgaactgaaccgatccaatccaatatcatccattgtccatccaattatatttaatatttataattttatatatttaattactgagtaaacatcatcttttgtgagattggaccatcaaagattaaactcaagagagtgattgattttatattttatattttatataaaatttgcatttgatgtattgtacttgtttattaagacttgtgcttattaaattagatttgtgt

SEQ ID NO: 208504 - DNA, 839 bp, Cannabis indica
caactactggtgttcttacacccctagacaatgaagagctaggtgagtacctagcacttacagagcacgctgtgaatattgtcctcacaagagaagaaggtggcgtacaacaccctgtataccacaatagaaaaaggctagtcgatgcagaaagtcgatacccactcatggagaagctgacctacaacttgctcttggcttccaaaaagttgaggccctacttccagcaacaccccataaaggtgtacaccgatcaaccacgatagcaggttttgtagaaacttgaagcatcaggccgactactcaaatgggccattaagcttggcgaattcgagatcacataccaacaaagaacagcaataaagggtcaagcctgtaaagagttcatggctaagtgcaccaactcaactcttgagacccctcaagcctcaggagaatagcaaaagccagagaagaagcgagagtaagagcagcaaataaatcccaaagatgtaacatcgaaactccatgttgacggaagctgcactgaccaattttccgttgcaggcattgcccttgcaacacctggaggcaacaactatacgaggcaatcaaatttaacttcaaagcctcaaataatgaggttgaatacaaagccctaatagctggcctcaagctggtacatgaagtacaggctgactaattgtacatattcagcaattcctaactagttgtgaatcaagtcatgagtgaatacacatcttgaggtgatagaatggtaacctagaaactcgagaccagactcctgtttggagaacatgtgtattcagttttcccagaaaagttgagatgtccatgag

SEQ ID NO: 208505 - DNA, 897 bp, Cannabis indica
aacctagccgctctaactcctcaccttctctactgttcttttctctctatcaggtaaaaaaaattgcactcctccctctatcctcatctatcatcggtagtaccaccaccaagtcctcgttattttcttcgtcaatcaccgctatgaccacctccttctatagtcaccaccacgatcactgctttcattagtcgttgccactaccattttccttagccgcccaccagctggaacaacaaggaagtgcaccactatgctcacgcctggtagcaagaaatcatctccatgtgagttgttctttttcattttttgctaaaaaatccccattttgagatgtggtatttttttctaaggttttattagttcatagtgtgatcttctttcatatatatttattttacttttttataatatcagatttgattttgagtgtagtattattgtgagagaatattattttgatgagattaaactataatatttttgagattacacaaacagtatattagaaatgtcttctcattcttttgttttttcttttatgtttttattttttttctcctcatatttcataaataatgtgtatttatttacatatttatataatatttctcattaaatattgtagcataaatcattagaaatcagtagcacaaacttggccaagataattttaaagctctttttgttatttatgaaaatatttattatatatgtgttttgtgtaagatttaatgtactatatgattattttgttattatttttaatattagttaaaataaaacattgtctgatgatttatatttagtgttattttactgaaatcttgatttttttttaggcatatacatgtatagacattgtatggtttagtgttattttaatgttagttgaaa

SEQ ID NO: 208506 - DNA, 937 bp, Cannabis indica
aaaggaatttttattcaaaaacgagcgagctacaaacaactaaaagccaaaactaacaaaacgacagttgtcgaaacaggcagcaaccacaccaaaaaaaactctaccaattcttaattaaattgagtaaatacaagtttctttggcaaaatttgaagggacctttactcataattctaagttgaacaactttcctaacttccaaactaagacttctaggagaagcacaagtcaactcaaagatgtaacggttcctattttttcacagctggtataaagtggttgttgtcaccatgtttaagacccgattttgaaggtctttcgccttgattctgctcctgctagttagatcagcaatcgaactaggccaaatataaactcccaatcaagagttcacctcctcaagaacctgtttagcaaatatacaactgaaaaaaaaaatatggtcatgagtttcaaactcagtttcacaaacagggcacatagtatggggagtttacaatctgccagtacacaaatttgtgcttagctagcagtaagttgtcccaaatagccctagcgtactcagctttaggctcctctaacaacatattgtagaacttttttgctctgagtcttgtacttgtcacagcaagcctcaacatggtttcatttgtactatcacgaagattcagcgacttcttaaagtaccagttggtgtctcgattctttgggaagctccatatgtccattcctttaagatagatagagtttatccactttacccacaaataatcttgtttgtgatagatagagtttatccacaagtaacattttgttgtgactaaaaagttgtcactaaaagtagttgttttttatagtgagatattgtaaacatgacattttctttgctatataagatgtgttgatgttatttatttaaagtaaatttatttag

SEQ ID NO: 208507 - DNA, 1109 bp, Cannabis indica
ttttttaaaaaaaaaaagtttgacaaaagggatcttaaagtaaaacgctaagcattgggagcagtaggggtagttggagtagtggattcatctgcgactttgctggcagcttcgtccacgacttcttcagtgtacgtagcatcaccatcctcgagaaaaagatttcctcctccgccttgagtatgcatgggtgacatggctcaaaaagtctcagccatttcagccgcctccgccgcaaggatcgagaagtcgaagtcttgaatcttcgaaagagttgtgtagatgtagtcagaaactgcctggtcatactgcttctttccattttccttctcgacctccaagacgcgggacatctcctctatctttgccttatcagccgcttcctattttagcttcttgactctctcctgaagctgggcattctgcctctttaacatttcaacttccttggagccagcagcaaaggccttcaagagcatggtcatggactacgaagccaactcaacagagcgaggcataagttccttaaaaggagttctctctaccttggacatgaaatcctcgcccacaaacttttcctgcagaactaggaaatcgcgagctcgaacagctggatcgatcacgacattcttccccttgtcctgcgtaggcttagctaacttcttggaggaattcgcggcaggagtaacgacgacaatgctttttctctttcgaggaatgataggagatgtggtcgttgttctggtttttggctggcggttgagaactggtgcggacttcaggaaagtcaattttgcaaggacaagaaaagaaaagttaaaataacaataaatttaaatgcattagtctatacatgcgatatgttacctgatgtcggccgagaagtctacttggaaaggcgtttgtctatcggctctttttgcttctcaaacggcaacttgtacactagctccctttgaaggctcgcgttctctggaattagcttatgttcccgtagctttaaggtcgtgcatagtagtctccagtcacgatcttgaacagggaggcttcagagaatttgaacggtctctatgcgggttgcgtctggtgcaggtcgagccggtctatct

SEQ ID NO: 208508 - DNA, 1363 bp, Cannabis indica
catcatcactttcctcacacgcgaggctcgcatcaacgactccaatctcaaccatcaacttcttcatctccaccttcttccccatcccaccccactatcccaaaaaacccaaaaaactaattaagcaaaataaaaaaaaatcgaaaaaaccctaaatcgatgtaccttgctctgaacctctcgctgtatctattctgctggccccccatctctggagatctgtgttgttaacctacagagagagagagagagagatgtgatcgagatcgagatcttgaagatagataaagatttttgtatttttcttcttattatccaaaaaagagacatggtgggagtatgcagtggtgaaagagagatgtgggtagtggtgggtggtgggttttggtggtcggtagagcgaatcggggctgggtaagttgggctgggagggaagaagaagaagaagaagtagaaaagaataaaaaaaaagttaataaattagtttttaaaataatttatttatttatttattttaaattattttcaatcaaaactacgacttccaacaagaaaatatctatacgtggtatttttaggagcaacaaacaaaataattacattgggtacatacgagaagctcgagtttgaagactattaccgtaattttttaaagttagggactcatctgcatcaaaataaatttttgggacttatgccttaatttaatatcagcatgtgtcattttaggagcaactaatagatttgttaaaatgaggaccaacaggcttacaaaaatctcgagcttggtaactattactgttaatttttgaggttggaaatttatctacatcaaaatagactttttttagagcatataacgttatttttcctttatgaattaaatttttatccattaaggaatatttctttctttttattaatttaaagaatatttagtagtatttctttctttctttctttttatttataaattctcataatatttctatttaactttatattatattttaatgtaatattagcatattattacatcttatattctaaaaataaacttatatatttttggaaaaaacattatgttatgcttttcaaatatgagtatatatatattcaattaatttatttattttctcaacttgtgtttaatgctaattttctttttaattaattttgagttcttttaaaataaaatgataattttttttttaaagtagatcttttctattatttagtttatctaatatgtaaaagattgttatctgctagttggttttgggtgtggaattttaggttacaacctcaattatctcaagcaaggtaaacgtaggtacaataatttttcattctcggggttatt

SEQ ID NO: 208509 - DNA, 914 bp, Cannabis indica
acctgtgcctgcacctggagagcttcctcagaggcttgatcagtagaagcgcatgcgatggtaccaccgtgttcagaattcgatgtctgggggtcaatggtggagtcgccatcattcttgtccttttgtggatccggaattggtaagttttcaggggttttgcaaactaccagggtgtcagtatcctcaagggggcaaacttcaccaactcccggcagggtgaccatcggaaatcgagatacccttagttcattcgtcgccggtagttcttccacgacctgttccaccaatcgtctctttccggggagttggcgccttgtctcccgtgcctcccaggaatcagcaatctggagagaggtattcatcttccattgttgtttaaacttttgatccaccgtgagacgtttttgaatgatccattcttcgaaccaagatggaagcgggcaagaaaagggtgatctcgctggctcctcatgcttcatccaggtaccaaacatagggaagtatgctccttgggaatccttgataacagtaggaggtttgaagcagaacttttgagagtgggatatgatgccacatttgaggcaaagtttgggtagcttttcatatttgaattgcatccaaaggtctttgatggtttcccgtttcataaagaagcctgagaataggggtttgtcaatgtcgatggtggcacggaatctaactgaacccatgccgaaggagcctcgctcaaagtcaatgtacctaggtagcttataatttggagagactttagcagcaagttcttcaagattggttttattccaatagaacggaggaatgctgctaattctaacccagatgggagtcttgtcgaactttacttctgatggagctagccaggacggccatggcataataacgagcaaggctcc

SEQ ID NO: 208510 - DNA, 507 bp, Cannabis indica
cagaatgcataatgtaccatacgttttgttatgtttatttttttctattttattatatctcattgaacttcctccaatagggtgaaactggcgcaaatgtattggttgggattcaggtaccaagttccgagatggatgagttccacagtcgagcagacggtgtgggatatgaatatatagtggtaaccaacgactgtgatttcagacttctgatgcattgattaacttataaagctaaaaaagcaaagacagcaatagaggagggtagtagaactagaaagaaaccctcttgatcaaaaagcgccgggtcatagtctttatgccacaaaatagttcccttcttcatcccaagttttgtattatcatttaaagttattatggtcatcaatatcaagggaaggacttttgttttttggtcatttttcttgttttagcccataacttctactgatcttgtgtcataaacgaatctactcccagatactttttctttctttttatgttatt

SEQ ID NO: 208511 - DNA, 583 bp, Cannabis indica
atacatttatataaagttacttcaggtttgacctaaaagatagcagatatatactatgttaatgcgtgtgacacaaatatatttccaccattgaatcatgcttatgatttgatatatatgaataagaaatggtatctaatttatcagtacaaatgaaatacacagctcgtgacaaatatactcattataatttatattatatgacttgtgacttgtgagtccttccaaagcgaaatgaatatataacttacataactctagtaaccagttaccatttcaaaagctatcccaattactgtgtcatgctttttatgtttgacatattggtaattcattaccactaaaaaaaatctaaaatccagttattttgttatgttttcagaaataattggaaaaattaatgacttgttattgttattgtgttttcaaatttgggcgaacgaataacaattattactctcaaacttcttatatctagttactatgtatgtttcttcagattttgggtaactagtaatgtttaccactgtgaaaattgtagacactagtaacttgttattacattgttattattttttttccc

SEQ ID NO: 208512 - DNA, 689 bp, Cannabis indica
aaagaaattgtccaatatttgaggcaccaaacaaagaggaatcaagagtaggtggacatcacactaatcaccaactttactacttttatgagtaatgtaatgatatgtataaattactcacaaagccaactaaaatcatctaaaatttaaaatagagttatttagtattatgtattttctttaaataatttagaacacaatacttttattggacaccaattgtgtctatcactttttaaaagtggcacttagcgattggttagtaatattcatagaattattatattaaattatataatactcaatacttagttgcattaatgatgatatgacaataagaaaaatactagacataattactaattagtttttaacatttctctttagtatcctttgcttttagaaaaacgctaaagggtactagtggtgcctaacaccctcttatgtgtcaatatcgctattgatctatctaactatcgggtcccatataatttaatataataatttttaggaagtatcgctagctaatcgcaacgttacatatcaagaaggtgctaggcaccactagtgcttaatagcaatgctcttgtttttaataactcatttgctatcttgtattttgaaatcataaatatttagtatattgaatttaaatttaatcaattaaattttattaatatgatcaaact

SEQ ID NO: 208513 - DNA, 637 bp, Cannabis indica
tttttttaaataaatcttatttttacattatagaatttcttgtctcattcttaaataaatgaagatgagactagagtgaagattaaaattcttaataggcatgagaatggaggaggactccccatttccctctcgtgtgcatcactaattgcaatcattaaagaatttatgaaacaatttaagatttttattttgaaacaatttaagatttaaaaatagaaaatcttatattttgacatttttgttttgaaatcagcatattttgacattaaaagaagggagattccaacttgaccttttttttagagaaaaaaagaaaagaaaaagagagagagatgtattatctttaagttatgcctatgattaacatgaacatatttaaggttttttgttttcttttcttgtgtgtaaatctaaaccgtctctgcatatattttaatgctaaaaatcaacttaactcacattttaaatattttattattattagtaaggtgcaaataaaattttgagagtattgttaggcttgttttttaaacgatatatcacatgcatacaataattctttttatttaaatcttataaataagtataaacaacacattctataattattatcggcctatgaacatgtgcaata

SEQ ID NO: 208514 - DNA, 1197 bp, Cannabis indica
gcttgtgataaggacaaaggccatgtttggggtaggaaaacgaaaatagggcagagcaagactaagatcgttgacagtaacttggtaaaagaagtggcagaacactcattgattgatatcccaaaagtatctattgatcctcttgttgaaaaaacctattgcaaataatcataatattttctctctttgtatgtcaaaaataagatacttatcaaacaccaaaaataagaaacataatatcaaccaaaacactacaaacaatataacatacacaaaccaatcataaaagtaaaacaccaagatttttacgtaaaaatctaaagcaaaaaaaaactatgggatcgtagtctactcaaatcatccactatcactaaagttcaataatgagattacaaagttcttttcgtaaaactagagactcacaataacatcaagattaaacaatattgaatcatcaatacaatcatcatcattatcttctcaaaatatggatacacaaagaaaaatttttggtctcaccaagtgaaaactgtagaagagcaccttagagagaacaatcgtcaaatcagaacggtagattgatagagcatcttgaaagaattcaccacccattacccaaaatttgagctaaagtagatgaaaaatcaaccatttaatcttcaatgcaaaataacaaaacccttttttcttttctttccctttctttttcttctactgctacttgttctccacacacacagtctactttcttctttttttttttctttctttctttttatgtttcatttagtttgggccttaagctcttaattggcaacaaatttcccactccacctcagttagtgggatcaactaaattcgctcttcgtctacaagctttaagcttttctttaggcaaaatctttgtcaacatatcagaaccattctcactggtaaatattttcgtttcacatcaaaacttatatttattcatttagagtattcctatcattcaattttcacatttcacattaagatcatgtttaacatgtaataaatacaaagatgaataaatcacacaatcaatgaaattaactaatattaactcatgaaataatctcagacaacatccatcaaatcccgaaattaggagtttaactcataatcaaatctataattaaactaggcatggataaaaaatataaaaaaatcaaagag

SEQ ID NO: 208515 - DNA, 969 bp, Cannabis indica
tgtaattttttgagactttactagttaatttctttctctgggcgtggtcccgtggactaagagtctacgaaagaacactgataccgcgtacaattttcttgtgtcaaataattttattttctgttagtattttaatttatgatattttatttctgattctagtttgtttctgcaaaactgtgttctgcagtgataaaattacattttgctgctacagtatttttacagttattgtgtaaaaaattattagtttttgcaaaaatacaatttttcagtacgaatattaattcaaattttaaaactaagtgggttgaagcatataacatcaatattttcacacgtgcaatttcagaaaatggagataattggagtatgggacaaaggcagctggtgagtgtgtgtgcctttgccaagtgctactcaaaagaagtaaaattttggagttagatgaagctagagataatctgattcagacaactcttagaaaacatttctataattattaaagtgaaaattcttcatttctataatagattgctcagcttgtagcagagtactctgttagatcaatttccaatgctgataattaaattctagttctataatctacttttttttttttttgtctttttcttacctggtaaagggtgtgtaagcatctatttatcctcttgtgttaacaaaatgtcagtatgattcaatatatcaatagtgtgttcattttgtgcattttcctagaaaagctctgtacttttgttttttcacttagtcgagaataaagtggtgtttggtttgttagacttttatttgggctttacattaaattttattggttttattaaaacttgggttgattggatagttcttttgctgtattagcccatgttgttggtgatcaattgttaatgggtttagcatctgtgagtaaagtctaggtgaagcagaagtgtgggcttttctagttgactg

SEQ ID NO: 208516 - DNA, 679 bp, Cannabis indica
caaattggagtgggtggtggattgttggtgggggtggtttttgggcagcaagaacgatgaggagtgaaagggaagcataggggatgacggtgtgatcttggagtagtctggctcaaacggatctgagaaaaagcgaagctcgaatggagggcgacgctgggttgaagagaaagggagaagctgaggatggtggcctggattttggggtgatgcgatggggttgttcagattggggttcaagcgagataggacagtgagtgggtaaggcaaaaatgatgactggagctagtggctatggaggttcaagcgtagaaggatgaagatgaagggaagagagaagagaagagtgaggctaagaatgaaaaaaataaaaagataaaataatttatttatcttttttttaaaaaaaaaataaattatttataaattaactttataatttggattgataatttctcagcatgtggcttttataaaatgaacaaacggatcagttaacttatggactgacacatttatgaaaattatgactttagagactattactagggtggagatagagacttatttgcatacgtagaactttttaaaaacgtatactgtaatatgaaggctggagctagtggctaacggaggtttaggcatagaaggatgaagatgaaggggagagagaagagaa

SEQ ID NO: 208517 - DNA, 807 bp, Cannabis indica
gtagaaaataaatctcttgtctcgaaatatggtgaaacaagcaaacaaataacatatatttttactaaaattcttgcttcgatcaattttatttctaagaaaattcttaggggtttgtatcaattaagtttgtattcgcaatggtgcttgtatttttttttttttttgcttggactttatgtacataatgttgttgtctttctttttgttccataaaaaagcttcaaactcaagagaattgcagattattattgctaatttttagtgcaatatatacaagtttagttcaggaaaagtatttcactcctcataggaatatttgagtacttcaaccaatgttatgtaagttaccattttcgaaggttaaaataaataaataaaatatgtgttcaagctccattggcataataaaactacctatctcaatgtgtaaaaatcttctctgagtaagttaatactatgtatttgggggttatgtagaggatacactacctttgaaaatgtctaccattgaggtagtgtgataatgtctccattggttatatgtactcaaaaaaagtctatttgacaaattggataatgttccttgctcacactttcacacacaaatgtttgacacatttttattataaaagaaatattatggaaaattgtcttataaaattgtcacatttagtttaaattgcttaaaatatttttagtgactaagaaaattctattcctccataacttgtatgttcttattgcattagactatagcttttaaaataaaagttttatattcttatgagtttgactatcaggaac

SEQ ID NO: 208518 - DNA, 1142 bp, Cannabis indica
gaaatcggccaacaacatcttggtttgagatgatgaaactaaaggcccttgccgaattacactcttaataacagctttcctattgatcattttatcaccaagcaagctttgataaaaagataagaatgagtgttgtacttgagctggatcatccactctaattccctctttgttttcaattgagagaattctattctgcctttgtcttgcccgaatactgttgtggaaaattgccgtgttttcatctccatctttcacccaattaagtttagctttttgttggagaaatgaattcagagctttatgtagctccacatattttattctgacatctagctctatgttgtgaagttcaagattgagtggatctctttggaggttctcctaacaatcatgtaaggcagcctttgcttgagcttttgctatttgaatgttggagaagctctgcttgttgagctctttgagagcccccttgagtgctttgagctttgataccacttgaaacatttttgtccctcttatcgtttgttgccaagtcttttttatgagctctggatattgcgaatgagatgaccacatacgaaagtcttgaatagttttctaccactttgtacttctggatgtacagttaatacagtcggtgtgtgatcaaataagccttcgttcaaaaatatcacttctgcattgctgaaagaaatcagccattgttggttagcaagtaccctatctattttggaataaactctgtcattgccttgttgcttgttgctccaagtgaagtaacttccactattttgacatcctcaagttggcacatctcaatacattctataaattcagctgctggtttgtagttaactatcttcccaattctctcttctttcatcacaatctcattgaagtcacccaacactatccacacttccttggttcgaattccttgtagatcctgccacaaaattttcctccctctatgtcattgaaagcatacacaaaggtagtgaaaaatttctattaaagaaaaactaaattaggtgtataattttaaattaaggttataggtgtaataacttcaattataaggttatatgtgaacttataccatacaattaacgatttatcacctttcatacattcacaat

SEQ ID NO: 208519 - DNA, 912 bp, Cannabis indica
tgatgggagggctatgtaggaaaattggaaatggtgagactacatctatttggtttcattcgtgggtgccgggtcccatacttcaaccccaaccacggcttgatgctacggaagggataagtttggtgagtaacttcatagaaaataattcgtggaaggaggagatggtgaggacatggttccaaccgacagatgcaagacgaatcctaaatattaccctttccaactcctctacaagggactcatggttatggctccctgaacaaaatggaaagttcagcataaagtcagcatacaaaataatcaaaactcttcatgacactccaagccaaaacaccaagtggagacgcatttggggaactactatgcataaccggcttaaaatggtttggtggagaatcttagcagactgccttctaactaggggtaagctcatgtttattctcaacctcaatgatacctcttgtccattatgctctctacaagtggaatactctttccatatcttttgggagtgcgaagttgcaagagcgctttggtttgggagcatctggaatattcgaacatcggaagtaaatgcatctaattgggaagagtggatggaatggttccacatgggagttaataggccagctcatactgacttcaatatgatattaagtggagctgccattatttttaaaaaaatctagcaggaaagaaatgcgcgagttcatcaaagcacgatcacaccgacacacatccttctccaaaggatcaatcgaaggctaatggaaatgtgtgagtttcacaatgcacaaccaccaattcacaacaaatggctccccccagcaggatggacaatgtgtaacactgatgtagccataggagaaaccttctcagttggggtagcagtgtttaggaatgaggaat

SEQ ID NO: 208520 - DNA, 900 bp, Cannabis indica
aaaaggggaacctttgtcattcagcaccatgaccggagaggtaagattgcagtccctcctttggtgccccaacaagccacacatataacaaaagtttcctaattcctcatatttgagttgaatccactggttaacttcattggaaagtttgaaaaaacaactgcaacacagcggcttgctaacatccacctccacctggacctgaatccatctcttccaagtgagaggctttgattcgtccagttcaatagacacaactttacccaccaaagtccccaacaagttagcattgactctggagaagtagtcatggggtagtgagtgaatttggacccaaaaacagatcgagttaaaagccaacaccttgacaccaaacccagaagacaacgagagaagcaccaacatatcccctttcacgcaccacggtctgtgctccaacactcgtttgctaatcgagccattctcaaacataaactgaaatgtgttggagccagcaagtaaaccatctgtaggctccactttaacctgagtttcctagatactggagcaagccttctccacatccttagcaataaatgttctggaggagagtattttgccaaagaggcaaattttagatagaaccttggtagtcaccacactgggggcaagtgaaatagatacctaatttaaggagatgcatctaccttgcttcccaccaaaatcgccaacaacctcatccattgtcataaatacaaaacaaacccagacaaaacaaagacaaacacaaagtcaaaagacccacacaaacaatcagttaactaggccaaaagacagtagaaccaacacccaacccacggacacagcaagaccccacagctgaaacaaaagccaaccccacaacccaccacaaagagggac

SEQ ID NO: 208521 - DNA, 662 bp, Cannabis indica
aaaaaataaaatgccatacaaaaaatataaatgccccttattagtttttaaaagttattttttatttttaaaaacgaaaaataatttttaattatgaagttaaactaagaaatatatcatagtttattcatgaaattattatatatttttattattaataaataaactattaattccacttgaaaaaaatattaagagcttgtttggtaggctgtaaaaaggtcatgaaaagtgcccactcttgactatagaccatgaattttagagctgaatacaaactttgactaatttgaggcaataaggaatttaactaagcattattggagtttccttcttccttataattaaccattttcttttctcaaaaaggcttgaagaacactaaaataagtaaaaatggagatctcccaatatttctcctgaaaaataaacaaaaacaaaaccaaacataaattcgaacaataaagtgataaaaatattaaaacacacactaaaatagactctaaaaatacataaaaataaacctaacaaattctccaaaatttatcatttactggccctccagtaaagaccaagttaaacaaacgaaaaagaaaaataacatcaaacgcataagtaagtcatcattgctatctataatacattgtctttcctttaaaatc

SEQ ID NO: 208522 - DNA, 868 bp, Cannabis indica
tatttaagaccaccaaatatagagatattgtattgtcatccttattttgcaaagcttggcaaacataatggcaattcgatcaagctccaatttcaatgaagtccattcggtggcacaacaacaacccgtgtaattgggtcgcgaaagtccatggtggacacttttggtgtggcactgtgttaaatttatgaaatagagtttatttttttttagattttatgttaatttagagtgttttagacttatttttgttatgttatttttattgtttaattcattttgtttagtttaatattaaattagtaaataacttgtattttgcggtggatgtttaaaaaatttattcttagtaatttttcatataatttttcttagaataacatgaaaaattaggtgtacaaaatctcttgggataccatgtattgacaaaatgtctttttttataaaagaagctcgacatagttcttataacactctttcgtatatcatgatcattcaaaattgttttcatcattgtatatctcatccgttgttatcaccgtatttcactaacttgctattattttatctcactaaattcttaactatgtacataaaataaatcaaacaatgaattaacattactaatattttatacaatttttctttgaatataatatgataagttaggtgtacgaacgggctgacctaactgtatttacaatttttttttagaatagaagcctgacatagctcgtataatacatttctgtgtatcccaatcatttaaaattgatataattattgtatattactcgttgtcattacatcattttatacatcatttggattattaaattataaagacatttgaattaaagcatacagt

SEQ ID NO: 208523 - DNA, 969 bp, Cannabis indica
aaataaaaagagaaagaaacacttacaatcataattgctaataattacagctgagggaatgtattgggaggatacttaagctagttctcctcaaccaaagaagagaacaaaggactggtgctattatcacctccaaacatatccctacaaaacaaaaaaaccaaaaataatattgagatataaattgaatagaaccatttaaaaactaacatacaaattcaaactttagagcataacacaatagaatagaattatactaacttacaaacacacacatatatataactcacaagtcaatacacaaaatttaatacttaatctatatatattgtacatgtcaatcaaatattaattattctacattacttcaaattaattataaattactctgcataataaacggaccactaaaaaagatggacttcatccaaaaaccacatatatcaatatatatatatacatactatatatatacatacacacagagagaacatttcgttcaacacaaaatataattaaacaattttacataatatggtcgaagaatgtacctttggtggagtttgcagggaaaagtttggcgatgcatagccgctaccaatttttgagtaaacaattgaggaagattgaagcggaggcagagaggaattgagtcggagaggttcatgtgagttgaaaaggataagaagaaaggaaggaagagatgtaattggactagattgaacagcctcttcgattggaactctacttccatctgtagcttctccggcgtctcctaaatcaaccgcacagtttccaaccacatcttagagaaccccgatctctgcagctcattcgagtcactcaccttactaactcaacttcgacccttgagcctaaaaggtaaatgtcactcctacaacgatttctctggcgagtttccggcatctataactcctctcgcccgactataccatctggatatctcat

SEQ ID NO: 208524 - DNA, 365 bp, Cannabis indica
aaaaatcatgattacccaataatgtgctttggcaattatattgttccccataaatgggaacatatacacaattaacagtaacataactggttttcactttgacaaataaattaatatagcacaaaagcaatgatagtcaaagaattcgatcataattatcccttcggaggaaaaaaagaaaagaaagaaaatatatagcttttagtacttaattaattactagctttttataataccatgtcgaattgtcgatccaattatgagacgaaaaaactattaacacatgcaatattatatattggcatgttcatatgtgatcattatttttttaagggaagttagaaaatattcaattttgatccaat

SEQ ID NO: 208525 - DNA, 1493 bp, Cannabis indica
tatatatttttttattattgttaggatatatatttttatgaatgttatatgtattttttgctatatgttatattaattttttgaataatatttacttttgatttttattatactgttattaacgtgacatgtaattttattagcatgttttatatttttattttttttaatgtatttttcttttatatcttcacatttacacatttttagataattttttcactttgcctctactattacaaaatttgtgaatgtattgaatttgattatcttcatcccaatccgtatatttaaagatagatatgccatattttgtgaagagtgaaacttcaatgtcccctttgaggcatcttcccggccaagttcattataaatggcttcttccattgaagcattggaatttgagcctcatgtttccaatgtccaatctcaaggaaaaaaatagccaataaataataaaaaaaaataaagagaaatacttaaccgtctttttagtatgatatcattattgctataagagaattgctaaaagtattaaaggtctataacactttcctcaatgtcatattgttattagtgtaattaagtttaagaaaataatttttaggcaatatcgctaactcattataaggtaccacctatgaaaggtgttgggcaacacttgtgcccaatagcaatgctcttaatgtaattaagtattgagtctcatataatttaagataataatttttcaagaagcgttagtgatgtctaacacctttagacatgtagcattgcattagttaagttattatatttaattatatgagatttgatacagttagaccaataatgatattcacacatagaaaagtactagacactatcagtaccttttagcatttcttttttaagaaatatcgctaactaattttactgtgtcacctctaaatctaagaactagtaatgtgaatatgaatactcaataataaactaatacaaatgatctccctctcacctcttaaatggtcctcttcttgttcttgtttttgttcttttatttgattctcactattatctttagaataaataaataataggatgtaagtttaagacaaaaaaaaaaaatcattctaggataaggacattgatattgaaataatttaaataaaatcttataggggtgctactcatgagtttaatattgtatattttaaaaaaaaaataaataaatcatcaacttttattaattgtaattattagagattacatgaaaaaaagaatcaagagaaatattattgataacacgattaacaacgataaaataagatgctcgagccaaaaaataaataatactatttgtaaatcgtctaataaaaataacaaaaacatcatctaactctgctaataacatcttatcatctaaaataatactcctaaaataaaataccatatgaataaaacttcataatacttgtataacggtaagattgtcggtttcaaccacgacctcc

SEQ ID NO: 208526 - DNA, 1416 bp, Cannabis indica
tcaacattgtctgtcatccacaacaatcttatcattctcactcaatggtgaaggtacgagttatgtcacaccaacaagaggtcttcggtagggggatccccttttcccttatcttttcttgatctattctgaggaactttcaagtttactacaaaaagaggaagtgactggtaatcttcatggtttatgcattactagaaacgcaccttcagttttacacttactttttgtggatgatagcctattattctattaaacccacgaaggcgtcgactttggcaattcaatgggccttggacatttaccatcgagcttcaggccaaatgctaaacaatcaaaaatcaattatgtccttctctccaaataccctagatgccgcccaagccttctttcaatagactttacaaataccaattagtgagtgccatgagcgttatctaggattgctttcttattcaggtcgagctaaaaaagagttattcagaaacatcaaagagcgtgtttggaaattgatgcatgcttataatgaaaaaatgttctccattggtggaaaagaggtgctacttaaaacggtagttcaatcaataccaacatttactatgagttgctttcgtctcacaaaaatcttttgtcaacagttagaaagtataatagctaatttttggtggggttctagaaaagatggcatgaaaatactttagagaagatagaaattgttatgtaaatcgaaatttgagggtggcatgggatttcgatcttttgtacattacaaccaagctctcttagctaagcaagcctggagaatctttgaaatgcctaatactttgttgagccatttattgaaatacaggtgctttcttaataatacatttttggaagcaaggttaggacacacaccttctctcacatggcaaagcattcattggggtcgtgagcttcttgttcaaggactacgatacaaagttggaaatggtaccatatacattgtggattagacaaatggatacctggttatactgagtttaagcctattgcctacaacgagccataccttgcttgttgcccatttcatcacggctgaaaggaattggaacttggagttactcaaggattattttggacaattggacattgatagaattgtcataattcctttaagcttcttcccttccaatgatggactaatttggcatcacacaaccactggcatgtatatagttaagttaggattccattagcttcaagcttagaagaagaacaacattcatcctccttggacttatacagaaattagtgaaaaactttttaaaatttgatactaccatcaaagattaaaatttttacatagaaagtactgcacaatgcaatcccaacggctgctgcacttcaccggtggaaggtaattgactcaacttc

SEQ ID NO: 208527 - DNA, 517 bp, Cannabis indica
agtgttatccatgtaggttataaatgtatttctaaaaatttattactttacgatcaaacagtgagacaatacaccatccatcaactataaatcatgataacacattaatacaaaaaaaattatttactaagtaattttagctggttaaattaaaaatataacacgtgaaaaacgtacatataaaacaaatatacataccagtttccttccaaacccgttacaagcgagcccgtagattaatactccagctccaccaatgtcgccaaaagtttttgcaaagtcaaaaacataaaactagcagcattaatatttgattttagtttctaagaaaacttcaaggaaataataaaagcaaattagttgagagttgtaccgagaatcctatatggatcgaacccatacaaataataacgacgtacaataaaaggaaagcccaacgtaggagttccatatgcctaagtttaattgcttttattagaatgtgcatttaatttgatgtacttttaattgagacttt

SEQ ID NO: 208528 - DNA, 1056 bp, Cannabis indica
atgcatttgtgcatgcatgtttccgtttttttactttttttttttaaaaaaaaaaaaagtagatatatcatcgatatgaacctgcacagtatataataatatatatacagcaggtaactcacgactaattatgaatgaagatgatagatatattaatatattaattcataatgatagataatacgatcgttgtagactaaacacatatatatatggaccattaattaaaaacaataataatatgatgatgatagaataatataagacatgtcagttgctgggtttactgcgaaacgatcccaatgctttaatggttgatgctctcaacacatattggtgatataatgctgcagccaatgctccaatgaatggtccaacccagaaatccactactcaccacacaaaacaaattaaactcaatatatcatacaaaaataattatacatatcatttattaattagagtaaatatatatatatatatatatatataataacctgatcattccaagctttttcattgttgaaaatcactgcagcgccaaagctcctagcagggttgatgccagtaccagtaatagggatggtggccaagtgaaccataaacacagcaaacccaattggtaagggagccaaaacctgtggtcatgaacatgaacacataatgcaatgtgaacatttgtccaaaattgagattaatttgaatttggagagagtacttacagggacgtgggagtcacgtgcgcttctctttgggtcggtggctgagaaaacggtgtaaacaagcacaaaagtaccaagtatttcagcgctcaaagcagtcccatttgagtagccagtggcaacggtattggccccacctccgaaggtattgtactcgtgcttcatgaaccctttcactaatcccacgccgcatatggctcccaagcactgcgcaaccatgtacgccacagctctcgcaagcgacacctttctcgccacgaacagccccagtgttacggctgggttgatatgaccacctattcattacacaaaaaaaaaatgttatataggtctg

SEQ ID NO: 208529 - DNA, 574 bp, Cannabis indica
tgatagatatcaagatacatataaataacgagggtagaaataatttattaaggggaagggtagagtagagataattaaggagcgtgatttagttgataaaggaaaagtttgtgcagtgattaataagggtatatatattgtcgggaccggagtcgatgacttaattaattaattcttttatttattttaatcggtggttggatggaacactgtctttccataatccatgcaatgcaagtggaaaagtaattactttaatcatcagattagattatacaaaagtgaaagaaaagtgggaaaagtatttgttttggctcttttaatattatatatataaatattattgtgcgtggctttttttttattttcattgaataaagattctgaaataatagggggtattttaaggtcttaagtatgataagctttttgattaaataaaagaattttcatgaaattttaattttttggtagggtaaattttttttaaagatactgtatttttataatgtgtattgtattaactgttaagttttatctgttttttactgttgttttttagttattccattat

SEQ ID NO: 208530 - DNA, 560 bp, Cannabis indica
atatatatatatatatcagtattaatatatgaaatgaaactgtatgaattgattgagagagtgagaagtcgtgtgagctgtgaggtgagtcagacttattgcaataatacgtacaaagtcttaagcttactttccccaaaagaataattattatcacataaagggtactgtttcaattttttgattgactttatgtattaatgttatgtgtacgtgtatgatgtcttttgtcggctgcaaccgtggttcttcgattgaccaaacgtgtatattaatctcatgattctcatgcatagccattagccatatatatgtagttggctcttttcaaattcaccctttatatatgtattaattaattttggtgtacttccaacaaaagaataaattattggtaattgtttttttggaatctgtttaaaaaaataaatcatattaaatttacaacaacttcattaatgaatacttaaactaaccaatagtttttagacttagtaatgaatagtctttctttttaatatgaataattaagtatcattaatattaatttttttttaaaa

SEQ ID NO: 208531 - DNA, 1008 bp, Cannabis indica
tggtgaagtgactagtgcaggggcagacactgcttctgtaacagggacaacaacatcttcagactccatttcatcagattctgattcaggatcagcaggagcaggaaaagattcatcagactcatcagtttaggacttagattcttcttctttgggctcacattcaaaaaaagatggtgatgaagatggagatggaggatgagcctttaatttcttccttatagaagatggagatgaagaagtgttcaaaattaattttctttgtggggctaactcatttttctttgatcgacttggcttcataggtaatttgagaagcccagttgtagcaccaacaacatttgaagaagatgaacccaatttagcatttgccctagccaccactgagggttcaatgggaaaatagtcaacattttttactcgagatggcaccaccacatcagatggtggtgcattgactccaatatcagaggtaatgtcttgaaacaccatgggatgctcattagagaaaggaaacgctttcttgcaagccttggtgttggtggtgcgaccaacagaggtagccggagctgacgcaagtggcagttaagtcgaaattgaagcctgaggtgattgtgatggtcggactttagatgcagcaaaggccttggacgatgatcctcttcgggtcttcaccatttttcctttttgcaaagaactgaaactcaagcaactcacacacaattttagagagaaagcacaatgaagaagaagagaatagaaatcgtgtgggtaagagaatgtgggtgagaaattttaataagacaagacataccttttttgaaattaaccaccataaagtagccttttttttcaaatgaacaaaaaaaggaaacttaaaacaagtacccactcacacacgatcaaccaacaagttatgcctttttctttttttttttttattaaaaagtaatttgtcaacaaaaaaaaaactaagaaaaaaaaacaataattttttttcgaaaaaag

SEQ ID NO: 208532 - DNA, 1058 bp, Cannabis indica
ttttttttcaattttatcagtacatattactgttttaaatttatttaaaaaaaacatttaaaataactgatacttacatgttttttgtctagacctaattatttaaaattttaatattatatatatatatcatatttaagacaataataaagtttatacaaaattaaaaaatatatataattttataaaaattaaatactaaaaataaatattgaattttttttaagactttatatttacccttttaagatttgttaaaaaaaattagaggaatccttattacaacctcttagtcaacctccacgtttgaaatcacgtgccgaaatattttttttcatagcgatatttgttatagttacagtatcattcctataaatttttgaaaaattccaaatagtttacagtaccgaaaatagagttcctgatattctaatttactagcgcgttcaaaaaacttcaaatgtatttttaacactgtaaattattagaaaattttcaaaaattaacaaaaataatattgtaagtataacgaacactctcgtgaaaaaaaaaattaaaaatatcccgatatatatttttgaaagtatatacaaaaagttcatgtagcactcctaaataaattactcgaacaaaaaaaacattatctttaaaagagaaacaatggaagctttctcccttctccactctcaggcgaagcgcgtggaataattctcataattatctgtcaataacgacgacaataattttatttttaaagaaaaaggaaacaaatcttatcatatcatcatctacttcagacaaaaattgtgagaagaaattataattataaatataattttttttcttaaaaataaagaatatcttaatgttataataatattcctatatataatacggtgcgtttggtttggtttggtttggataggcgtgtgaagttaaaattggacgatgggatgcgtgcctgcatggggaactgcgaaaattaaaaccataatttgttatctcattctcatctataataaaacaaaaaactcaaacactcaaattatttatcaata

SEQ ID NO: 208533 - DNA, 1899 bp, Cannabis indica
tcaactatgacctttgtagagttctagttgttgaaccttttttgttacaaaacttttcccaactatacaaaacgttgcaaatacctacttcagttaaattctgctaattttaaaataatttgcttaagtgaccatgagtcacaagagagtctgtaataactttaaaccagttgaaatcctgtttatttgtattaaacatatatattctaactccaaaaaatgcatatatatatttgttctcataattcatcattaaactactatttatgtatttatttttcatcaaaactcttgaagcgtattaaaattaatgtcatgttagtgctaaatcaacaaattgttcaaagaaatgagtaaaatgtaattgcaaaggattatttgcggcaaattatatagctgaggggactttatgcaacataaaaaggttcagggagcaaaactctacaagggtcatagttcagggagaataataaatatctatttatttattttgcattaattagaaacaaaagtaacactaaccatcaccagatggtggatgtgaagttaagtcaagttgtccatctccaacagcttgacatctctaaaaccaacacaaaatttgtttgagttgaatggcataatatcacatatttagaaataagcaatatacagaaattaacatacctgagtatgagcttgggtttgagtttgagtttgagtatgaatcccaagtattagttttggttttggacatgaaagggatagtgtgtggtgtggtggtacaaatccaagagcaaaggctgaaattgaagccatcagagtacttgttctgtctacctaaaagggttagttaatatgaattagaaatccaaattcttgatgtgaaaatgtgtttaatagaaaacccaattggttattctttcatcaatagtttatttaagctaaacaacaaagcctagcttaacttgacaagtgaccactcaactcactcaatcatcttctgtttctaataaaatacaatgaacacgatgaaaagctactaactataaccaatttacacacacacacatttttatcaaacagtatataatcaaacacaaacaatatacaaaaatacaaacagttaaaaatgacaagtgacaagaaattacgaaccaacaaaaaaaaaaacagaagaaaattacaaaattaccaaccagatatgatgaacacagcaagattgtgagtgtagcagctgcttaagcttgaagtgttctcagaggtaagaggatgaagatgagggaagaacggtaaccggaaacagaaactacaagaacatgtaaatggttttttttttttattatttattattttggatttatatcaataaaggtcctccaatatcataaaacattacacttagatcctcgaattttattttatatcatttaagtccccaaatgcactaaaatatgtactaaaatcctttataaaaaaatgtactaaaatgttacatctaaatgacgtgtattgttttttttttaaaaaaatagtaaatttaaataaatataattagttaaaaaaatattatataaatttttaatctgtacacatattattattaattttatagatgcttaaaaaaataaagttatatcataattattaagtcatataatagtaataattacacaatttaataattatttttaattacatctaaatctaattctaccataatttttcaaatgcaccttatttaatgtaacaagtattctaaaatataaatattttgatgttttacaaaagagttaataatatcttcttattttcaattacatggttacattcaattccaattacaagctaaattttcaaaggcaagcttaattaatttgggggacataagtgaaacaaaataacatttagagacctaaa

SEQ ID NO: 208534 - DNA, 842 bp, Cannabis indica
aaaaacagatgggagtgagtatctacagaatcccccacacaccaaacagtcagtaacttgaaccaccccaaaccgattcaatctgtccctcgtagataacgctgatgcaaggctaaacaagctaagaaacgatgtttgggagtacaaaatctgtcccgaattaaggcataagactagccatgaggaccactctgctgcaatcttattcagcttgtcctttttgtatttcacaactctaactgataatatgtttgtatttttctcaacagttggatggaaacagtcatgtgatatatgcagaggaagaagcagctggaactcgacttctcatcgatggaagaacatgcttgcttcaggttccccaccattcacttcttccaaacaatttcttttagtttccttaagaaatacttactaaacatgataacattaactgtaaattgttcttttgcaactagaatgatcacgacccgtctaagctcatagccgagataccatgcaaactgatgaggtattcggttcctgatggtagtcatgttgctgctgatacaccttatgcagaggtcgaagttatgaagatgtgtatgcctctactttcacctgcttcgggtattattcgatttaaaatgtctgaaggtcaagcaatacaggtaaaattatgttatgttccaaacaaagatatcaatgaattatgacttgtatagaagttaaaacagttactatttttgttaggcgggtgagcttatagcaagacttgatttagatgatccttcagctgtgagaaaggcagaacctttcattgggactttccctatcttaggacctccaacaacaatttccaa

SEQ ID NO: 208535 - DNA, 924 bp, Cannabis indica
ataagaacataatactctctcaacttgtctaaatctatatttataatggtttatttatatatttatcattcatcgatgatcagatattttatcgttaaaatattggaagatgttgaatgatcgtaatatcctacctaagctgcccccatgcaagagcctgatttcggaaaatttgtggtatcatatcaagccaggtgttggtgtgcccatgatagccatagcttcaaaggagagaaagtacaaaagcaactaggcaaaattccataatataggtgtgtaaaaattgagcaacgctatcttcttcccgaaaattgtataagctcattgattataaaaaaagaagtatttcttgacatagctacataatacaagtatgctctcgttcattttggaaaatttagtccaaataacaaaaatggtaagaatattcagatgtttgacactctaggcttaactataagcagccacatcattctaaaaagtagcgagtagtccaaaattctcaactaaataacgagtagtcaaaagatctctgtttttttcgttgggagaggacatattcgaacttaggatctcacaaagatttcatttttgtgaagaggggtatagtacactatgtctatgaccaccaaaagacttcttttttaactacaaaatcctattgctcgctctatttgtacacaccaaaatgcaaaaacaatactcatgaacctacagcaacaaaacatgctcaacctatatttgatcatgaccatgaaccagcttcaaaccccagctcatgtcctcacaatgcctcacatgaggaaccaaggctccagtatcaattcctttttttgccttacagtcatagaaaggaggtgcgtggaaacagggctccattgacatggctcgacggcatgggggatcaggggctttcgcgttttc

SEQ ID NO: 208536 - DNA, 1036 bp, Cannabis indica
atttttgaattttcataactaaaactcaattgctaagccaatgttgcaacacaggtgttattgtcagaactccttagtctctcttgggagggtgttgatggggtgataccatcagagatgttgattcagattatgatgtggcattgattgtttcaaagaatttatatcccaacaagttgattgaaatacatcacttgtgtttacattgccactgtttcaatctttttcttttactgctgctctctactctttattagtttttctttacagattttgttttctgatttcatttgctaagtatttcccaaaccaaccaattaagtaaaatactattcttaagaacattattataatataagtcttgctcaaattaatgccaagcatggattgcctaagtgtaatgtttgtgtgttgctcaaatcaataaactgtaactttattataataataataataataataatttcaagcattgttagtgttgttattcatattgatcaaatcaataaaggatacagcttttcacgttttcacaaatataacaagttggtctgtaagttagaaatttgggaccatttgcaaaggcactaaaatagtgtgttatatattattataatcttttgctaaaatttataccaaattgaaaaaccaaagttgctttttgagataaaattatagcaataagacaaataaatacaggctgtataactaacttatatcaaagaggacaattagtattataaagtgaggatattataaaagttgtaccaatattgtcagattaaataacattggatgaatagtaattatgaaaagaagtaagcatgtgctaatctgatagtgattaccataatttatatggcaataaaatattataacattgaaatcaaaagaagcattagataccatcgtttccattacttacctcattctttgactactcttttcctctcagtctctcctatagagcttcctctctgaatctttgactattgggtgtagtaactgagctcgttaccgatggctgagcttgtga

SEQ ID NO: 208537 - DNA, 1004 bp, Cannabis indica
tcttattatatagctgaaaagtcttactcagagagagcacatggacatgtgataaaaaataagaacaccatgtgaacactgctggaaagactgactctatacacaacaaacacagaagaaaagacagagagagagagagagaaattgaaagaaagttgtatgtgaaggaatcagttactcttagaataattctaattacataaatacaaaagttccaatcattgttcaaataacttctacatactttcccttgagtctctctcactcatcatcatcatcaatgtttcccaacatagttttctctctctctctctcatactaaaggtctcaactttcttcaaaatttgctaaatttaacacaaatgttattactacaaatcaatactttcattacccacaacatatatagtaaaaaaaatacatttttttttaataataatcaccatacaaattcttccactaatagtatcccacttttgctctaatgggaccctttttttttctttatgtaataacactaatatacacatatttagtatatataatatatatataaaaaaaacaataatatatatggctttctaagaaattatactctaagtttttttatacgatgttatatattatagttataacagatgtatatttttaaaaaattctgaataatttattatgacaaaaataaaattcaaaacagtttattgtcacgcgtacaactaactgtttgaattctattttcaacactgtaaattattcaaaaaaatttcaaaaacaatcagtatatctagtataactataacgtacaccatcatattaaaaaaattaatttattatttctctatataccgaaaacaataaagagcaaaagcgacgcctctgatacctacctaagaacttttctatatgtattatcatttcgagatagaatcgtctgagaaagcaaaagaacaattagacgaaccatgtgaaatcatcttcctagtaggagattgagtttgttgtga

SEQ ID NO: 208538 - DNA, 1169 bp, Cannabis indica
ttttttttttttttacgaaaaaaccttccctaatttttcagattatgaattttggtttaaatatacactttggtggtcttggtagatgggtggactatgtaaggactgttttggtattttgaggttttttaaggatagaattgtctatttgggtcaaggtttacccgttacatttttgtttatcttacttgactgtcacctttaatggtatagaatccaattattcaatgccacgtgtatgacaaaattgtattaatttattgagaaacaaaaaatctaataacatttgttaaaaaaaatgtaataacattaattgatttattttgtaataataaaattataagagatttgatttctttttttttgacaaagtgattagaattatgaatttacaactttcacgttcatcaccaacgctagaacctcctcatcgtctaactgcagagtatgctttgtcaatcatgggctgctaaaatcttagagcacatttagataagaatgataagaatgttagataaggtgcctcttaacataaccctttcttctttagcaaaatagcattgttattgagtatgtttagcacatttaaatatgttaccttgcgattgattatcgatattctctaaaagctatttcaatacttaattggaccaataaaaatattaacacataagaaaatgttatgtattactgatgcattttaatatttctcatagcaaaatgctaaaattatggataatgtaatagaagagtgggagtgagacctattttttttctctaatttttatatataaatgaatttcaaaaaataattaaagcattgtgtgatattattatttttatttatgtaaatataattgaaaagcaagagaaataaaagaattaaatccataaattaaaagataagaatgatgacttgttggtgtaaagaaggttaagtggaagcgggtgtaggtgattataacttttggtggttggtgagggatattgtgagggtggtgggaagaattggaggggaatgggtgaggtggggctcaccgtacaggtttgaccgaaagccacaaagtagttgccacgtaagaccgcttacctaacacaaagggaaggagtttcactactgttttaagtaactttactaattgtagggagtagatgacaacactcaccta

SEQ ID NO: 208539 - DNA, 1200 bp, Cannabis indica
aaaatttctcaatgcttactctccagtaagttgactcttatttatacaaaaatatagaaaaaaaaagaaaactaaattaataaaatcaaaaaatacaattatatttatgataataattgatttgtgtgatttgagcatttatatatataatatttcataacattaaaattaaaagatatataaaataaataaaatttgtgagacaaattaagtagctagctttctaaagagcattgttatattatatagagtattaatagtgttcaatacaactccaatctacactttcataattagtaattttttataaaaaattattaaattaatatatattgaatgccatatttaattgcacaaaaaacaaaatttgtgacagaattaataagttggtagctttctaaagagggttgttatttatacactacaatcgatctacattttttttttatcaaaactacaatctacagtttaatagttagtaatttttttaaaaaattattaaattaaaatatattaaacgccatatttaattatactgaacacttttagattttttcaaacaatacatattattataatataataccctaacaggctaagccaaagaaaaaaaaattattgttaattaattttgttttacttattcctagctgagctctcgttttaaatttgtttgagtctctttctctttctttttaatataataatatataatataatatatatactattaatttttcttcttctacttctcttcttcttacttagtgctttgctttctttggttttccttttctctctctctctctttcctctcttgtataattttatcatatgttccataattaaaacacataatcgatccttgtattacaaaaaaaaaaaaaaaatacatataatccttcgttttcataattatagtccctcagtttcatcatcttcttcgtataccctaatatacacagcacataaacatatatatatatatatatatatatacacatataagatatcattccagtactgaatatataattttctcttcgattcccgttcttcatagataaagttgcatatagagtgcttaataaaactcagctgatcttattattaggttttcctgaagtgaattgattctgtttgttttagctgttgtagcttgttcttgaattaatatacaacagaattggtagtctggct

SEQ ID NO: 208540 - DNA, 538 bp, Cannabis indica
tatgtatacatatttatataaatgtcatttttctatccaatggttcaagtagtcaacatggtgaattagttctaataatttttttttccttatttggatcgatctaagctaaacatgattaatttccaattgactagaaattaaaacacattaagtaaaacacatgtacatgttttctaaaatctaatgattaagtctcaacacagcctagctaagcatgtcattaattattttgccagatcataatctctcttgattaattttataatttatttaattatttttaatattttataattaatatataattatcattaatttgtactaccaaatctatatatatggtcaagaatggagtatatatatgaatattattaattaagatgttcgtgtgtacaaataataattaatatatatcaacaaaatatctatatatatatatgcttatatcacatggaagtaaaaaaaaaaaacagagcaccataatatgagctaataagatccaaaataaatgagtttttgtttttattttctttta

SEQ ID NO: 208541 - DNA, 854 bp, Cannabis indica
tgaacacttgacacacactccacaatgtcatctttcatgcctagtagaggattattttttttttacatcgtgatacatctcagttgttcttgagtgtaaagagtatggtataggatgagactcatctagaatcttctatttgatatccttatcgaccggtacacaaaccctgtccttttatcgtaaaatccctttagacaaaatttgaaagtcctttgccgacctagattcaagtcttttccttgtacccctgtagctcggagtcaccctgctgggccattttgattctttctattacatcagactatagtgtgattctaacaagttctccaatcacaaattcaatccccactctagttaaatcttcatccaactttagtgaaatcatgtcttacacctctccaaattaaagcacccatcatcaattttctttcctagattggtagagaatctcacggttataatctttaactagctctaaccattgttactgttttataattaaatcatcccaagagataaagtatttgaggttcttgtaatctgtgtaaacttcgcgcatttaccagatgtgtaaaatgcaaaacttccaagggaaaagccattgctatcaattcaatatcataactggaataccatgctaacacttcttcaattgtttaagaataccacattatatcacaaatttatcctcactgactggaaatgttaatactggtgcaataattaattctgtttttaattaaattttgtttcaaatcattcgacttaatccttctaagagcgtagaaatcctaaaacaaacatcttgtagcttccagtcaatcccagtaaacctctaaccatcactgcaa

SEQ ID NO: 208542 - DNA, 611 bp, Cannabis indica
taactaaaaagatagtgtagatagaaaaaaaaaaaattgataaattgtaaatttcttaccttaattgtttacatataatcatataaaaagataataccagttgaaagcaattttttgaactttacagtacaataaaaataaatttaaacaaaaaaaataatgtagcagaatattaaaacttatcttaataacacaatatttaggctaatcagtccatattcaattcaatcatgttataaaaaagttcatcatctattttatctaatcgtaccaatcacatccaacaagtattgtccatcttttaaataataaataataatagtaatgattaaattttatgtagactaaaatgatgagtaagaataaaacaaaatatgcttatcagtcctttcacagattgcttttccaaattgttgtacacacctttcttcaattcagacttttttaggattccaattttttcaggtttttcaattgactatgcaatatcaatgtgagcaaatgataatacatattaatattttattttagtaaaagaaacagaacggaaatagaaagaaacggagctgttagttatttggaaaatagatgtcttcactctctctctctct

SEQ ID NO: 208543 - DNA, 912 bp, Cannabis indica
tttttaaaaaatattttcactttgtcacttttaaaaaccgaaaattaattaaaagtgttactaaacgtcacctttacatttgtatttttccaactattatttatatttttcatgcagttttcagattctaaatttggatcttaagacttaaactacacaatgaattggatatttcaattaattattaatttaattattatatataaatactataaaacgtctaattaaacttgtacatatataatattccaaaagatcagaaacgtactgtcattaaaattgatggaatattaatgaagaaaatatatatttgtaaatttaatatttaataagtggataaaaatatcttaaatttatattatattctgaaagggcaaataatatatatgaaaaatttgacctttcaaagcaatcaaaacaaatgaatttagctttcaaattcctttggattcattaagttgtattcttataatttttctttgtttttatgcatcaatagtaattctattcatgaaaaggaatatatgatcatgtttactgataataatatatatatatatatatatatatttatattcaatctttatccctcctatatattttgttctcaatctcatgtgaagtgtctaattatatctatataactagatggaatgtattttgttattcacctactttcatttttttaaattgttaacatggtattagagtctgcttgtgatccgttgtgagtctaaagtattatcggtctaaaaaaacgagccaaactaaaaaaactttcgcttttctttttttaacctccatttgagatctttccgctaatatgtgcctagttttcagtattagggtctttgaactgttttaaaattcacaaaatttccaacgtactgtatactcacaaatttttcgatt

SEQ ID NO: 208544 - DNA, 925 bp, Cannabis indica
aagatagatgtgaagtgttcttactattattattaatcttatacatacatgtaccgtaacattatacaaccaaaaacatcaactaggaaaatcaaaaactaagcaagaataatttgaaatttttttatgaactcaacaaagatcatttgctcttttcaaagaggccaaatctttgagaaactctttcaagagctgtattacaatcacatttatgaattcaacaaagacattaaagcttgcatgaataacttcaccactgccagtgaaatcaagacttagataaaaaaatgtgttgtacaggtttaccttaaaatgcatctcaaaaccaacaccactatctctatcctcagaaatgaaactgttgacaaaaataaataatggtaagggaattttattaatgatactacattcttagatcctattgctagcattcaagcataaaaattcaagaaggaaaatgaatactaatgaaattgaactaccttcgctttccttctccgacatcagtagtcaggacccaatttccaagacaaaacgacaaacatcttatctacaaactagaacagattacaaaaccattgaaattccaaaaaaatcctcaccatcgatatccttggaacaaaaaagaatgaagccccacatatatacatttatatataaaatctgacctattgggcgatatataggcgaaatcagtccaagagtggccattccaaaagagaattctaccatcggcgacaccagtgtaaggtccacggccaagagaatcaaaagtgacactctcagggccctgaaccaggttcaaaaacttaatctttgacttttggagcaaattctagcggtctctatgggttggaatttcggaccaataggagatatttatgttgtgagattgaaagtctgggaaatcggagatggcgctgtg

SEQ ID NO: 208545 - DNA, 550 bp, Cannabis indica
ttgagaagaaaagaaatgcaggacaactaagaaaagaacatagttgatttatgagagtttgaaccatatgtaatgctctataatatttcggttgaacagcgaccataaatatttttattaatcagatcaagttactgagtttacaaagaataattcttgtcaaaaacacaagttacaagggttgcttagatcacttgtgtgaactctctctatctatctactctctagtaacgtggagtagtatttatatatagccttgaaaatatcccaaggctctaaatatttttactgtcaccaaacggagttaactccacttgtataaagttagtaccaactaactttaataaaacttcataaatggtaacttgtaaccatattttcacaaatctctaccttgctttaagttatcatgagacaaaaaaaaaaaaaacatagctacttttgctatccaatcaagccccagagggcttagctaatcccaacaccaattagttctaaaaaatactcgaattttttgcttggaactactttagttaacatgtgtgggggg

SEQ ID NO: 208546 - DNA, 553 bp, Cannabis indica
tagttgttccactattgttttaattgttctgttttgttgttttacggttattttataaaaagacaatatttttattaaaaaatttaacagtaaaattataaatttttccttaaaatctaatatatttataaaaatcccattttttttttatattcttgtttttgccagcaaataaatttaattatttttaattttaccatcacgtatttttattttttctattatattttttattttatttcacatattttcatatttatttttgtccctatcaagtttatatttttttcttcaacaaaaaaaatattttttattaatatttgctcctcttaatatttgtggctagttctgcaactaagtatagatgtggaaaaatgtgtatttttatctttgagtattttgttggattcctcaattgagtttcatttgtcaaccccactaaccataacaaacgaccccttaaattgtactaacacttttcccttttttactctcattcctcagattcttgtctggtacttcccttgttggaacagatttaagaggtggggtg

SEQ ID NO: 208547 - DNA, 875 bp, Cannabis indica
tagtgattatggtaaattctttaaggaggaaatgatgccccaatatccccttttacttgtcttttaataaatgctcaacactttatcttgtctcgcagaaatgaatttcgaaggtctcgtccacaaaaagggaaaaaagaggttgaccatctcagaggctccagcagatgtcgatgtagagcccccaaaaaggccgaagaagactactgctaacaagaagcaagcctcccagaccgctaatctcgaggtccctaaaactgagacttaggatccaatccctcctccgccccacaagtactgacgagcctattcccatagcgactcaagcttctgcctttacgagccaagccctcaaaactctgcctgtcgaggctgggaaagctagcctaaaatacactactgagtttggtgcggcatgttggcatcatttcaaggctctccttcaccataaatgagatttaatcaataatggggatttcggggagatgcttacaaggagtgtatctaacaacctctcggtaaattcctttgcccttatccgctcaccctttttttatccttcaaaatactcatgcaattttttttttttttttgatttctatacatctttcatttcctttgtttcccaacgacgaggcatggagaaaataaagtatttgaagagcgagatccagaacctaataggctagcgtgagattatgaccaagcaatggaatgatgccaaactggagaatagtcatcttaccaaagaagccgagaaggcgaagaggaaccttgaggccaaacttgaagtgctaagaaggaggcaaaggacaaggccaacacgtgccagaaactccaagaggaactttgatgtagccaaggtaacgctcaat

SEQ ID NO: 208548 - DNA, 665 bp, Cannabis indica
actagacaattctgacatgggtctaataaaagaactggataaaaagaagccatgggaaatgggtgaagcagtgggctttacaagcgagagtcttttgaaaattaaacgaagcattgcaattgtaggagaaaagcttcaaccaaagactaacctttttgtggttgatccgcctggctcctcactcaccagcttagctctcctctctctgactctgcacagtagtaatggtgtgtagtgactcagagaagcggaggagcagtgtagagtgagaactgagaagggtaagcttaggtttagactaatgaacagactgagagactttaccttcaagcccggcccatccaatttgaagacataattgactttgactttggtttttcaactgtaaaaaatagtttttttttccttcggaaatggagtaaataatgtgtatttcaactcaattttcttaccttattttctactattttttaatttttacaatttaactttgataataatagctactaaacaaattacatttttatttacttttataatttttctaaataaatttcttaaactctataaaactactacacaaaaaagagaaagctttgaataaataaaagttagtacaaagactttgtaaaaagtttcaacttgttatgaaacagataaaaatg

SEQ ID NO: 208549 - DNA, 797 bp, Cannabis indica
atatattttttcgtcgtcaccaaaaaagataatcaaaatcaaatttaacattttattttcttttatattttcttaaataattcatcttttaaatttaaacaaaattaatgtaccaaacaacttgataggttactaaaagtattttcttattttatttttagatgtcacaaaattaaattatagacaaacttatttttataaaactattttgataggtgtataaaataacttataaataaactaaatagtatcttaaatatcatataagttacaatttaaaaaaaaaagtcagacattaagtttaaacaaaactaaatatagttactgttaaaccataaacttttccggtgacatggacatcaatatttttatatttagacattacaagattgaataaaaaaaaacttatttttataaaactattttaataagtttataaaataatttgtaaataaattaaatggtatctgaaacatcatatgagttacatttaaaaaaaataacctcaatgtatcttaaacaataaaataacataatatagcttaaaaatataaaagaaaacaaaaaaaaattcttttaatgttagccgtcttttttttggagacagaaaagtatatatttctcacatattaaaatggttattttattatgtatatatgtgtaaaattatgaaataaattttttaatagaaaagtaaccaattgatatcttattcacatcaaaagcaattaaatggttgttttttcaactctccgaaaaagcaaaaatttttggaaacgagatttttctaatttttt

SEQ ID NO: 208550 - DNA, 717 bp, Cannabis indica
aaaataaataaaaaaaatctaaagaacatacaaaagggaaaactatacaggaaaacatagataatcagcttcatcgatgaaagttcaaaattatatcttttaaccaaataaataaatatttaaacggattgtagcttttttcaatgacccgatgaaactaaaatctgaatacccattaaaaatcataagaaattacccagaaaaattcataagaaagtcttaaaaaaataaagccccaaaaataaaacttcaatcaaaaaaaaaaaccaaaatttgttcttttacctttacaatcatatgaacaaaaaaaaaaacccagaaaaattccaaaatttcaccgacggaatcaatccctagaaaccaaacccattaatttcaaacaatccccagaaaagaaaatcaaacaacaacaacaacaacaacaacaaaaaaccctaaattgcagtaaagaagaagaagaagcaaaaattgaagaaacacaccgtgagatacggaatcgatgaggctcacaaagcgattagggatctgaattctgaattctgaattctgaagaagaaagatgaaaactttatgcgattgaaattattgagagagaaagagagagagagagattatagagagagattgaaattattattgggaagctttctttcgtgtttatatttatttatcatttttcctttttttctttttttttttttatttttcttaataatt

SEQ ID NO: 208551 - DNA, 826 bp, Cannabis indica
aatattttatatatttaaattattactataaactttatttttttattaggggatttccagttccgtccccggcccattcctaatgggaaataagcaagaattgtgaattaaaatccttgacgagaatggggattggagagcactctctgctaatttcccgcctcgtgtgcatccctaattgagaggtgattgaaaattatttatatttttttgacgtaaaaattatttatattgtttagtaagataggaggaagaggtgataatcattttttttcatttactaaattctaattagaattataataaattaataaaaaaaattaatgagtttaaaatataaataatcgaaattgatattttattataaggtaaatgacagcataagtacccaaagttttaagtttgtaagtcggataaactcaatatttatttttagcggcatattgtaaactgtaatttttctccaattttgtaattacaaactctgttgttgtctaaaacggggcacatctaaggactagattctagatcattaggtctagacataaatatgtagtattagtttcttctaaatgttcttttaacaaattcaaaacagtattttttactaacgaaattgaaggaaaattatttacaaattgtgtacttatgccgctaaaaacaaaattaggtttatgccgcttacaaaattaaaattttaggtacttataccactatttaccctttattatattatttactaaattgattggaaaaaaattataattatttttattttgttacataattaagaagtataattgaaatattttaatttaactaaatt

SEQ ID NO: 208552 - DNA, 1098 bp, Cannabis indica
cgtgtccaatgtctccaaaacccttaccaccttctgggttcttcactgaaaggagtcactcccaaaggccatcgcctctagttaccttctagattcgagagtcattttttttagctacctcagataatttatgtagtgaccgtgtcctttgccttgatcatgccacgtgtccaattaataaaaacttagataaaatttacccccaagcttttgagatcctctagatcacgaaagcttgccattgtcttcaatgctaaccttggacacatgctgcaagtttaggtcggcaacacacccactgatgagatgaattcttctgagagtatttatgtcatttacttcccttcacgtggtaaccacacgacatgttaagatgtattttttcccctcttcatgagacgcaaggcgtgcttggcaaggaaggaggagtacaactggcggttgagtgacgtggagaaaatgacctcgtcatttttgtgggtcctaggccaatcacatgggacctctcatctcccgagccattggattcactgtaaccactttgaaccgtggatctcgcttagccctgtctcctttttaaaataaaaaatgtctatggcagtgtcattttttattctttttacttaaaacttcatattttctctgcaacttccttttcccttttcctgtcatattttgcatgcaagaggcattgaaggatttgatctaacatttactcatcatttgcatggaactcttcccagatattactcctcttcaactgaactagcaaagttcttatttagggggaacatttgatttttaggttaactgtgatcgctgcattgagtggcttcgaatctttaaggaaatttttttggatacaccaactatcccctttgatttgtcaagtaagtggactaaccccctgtctgagtttcttggcatttcacatttagggtaaaaaaggttcttgcttaggttagggctagaactgtacttgtgccgcgtagcaagatagtgtgtgtgaaagagaaaactcgtcttcaaatccattcattatttcaaagaattctatttttccttcatggattttaacgaagaccccctcacaagcac

SEQ ID NO: 208553 - DNA, 791 bp, Cannabis indica
gaccctccattatatataggataaatacatttttagcccctatgttttaataaatgataaagtggactctgtattttttaaaattataaaaataggacttatgagctcaatttttgataattttttaataatataactaattgaaaaacaattcctaacacgaacagaagcaaaaatgtaatcataattttattgacacctctaaatcaggttaagttttattttgacaaaaaaattaatttatggtcttatttatatcattttgaaaattataagatttattttgtcatttaataaaatagagagttcatttaattattttttccaaaactacacaaaatctaaaataatatctaactcgttatatatatatatatatattataaataataataacatagggtttttatttttcatatttaatatatatgtatatcatgataacataaagacacacgcttatacatataaaatatacatatacatattaactaaataatcggtcaaaagattataaatctaaaaattactacgtaaatatatattatatatataatcatagaagtagtcaagagtgaacgtttcctctttgttcttattctttcccataaatatatattatatataaatatgttattatttaattattgaatataatcacggtttgaacatttctcatgagtacgtacttaagatcataatgatgatgatcaatatttaatcatttctgtgtctattttttcaagatcgatatatatgatataatgatagtgatcactatatatgaaaaa

SEQ ID NO: 208554 - DNA, 941 bp, Cannabis indica
taatgtatacttaaattaaggattatggagaataggagattacaaagtcaataaagaaaaagtatcttaacacttgaaagtgaaaaatccacatgtgatgtcgtacagattgtaagtcaaagccttgtgtgatcgagtaaatgaccacaactagaagaaaccataatggagagcatgaaagaggtcctcagtttactccttgaaaagatcagaccatttctgaatgctgttgtcttttccttctctggtaggttgaaacaagtcgttcattatctttgtaattttttcaattacttgcatgatttttcctctggtgctatcaaatatcaatttcactatatttgtggacttcattactattcctccttaggcctcccatcccaattcttttcgaccaccatcctcagctgcacataaattttattattggattattattattagggaaagttaagaagaaagtcagaatgggcatcccatccaattgaacatatttatacctaattaagtatgattttaaaatcaactaaaaaactaaatttcataagatatcttctactcaatagtaagatccttttgttcaaaaaggaaaaatagtaagatctataattctaagcaagacctctacaatcaaaaataaaaatgatatgttatctcttttggactgtttatattctagcgtggaagaaggggtatggtaatactaataaacaatcactaacttttttttcttcaaaaatatatatgttaatatactttttttaatttctaaatataaatatatgtaattgaaatgactcagttgttaattggattttgaaagtattatccgatattccattcaaataatttttcatttcaaatccaatcgaatccaggttttgttaattggattggattacattgattcggtataactaaattggtttggatgatgctca

SEQ ID NO: 208555 - DNA, 1149 bp, Cannabis indica
taaccataatttaacttcaaaaatataatttaaacactaacaatagttatagaactcaaacacccaaaattcatgcaaaatctctaacttaaagttcaagaaactaaaaggatggtgctaggaacttaccttgagtagagatcactaacaatttgttgtaaaacaccttgaatttctgaataaaaacccaaaccctagctggttctaggagggttccaaagagagagttgaaagagagagaaatgcgtttttccttaaatttcttattttctagaaaaaagaaataaaactttggttttatctaaataattaaaagattaaaatcagattattcattcaactaatgtccactaaaggacaaaataccataaagaaaaatgaccattttgcccttgcccacactaaaagtcataacaaacacttaggggtatttttgttaaattctaaatctcaactattctcgacattctcaatgtctaactatattgccccgctatactaaaaatactaagatgtgattctactagccaaacaccgtgttccaatgttgccgggcacaaaacatgcaaaaatatgaaattccatatatgacatataaaatgcattctgaattcaaataaatctctgtaaactaataattcataactaatagtttcataattaaaccctaattatctgttaatttctaaattaaagttaagccgtcgttgcatggtttgttgtcactgtctttgttgctccctctttcgattaaaattgaggaaactcgctggcagaatcgaaccaataattacaattgccaccactgagtaaatctatcaaatcccatttgatttacttctaatttgttttgaattgattatctttaagatagttaagagattggagtgatgactccataatattcaagctcaacagaccggaatgcaggctcctctttttagaggactttgcatgtcgataatcccgctgaactgagcattctctttatatacatgttttcacaacatgtttttctttgattttcttcaaatttttatttagattgttcttattaatttaggtttttgagctttggtttttttacatgggaaaattgtggttgcgatgaggatttaagctcccacttctgattatggttaaggaaat

SEQ ID NO: 208556 - DNA, 695 bp, Cannabis indica
aaaaaattttaaaacgtcgaaaaattaagttaaaataatttgttatataaattcgtatcttttttattttatacacatgtgaaatagattatttcaacactattttctatattgtgaattattctaaatttctcaaaattttattaaatatcttaaataattataatatacacgactataaattttggataccaaattaataaaaagtgtatcggtacattgttttgaaaaatgcattgtaaaagctccctaaatatgacttagacttcagcattcattcactacaaaaaactgctacatttagtgacaactttttaattacaacataaaatttttgtgactaaatgtgacttttagtcacaacaaaaaattatttgtgactagcatttagatacaagttgtcactaatttagttttagtcacaacaagtattgtgattaaaggacatttagtcacaacaaattgtaattgtaatttttgtgactaataccttttgccacaaacttttcaatttaatcataacataggaatgataattcataattaatcacaacttttttattattgttacaataataaataggcccaatatctgtagtgctaactgaaagggagatttttggacaaattaataaataatgtataataaatagctaggttagtaatattttgaaggggaattactctatatacta

SEQ ID NO: 208557 - DNA, 841 bp, Cannabis indica
gttaaaaattaaatttaggtacgtatttatttgtaattgaaaatttaacttagttatttatgccgcaaattaaaacttaattaaagttattccacctacctatttatatgtattattccaatctctaattaaaattaattaaagttattaacaaatataattattaattaataagaactcattactaagtttgtttctgtttttattattgcatgaatgatctcgaatttaattaaatataacaaaacttaaacattagttttatttttcaattactctattatcagaatgtagtgtataaatatataaatttatatatttatattatatatattattaattatttaaatttaaaaaaaaaaatacagaaatattatttataatataggctatataggtggccgtgtaagaagtagtacctgggaaagggtaattaatctctatatatataattagtttattaataattcaatcttaacatttgtataattaattaattttaagaactacttgatttttaccctaccctagctactatatattataatgtatattgtgtgtatgtgtgtatatatatggaagaataaacttatatatatcatacatacaattatacaaaaaaaaaaaaaaaaagaaaaaaactcatgtaccgagtagatctttaattaattttgttggttggtcatcaataatcataatcatgtataatttaatcacctaaaacaattatactttctcatactcatgaacatgtcattatttttgtaaacttccactaatgtttatattatgtgtttataattacattctatatattgatgatatattaattaatattgca

SEQ ID NO: 208558 - DNA, 1186 bp, Cannabis indica
atgatgtgatttgattgagggaatacgaagatacgactgtctcttcaatatttgggcatttaatgccccgtcttgaaaattggagctcgagacatgcaatgacggctacaaggtattgcatgcttgacatttgtgctcttctatgggtattaactattcttttttgggggaaaacccaaaatttaaattttgaattactgaattagccatcaaagtacctataaaagggttaatcctctttgacactcttttagccatttctattctaaaaaaaagagagaaaattttccttttatctctcaataccttcaaagagttctttttggaaacccaatttgctgaggtcgtccaagtgcattcaagaatctgcaaacactaagtaagttttctttcaccttctcatttcttttaagttattcactttatttacaaatttgtttctgtaaaaatttgggatatatgaaactgttctttgacgatagagattaaggaaatcagggctttcaaattctggtctaaatgaaattgcttaacttatgattctcaatttccagttgattcccaactatttgtgctgaaactcttgaaaatggttattgagagtttctgagcattttttgggttcttgtttttcctttaaatctttaattttgggaattttatgcttggaatgaaattttctttcttttatgcttttgaatatgtctggttagagcacaaacatgtttcttccttgcaagatttacgcttctctgtctagttcttacctctttttccttctttttaagatgaactcgagtcatttttggggaagtaagcaccagatagataatgatttgcttcatttgctttacaaaaactagcccagattctatgcattttcatcctcaccaagcgagagttcattgactttgagctatgatgagtgggaggttacaagtgactcatcagagtcttcggagctcgtcatgcaacaacactattatcctgacaaaattcgtggagaagggtacggtaggttcatttaggaattgaataagggctagttgcattactttcctattgcgtggacatatagggtcctattgaggatccacaatttgcatgactttttactatagccaatgtggaacatgttgaacatcctagggaggatgctgaaatgcctgtgttggaaattatttta

SEQ ID NO: 208559 - DNA, 845 bp, Cannabis indica
tcaagcccttaaatggaaaatgctattaacattcagatttaagccttaaaatattccaaactcaatttctaactcaaattcaacaagtaaacattggaactaatccccatagctacccaagaatattaagttagaatacccataactactctaaattacaaagccaatatataaaactaatcgtattaaccttaaaataaagccaatctttaccttaaattcttcctcttcaatgttatactatcgtgctactaccaaaatttgaattaccaaattttgagttaaaaatcgaagaaaataaattaaagggaggagggtttcgtcgcaccgaaaaaaaaaagtttcgtacagttattatttttgaaaacataatagaggagtgctagggacactctctcttgcactctctctatagttaaatgacaaatgtcaaacttttaaattaacttatttgtacctattaattaaccataatattactatcttattataattatgccatcttaatcaaattaatacaataattattattctactaatttgattttatatacagatgaaaagttgtcttttaatcttctcatcttcatagatattttctcgtataaaaaacaaagaactcttcttcaatgaaataaaataggtaattagtactcatttcatctttttttcttcaatatatgtattacctcttaaatattatctaatgctaagttgctaacttctttttattattttacagttcaagctcagttaaaaaaaaaaagaaatcgtacaaagtaacagaagtatttcaactcctaatggaaaatgtatgttttatttatgttatgtatatgttagtt

SEQ ID NO: 208560 - DNA, 1352 bp, Cannabis indica
aataataataataatagatgaccaattcacatttaagagtgacacctttttcttttgtttttagtacaaaatcttagtttttttttggtttattaccaacttttctatttatagaaaaaatatgatataagcttagtcagtggataacctgaaattcagcctcttaaactgtaaaagataagttgaagctatacaaaactccaaaacaacaccataccaaaaagaaaaccaatttgcatttatagttttccttattattattttttggacacattctaataagtaactagtaactagtaactagtaattgcatttaagttaataaaaaaccttttatgtatatataaagagtaagattgtatgaccaaaactggggtttgagtttgtttgagagagggcattttcccaattttccaaatgaagtaacaagagaaaatagggggaaatgaatctttactcactcactcccccctaaatagagctccctcataatagtcccaaaatccaaaaaaagaaaataaaacaaaaaaaaagaaaaaaagggttattttaaaaccctcttcaacctcaaacctcactctctttctctatatatgttttggtcttttgattacattggtgaagagagataatgaaattcaatgacaggtattatggttggttgttggataataatatcatcgagttccaaatgatcaaatcaaatccatggtatgaacttgaagatatgtcatgttgtactttctttagttcaatattttattttcatatttgagcaatgtttgctagttaattgagtatggtattattgatcattaataaaactccatttctctttctctctctctatatatatataaatatacaccaaatacatagattattttcagcagtgaacttttttctttcatagtgcaaaagaggtgaaattaagatcatattggtctctcgagagcccggcccagatgtggtgaccaacaaatttaaaccaagaaactaataagaaagaaaagaaaaatgaaaatttgttcaaataagaaattttctatatcaaagagaaaagactagtaagaaaaattgaaagtttgatattgttctcttttctcttttacgttgtgtttccaattctaaaaaacgggttactataaaaaaaataaaagaaatagggaaactaaggctagctcaattgaccataaaagtaagtgatatggatgcctggggtctggggagtcaaataacaaataagaaaatacacttaaggctagctcaagcaactaacaactgaggagtgatgatggagtgactgcgagtctcaagaagacaaaagctcaaattgaggtttagtaaaggac

SEQ ID NO: 208561 - DNA, 1060 bp, Cannabis indica
gagagagagagaggtgataggtttgtgctaaattttattattttttgattttaattcttaattatctgaccaaataaaactaatttaacaaatctaataactcagctagtattttctaggttatcaaataaaacaaaacaataaaacttagcaaaagactattttaccctcaatcaaccacttaatctagcttataatttaggggtactttggttaatgctaactaccccaattaatctgacactacgagaatactaaataaatcggtacaattctaataaaactcattctattatcgtcgtgatatccttggtcaaaccatcgagtttctatggtcgccgaacccaaaaatattttattttaaaaatagtatatataatacccacatgttctaataaaatctccataattaataattacgttcaattattcatttactcaaaaatctcgaattatctcataattggcttaagtaagattataatgttactctaatattcatataattacatatttaataaaatatgtcaaattacatatagtaacatttttcaggatattacatatatttattgtatttccaaaggatttttaaggtaaagaactatttagtagcatcgactcgtgaagtaaggctagttaacgccctaaccacgtcaaaactatttgcgtctttttatttttttctcgtttaattgtttatttcttaagttctgattatttataattagtttttcaaaaatttcaataaacaattataaataaatcatttttttattttttatttgtttcaattaattaatttataatttcaaattcatctcatctataatgtataatagtaaatattaatttattaatatatattctatagtctaaaaaaaagtgcaagtgagtttagatgatatttttattattttttattttaaaataattgtagagttttatattttgtctcaataaaaaatgttatatgatttattttattttgaaaaaaatctcacataattaaagtgtatgtcttttatatcttaccttatataaaatggctatgtaacgg

SEQ ID NO: 208562 - DNA, 980 bp, Cannabis indica
ctaaattgtaacttaaatcgcaaccctatcatcccaaccctaaattaccatcgaactattcgtcattgctacaatatgtccatggcattccagtccactccccttggtttcgctgacaatgatttcccaaatcaaaattcaggtcgcaactcaaattgcaactcaaatcacaatccaaatcgcaatcctaaattactataaaccatttgatgtgctagtcaccgtttacagtgttcaagaccactaggcatcgcaagatatatgatgtcatttgcttaaggtattctctaaaatcaaaacccaaatcccaatacaaaccacaaccatctagactataatcacaacatctaatttttatggtcagtcacaattctaataacaactcaattcgcaacctaaattgcaattatctaattttatttttactgtatgaaatcctaattgtgaactcctttcttttttaataccataattttgtaaaaagtaaatttgaactgtattgcacaaattaataatgcactataaccttatatataagaaaaagccctaatttttaaaatttatgttattataattttttttgtttgatgtaatatgacttttatgtcacacacaacataaaaaaagaatatctaattttgatggagaatgctaaaagatagtattggtgcccaatatcttttttcagtattatattgttatttatgtaattaagtaccaggtctcatataacttaaaataataatttttagaaaatatcgctaaccaatcgcaggacgctacttataaaagatgttggacatcacatgtacagaataatgatactcttaaaaaattatcaactaatcaatttttgtaaggttccaaatcaaaagatattattaattttagttaaataattgagtgcagttcataaaattcctaaaaaaaaaaattattagcacatttgatgctcaaaaaaacaatctcatttattatgt

SEQ ID NO: 208563 - DNA, 767 bp, Cannabis indica
gctattatatgtttacatcatattattctgaaaaatcatgtacagaaatctgaaatataaacattgataattgttaatggcaaaaatataatttttaatttttattattattattctagtccttttgcaagtgctgactttttaatagagaaagaaaatgaagtgactatcatgttctgttgagtgttgagctgagtgaattacaaacatagttgccttatctttcgtttgctagaatgcataatgtgattttgacactgtcattagcttagttgtcattcccatgttcaattaagcattttttttttctttctttctttctagtagatctgaatccagagatataatatttgaatatcaatgattcttactcaagatcttgtagattgggaagagactatttaccttatattactacatatttgcatcctatgttttcaacaatacttatctaataccttttaatttgcaatcatacatatttagtgtctagatcaatcatcaatataccaatgtttcaaatttaattactaactatatataatcgaaagcaatttttactaataaaattttattgatcaaatttgagttcactaaatttgttttcgataatatagtataccaaatgattatttaaaccctacttatttatataatcacctcaattagaatacatgtgattgtttcattgttgggtttcttttattttttattcaaacctttttgctcaaagcctccattgaagataacatagactcatttttttt

SEQ ID NO: 208564 - DNA, 798 bp, Cannabis indica
atggaccgctctcgatcccctgcgacgaggcttgtttcgaggaagtcctccgagtcgtgactcgttcctccgattcaggtaactcgggcagattcatcgttaacgctgaggaatttcagagacgatgcaacttagatagcaggaagaagatcgagttcttcggcgaatctcgaccgttgcttcatgatttgtctgataaatcagtctgttaatatgtaaaaaatcaaaaaaaaaggaggaagaagaagaagaagcgagtcagactcggtcgcgtgactcagctgagttggcgaatcgcgaggtggttccgctgagtttacttttttactaacatatttttcttttttcctttttttttttatatataaattcatttttgaatttattataattatttatattattaactaattgatgataaaagaattagggtggtagtgagtttgaccgagtcgtcccgagttgaatcggagttgtggtgagatggctcaggctagcttgtaatttgagctattgtaaatttctgagattatcaatatatacaatcaaatgcttttattaatatcattattaatttgttaattaatacatatttccattttcctcacgttttattatttattttaattacaatttaatgtaccagtcctgcaattttttattattattattggaaattaatttttttaattttttgaaattaagtatttttttctgccacaccatttaaagatatttcactacatatatgagaagaaacaactaatgtagttttatatataaaaaaaataggaaaat

SEQ ID NO: 208565 - DNA, 635 bp, Cannabis indica
tggttttctttcaagtgaggatgtggaacattgtttccaccataaaatctggtttatgaataccttttataatgaaatttgacgtttaattataattatatatatatatatataaaaaaaagcaagttaatgaaacttattaaaacaataaaataatccaatcagcaaaagtgaatttgaaatttgggatctctttttaatgaagaaatgtgtgatgctattatgtttagagcactaacaacaatttctaatagagattccttaaattttttaactaattgtgatataaaaagctttcattaactcatttaaatcatatttgtataatagaaatttactcgatcaatgcaacttgctctacatgtacagaatgaatagtgtattctttaaacttattttaataatatataataaagtatttatttatatttattgtatatactagagagagttacgcggcgagccacgtaatattagtttattttaagttctagggtatttgttttaagaatttgtaactaattgtaaattatgttataacgatatgtttataaactaattgttaagatatcataatgtatatataaacctataaatgttttaatgttataaacgtatttttttattaatgtaag

SEQ ID NO: 208566 - DNA, 1135 bp, Cannabis indica
ccattccctgcaaacgccaaaaactgtgaatcactctcaagtattgccatttgccgatcttccaacgtcacaaaagcttcaacctccttatcattactcccttgtgagtcgatcaaaacaaccatatttctaaactccggcccgacttttccatgggccccgacccaaaccgggttgccccacccgaaatccacctcgttgaaggtgtttttccagttagtaaaggcgaatatgtctggcttttcagaatccatatccatcatcgactccagctgcgtcacaaaatccgaaatgggctcgaacccggcttctccaaccatgttctccaagtaatcgccgttaaattcggacacaatttcattagtcaacgccaccagttgactcagctcaagctcagccttttgggccgggttcactattatggaggcccaccaaaagaggttccccgtgcaattttccagcgagcgaggatttgtcatcctgggcctcatgttgacggcgtgggccgctacggatattctgggcttgcctgatatggcccaagaagcctcggtggcgtgtttccatatgaagcagctgacgacgtcgtttcgagtaggagatgggactgtttcgcttttacctaaggatttcaacgtggatatggctttgttgttgaagtaaaatctcttggtgacgtagttgctcttcttgaaccataactggtccatgagagctacacagttgggtggtaattctgtctgtggcaggaaaaacgacgccgctttggatagttgtgggacaactactttgtgaggtgagccggtgaagagagcagcccatgacttgaggaaataactcaaagtttctccgtcggattgtttgtggcttacgctaactcccagggctattccgccgcaactgaacacgtttacctgttaattacagtatggacattaattatattctcgttgcaacaataataaactgcatatattttactctataattaaaagctaagtagaaatttttaataaaacgccatacaccatatatattggatataatttgtaatattatatatgaataaattaatgatatagaaaatatacaatatgattaattgctccatacaaataattaagtaatatcacta

SEQ ID NO: 208567 - DNA, 851 bp, Cannabis indica
aaaggattacaaatcctcttgaatccaccccttagagtcttattaatggaaatatttattagtctcattttacttttatcaattaatttgtaaaatatactactacatttctccatttctcttctcaattcttccttaaaattagtgagtgaaatgattaattagagtagcatgaaggcaaaagtaaaggagtagttatgctcatggtgttttttctttctttttttaattgaggtgcctaaactaaatttaccttcattgtaaaatattgagtcaagattatcggttagagaaatggaaaaagtgaaaaccacaaacaataggcgtgttttccaacaattggatatggatggatttgtagcttgggtggataacagtataaacaaattgaatatcaaatggatgtgtcatgtaggcaactagtgatattagtgactcctcacctcaacattaatatctccaataccaaacattaatatctcaaatatcaaacattaatatctcaaatatcaggattagtgacagcataacagggtggagccagggattcaaatttgaataatgtatctttttgccttgtctatttcttttttgggaaaatatctccacattatattataaatttattatttttgtagaaaagtatttcataattatttttgcaggaaaaatatctccaatttctcaggagctatgaaaattatccatagagatatgtagaccataacaatatgccaaaaatgaagttgtatgtagtccaaaatactataaagacttatttataatattttttttaataagaaaagaaaattttattaaaatagaatagtcaaattaaccgttacagtatt

SEQ ID NO: 208568 - DNA, 912 bp, Cannabis indica
gagagagagagagaagaaagtgaataagagatcaagggctcatttgctacgtcgtataagagtcgtattgtattaaataataaataacagtatgtttggataaaacaatgtattgtattaattattacgactaaattttttaatacaatgtatgttgtattatttaatacataacaaatggtctgtattagcttgtattataatatttacaaaggatttggggtcaacaccaatcgccgaccgagacccagacccaggacccgggacttaggactcgagacttgggacccgggacccaagaatcggagttggactcggacccggacccggacccaaacccagacccgacccggacccggacccgaaatttggacccgaacccgatttcagatgccgtaccccgactcgtagttggcgttgggctcgagtgtatttaaaatatattataactttacacaatcaattaatacaagtcaatagcaaacattgggcctgtttggcatagctttggaagagcttttgaagtctcaaagttacttttagatatgtttggataaaatatgagaagagctttattaatttaaaatagctttttagagaagcaatgactcaccagcttttttaggaagggcttttaaaaaaaacatgggaagctattttttttagtttaatgaatcttttatcatacctaatttatccttttttacaaaaaaaataattaaatcactttcttgattgttatattacgacagattatttcatattcttctcgtaatgaaaaccaaatagtcttcagccaaaaaaatcacagcagccatttgtattgaagaaagaaaaaagtagagttattgttttgtcaaaaaatttgaagattagtattctttaactattctattctcattataatctatt

SEQ ID NO: 208569 - DNA, 903 bp, Cannabis indica
aaagaaaaagaaaaagaaaggcaagagggatttttgataaacgaaaccgaacccgaatctcaaacccaaactgggaacgatccgacccgatggtgtgagtgagaatcaagtgctcaccgaccacggtttcttgttctcttcgtaatgccacgtggaggatagctaaattgaatatgaacaatcaataaaatatatataatattaaaaaactcagcaaaacaaaatcttttggaaaaaaaaaaattcaatttggtaaaatggaaatggaaattaggatataataaaataggattaaaaaatatatattattatagaataatataatttaaagaaaaaaaataaagaaaaaataaatttttttgagcgtgttattttaatggattgatctcctatttataaaatatgtgagtcatagattagaaaattaaagaaaagaaatagtaattaagatttggatatccacaaatagttattatttataagactccttcttagatgtttataataactgtctcgttaaaaattttacccaaaaaattgagtgggacaaaactcggtcaagggaaaaatagtgcaatgaaattactccccctcattttggtattctttgagatattataattgacgtattccaatcttgtgaactatcttcttgaatgttgattttgataatgatttcgtaaataagtctgcaagattattacttgatcgaatttactgaacatcaatattaccattttcttgaaggttgtgtgtaaagaagaatttttgtgaaatatgtttaattctatctcctttaatgtaccctcctttcagatgagtgatgcaagcaacattatcttcatagaggactgttggtacttctttagatattaatccacattagggctgagcatcggtcgg

SEQ ID NO: 208570 - DNA, 912 bp, Cannabis indica
aaaaagaaagggtaaaaataaaatagattaacaaaaaagtatagggttcaattttgataatgttttcttacacaatcgaccaaaattcaaaacaaggtttcaaattgaaacaaatttcgaatctatatattcagcaaagaaaaagtttgaaattgaaatcagtaaatatttaaactaacatctattcttttaagaaataatactatgttactaggtataatattttagttcacaaatcatttctcttttgaaatgagtaatatcacatacatatatactatgaaaagcatagctgggattgaaggcttgggctccatttgtcttgcgacggagatcaacccctttgaagatcgataacgtggtttgtgtgatagttagtagtcctgttatccgtaaggagaaatattgggtaagttgtgcaatcccacatcgcttgggaaatatcaagtgtggtgattctaagactatgtaggtatgggactacataattgaagagggcttaaatgaattgattgatattacctatatcaacaagatgcatcttgttttctagtagcccatcatgaaagaactccacggttatttcaagtgggtgacctcctgggaagttttctcaaaaagtatgcgagtgaggacaaagcacgctggaaactctcgtgttggtctgtagggctagtcgtcagtccatggagcagccagagtgatgtacccgtgtataagagtcatcattctgtgggtgtaaggatctaactgagccttgaagtgaggatgctacagttgggactcatgagctatgctttctcgaacggtttggtatgggagggacgtgtggcatgggctccatttgccatcgacaatctggtgcggtagagagagagagagagagagagagagagagagagagagagagag

SEQ ID NO: 208571 - DNA, 686 bp, Cannabis indica
ttttgcagtggatattacaagtgtagcagcgtgaaaggttgtcctgcgaggaaacacgtggagcgtgcaagagacgattcaaacatgttaatcgtcacctacgagtgggagcaccgtcactctaacaccacgcccgtcacgggccttgccttacagtcaactcggtgaacaactccatgtagtttcactttcaactgtctttctccaccgattgatgtcgtacgatctacgatggaaggtcggtcccgtgccttgcacgtgagtctctgatcgttgccgacgtagcgtaacgtaacgtagcaggaaaattaaagtcaaagccctaaaagtcaactataccgtgtaaatgaaaaccagcagcagaagcaagcaaggtgttttgttttgttttttatggctttttttgatgtaaaaaaatctattcgtataaaatgggagtgggaatggaatataaatatttttgttggttatcaattaatttattcttttattttattcgtatttatacaatcatttccttattttttcttttttgaaaaaaaaataaagtaatgtgtaattatttcgataaagtcttcgagattggaatcctacattgaaaataggtatgcatatggaggaaaagtcaaaagtgaaggttgaattgtctatcttctggtccatcctagaaataattagactttttt

SEQ ID NO: 208572 - DNA, 2012 bp, Cannabis indica
ataacacttactccaagtgtaagtacacatcatcgctgattatcacatcagtgtaaaccaaaacactgatgaaacagggacttagtcttttgattcatataatcacaatcacattccactgtgttgacaatactgtaattgtgaataaacatatgatctggacttaacagattttgtgtgtaaatgtaataaacatattaaaccattagcatgtaaaattcatgcaaacataaatcacttcaaatttcttatattgataactaatcagattgtaaagggttttatttagggcacaaaacccaacattatgtacttgtgattgggtgatttattttataacattttaatacaacatattacgaccacttgcaactttgtttgtaacattttttgatttcaatttctttgcattttttagttagttgtaaagaacttcttgtttccccggcctagttaagaggaatatttcaagtccattaatgagggtaatttccctcgttatttttagatggacatcaatcagcaggtgggggtgatagtacacaggattatgtgtttcaaagccaagcaaaaacaattaataaggttgtggcaaaggaaagtttagttccaccaccaccacctccagaagtagatgagtcgtctacttcgactgctctgtcaactccagcctacacctctgtggataatgacctagaaaaaatgttggataaactctaggcccagcaagctaccgttatattttcgtagacggagttattgaatagccatctcaatatgaggcgaccctttcaggaaaatctgattgatctgaaggagaatttttttggctaagatggcccatttgaaggcattgtgaaagtcgaaggagagggaaccacaacccaaccgagacacagatgaccaagtacattaccaatgcgtagagagtgataatgaagatgtattcctagaggattgggaactagatgataatgttgcaccgtctactccaatggaagcaattatcaggaccattggtgatacacaatcacaggatgatgtcctacttttaactggacccccaaaagatgtaccatttgtgagaaagaggatgtcgcctcgctacttgaaggaccattatgaggaaaagaagaagaggcgggttcttctagagaatgaagatccaaaaaggtcacctaaccatagactactacgtaggttcaagaggtggttggttggagacatcccaaatacccgtcctacgaatctgcacactggcatcgcaaatgtgaagttcttcacaaagttgttgctgatggagattggatggacgatgatggaagtatttaattatggtactttttataatgtttttattatttttgtttcctgttaccttttagggacatttcacgatattgtcgcgacatttcacgcatgttctgtaaagtagatcaacctcaaaaatcaacatcttacttcttgggttattgaatatccaattcaaaccttcaactatccaaacccatcatacagtaaaaccacaaatacagttgcatctgcaaaagaaaaaaggaaaaacattagttaacaaaatatgtcgagaaatattgcaattgacatcgcaacatgtcaataagtttgtcgctatatctcacaacatgtcgataaatatcactccccaattcaccaatgtataactctatcactatagacaaacatcgcgaacaatgtcgatagacattggaccatcgtagttagaaaacttacaatgatcatgtcataaatatagtcgtaacatgtcaccaaaaatcgttaaaattcatctctcacattcaatatactctaatatcgctaaatgtcattatcatctacattttttcccacctaacgtggcatgtccacatggccaacgtcaatgcaacgtgggaatacaactcacaaacaagaaggccaagccatctactcagcacttcaataaacgagaggtccgagtacttaagagggatgaagaagtgatgaaccagcca

SEQ ID NO: 208573 - DNA, 1053 bp, Cannabis indica
agttggacgattgtgatttgtgaatacgaagtcttttaataaatattagagaaatgttaaaatctattgtttcttaatatttttatcggaattatattaatattgatataattaagtatcgagttttatatattaaaaaaataaattttaaaaaatatcactaactaattataaagaattagttataaaaagtattgggtgcccacaagttctaaatattaataataaaagtaatttgtgatttaaactcttaaatttaattctccattgcacatagacatgtggttattaacttcacacttaacggtaaaagttttagaaatataacttagatattattaccgttaaaaattaaatttaagtatttatttacaattagaagttaaatttaaataattatgtcacaaattattctaatattaattaattaaaatttgttataattataatattatttttgaaaaatttcgaatagttatagtgccgaaatcaaaaattatgttttaagtattgtaaactatttagaatttttttaaaaatttacaagaatactattgtaactataacatataagagaaaaaaatccacgtgtaatgtaaaaattaattaaaaaataataattaacactcatcatatatatatatatctaataaaaaaataaaagaaaagttttattatatttattaataataagataaaacacaattattttgttatatgtgtggatttggaagttttattcgtctttcatgtatgactttatatatatagatctcgatgctcatgctatgaatatgccattatatgcttttatcgaatatgtatgaattatttatctcaaaaaaaaatatatatgtatataataataatgataataatagtaataattattattattgcctctgaacattgttctcacctttaaaattcagaaaaaagtcacctaaactcaaaacttctaactcagaaaaccatttgtgaaatcacttcggatataaacattttatcactataaatcaatcaatttttctagttactgttttcttttatttt

SEQ ID NO: 208574 - DNA, 564 bp, Cannabis indica
tgtcaattacctcttctaaaaaagaagtgtattaatttttttctttatttttacatgtcacaccctaaaaaaaaaaagtataaatagattttgattaaataataaaaatacttaattggttgaacaaacgatagatttactaaaaataatgtaatatattcctaataattaatattaaataaaattacagaatgaaatcatatatatactcgatcaataaaactaataatattctcttaaaatcaaatatatatataaatcaaatcgaaataagtatccactatccaccggaatagtttctttttaaggatcgataccactgcataatctccctgtataatatatatatacatatatatatatatatatatctgatcttctgagattcatgaggtagaggcggatcacaattattagaaagcaattaatggactgtgatcatgattctcttaatacgaattgaaccttctattaaagttccgtacaccttatatatacatgcaatgcatgatgatcctattcctatatattaaattaatagaagaaacaaaagtcagaccataa

SEQ ID NO: 208575 - DNA, 717 bp, Cannabis indica
acctgtttgagtctgagcatgagcaagaacaagagctgtgagaacaagaatagtagttagggaagcagagaggaaatgctttaacattatcctcatgtcttatcgagtgctccgattcaaattagtttctctcccacagaataagacataactaacaattgacttctacatacatatcagtagtatatatatatatagagtctacgtacacattgaacaattaattatattttggtaaacacttgagtagctgtcctgccaagtactgttcattttattatacaaagtatatatagggaagagaatatatgtccacttgttgtagttaatttagttattaattaatttgatcgaaaattgagccttttggtcaaaatgcatgattacatgagttatcagcaatttaaggcaactcgagaattccagcaccgatcgaatatttgacttatgaattcgaacgacagatattatttaaagcctataaatttatcagatcacatgcatgtaggatagtttctccattattttgcaattgttctatttaaatatgtatatataatgacactgaaaaatattttagtagagttactagtaatctatttttttttaaaatgctatagtaactctattaattatcaattatacattatttactaattaacaaaacagattataatctaattcatcaatattaaagattcgactacgactttcttc

SEQ ID NO: 208576 - DNA, 1129 bp, Cannabis indica
aaaatttatttaagtttatttttgtttgcaaatttaaagttttaattaaattttaccattaaacaacaactagatgtgtcacagtgttacagtgtatacatatgtacacgtgtcatgtatttattgatcaaagtaatcttaactatttaaagattataaaataaataaaaaataaactaaacaaaattgaaaccctatgtgtttatttctttcatcgtcactctctctctctctttctctaatatttcttgtgtcgatgattgcccagacgacagttcttggggaagcgacgacagaggacgtcgaaggggaagtcgaagggggaagcaagggcagggtttttgcctggacacttggggaagggatcttggaggtttcttatctaggggaaccgacaatagtggagtcaaatgggtcttgggttagaataatggcgactgaagtggtccgttcgtgtctgacgaagaactaggagagagagaaaggagtggagaaatggagcttttaagagttatcgacctctgtttggctcatcttcattgacgaccgttcgtggttgtcatgcgtactggttgagatctcttttatttttgtttatttattttttagttgacttttgatttgagaatttttttgagttttaagtttaatttttattttggtttttgttgacggtaaaactttttagccaaattatagccaaaaaatttaaacttagatcaagatctaggattaagatgaagatctgaaaatatgaaaacttaacgaaaaatacaaaatagacatggagaaagatagaatgtatatttctctaggtcaagtgttacaatgattttacaaccccctctcacatttgagaatgaggtatttatatgttttaatgacctgggtacaaaggtggtcctaaggggcaaagtgacatccatgatctacaagctacaggttgcaaatggtggtcttgcactctgtacctttgtttggtgtcaggtggtctcgattgacaggggtagtggttgttatgcatccttggtcggaatgtcaggccttgtaggtgtggtgcccccactactcgtacctccttgacatcagaacttgcaggaggcgtagttgtacttatcttatatgcacg

SEQ ID NO: 208577 - DNA, 1154 bp, Cannabis indica
agagagagagagggttggaaattttctttttcttcttggttttctaattaaatgaatagttatctaataaaacttgaattaatcataggattatccaatccccattaaaaacaaaaatctctaactttaggcaaaatggtaattttgccctttcttcactatggagcaatttaaaatgcttagggataaaatagtctaaaactacaatctcgagtagtcgcaatattccaaatgtctaaatatcttacccctttaattctaagatactccactgtatctaagtgactctaacggccaaatcgttgcattccactgttaacagacataaaatatgaaaaacataaaatttcatatataatatacataatacacatggaattcaaatatgtctctataactgagaaaataataatctaaagtccatttctaacaataaatcctaattatctactaagaggtatatcatgataaaagattaagtaaatccttaattatctgctaattctcataataaagttaaatatggtcattacaaatacataatcgagagatttcctttctggattgtggacaattgacacttgatttgaagcaagtgtgcctaggattgagataaaaacctctattctaaggctctccacgcagaatgagaggtgccatgttatgcaagagatccaagaattatttcaaacatcaaagaacatccatgtttttgaataacttgggatttccaagccaagtagttggatatatcaagcttgactgcaagtgatgagttgatagaatttaggaaagggctccatgtgtgttgaggtgaattgttttgtggctgttgccattgattttgggcaaaggagcaaggtgggttttcaatgaaggtacaatctatagaagactttcgtcattggcttcctgataccatgtaaaatcttatcaatacaagtagaatttgaataatcactaagcttgcaaaagatgcagaacttagtgtagatacctttatatatagagggagaattacaatacagttcaacaataatagaaaagaaaagttactgaactaactacttaactgaaagttagttacaacaggtctaacttattatcactagaaagactagctttatgagtcagcaactcctcataaaaggaga

SEQ ID NO: 208578 - DNA, 1332 bp, Cannabis indica
ttagtagttgctatttggtttttgctgcgttagaattatgtaaaatctcttgttctggctacttaaaattgaatacggcaatctaaatgttcctttctttgttacaatttaagtgtgtactttgtttggtatatggtcaaatcggaaaatgtgattagttggtataccaatgtaaaattcaaaggcaatgatttcatctttttctatatctatattgttatattccagtttcctcagtgaatgggattcaatctccaggtttgttcctttttgttttttgtatatatattgtatcaattttactgtcagtagtatatatggtgtttctgttaaatggccaaggtttaaagaggatcattctccaccacaccaccgttatcacgacattgctttggcattgttttgtggttgacgtctttggccggaataattgtttcaacaatcagtgcttagatcatgcctggctggattaattgtttcaccattttatatgtattaatatattatatttttacccatataatatatttatttttctatttgtataaagtttctttaatcactgtttcacaaacaaaaaaattaatttatatactgcatttcaaaaataaaataaaatatttaatttacgtatttcaatctatatttttgtagacatatataatccaaccaaagcttatttttagtgtagacttgttatgtaattgtaataggtgtcgtttggtgcttttggtaagtttttgtgtcaatatcgacagttattgtaccattttatggtttgtttggtgcctatattggctgtcttgtacaaagttttctgtttaatttatgttgccttttgaggctagttgcggtaccctttgaggttgactgggttgtggtttgtttggtgcctacattggctgtctaaattactctttatacaattgggaggatgtttcttctaatatgaaatttcatatatctttcttatagatgccatactaatccattattttttatagtttgtaggtattattttggtgggagcgatcaaacaattcagcactttactctttagtgctcttttcagactttaaagttttattgtctagttttcctagtgcatctttgcatgctcataagatagacaatgagttttattgatgaattccctctccttcgttgccatttattttttgtccactaaagtagttttaaaaaaaaacaacagaaagacacataggtaatgggaaaaaaaaaaacaaactaaattttataaaatgcataactaatacgagattcttttattgaaaagaataagtataatagttcaaatacctgaagataacg

SEQ ID NO: 208579 - DNA, 775 bp, Cannabis indica
gatagtctacataaatccatagctagcaaatcaaatcattaacgagctatgaacaatggataatgaaaacaagttgtgaaataaagacttagttttgctcttaccaccatacttctataagctaactaggatgaaaattgttattttaagaaagaatatgagattgtcaaaaatttattataaataagacaataaactctttattaatatgacttatcttaccaatacaagtatcttgctccttcaaatacagaaggtctcctttacacttgcactcgtacccgccccaagtgttcttacagccacaaccactgcactgacaagcactgcgttccttgcattcgtcaatatctgatgtaaaagaaaacatacaaatatatacgtaaaacctttaaagacacttatatcaagttcacatgaaaccaaaaactttttagtaataattatactgaaaatagtcaccttcgcatttatgaccgtccccgcggaagccctgtgggcagtggcagccagacaactcagagtcctgaaaccaaaagatcctataagtatcttataaaggtcaaggcaggtagacgaagagataatgaaacataagaaacccgtaaaagttggaaaaggaaaaaattcactgaactgaacaagctgagaatgttaatccatgcctagtgtctgaccaacaccctccattgtccactgtgcatcttgcagggccaaaagctgtcatgaaagaagcaacatgaagcacatacaaaattaataatataattatata

SEQ ID NO: 208580 - DNA, 744 bp, Cannabis indica
gttttttttttttttttctttatctttcattaatttattcattttttttttcacttggtctttttgatttgtaattatacgaacaaactacaaggttgatgaaattttgatttaattttttgagaaatggaaagaaaattttgattgataatagtgttgaattaccagtggtaaaaagtgagtatttaattcttatgtcaatcagttaatttcttctttattttcattatattttattggcaatgcttcgcttgtccgcctaatgcatcataaagtaaaataatggtgtacgtaatatttatatattagatacagactatagtgatatgatttggagaaaaaatatttgtgtaccaagttgcttcttatatttctcaaagaaatacccttataacacagcttaagtacatcaccatttgctttataaacctaataataattcaatattaaatttaataaaaactcgttctccccgactaaaaaaaagggggataacatttaaaattaatgattttgtttctttaatatccatgttgatactactcatctactaactatgcttcttatgactagatggttttgttgaacgccattttttgataaatttatgataaaaatgtagtggatttaacttgatagttacaaaaatggggccattatgttaaaacctcctaaatttgtaccgtgctgataattattacccctctttgtccctatggtttaataaatatagactgggtaatc

SEQ ID NO: 208581 - DNA, 424 bp, Cannabis indica
aaattctctctagcaaaaaaaaaaaagaaagagaagaataggcggttagcgacaatatatatacatatatctgtgaatattattattcatatataaaaaatgacaattatgtatatatatcattaagcatatataaaaaaatatgtttatgatgacgaaaaagaatttgatttattcgtatatgtatatatgaagaaattcaaatatatatacataaaagatttaaatatatgtataaaacattctaagtttgttatatatacatatatgacgtatgtatgaagatgaaataaaaaaggacctctactgactcactcgagtagatgtatatatgtgtgtgagtcgattgtgggctcagatttatatacctcttaaactatttctatttcacagagtataaggatttaaattcacagaggtatta

SEQ ID NO: 208582 - DNA, 512 bp, Cannabis indica
aatagcagttttttgtagtgtaagagcaccccacgaaaggaggcctcaatttccaactattcacaatatatctttaactaaaaattacttattacaaagttccaatccaagtaacatcatgttgttgtactttctttggcattacacatgaaattctagtttaaattagtgccttagcttcctgcactataacctactcgggttaaccacaacaacattctaaatttttccattcatgttcgaccaaattatgtacacaagtgctgcaatagcagcagagtatacctccttcttaaatttgctgagttttgatctctctatccacctcaaaataccctgtaaagaagaggttgttgccttccatataagccagtccttaacttctgcaaacaccgttgcaagaaggtgcattcaacaaccaaatgcaatgttgtttctgcaacagagccacacagtacacagttcgcttcatcagtgatcttaaactgctatccaaagcacaaaactatgct

SEQ ID NO: 208583 - DNA, 716 bp, Cannabis indica
gtccaagcgaatttaatccggttgtgtctggggagcacgatggagttggtgaatcggatgagccaactatggatgatgagagcactccggtgcccaccaattacttctctactggttactcacagcatgttgacaaaccgatctctactggccaatccaagagactcacgacctggaaggcgagggctagactggatgatattgctatcccgaagaagaatcttgttctcattgcagatatgggctctgctgtaggagctcctgttgtcattattacccctgtggaggaggtggaaagccctcctccacaggagcaatgagaggcgttgcttggaactgtagagggttggggcagacctctacagttctggaagttaaagccctggttcggtcgtgctcgcctgatttcatttcatttccgaactcaaaagcgatcacgctcttttggtacgttctctgaaaagcttgcacttttattctaatattattgtccctgtggttggtggtgcaggcagtcttattcttgcttggaaggctgggtttacttttgagacagtttcgatctcgaaaaaccatatttctggtattgtgtattcggatcctgaccatcatccttggttattgtcgtgtgtgtatggcccctcgtactttaatgaaaagaaaagtttttggacgatgataatggagctcggtctcaaatttggggggccttggtt

SEQ ID NO: 208584 - DNA, 685 bp, Cannabis indica
ccagttcatattttaaaccaaattcctatgcatttaactggtgcacctctgattcaaaaaagagatcaatactgtacctcaatactttgtctcatgattgtaaaaatggggttttgattaagtggggacgttttggttgttgggaaagattatggacacaagtagtagatgtctcttggtaggagcttacaatttttataatgtatacaaaaattactcacatacagatttgattcattcttcatctttataattcatataaaaaatgactaaaaacaaaaactaattgaacaggtcattattctcaatggttctctgttttctcggcatccaaacaaccttgattcaattcaataatccagaattttaaaacaacaaaaaatgatatttataaataaataaaacagagcattattcattacctgtccactcttccttcacaactgatcgaacccatttcgggaggtccaaaatctgttcttcatcctcaacgcgattaggccaagtactggccagagaagggtattgtgaaggtgctcttcccgtaagaacttcaaaaagcaagacaccaaagttgtacatatcagctttctgagatagcccaataaaaaaatgataaacaaaaatctagaaagataaaacttacaaaaggcaagagctgaagcataccagagtatcaagagct

SEQ ID NO: 208585 - DNA, 943 bp, Cannabis indica
aagtattggaggaaggactggtgtgtttgcatgttttgaaacattaattaatttcattttaaataataataataacaaggataaatagcggtttaagtttttaagcggcataaattcaatgtttatttttagcgacataagtatccaatgtttgtaaaactgtaatttttttttaatttcgtcaatacaaattctgttattttcttgaacaggctacatataaggtctaaatttttgatcattgggtcttttatttctaaatgttcatttaataaattcaaaacggaatttttactgataaaactagaggaaaattacagttttacaaacattgagtacttataccgctaaaaataaatattaaatttatgacgtttacaaacttaaaattttgaatatttatgccgctatttacctaataacaataataataaatgaaatgttgtacctcgtgttttcaaaatggtaactcaagaatatgctcatttatttatttattaatttttattttgataaaaaaaattaattcatgtactagttttaaaaagaaaattttgaatttctaatgcttacattaccttaaattttttttttctaaaattatacttaccaatatttttaatatatgacaattttattgtttttcccaaaatatcctcctcaatttcatcaactcttctctttccatcttttcccttaaacgtaaatcggacccatcgggcccaagacatcagacccgtcgagcccatcgggcccatcggaccgggccataagaccccctatattagcccatcgggcccatcggctcatcgagttgtcatcttcaacctccagccatgccccccatcggacccaaccatcggacgggcatcgagctccatcggactcaattaaaaaaacttcaatttttgacaaatcttttcctaatcttcctaaatctaac

SEQ ID NO: 208586 - DNA, 1016 bp, Cannabis indica
ttttgtttcaacttaattttccttgagtcatgaacagcatagatgatattcttgttttgatttatttaatcatattatgtctttaggatctattgttgattgaagaaccagtattctaaagatcatgcttcttcaggataagcttgtggaatcatcttcaaagccaagtatagtctctgttccatctttcgacatgactggatatccttttatgatgaatcatatgggccagaatggatgcttgcctttcgaaggttagatattgtttttatgtgtttttctatgcatatatatttataccgatggcgtattttactatcataattattctctaattcctatttgcttaatagaatttctaatgattacttatgggtattattaagcaacccatattggggttattattcattgaaaatgcatgtctttcggtatcaaaacacatttttaagtcatggcatgcttagtacaccattgtacaatatacgattgttctgaactacttcttctttgttagtctcaggaatgagtagcacagccaagcatctattggaacaaaatgctcaaactcttagtcaaatcacaactaatctctccgcttacaaggtaaacacaatgcacctaattctccccgatgtattctttttattagttaatatgctcgagatgttgaaaatgaaaaaattaaagcggtgtgtgtttcaaagtggttccttaccattttaatttttgttggtctgtatgtgcatgaaattgatctattggggagtcttgcattcaagtttagtatggttataagcatatttttgtccctataatatttaagtttgactatttggtccatgagttttttgtgctgacctattttgttttacaattttggcacatttggtcccttaattattaaggaaaaatttacataatggaccaaaaatttaaaaaaaaaattacaaaaatatatcaacacggaaatttttttatttttactctttgaatttttttattacaaaaataca

SEQ ID NO: 208587 - DNA, 1296 bp, Cannabis indica
ttaaaagtacattttgggacaaaattaagacaattataaaatgttgcactaaattttaaagctaaaaaatgtatacgtagttccaataattaagaaagaaaaaaaaaagaaagcattcaaatcgttattaaaatatgaaaaatgattggcacatactcaaataacataattttacacataaccatgtgtaatcaggcccggccctgagcataggcgggctaggcctgtgcctagggcccacctatcccaggggccaaaaaaaaaatatttatcttttaaaattatatcatttttttactgattttgaaaaataccatatttttttctaaataagggcctaaactaatttttttttctatggcccactaaaaatcagggccggccttgtgtgtaattaatcaaactgcacaattaaaagtgaagtgattccacttaaaaatataaatgattaatttgttttaaaaaaaatggttaatatttattacactgaataataataagtgtgtacaatttgagtatattaaatgtgggaaccaactctacatatctaaaaacaacatcttttcattgtttttttttatttaaatctctcttatattaaatgtaattatatacaaaaaaaaaagtattgtttctcctatataaaaaaaatattgcaataaaattaaatttattgtgaatatctaagaaaatatatttctaatattttttttaaaaaaaaataaatatctacaattataataacccaaatatctttctattattatttttcttttatattaaatgtgactataagtgttattttttaaaaaaaacactgcgattcaaatttaaactcactacacatatctaaaaaaaactttctattattgtttttaaaaaaaaacaataaatctttctgttatattatccacgagtccatgaaaatctgaaaagaagactacaagcctccaccactattgagtactggaagcttggggagtaaatgatatatgtgttttcagaagggtgacacgtggcatttctaaagtatgattaatccgggatgacctggataaaagcccttccacgaagataggcccagtctagaaggttgatgggcctgagcccatctaaagcctagaaggctcgcttccgaaggggaggctcatctggttcaagaatgcctccaaacttcccaaaatgaagtaaatcaagccctccgaatgaacactaggtgcatccgaagagggtatttcaagaggcgccaccaaaagccctttgtagggtgaagtggctgccctttgacacttggtc

SEQ ID NO: 208588 - DNA, 829 bp, Cannabis indica
atgtagtagaggaaacaaaaggaaaattaaactcatcaaacactgcatttgaaagatgtaaagtcttttatctttggaaaggcttttgcaacccttgtgtgacatgatgttgcctaggaaaacatagggaatagacttggaagaaagaagctagaaaattgaaagattatcttgttgttcctaatcctcaaaggcaagcctaggagtgttagtttgttcatctgctggtgtgagaaatttaggataaatttgttgagtagaataaagaaatttatgaaagcgactaccttttattaaagctaaaacttgacagcgacaagggagaaaattgtgttcatcaaacttgatcgacaaggaatgctaaaaagaactggataaaactttggcaaatgaacttgttggttctggagttaagtagtgttcaatcttgttgccgctccatttgttgaatcgatgggcgataaaagctctgataccatgtgaggtttagtgagagaagagtgtttttgagagagaatgattattcagtcttattcaatgaagaaaatgattataaagtatttatataagatgtagatacaaaacacttatatttattttcttattttttttaatttttaaataggtttataaatattaattaattaattaattgaaaaaataataaattgagatattttttttcaattatcactcatctatatataacatatcattaataacaatttttactattctttctgttcactatatcattcacaactatatttcttcgattgtaatttatttgactcgttaattacttctttatgctttttttttttttttt

SEQ ID NO: 208589 - DNA, 619 bp, Cannabis indica
tatatttattcatttaaatgtgaaatatgtattggaatcaagtactcaaaatcgtcttgcattatcattttctttttcactataaaattacttttattattgccctacaaactacaataatggcgatccttttataccattttgtcaataatattaagtttaattttttcctgtccgaaagtctaatttaacaaggacagttcagccatatccatttgatttatttattctgatcactgacaaaaaaactatatcactaattataagtaagttattacaataatatttatttattttgtttatttttatatggattatactcccaacttattactattacgaagttagactcgattttgacatagttttttttaatatgacgagatcaaagttttcttcaaaagagaaatcaagataaagtttattacaaactatctaaaattagtaaattatttttcaaaggggtgagaaagtgacaacaaagttaataaatggagagtagaaatatacaattcatagttaataactgtttttcttttatccaaaatatagttaataattgttaataagtagatcatgtgtcaaaaacactactcaaaactagttttttttttttttt

SEQ ID NO: 208590 - DNA, 1398 bp, Cannabis indica
taacattggtggaaatagccatattagatgtgccatttgtgatagatgacacaggaatggtgagtggagctggagataattgcggagtactaccagtatgtgaaggtgaaatttggtgtcgaggtatggaagcagagttggtatttcctggaaaaactgggacagcagaagaagattctccttggaagaggattttgggttgtggttgagatatcgatcctaagtttgggatggtagaaaccaatgatttacgagcaagtcgagtcaaaagtggccaagcgttccccttagagaaatcagtgcggtatttgtcatagccagtagttggaagtttcgcacctttcatccaaggaccatactcaagatcatcatcattaccattgtccattctctccatgaaggctacacatttttcgaaagggtggccaagtcgcccacactcaaaacagaactccggtaatcgttcatatcgaaagtcaatccaaaagtcatctttaatccttggcaaactaatcatacgaccccgaagaagcggtttatcaataggaagtcttacccgaattcttaagaaagggccccatccctcatcaagagattcttcatgcacatcaataaactcaccaataatgtttcccaaagcagtagcaagcgttttggatttgctcaagaacggcaaacgatagacttacccaaaacggagtgcttgacagatttcttactgtgacattctgcagaatagatggtgagcaaaagaccacaaggtggttttggaaatgccatggctctttgtttaggacccgaaacttatcccctgcacatccgaaagtaactttgaataaaccatctccatatacagatatgacagcaggatacctacccttccaatgacctcccatttgatcaaagaaggaaggctcgtggacatattctcagtgagaactcgtgcaataaggatgtgtttagggtcgttagttgaggcagaagcaacatcagcaggcagaagtgcaactgaactttcctctttagtgagatttaatgttgaattcatggaatgcaagagaggatccatcacgaaaaacgcagaaaaaccaggaccagaagcagcagttaaaggaaaaccatagaaaaactgatatatagcagaaaaaaaaagggggagggaaaaagtttgaaaaaacagttaaaaaatcaaaaaagtagttaaaatgctataactgcaacagacccaaaccgggcacatttttctatgcaactaccatttgttcatcaatgatataatttttttcgatcataacatatttttctcaccaagcaaagcaaagagtgcaccaatcaaacgaattatatgaaaagtaaacaagattattgcttccacaaggtagttatattgagattttt

SEQ ID NO: 208591 - DNA, 1173 bp, Cannabis indica
gaatcttctatagatgaagaagaatcttgggaaagagtgtgagagttaaaacactttgagagaactcaacagagaatctttctcgactatattgtacttgtttttgttcaatcaataaagaggattttgtggtattccagagctggagtagagccatagatcacatcaatctatcagacttgaaccagtatatatcttggtattgattttattgttttactactttattcatttcttgtttttcatactatgttcatctctatttttctccgattattatttgtggtttgttaacttgtcattgctaatcgtttgattatttaaagtttagttattttgattctacacgtttacagaatgtgcaggatcaaaataatgagtaatatcggtattgtaatataatcttgtcatcactatctgtgtattcggatagccagtcatctatccatctttgtaagaacccaatttattatgaaaatacatagacataagattctactggataagagagaagatagaagaagggttggttgatttagacaatgtcagaatagaagataatcctgctgatgttgggactaaggtcttaactgtaaacaagttcaaacattgcttgaacttgatcaatctcaaaagttagtatattgggattcctggaacaccaaccatgatggttgcattttttcttcatcaccgtcaatattttaatttgaattatctatgtagaatttatcgtatagttcctccaaatgaaaaggtctccaaaagtcttttctgaaaaattgttcactcacggaagcaagtcttggaagactttctagtccttctaggaagagtctttaggaagttagtcctcctctgaaaagtgagtttcagatggctagtctttcctcctggaaggtatagttcctaatagtcgactccagctggctctatcctattcggaagttctttcagcgatttccttcggtccgtgatctcggaagctcatatatattcctggatgcactcactcttatgttgacatggagatctcgctcaaaagagttggttaagttagttattgcttaactaacttaataacttaagttcttgcagtcaccgactttaggatcttgatccttagcctataaacactaaaacaaatgttacctttaccagcatagtttgcta

SEQ ID NO: 208592 - DNA, 1521 bp, Cannabis indica
atcaattatttgccaattccatttataaataaacagtcattacaataactaacatgaaacaagtttctaagacgaatagatagaaaactaaaaaaatgtaaataatcttatcataacacatccaagttatgttattattatgttttataatttgataaaaattgagtttaatgtctatttgtactattttgaaaaatatgaagtctaaattgttatttaataaaataaatagttcaattagtaacttgtaaaatatatagtctaaaatagtatttagccttttgtatcataatatatattaaaattttaaattattatttttttacattaattgtatgtttaatattttttagaaaacatataaatatgtgtaaatggatttctttttaaatgtgaatcaacattacaaatatagattttagattttttaatccaatttacataagttccgcactttacataaggaattagattagatcattagatagattaggtattggaacaccttacatttttagtttttaatttttttttctctataaaatttacaatattacattaaaaattatatatattttttaatgatagtactcttttttaaaaaaataaaaaataaaaaattattatgcccactagaatatgtctctggctccgccacctataacaaccagttccaacttgaaaattaagcacattgatgagactctcaaaatacttaaaagcatttgaatatgtcctcttgtttaattttgtatcatcttctcagctgtaaatcgttgtgccattaatgtagacaagtatatcagtatgtatgatttaatcttatctcatctaaaactagagttgtcaatgtttgaaccttctttcatgtgtgaataaaggcaatcattttctgttcaatgtgtagtcaagcagatattttggtgcaatccatcaggaacaaaaaataaaagttgttgctaatgatttatttgtcttttttctttttaatcttgcaaggtaatgccttagtcaacagtttggccaatcacatagagttttgacttttgagggtggacaccaaatctaccgtggcagccggcagaactgtgtccaaatgagctgcatgtatagcttgctaatcctaagagtacaacgtatgtgttgtgttttgttcccttttagtggtcctatttgcctttgttaactactattgcagaccattggactggccaatctgcaagtagctgaattctgaattctgatcattttcatctatttctactatctactctggttcccaagtaaaccgaagtctttattattttatttgaggggttggggattttaaaagtcaatattatttagattttacattaatttgttggatacactactatatagtacataataagtttggctaaatcactgcagagcctttttgactgcattttatgtatatggtaactttatgtcaatcttatcagttaaaatagtctctactacggaatttgctaagtgcttcagatacccaggtctttt

SEQ ID NO: 208593 - DNA, 603 bp, Cannabis indica
ggctaaaacaaccacgaaaaataacaagcatgaaaaaagtgttggcaattgcttattctctcatcttatttacacaaattttattttacgcgactatcttaaaaataactaacaaacagccaataatattctatattttataaaataaataaattaataaataaatattctattaatataaatatgaagaaaatgaaaaataaattaaaattgggagaggaacagagaattggtctcagaaaattcaaagacggagaacagcctccttctctctctccttagactccaaaattagggtttggtttttccaatttgtcttcttttaaggggtttcctttctcctttcctctctatctacaccttcattactataaatttgtacatactgtagctaagtttctcttcacttcactttcctttattactttaattaaattcttttccctttctggtagggagtttgtatcatatttagggctctttagaaactcagaaccaaaattcgtaggtgtctgacaaacactcttgagtctttgttttaactctagaattgctagtattttttttttttttttttattttttttaatttcataagtaaaaa

SEQ ID NO: 208594 - DNA, 698 bp, Cannabis indica
aaaacccacttgttgcctattaaattctgatctggtttgggaggaaccagcacccaggtgtgattatccttaagagctttgttttcactttgcatcgctttgttccaaccgggatgagagagagcttcctctacactgccaggttctttagtttctgtgttgcagtgagtgtgtcccatgaatacccgaggtttgaatattccagcttttgctcgagtaatcatgggatggccagctgtttgaggatgatctgtggtctgaactggagctggtgagatgtttgttgagtgttctatttcagcaggttgtataataaaatcatcctgaaaagtagcagcagggctaatggctattcccctctcattttctgaaattggagatccatgtgatgcagcaggtgtagagtgcaaagagtcaaaaaagtgagtatttacctgagagtgtgttggtgtggagagtgtttcttcaggtatgctcaaggatgttggaggagttgctggtttggggacagaaaaaccagcagcaggttgataggatggcaaaacagaccaagttgaactctgaattatgactggtttttcagcttggtaattatttagaaaaccaagtttgaatggaaactctaactcattaaacactacatttcttgaaatatatattttacctgtgggagtcaaacatttgtaacctttgtgaac

SEQ ID NO: 208595 - DNA, 1313 bp, Cannabis indica
attttgttttaaaaaatattttacatttacatttatattttcattattaataaacaacatcaatcaaaagtttgttctaaactacaaatttttttaccagtgatgaaaatattataaattatttttatcaaatgtatataaatttatacaagaaagaaaaaaatattaaaaatatatagaaaataaaaattttatatgacatatatatgtgattataatgaactacattataacattattattattattattataatagaatctttattaactcgcagtacattaagatttataatttaccaaaaacttggctcaatttttttctacagttctactacagttgctttttctcacagcacaactataattgttatttcccacagtacagttgtgccaaaatgaccctaaatatatatttttacatagttatagtattattaataattttttattttattttgttaaaaaaagaagaaatgtgtccaagttgtgttaagaggattatatcgtgtttgacctgtttttattttgtgtcatcctatagacccattttcgacccgcgctaatattcccgatcctaacccataaaattcgtgtcgtgtttttgtgccttatcaaaacccattttaccacccctagttggatcctcttatggtgatatatcactaaccacgtaggcaaaatcataaattaatagggtgtgggaagaacaccttaaaaatacaaacgaaacagtaatttgaatattttcccaccaaaatttaaacttgaaaggttaattgcaagtaaattgagaattcaaaaactcaattatcctttgtcaaagaaaaaaaagcatgccttttaccagaatccaaacaatttttctttttaaacatacattctggtccaaataatctattagtttagaatcaaaccaagattaagaaaaataagaaaaagaaacatacttaatatcacaactttcactctgggtcgagggaagcgaaggactagttagtagtgatgtgtgcctaatcatttacaatgggctcattatcaaaggggtcaagaatcaataacgatgtacaatagtgttaaaactcgctacatctcaaagatgaggtggtgtgtgttcattcatggggggtttttatgtctggttcagcagcttaaatttctctatttgtgttgtcacactctttgcaagattccgaggctgatcgacgttgaaacctcttaaaacagtgagatgataggccaacaactgcagaaaagaagaacaaaatttattgttttaaggcaatggaatattttcaacaattctcgtgaag

SEQ ID NO: 208596 - DNA, 1190 bp, Cannabis indica
agactaacaatgactccttaacagtcgtcagcacagttgatgaactctgcctaaacagctcatataaacacatcacaaatcatggtactcaagcttgcaattatttcacaagaaagtagcgaaagcaactttgaagtaaaaaattatggcttttaggttgaaaattatttccactcttaaattaagtcattactcatttctcatatattaattgttatgacttatcaggtttctcttttttgacactacgatcagaaccattgtatttttgttaggctattatatagaaatgagtaatttagtaaggcacttcgataatagtgaacgaagcaaaatcattgaaaggtgagatagagtttaaattaaattcgtataaacattttacaaaaagataggaaactatattacaaaaattcagagggttctcaattattgggaccccaacagctcaagtacatgacagttttaagagattcctcagattgcttcaatttctcgtctttggagatgttgttagaatagtgagctgatattttctttgcctgagaataagatctgagattgctttttgtgtgttgctgaattgacttcaaaacagaattccatctacaaacaccttggtccttcaaagcttccactactccaatactagttgccactgcccaacccttgcttattgaactcatatttcctctttaataatattgactgataaaattgtaattagaaaagttgtgttgtgcttggttctattgaactcatatttcctctttaagaaagtttatataattatatagagtagtatgtgaggacaacttcacctccagttttggagaaatctgtggttttgggtgcaaaaaccatttgcttagctcattactacttccaaacgtgtccatatattattgacaatgactgtctttcataataagttaaaatactaccattgcgtcattgtgcgtgtacctacaaaacagggggaccacgagattattcaatgacttgatcacttaaacctctggtttgtttatttacctatttaaattaagccaaattgtctttaagaaaataataggagaagttataaacaaatagcattttgtttgttcctccattcgtttagatatagttaaatttttgctgtgaataaacacgtgattatactttaatttggtagataagatgaataa

SEQ ID NO: 208597 - DNA, 1290 bp, Cannabis indica
ataaactttatttttctattagaatagttcttgtcccgtgctcgttttattaggagatttcacgcctcatcttctatgaagaataagtggtgatggatattaaaattctaatcaaaatgaggacgaaaggagtactctctgccaattcttgaccttgtgtgcatccgttgttgtatggtaccactttaaaaggctaagttgttaccttcttctttggtaggagaatttgtggttactaaaatctattttttattaaaaaacaaagctaataatcctaaaaatatcaagattgaggaagaatgtatgggggaaggtggactcaataacttgaaaagaaatatgaggcacgaaagaatccaaaatgcattgaaagtggaatccaaaataaaatagggaaaatatgtattgccaataaattaatgtagaaatgaaaaaattaaatgttgtacagcaggggcagttgagaagatccaattgattagtcaatatacggccacgtgtttcctttcttttgtacagtggtaatgcttggaatcataatcgttgatccgtactacatcttaggggtgtaacgtgttcatttaaggccccaccctgtacaaaccgctccctccacagtatactgcacaaaaaatagagattaaaatttttgccatacagttccagtttgtatttttaccaaattttgagtaatgtaatttacaattttaaatttaatcatcgcagtttaaactgtaccttattatatattacaactataataacttttctttttcatacatgaacaattcatatacatacaaagcggaaaccattaaattaatgaacatctatataaattaatctagtttttttttatattttgttaacaaattattatgatatatataaactattattattattatattatatgaacattcatataatataatatatatatatcattattattattgatattattattaatatataatatatgtatgtaatatatattattaatatgaatgagatttaaataattacatcaaatatataaccataataattatatttatttttaaccatttgatttgaatggttttcattaatttacaaattaaagaaaaaataacttgtaatctaatagtaattctttaataaagcttaaattaaaattaattttattttaaaattaaattaattataattatttattattattattattattattattattattattattttgtaatttgttgctaaacaaggttcttttaacaattaattttcttgcactaaaat

SEQ ID NO: 208598 - DNA, 556 bp, Cannabis indica
gaaaaataaataaataaataagcccatttctctcacttttctttttttgttattattttttctttttgatacactcttccctcttttctctgtctttctttggttggagtctctttttctcttttaatgcattccccagaagataaaaaaaaaacaaaagggggtggtgttggctctgaaattactaggatgaaagccaagaaaaagtttgttgccaattaaaaacccttcctctgttctatttttaaatgtataattatttatatatattataactttaagagagaaaccaggcagcaagtcctatgcattttgactctcaaccccacaaccacattgacttacctcttcttcaaactccaaggcccttaataccagacaaactccaaaagttccttcttaatataataatccttcggctactctactacttttattactatttcccaaatatcatcttccatcttataaccaaaacccactaaatcttttattacatatatataggagagagagagagagagagagagagagagagagagagagagagagaggt

SEQ ID NO: 208599 - DNA, 502 bp, Cannabis indica
atactactttatatatagcattaagttaagttaaaatgtattgtgagagtaaagaaataccaacttaaaagtaataatttattagtgcttcatgaccagtaagacaacttatatttgtagctacaaaaagtaaacaaaagcaaagaaataagaccctttttccttttaagaaaagagtatgaaaattggtttagcaagcataccaagttagatgattggtactttatttagtggtgtcccctgcaaaagtggaatgaagataaggttcatcttcacctccactatttacagaaagacaaagccaaaaagataaaatcatcttaggagtttatgtactaaaaaaataagttgggtttcaaaatttgtacaaatataatgattggctttctttaaatattgtaagtacactacgtataaaaagaatctatagtgtttaaggatctttaggtaagtaatattcatctaaatttttacacttagtcaagcacattctatattttca

SEQ ID NO: 208600 - DNA, 851 bp, Cannabis indica
cttgttttcattgattaaaaatgcaaaagcaaaatgatgatgaatgcaagattggattgttagtttaaacctttagtaaagagggaatcttgtgcatatgaaatttgtgccattactacaaagacggctgattgtaaatgacaattagtttatagtataatactgtaataaagaaatacactcttatagtgccattatagaatataattaattgatatatctgcatacattatgaaaccatgtttacaagataagctacaagaaacttgtttaagattacaatggagctgaatttggatgtagagaaaggaaacaatgctatgtacatagaaatatttggccttgtacaaaatttataaaaatcttcccctagaaatagacacatgaaagggggggaaatgaaatttcatacacataatttcaacaaccaaacacaggcctcatcaggagaattggatcaaggtcatatccttaatagttagttggtcatgtgactcatgtccaacaatcatggagacttgccaaatccaacttctttctaagtcaatcaaaggtttagatcaacccactaaacctttatgacaagcaatcatagcagcaataatttatgacatttcaactaaagataaaccgataaattattaaactattattgcatgtcctggctcactaattattaatactttacaacagatagttgaaaataatggagaaaccgtaccaattgaattttatcataataatgatgatgatgatgatgatgatgatgattacaacaatgatgaaacctcaaacgtccaaatgtacagcagactcgggcttaatccggtttagccgaacagttccaagaa

SEQ ID NO: 208601 - DNA, 916 bp, Cannabis indica
atctggacacgagttgcaggacatgtactaggactgaagaacacagtagacttagaaaagttcaccttttgtccaaatgcagtttcaaattgattgagcaagtttgagacactgtcagcaacactagtagttgattgacaaaacaaatagctatcgtctgcaaagaacatatgagtgataggtggtgcctcatgagtaaggtaagtaaggtacgtgaataaaaaaataaatttaaaagagaaaaataaataaaatattagaaaaacagaaaaaaaaaattaaatagagtggtgtagaaaaaattagagtgctattattatttaattaaacatattttaaataaatttggatggtatgttccttggaccttagtttaaaatattttagtatatttttgtttacgaatttttttgtacagctttacaatttattaataaaattgggtatattttaataaaatttaatatgatagtatttttgattaaaagatgaaaaaaaaaaattcctccaccataaattactttatttattttgcatactctgacattatggcagttatacctgggccacgtgcttctactaagttacttagaatgggttgcccccaatttgatgggctccattatgacaaatttcatgacaggaaggacattcgggcccaaaatttcggcctatattttcttgtccctaattttcgttcaaaggtacacttacaaacactaataaatcgtcgatacaccaaaagaaattattttttttcacaatatttttttttcaaaatgaatcatgcaatctatctatctatttatcttctaataaggagaaacataaagagtgacatgacaacttaattatttttttttttttgaataacccgcccaaatcaaattgaaaaaactagggttgtacatcggtc
